United States Patent Application Publication US 2011/0183924 A1 - sequence listing, part 254

SEQ ID NO: 726846 - DNA, 4841 bp, Homo sapiens
  misc_feature (63)..(63): n is a, c, g, or t
  misc_feature (66)..(66): n is a, c, g, or t
  misc_feature (72)..(72): n is a, c, g, or t
  misc_feature (74)..(75): n is a, c, g, or t
  misc_feature (4505)..(4505): n is a, c, g, or t
agcgggtttcttaccgtaggtttctccctgttgaggcgaacgagctaaatgacctctccgggnggnggcggngnnctggccggggcgggcggcgcgggggcggcatgagggcccgcggcccggggggctgaggcgcccgccgcctgccgcgggggccgctcgcgtcctccatggaggccggagaggaaccgctgctgctggccgaactcaagcccgggcgcccccaccagtttgattggaagtccagctgtgaaacctggagcgtcgccttctccccagatggctcctggtttgcttggtctcaaggacactgcatcgtcaaactgatcccctggccgttggaggagcagttcatccctaaagggtttgaagccaaaagccgaagtagcaaaaatgagacgaaagggcggggcagcccaaaagagaagacgctggactgtggtcagattgtctgggggctggccttcagcccgtggccttccccacccagcaggaagctctgggcacgccaccacccccaagtgcccgatgtctcttgcctggttcttgctacgggactcaacgatgggcagatcaagatctgggaggtgcagacagggctcctgcttttgaatctttccggccaccaagatgtcgtgagagatctgagcttcacacccagtggcagtttgattttggtctccgcgtcacgggataagactcttcgcatctgggacctgaataaacacggtaaacagattcaagtgttatcgggccacctgcagtgggtttactgctgttccatctccccagactgcagcatgctgtgctctgcagctggagagaagtcggtctttctatggagcatgaggtcctacacgttaattcggaagctagagggccatcaaagcagtgttgtctcttgtgacttctcccccgactctgccctgcttgtcacggcttcttacgataccaatgtgattatgtgggacccctacaccggcgaaaggctgaggtcactccaccacacccaggttgaccccgccatggatgacagtgacgtccacattagctcactgagatctgtgtgcttctctccagaaggcttgtaccttgccacggtggcagatgacagactcctcaggatctgggccctggaactgaaaactcccattgcatttgctcctatgaccaatgggctttgctgcacattttttccacatggtggagtcattgccacagggacaagagatggccacgtccagttctggacagctcctagggtcctgtcctcactgaagcacttatgccggaaagcccttcgaagtttcctaacaacttaccaagtcctagcactgccaatccccaagaaaatgaaagagttcctcacatacaggactttttaagcaacaccacatcttgtgcttctttgtagcagggtaaatcgtcctgtcaaagggagttgctggaataatgggccaaacatctggtcttgcattgaaatagcatttctttgggattgtgaatagaatgtagcaaaaccagattccagtgtactagtcatggatctttctctccctggcatgtgaaagtcagtcttagaggaagagattccacttgcacggcaacagagccttacgttaaattttcagtccagttatgaacagcaagtgttgaactctttctgcttgttttgattcaaagtgcagttactgatgttgttttgattatgcaactaagtaggcctccagagcctctctagtggcagagcagctcacactccctccgctgggaacgatggcttctgcctagtacctatccttgtgtttctgatgcagtggtagcattggttcaagttctctcctgctgtggtcagagttgcttcgatgttggccaagtgcttttcttcttgggctcccttctgacctgcaggacagttttcctggagccatttggtatgaggtattaatttagcttaactaaattacaggggactcagaggccgtgctcctgaccgatccagacactattactggctttttttttttttttttaacaatggtgtgcatgtgcaggaaatgacaaatttgtatgtcagattatacaaggatgtattcttaaaccgcatgactattcagatggctactgagttatcagtggccatttattagcatcatatttatttgtattttctcaacagatgttaaggtacaactgtgtttttctcgattatctaaaaaccatagtacttaaattgaacagttgcaaagatgtcttaattgtgtaaagaattggtgtagtcatgactttagctgatactcttatgtacgagatctgtctctgctgtttaacttcattggattaatcagctggtttcaactctactgcgaaacaaaaatagctccttaaaagtactgttctccttcagtggcatgtagttatctaatcaagacacctcattcaaacaaaacctgccttaggaaaatttaatatattttaaattattttaaaagaaatacaacatcttattctttagctttcttaatcggtgctttatggaggccagtgtaacgttacatgactcgttgagaaagttgaggaatttcctctaccacctttgttgcttgaagaaaaacatgtcttttcaaaatgagaggctttcattgaagaaaagaaaaaaacaacagttaaaagcttttggctctctgtttcatttttttccattaagaaaaaaaaaagtccccttttaaaacaagcagggctgggtgtgacggcacatgcctgtaatcccagcactttgggaggctgaggtgggaggactgcttgagcccaggagttcaagatcagcctgggcaacagagtgagataagacccaatctttatttaaaaaataaataaataaatagccaaaaaaacttagtgtggtgctggtgtgcatggtagccccagctactcagggggctgaggatgtggtggcatttacctgtggttctgtggttccggctactcaggaggctgaggtgggagaactgctcgagcctgggacatggaggctgtagcgagccacgatcgtgtcacggtattccagcctgggtgactgacagagcatgatcttgcctcaaaaaataaacacataaaacaagtagtacagcagaagagctgggaatggattggccaacgtttacatttcatggttatcttgaagttccaggtacagcagatgctgagcctctgggtggtttgaggcctggttggccatcagatatttagcttcatactttgccgctgtccttaagggggtgagtcctccatgaacaaagggaatagtgactttttccatttgacagtttaagaatttgacattttttaaagaacagcatctaaagaaagtttattctgtgatattagagacagaaggttttcatataaatgcaagtttgacaaagtcagcatctttctagctgtctaaggaagagtcacttgtaacacagccagccaggaggctgctttgttttttattataaagaacactaacacaaatgcagcatgattgctgtaaaataaatgtgaaatttgtacaaaagtcccagtccttccgcagttctaggtttacagtcaggctcaaccttacttgccccgctcctgcatgaaaacaagtgcgttttatacagcctctgccacccagtggcatagtttaaggctctatattatatttaaaattaaggtttttttcctatcatacacatcaatttggaacctgctggtgactcttctaccacagagggtaaataaaaagaccagtttttaaagtaagaggattcagctcatcttataaaagtataatagtttcggccagacgtccattaacatctgtttaaattagatacagacacaatgccaaatattagaatcataaatgtaattttggagataatgtttaccttgagtaggaagacacttggaccatattaaattttctgtaggctgtggtgaaatcttgattcaacatccagtccaggatgttggcaatgtctgacttgagcgggtgcccggtgcaggtgtagacagtctcctctgtcaccttcccaaaggccatattggtgctctgcaaaatgttcagagccctacgcatgtctccactggaaagagtgactagtgctttcattccatcttcacttatatcaactttctcttcttccacgacatgttccaggcggggaaccatgagttcaggagtcaggggaccgaaccgaaacctcgtgcagcgggactgcaaggcagggatgatctttgacagatagttacagatgaggcagaatctggtattttctgtgaatttctcaattactcttctcaaggcattctgggcgtcctgagtcatggcgtctgcttcatccaagatcactagcttaaagcctttcttaaatattgtccttgtgctagcaaagctcaggatcggtcctcgaatgatgtctattcctcggtcatctgaagcattcagctccaagaccatggagccaaattcnttgtctttatatagctgtttcgcacaggctaggataggtagagtgtcttgccgtgtgccctgggggaccgtagagaagcaagtgtggcagtcggtccttcagttgactaaagcttctgaatggtacctcagaagtgctcctagactgagcaaatagaagatcattgcagggtcatgtggccggtatcttttcaacccagggcaggtatcctgatctgtggtcggccgcgggcatgctcctgcatgcgttgagctgctgaggtctgccatggcggggagacgaaggtgaccagatccgctgagatcgtcgcgtcacaccaagcgcctgcacagtgac

SEQ ID NO: 726847 - DNA, 185 bp, Homo sapiens
  misc_feature (141)..(141): n is a, c, g, or t
cttgtgtaatatcaacaagcttaagatttgtctttgctagatagtgaactatactagtgttcgtcaattgacagacgtatatcgtgctcaggttattacgcatacgtagtgattggcaaacttctttatcttctattcgtnccttgattccaaagagaggtagaagaatctataagggtgagaat

SEQ ID NO: 726848 - DNA, 723 bp, Homo sapiens
gggcttttttcggtgttagattcaacactgcgctaaagcggggatgttccattgaataaaagagcagtgtggttttctgaaaaaaaaaaaaaaaaaaaaaaaaaaaaaaaaaaaaaacaaataaacaaataaaaaaaacaaaaaaaaaaaaaaaaatacacacacacaataaaaaaaaaataatacaacaaaaaacaaaaacatatcatcacacattatattcttagtccaaaaattcacaaaaaatcaagatactacatacaccatcttcctttcatcccgtccacacacactatcatttactctaaacaatacactaaaatctgacttgaatactactatatgcatcctagcaccatcgaagcaatgtgcagaacctactaataagatttgcactggctacatatcacaactacaccactacactacaaaacaaacacgcagacctgctttcttccagctaactcactccactaagcttattaatattaaataaacaccaacatctcaaccctctgctcctatgagatgaatcctatttctaataaaaagaagaaaaaaaaagaaacaataaaacaccttagtccatatcttctctcatgtgtcattaccccttcaagcccttccccttattatatcctcttctcccctcactcacttgagctctactttcttactcttaactctcaaactaaacacatccccacccacccatgtctgtgg

SEQ ID NO: 726849 - DNA, 5361 bp, Homo sapiens
  misc_feature (5025)..(5025): n is a, c, g, or t
agcgggtctccgcccgcgcccaccgccatgtgacgggaagcagctgattgcctctccgggcggcggcggcggctggccggggcgggcggcgcgggggccgctcgcgtcctccatggaggccggagaggaaccgctgctgctggccgaactcaagcccgggcgcccccaccagtttgattggaagtccagctgtgaaacctggagcgtcgccttctccccagatggctcctggtttgcttggtctcaaggacactgcatcgtcaaactgatcccctggccgttggaggagcagttcatccctaaagggtttgaagccaaaagccgaagtagcaaaaatgagacgaaagggcggggcagcccaaaagagaagacgctggactgtggtcagattgtctgggggctggccttcagcccgtggccttccccacccagcaggaagctctgggcacgccaccacccccaagtgcccgatgtctcttgcctggttcttgctacgggactcaacgatgggcagatcaagatctgggaggtgcagacagggctcctgcttttgaatctttccggccaccaagatgtcgtgagagatctgagcttcacacccagtggcagtttgattttggtctccgcgtcacgggataagactcttcgcatctgggacctgaataaacacggtaaacagattcaagtgttatcgggccacctgcagtgggtttactgctgttccatctccccagactgcagcatgctgtgctctgcagctggagagaagtcggtctttctatggagcatgaggtcctacacgttaattcggaagctagagggccatcaaagcagtgttgtctcttgtgacttctcccccgactctgccctgcttgtcacggcttcttacgataccaatgtgattatgtgggacccctacaccggcgaaaggctgaggtcactccaccacacccaggttgaccccgccatggatgacagtgacgtccacattagctcactgagatctgtgtgcttctctccagaaggcttgtaccttgccacggtggcagatgacagactcctcaggatctgggccctggaactgaaaactcccattgcatttgctcctatgaccaatgggctttgctgcacattttttccacatggtggagtcattgccacagggacaagagatggccacgtccagttctggacagctcctagggtcctgtcctcactgaagcacttatgccggaaagcccttcgaagtttcctaacaacttaccaagtcctagcactgccaatccccaagaaaatgaaagagttcctcacatacaggactttttaagcaacaccacatcttgtgcttctttgtagcagggtaaatcgtcctgtcaaagggagttgctggaataatgggccaaacatctggtcttgcattgaaatagcatttctttgggattgtgaatagaatgtagcaaaaccagattccagtgtactagtcatggatctttctctccctggcatgtgaaagtcagtcttagaggaagagattccacttgcacggcaacagagccttacgttaaattttcagtccagttatgaacagcaagtgttgaactctttctgcttgttttgattcaaagtgcagttactgatgttgttttgattatgcaactaagtaggcctccagagcctctctagtggcagagcagctcacactccctccgctgggaacgatggcttctgcctagtacctatccttgtgtttctgatgcagtggtagcattggttcaagttctctcctgctgtggtcagagttgcttcgatgttggccaagtgcttttcttcttgggctcccttctgacctgcaggacagttttcctggagccatttggtatgaggtattaatttagcttaactaaattacaggggactcagaggccgtgctcctgaccgatccagacactattactggctttttttttttttttttaacaatggtgtgcatgtgcaggaaatgacaaatttgtatgtcagattatacaaggatgtattcttaaaccgcatgactattcagatggctactgagttatcagtggccatttattagcatcatatttatttgtattttctcaacagatgttaaggtacaactgtgtttttctcgattatctaaaaaccatagtacttaaattgaacagttgcaaagatgtcttaattgtgtaaagaattggtgtagtcatgactttagctgatactcttatgtacgagatctgtctctgctgtttaacttcattggattaatcagctggtttcaactctactgcgaaacaaaaatagctccttaaaagtactgttctccttcagtggcatgtagttatctaatcaagacacctcattcaaacaaaacctgccttaggaaaatttaatatattttaaattattttaaaagaaatacaacatcttattctttagctttcttaatcggtgctttatggaggccagtgtaacgttacatgactcgttgagaaagttgaggaatttcctctaccacctttgttgcttgaagaaaaacatgtcttttcaaaatgagaggctttcattgaagaaaagaaaaaaacaacagttaaaagcttttggctctctgtttcatttttttccattaagaaaaaaaaaagtccccttttaaaacaagcagggctgggtgtgacggcacatgcctgtaatcccagcactttgggaggctgaggtgggaggactgcttgagcccaggagttcaagatcagcctgggcaacagagtgagataagacccaatctttatttaaaaaataaataaataaatagccaaaaaaacttagtgtggtgctggtgtgcatggtagccccagctactcagggggctgaggatgtggtggcatttacctgtggttctgtggttccggctactcaggaggctgaggtgggagaactgctcgagcctgggacatggaggctgtagcgagccacgatcgtgtcacggtattccagcctgggtgactgacagagcatgatcttgcctcaaaaaataaacacataaaacaagtagtacagcagaagagctgggaatggattggccaacgtttacatttcatggttatcttgaagttccaggtacagcagatgctgagcctctgggtggtttgaggcctggttggccatcagatatttagcttcatactttgccgctgtccttaagggggtgagtcctccatgaacaaagggaatagtgactttttccatttgacagtttaagaatttgacattttttaaagaacagcatctaaagaaagtttattctgtgatattagagacagaaggttttcatataaatgcaagtttgacaaagtcagcatctttctagctgtctaaggaagagtcacttgtaacacagccagccaggaggctgctttgttttttattataaagaacactaacacaaatgcagcatgattgctgtaaaataaatgtgaaatttgtacaaaagtcccagtccttccgcagttctaggtttacagtcaggctcaaccttacttgccccgctcctgcatgaaaacaagtgcgttttatacagcctctgccacccagtggcatagtttaaggctctatattatatttaaaattaaggtttttttcctatcatacacatcaatttggaacctgctggtgactcttctaccacagagggtaaataaaaagaccagtttttaaagtaagaggattcagctcatcttataaaagtataatagtttcggccagacgtccattaacatctgtttaaattagatacagacacaatgccaaatattagaatcataaatgtaattttggagataatgtttaccttgagtaggaagacacttggaccatattaaatttgaaagtcttctgttccagaccaaaatggggtaggctaattccctgtcatccaagcaactaaaaggtaaaaaccttataactttaaaataaaaaaggttatttttttcccctataaaagacaggcagtatgagttaatacattaaaattattttgtacatccctgctccaaacaaccacaaaaatggtactttttaaatgcctgcccatcctctcctggaagggggtttttccaagattcggggtgactgattcatcccacagccccaggcagcagtttatcctggaactgtcctctgttctcccatcactgctgagccctgagaattgtgaatggccctcagagcatctaggcctctgcaacaatcaggtctctggtgacttgaaatgcagcaatgagggagctcagctggatcttctcgttggtgccaacagaaagcctgtactcaatgtctgccattttggtcaataaatgtattcgaactgaagatggaaagtcaactctatgcacaaacaagtgtatctctgtcaggatatcatgcagtgccaaccccttcagagttttcaactctgtaatatttctgtaggctgtggtgaaatcttgattcaacatccagtccaggatgttggcaatgtctgacttgagcgggtgcccggtgcaggtgtagacagtctcctctgtcaccttcccaaaggccatattggtgctctgcaaaatgttcagagccctacgcatgtctccactggaaagagtgactagtgctttcattccatcttcacttatatcaactttctcttcttccacgacatgttccaggcggggaaccatgagttcaggagtcaggggaccgaaccgaaacctcgtgcagcgggactgcaaggcagggatgatctttgacagatagttacagatgaggcagaatctggtattttctgtgaatttctcaattactcttctcaaggcattctgggcgtcctgagtcatggcgtctgcttcatccaagatcactagcttaaagcctttcttaaatattgtccttgtgctagcaaagctcaggatcggtcctcgaatgatgtctattcctcggtcatctgaagcattcagctccaagaccatggagccaaattcnttgtctttatatagctgtttcgcacaggctaggataggtagagtgtcttgccgtgtgccctgggggaccgtagagaagcaagtgtggcagtcggtccttcagttgactaaagcttctgaatggtacctcagaagtgctcctagactgagcaaatagaagatcattgcagggtcatgtggccggtatcttttcaacccagggcaggtatcctgatctgtggtcggccgcgggcatgctcctgcatgcgttgagctgctgaggtctgccatggcggggagacgaaggtgaccagatccgctgagatcgtcgcgtcacaccaagcgcctgcacagtgac

SEQ ID NO: 726850 - DNA, 2960 bp, Homo sapiens
  misc_feature (63)..(63): n is a, c, g, or t
  misc_feature (66)..(66): n is a, c, g, or t
  misc_feature (72)..(72): n is a, c, g, or t
  misc_feature (74)..(75): n is a, c, g, or t
agcgggtttcttaccgtaggtttctccctgttgaggcgaacgagctaaatgacctctccgggnggnggcggngnnctggccggggcgggcggcgcgggggcggcatgagggcccgcggcccggggggctgaggcgcccgccgcctgccgcgggggccgctcgcgtcctccatggaggccggagaggaaccgctgctgctggccgaactcaagcccgggcgcccccaccagtttgattggaagtccagctgtgaaacctggagcgtcgccttctccccagatggctcctggtttgcttggtctcaaggacactgcatcgtcaaactgatcccctggccgttggaggagcagttcatccctaaagggtttgaagccaaaagccgaagtagcaaaaatgagacgaaagggcggggcagcccaaaagagaagacgctggactgtggtcagattgtctgggggctggccttcagcccgtggccttccccacccagcaggaagctctgggcacgccaccacccccaagtgcccgatgtctcttgcctggttcttgctacgggactcaacgatgggcagatcaagatctgggaggtgcagacagggctcctgcttttgaatctttccggccaccaagatgtcgtgagagatctgagcttcacacccagtggcagtttgattttggtctccgcgtcacgggataagactcttcgcatctgggacctgaataaacacggtaaacagattcaagtgttatcgggccacctgcagtgggtttactgctgttccatctccccagactgcagcatgctgtgctctgcagctggagagaagtcggtctttctatggagcatgaggtcctacacgttaattcggaagctagagggccatcaaagcagtgttgtctcttgtgacttctcccccgactctgccctgcttgtcacggcttcttacgataccaatgtgattatgtgggacccctacaccggcgaaaggctgaggtcactccaccacacccaggttgaccccgccatggatgacagtgacgtccacattagctcactgagatctgtgtgcttctctccagaaggcttgtaccttgccacggtggcagatgacagactcctcaggatctgggccctggaactgaaaactcccattgcatttgctcctatgaccaatgggctttgctgcacattttttccacatggtggagtcattgccacagggacaagagatggccacgtccagttctggacagctcctagggtcctgtcctcactgaagcacttatgccggaaagcccttcgaagtttcctaacaacttaccaagtcctagcactgccaatccccaagaaaatgaaagagttcctcacatacaggactttttaagcaacaccacatcttgtgcttctttgtagcagggtaaatcgtcctgtcaaagggagttgctggaataatgggccaaacatctggtcttgcattgaaatagcatttctttgggattgtgaatagaatgtagcaaaaccagattccagtgtactagtcatggatctttctctccctggcatgtgaaagtcagtcttagaggaagagattccacttgcacggcaacagagccttacgttaaattttcagtccagttatgaacagcaagtgttgaactctttctgcttgttttgattcaaagtgcagttactgatgttgttttgattatgcaactaagtaggcctccagagcctctctagtggcagagcagctcacactccctccgctgggaacgatggcttctgcctagtacctatccttgtgtttctgatgcagtggtagcattggttcaagttctctcctgctgtggtcagagttgcttcgatgttggccaagtgcttttcttcttgggctcccttctgacctgcaggacagttttcctggagccatttggtatgaggtattaatttagcttaactaaattacaggggactcagaggccgtgctcctgaccgatccagacactattactggctttttttttttttttttaacaatggtgtgcatgtgcaggaaatgacaaatttgtatgtcagattatacaaggatgtattcttaaaccgcatgactattcagatggctactgagttatcagtggccatttattagcatcatatttatttgtattttctcaacagatgttaaggtacaactgtgtttttctcgattatctaaaaaccatagtacttaaattgaacagttgcaaagatgtcttaattgtgtaaagaattggtgtagtcatgactttagctgatactcttatgtacgagatctgtctctgctgtttaacttcattggattaatcagctggtttcaactctactgcgaaacaaaaatagctccttaaaagtactgttctccttcagtggcatgtagttatctaatcaagacacctcattcaaacaaaacctgccttaggaaaatttaatatattttaaattattttaaaagaaatacaacatcttattctttagctttcttaatcggtgctttatggaggccagtgtaacgttacatgactcgttgagaaagttgaggaatttcctctaccacctttgttgcttgaagaaaaacatgtcttttcaaaatgagaggctttcattgaagaaaagaaaaaaacaacagttaaaagctaaaaaaaaaaaaaaaaagcattaatcgacctaacttcacaccatttcgctcaacccatccaatgcaatcgctatcgttcactcactcaacaggttcacaaatctactcattaagctcctgtcaaccctcgctacaactgatcatctctgcgcttatccatccatctactacaagcactccgccatcccccatcctcttcacagcctcctctgtgcacacttctcgtaccccctttcaccatcacttccaccaccccatccttcgcccctttgtcttcactctcct

SEQ ID NO: 726851 - DNA, 388 bp, Homo sapiens
gcggccgcctactactactaaattcgcggccgcgtcgaccgttcctttccactcttgctttccattccatctgactccattccacttcactccactccattcccttactttccattccgtttccattccatttcactccattgcattccattcctttctttcgactagctatcactgtgtcacccaggctggagtgcagtggcacaatctcagctcacattacatgtcaactttccattgcatcgcattctcttccgttgccttccactacattgcattccattccagtcaattccattctattccactccattccactccactgcactacactgcagtacattccattccattcattccattctactccattccactccactgcact

SEQ ID NO: 726852 - DNA, 654 bp, Homo sapiens
gttctagatcgcgagcggccgccctgcttcttttctgaccgggaaataaatgcccctgaaggaaaaaaaaaaaaaaaaaaaaaaaaaaaaaaaaaaaaaaaaaaaaaaaaaaaaaaaaaaaaaaaaaaaaaaaaaaaaaaaaaaaaaaaaaaaaataaaacaaaataaatagaagaaagaaaagaaagaagataacaaatggtttgtaaagatattattagattgcttctttataggaatcagtctgactattatgaatcactacatcatacataacacacgcgcagacagatgattcatcgccagaggcagatggtaatgtgtcggctggtagtttctctggctagctgtgtgtgactactaggtaagagtagcgtcgattgttggagatgctaattaatatgataagacgagcgtagcgagcagataataaatagaatagaataaatattatgagcaagcacggatacgagttagatattacgggcgtgatcgtatgcgatgaggagtgtcatgtgagtctgtaattgtctcgtggttgggggtagtagttgggcggtgggagcgagaggagggaggtgcaccaggggggagaggtgggtgcgcgtgcgagaggcggctgtgagggccgagtggagaggcgggggggggggt

SEQ ID NO: 726853 - DNA, 376 bp, Homo sapiens
ccttttttgaaccaaccatggtcatgtttttacctcagggcccttgcacatgctattccctctgcctggaatgccctgtgccccctttgccctttgccgtggtaaaaaatccctcatcctttaacttcaaaatccagggcccttttttccctgttaccctcaggcaaaattaggtactctttcctctgggccattgttttaaatcttcgccccagctcttttcccgttgtattgtaatgatttggttatgtttaccctccctactagactgtgagctccaaagccggccgtttttattattcccttttggacccctagtgttttttatggttttccgccccctataaccggggccccataaatatttttccaatta

SEQ ID NO: 726854 - DNA, 1011 bp, Homo sapiens
tcgggggccgcagaaaatagaaactgaagccgatggtcacgatgacaggacatgtagtatatagcaggctagccagcgactccatgctcattgcttctggatctgcagggcaagtcccagcaggacccatggcagtgtccttcgatgccagcatgtcatccaaggcaggaaacccccaagatatctgcagccagtgcgggagagaggctgccatcctgcagacccccatagcagattcgtgagaacaataactccacaagggcgtcaggcctcggcagggtgcacaataggcagtagtagggccaggcagctagaaggaggaagaggggcccagaagcataagtaacccgggactcaagcaccagtaaggccaagcaacaaccccgaaggcagcccatagtatccgaacagcctcctagtgcacctgtcccaagcaacagcaaaaagcacagcaacaaggcacagaagcaaacaagcacaggggcaacaaagtccggcattccatacagagcttgagattccatatgacccacatatatctacctgccagaccacctgataacactgcacattgtggcttttcaaaagcccattggcgcgtcaagcgacacaccagaacactgaccaccaacaggacaaagacccaagccagacagtgggacacacactagggcccagagccgaagcccgaagaacccacgaggaacaacaagcacaacccaacgacgcaactggaagcggtggaccgggcgctcatccaggagcaacaacccgaaggggtatgggaggaacaggcccccgccttggacaccacgggccccaaggggccgtcaagcgggcaagcacacggccagcggaagctgcggacaacacagaggcacacagcgcgagaggacactcagaaagccaagcacacgagacaacagtaccaaaggaaccacacaaaagagacaagcggggagaatgaaacccagcgaacaggcatgcacagatccccacatctcgcgaaag

SEQ ID NO: 726855 - DNA, 289 bp, Homo sapiens
atatcaaggaacgagtacgggcagatatacggatccccacataaaaatgcttcaggttaaaaagtgaaggggaaggcaaaaaaatcaaccaataaaatgagaagtgtcgatttgcagcatgaagcactactctaggtataaattagtcagcccagatcccagacagagatgatactccaaacatgaaaagtcaccgtccaagtctcaattcactactgagaacccaagttcaaaatatcccctaaaattccataaaaatcaggaaagaccctagctgggtagtcagaga

SEQ ID NO: 726856 - DNA, 1566 bp, Homo sapiens
  misc_feature (1566)..(1566): n is a, c, g, or t
ggcgtgcaccaccatgcctggctaattaaaaaaaaaaaaaaaaaaaagacaacttttttgggagagggagggtctcattaggtgggctcagggctgggtattggaactcaaggtggatcctccgtacgttggacctcccataagtggctggggattacacgctggtgagctggctggtgcctgggcctcattggtgggtattacaatttggagcactttctcatcttcctttattaggacctttctgttggtacaaattggtgctatggagggtgtctttggcgataatttataacaatcgggggtaattggagtttttttcttggtcattgggctggcatttgggcataggttttattttttttaaacttctccttaaaggtgggtcactggacggtggtgggccggggggtgagacaaaccttcttggggcgctaagtgtttggcgacacagggtcaagaggtggtggtgcaccgtgaaaatggatggacgctaaggatgtggtccccaaagacaggggggtgtaaggggagaatcccaccgcggtgttgtgcccccggggaggggggatccgggcttaggtggagcagaatgtgatagtattagaacctccttgggcaccttgggttgggagccttttggcaaaaaacccttctttgggcaaaaaccaaagggtggggggtcaaaggagactagtggcgtaacactcccagggggtcgccgcgcccctcaggggggcccaggagggacggagaaacacagagacaaagcccagaaacgggcgggccacggggagaccatggggttcgcttgggagaaacacacacaaccacggtacggagtcactatcaaaacgagacagggtgggcgagcgggcaaagaaaaaaggaccccctgtggacacccatcatacaacaaccgtgaggaaggacatccagtctgtgggccggcacaatggtggaggaccccaccccgggagagaactagggggggacgccacacaggtgggaaaaggagcacgctccccgctcaaaagagttggtgggggggaacaccaatgatgttactcagaaggccaagcggttgcgcaaaaaaaaaattctgggaagcgtcgcacaaaatagcgcggggtagagacgacagcggggatcaccgacagaaaaaaagggaaaagctgggcattatagggggcgcacccaaatacgaagtacacacacagggggggcgtttgtagcaacgattcagaaaaggcacccaggcgccgcgaattaggtggtgaccagctcgtataaacacgtgctattgggaggataaccagatggcggaaataatattagaatgatgaaaaaagagaggagtgtgagaaaagtgataaacgtcgcataatatgacaacaaaataacgacgagtgggggaggcgaattaatccatgaataggaatgcagcaattatattcagctgtgttgtagttatacaagtgatcagatgggaagacatgaccaagttaatgaactgagaaagtcatctttatttttttctttgcgtagtgctagtgttcgacgaan

SEQ ID NO: 726857 - DNA, 657 bp, Homo sapiens
agcgggctctcggtcccccagccctggcgcggacggggtggttccagctcactctcctcccccgagcggcagcggcagcggcggcggcggtggctgctgcgggcgctgaatgagagacggtgactgttcgggtcgacgatgtgctactctaggcggcggcgagcgtggcgtgtgcatgcgtgacggccggcatcgtcctttccgtcctctgagggcgacggcgcgcggctgcacaggaataatgtatttgtggcctaggacgatgcaggcagtcagctcctctgatcgctgtcaacatagggtcagggactgaatgaggaaatgcatggaacctaagtgaatcgggcaggcaacgcagtgtcaatatggcaagctactgctttctgagcaaaacgtagcagcatctgcaagtccttaaagtgacaaaggctctgaaattgcacgacaagctatcgagtgctgtggtatccgagtgtacttacaggttacaccagacagaatatgcgggcgtcggataacgatcaatgggatgttcccagatcatataaaagctgattcaaaccagcatgaagcttgccaagtggtaggcatggcaatcaacagcaggacacacatataactcctgcacccaaatgcaggtcgcctatcacaagaaga

SEQ ID NO: 726858 - DNA, 355 bp, Homo sapiens
ccatgtgggcatacgggcacttccgtacagcgtcatttactatgtgcattgtatggttatgggaggcaatttttattttacaataattttttattcatcccttctttcattctccaactcagttattccagtttaaggtggtgggcgaccagagcctatcccaacagctcagtgtgcaaggcagggaccaccctggacaggatgccctcccatcacagggcacactcaccccccacacacactcagactgcgaccagacaccaacaaacctcacctgcacatctttggggcgtgggaggaaaccagagtgcccagaaagctctccgaccgggaggacgtctagacggtgcacagg

SEQ ID NO: 726859 - DNA, 340 bp, Homo sapiens
acttgtagctcccataatcctatgcattgtgggagggacccagtgggaggtaaccgaatcacaggagggtttttcccatcctcttcgcatgacactaagtctcacaagatctgatggttttataaacgggcagttcccctgcacacgctctctcgcctgccgacatgtgagacgtgacttggctcttctttggccttccgccatgactgtgaggcctccccaaccatgtggaactatgagtccattaaatcttttgctttataaatacccaggctcgagtatgtcttcatagcagtatgaaaatggactcatacaatcccttcccaattccccaggggcg

SEQ ID NO: 726860 - DNA, 733 bp, Homo sapiens
accagcgaagctgctcacagaggctcaccctttgaccactttcctggtgcacagccagactccctctctgggtgaagctttttccacactgtgccgcacagtatagggtgtctggctgtgcaccagtcgcaagctgctcacagaaggctcagccctttgtaccactcttcctgcatacgcagaagtcctctttatgaattaagagtacaaaatcctctgatgatgaagctaacctatccagttctatggaatgaatggagcatatcttgtcagaatagaccatcattgggtagggcacactgatctttgtcctattcccccaatagagtatgagacataaactgtcttgtgtgatttatcattaaatagaaaaaaatacaacaataacccttaacacaagggggggctttacccgaaatgtcccctggggaggcgccgaaacctaaactggacaccccacagttgtttgttcagagaaggggtccccgcaaaatcgtgaggccacatatttttatgacccagggactgtgtgcccagacacagtctatgaaagtcatcaaggtgactggggaaatcaccgagttgacgactggggaacatcctctgcacaagacaagacgcttgaccattagtggcggtgcaactgatgaattgtggcacgaaagaatgcaagcgaagttgttttaatgcgctctaggggacatttcacatgtctcaacccggataaaacagg

SEQ ID NO: 726861 - DNA, 928 bp, Homo sapiens
gatgtcgaagcgaaggacgttggtgggtcctctggtgcgaaattccggatttccttgggtcttccggtaggagctgtacatcaatatgtgctgactacacaggagccagaaacctgtatatcatctccgtgaaggggatcaagggacggctgacatcagaaattcccggatgcatggtgtgggtgacatggtgatggccacagtcgagaaaggcaaaccagagctgcagaatagaagaaggtgggcatccagtcagtggtcattcagacaatagaaagtcataccgtagaaaagatggccgtgtatcttctattttgaagataatggaggagtcatagtgaacaagtaagaggcgagatgaataggttctgcacattaccaggaccgagtagcagaggagtgtgcggacttgtggcccgggattgcatccgaagtgctggccagcatggcatgattctccagtatattgtaaaaaatataagagaagtgttgataccaatataaggtccattaacaattcaggtttcataacgagaaccatcctaaaattctgtttctagattttaatgtcaagttcccaagttccccctggtggttctaatatgaagggagtgcagcttctgctaggcaataagatttactgatggcagtagtatgcaagctcaggagatttgagcatacagataggaggcgggatgaaagacacgttggatccctatagattttgtagctttgaaaggccatggtgggggaattacaataccccggtaatgtaggttgtctataaattgcgtgtggacggcctttgtcggaaaagtgcagattaaaatgaagggggagaacggggggggcagttaagagcccaggaataagaggatgtggaaggaagaagggaaaaaatgagtcgagtggaaggtatgcggtgggc

SEQ ID NO: 726862 - DNA, 155 bp, Homo sapiens
cctgttttaattttttttccccaaaagtctttaaacatcatgccagcgggtgagccgagcccagtgtatattaattcttgtcgtacggcccgcctttctctgtccccatgagtatggcatggcgggcagcataaatattaattctaatagctctg

SEQ ID NO: 726863 - DNA, 964 bp, Homo sapiens
gcaaagcggtgtgtctgcaggcggtgttcccaggttccctcggctgtacctcgcgcactcgctcttgctccaggtccttcagtctccgctcgtctcagcgtaggctgtgacgacgtgagcaagaaagaaggatcaggagggttcaggaaaaggaagcatgacaattgcccaccataaccaaagaagagaagggaaggatgttgaagttcatacttcacaccgtgatgttggcctttaagatcatttcaggcgaggaacttgatgcaaggcgatgacaatggtatgagagacttgtgaaacattagtgcgggatatagactgttgaaagtagaaaggacaagtttattctcctccataggattgacaagtgctccctgatatggaagatatattgagtgaatcagaaattaagatgtggatggtgttcgcgacgaaaacagatattccgggtagcgccaagggagctatcaggggaagatatgcgtcagattgccatcgaagaccattactacaggagcgtacaggaattatgtggaagctggtctctgttcaagattttcatcagaagacgatcaggaattagtatggatgaaattaatgaacaaagtgatatatatgactgaagacttgggactgatcatacaatcgcttctctgatgggcaggattatgcagtcggtacggtgcgagactgcgagtcgcgacctgtcggctacttgctgggagtggctggtccacctggagggacgtgcggatgggtaataagccgtgccgagaagggggacattgaaccccctatgaagagagggagcaaagcgtccgtctgccggtggatgcattgggcaccggcctgagaaggtcagcacctggtccccaacagactggggcgtggcacaagtgttcgcctcaatttccggtgattccccatttgggatcctgcactacgggagaacaaaagggcaaac

SEQ ID NO: 726864 - DNA, 107 bp, Homo sapiens
gttctttgagatatcatctgaaactgaggcgataacttctgaatgtttcaagtttgaaaatcaactattcttgctggacgcggtggttcaatgctgtaatcccagca

SEQ ID NO: 726865 - DNA, 1391 bp, Homo sapiens
  misc_feature (342)..(342): n is a, c, g, or t
tgattctgtccatggcacgggctggtcccaggtactggagcgaagtatcagtggactcccgccacgatcaggcgcgagacagctccaggcatctcagtgtcccaagcagggttcatggatcaccacttcgttgagacatcgctcgggcgatcaacggacgagcgtagcgtacacgtactaacggggatcgcatacacacggagacatatcggctagactaggcttcctggatcctttcagggtcccattacaacaaggccacaacacagcctcccaagggatagtggtctgaatgcactccacatggcgcagagtcatgcgatccagagataggtgctagangcatgacagatatagcatcgctaactgacgggaagcacgtcacggatgaccgaggttccaggtgctcctcatggaggtaccatcggtgcgaccctactgaagatgactttaccctagggtccaagagtcctcgaactaaagctccttcagcaacacgttcgcacaaggcttcccgaggcgctacgggggtttgattatacgaccgtcgcgagtgttcgccaacgcgcaagcaaaagcctaagcgcagcccctacgcggaaattcactaggactcgttgtcacgggccccatgggaacaacggtgaacccaccggataggagcggccattagagccccaatggcagcggcagctgccttgcaaagaaagttgccgagactttcttcgccagttctgggcctttgtcccacgcacgagatcccaattctattggcggacttcctcctcgcgtcgggcgagataggccatgcgtccataccgagaggaattgagtctctccccttaacggaaccaatcctccccgctggggacattacccttcattgcgaagcgcggcccggtatttgcgcagacaccgaagatccaagttgggttaaccacgtggcgttttccaaccccctttggtgtaccaagcgttcccagtaacttacctaagattaagcctgaggttagagagggaacacagttgaggttccacctttaatacgctgtacgctcccatttttaagccaacatggaagtttccttgacggtttattttaacccttccaaggggggaacattatcgcacgctccggtcggattggggccagcggacccttcaagcaacgtatggcttaacgcgttatcctataatgtctgtttacctcccaaatgccttggaaaggggtccccctagtaataaagcgcgcaaagatgagtggggtggcaggcacgcagggctcctacgctgtgttgggacgaacctttggcgacacgtcatcatttggggcaacgtctcgcagaagtctactgtacgaatcacacaggaggacgaacaacccgcgcggg

SEQ ID NO: 726866 - DNA, 107 bp, Homo sapiens
ggtgtctagaggatcccgtatgttctgacccactcttatgttctgaccacgcgcttatggtcagaacataagagtgggtagaacataagggggggtcagaacataag

SEQ ID NO: 726867 - DNA, 393 bp, Homo sapiens
  misc_feature (386)..(386): n is a, c, g, or t
gacttcatttgaacttttcagtactatttgttgatttcataatttttcgagcactgctgttgaaactgcctttgcaaaattacaactgggggaatttattgatagggggaggaatcaggccttaaccgcttccattttggcttctaaccttaaaggcgtcctaattaaatcccgggggtttggggggacctaccttggggggggaattaaagtttagggttaaaaaaaaatttaataatagcccctccccgaagagccccccttttcgcctgggcaccagttttttttaaaaggactaacaatattagcaacagatacaattacagttggggaacatgcagcttctgctcaagagtttcacctccaaattgctgggggaatacatnactatga

SEQ ID NO: 726868 - DNA, 427 bp, Homo sapiens
tgactctaggacgcgcaagagggatatgaaaagtgcgtctcatcatgtaggcatggtcaataaggacaaagtgtcacttaactatcctcctccaagtttctttactatccctacacacaagacacatgcacacacacaatacaaatgagtatctgcatcgtcttgaagaagatctggatgacgagaatgttctaatcccagctaacagatgcgtggtgaggcaccacttttgatctcaggcttctgcagagtgagtgagtcggccaattgttatattagaaagcttgaccagttctgcgtcaggatccaatagggataggtagaaaatgacaatcacaatttgaggaatgacttgaggtgtgtgatgggatgtcctgaggtaaatgcgcaggatatagacccctttagtccttcaccttgaggaaac

SEQ ID NO: 726869 - DNA, 1327 bp, Homo sapiens
  misc_feature (685)..(685): n is a, c, g, or t
tcttttctgtttttgtttttgtatgcaacacgcacactcacgtagagatagttttggtgatgtgttgtggcttcgccaccctctgctcctgtcgtggttgcttggggggagggcggacgccccaccccctactctctgtgttctattgctcctccgccgcatcaagcaggagggcgggacgcatcatctattgtttgtttgggtcctcctcattctcgccccgcctcagattgctactctcttcatccctctggtttgctgcttcttgcttgtgggagaggggcgggactaccgggccttgcaacggtctagttgttgggtggataaacacactatatcgtgatggcaggacacgatcttgatttctttttgtcttatctcgcgctcctcttgtatcgcctacacctggctagggaaaacccctgctcgccgcctcgctggtggtgtgtatatatagagtcaacacagccgcgcgcggtggctgacacagcagcgcagcgagacacccatctctcgacttcttgttttgtgtcgttgtgttcttccgtctctcccccgcgctcctccctctctctcgcggggaggggagtgggggcgcgcgcgctccctctctctctccgcctcgcgctcctctctcttctcgcgcgcgcgcgcgcgcgcgcgtctctctgctctttctctctcncttttctctccacacacagacgagagagagagaggcgcgcgcgcgcgctcgcgctgtgtgggtgtctctctctctctctctcgcgcgcgcgcagcatcgctcgcacgcgcacatatatataatacacacacaccacatccccgctgtgcgggtgtgttatatgtgctgagcgcgcacgcgcacgacactctctcttctttgttttctgttgtgcgctctcctctctctcccctccccagcgcgcgcgtgtgttctcttcgcgcgcgcgcgcgcgcgacacaactcccgcgcgcgcgcgctgtctggcgcacactctctctctctctctctagtgtgtgagggcgtggtgggtcgcacgtattgtgtgtggtgtgttgtgtgtgtgtgtgtccgccagaatattcttctcttctctctctctctctcctcgttgtgtgtgtctgtgtctggagaggagagagcgcgtacttctctctctctctctctctttgtgcgtcccgggggcgcgcgcgccccctccccccccccccgccgcgcctctctctctcttgtgttgtttctctctctgtgtgtggaggagggagagggggtggggcccctctctcttgtgtgttgtgtgtgtgtggtgtgtgtggtgtgaga

SEQ ID NO: 726870 - DNA, 820 bp, Homo sapiens
gggcacatgtcgctcctggatccctggtggcgaaagtcgtccggccttgccctgtgttgctgatcctggcgttcctatgtggcctggttgcagaccgcccttctctcggtagccctccctgctgcttggtgcagcggttcgcagcgcgtgagattccggcctgactcagaaggcagacgtaacgccagctgcgaaggcccctggctcacctgcagctccccggatctcgcctgggcaccagcggacaggcacagagcccggagatgtaccacgtaccagcacgcaacggcagacagatggctgtgcactggacgcgcgcataaacgagccacgcgcaagcgagcgtggacagcggcactcctcgtgatgacggacgaactgaggagcggagactgtcaccggtgtacagagtcgcccggggcctggcacccgatccgggcgaaatgcgacggtgcgtcaaccgctctggtatcagaccaccagccgcacgtgtgccagcgaccccatgcacggccccacagctcagcacgccgtgcgacatgcaacatgacactggaggcagacagacggcccacctgctaccccagacctgcgaggcacccacggggaggggcagggcctggagcttcccactaaagacatgttctgatgctgtgtgcttttggctgggcctcgggctgccaggtcatgggatccaccttgacacagggagacaccccgaacctttgtgccaggacagcatcctggtccctgcacgtctcctgttcggtattagacccccaaactggagggggcatgtaaccgtaggcgcagaatctgg

SEQ ID NO: 726871 - DNA, 505 bp, Homo sapiens
cttcggccttctgaagtgctgggattacaggcatgagccactgcacccacccagtgatctcatttctgaacagggaaggggcagagggcccacacagggagtagggttggggtagagtgagaagggaaaggagaaggggaaggtgactgggaattctcacccattctcacttctgctttgtgggttagaaacactgagctgcctcatcctcctgtctctgaacttccttcacacgccattgggccatttgcatatgtctcgttgaaattccggatcacggcgtcactgcctcctccccatggcccccagagggtgaccggagcatcactaggagccaaagaatggggatgagcagtgcggggtagtgttgaccgccccaactttcccatggtgactcactcttattcaatagacagaccattttcctagaatgttgcaacaggggtattagggtttttccagagctttccactctcgattacccaaccctgagcccctcgcgtgg

SEQ ID NO: 726872 - DNA, 88 bp, Homo sapiens
gcggccgcctactactactactgctcgaattcaagcttctaagatgtacggggacatgtaccatcaataaagtagatagtgctcaacc

SEQ ID NO: 726873 - DNA, 314 bp, Homo sapiens
tgtcgccccggctggagtgcagtgacacgatctcagctcactgcaacctctgcctcccaggtccaagtgactctcccgcctcagactcccaagtacctgggaccacaggtgcccgccaccatgcccggctaatttttgtatttttagtagagacggggtttcaccatgctggccaggctgatctcgaactcctgaactcaggtgatccactgcctcggcctccccaaagtgctgggattacaggtgtaagccaccacacccggccaagtgaattgatttttgagaaaagtggccaggcaattcagtgggtcgac

SEQ ID NO: 726874 - DNA, 372 bp, Homo sapiens
tgatctccgtgccgcagtgtgctattgtcaggatgcatggcagaacaacacaaaaacaacaaaaaaagacttgaatggccttggccctaatggggcttggacctagtagggagatatatacataataccggaacaaatatacacattgcaaatggcgggagatatgttaagaaacgcaaccagatgatgtggtaaaacgcagtttgggtctgtaagaattggcgtaaaattcaaagacaaaccatagctggagagggtgccctctttgggaggtggccaaagatgtacttccaaagggggcgatacataaaactcagagccaaggtgaaagatgaggtcccccatattccataaaagacagggccggaagat

SEQ ID NO: 726875 - DNA, 208 bp, Homo sapiens
  misc_feature (51)..(51): n is a, c, g, or t
  misc_feature (71)..(71): n is a, c, g, or t
  misc_feature (79)..(79): n is a, c, g, or t
  misc_feature (87)..(87): n is a, c, g, or t
  misc_feature (92)..(93): n is a, c, g, or t
  misc_feature (98)..(98): n is a, c, g, or t
  misc_feature (111)..(111): n is a, c, g, or t
  misc_feature (113)..(113): n is a, c, g, or t
  misc_feature (134)..(134): n is a, c, g, or t
  misc_feature (137)..(137): n is a, c, g, or t
  misc_feature (142)..(142): n is a, c, g, or t
  misc_feature (183)..(183): n is a, c, g, or t
aaccccccccacaccaacctcctcataatccttctcaagggcagccatgtnctcacgggcctctgaaaaanaaccttcntccatccnctccnnaacgnaccagtaaacaangnaacgtatggaataaatcaggncanacccntggtgggggggggggggggggtgggggatgggtgtggtgtngctcagggtgggcagggctctgtgt

SEQ ID NO: 726876 - DNA, 418 bp, Homo sapiens
ccctttaaaagttaaggggccttttttttagatgtttcccctccccccaagcttgattgctcaaaaaaatatgcaaaaggcagggtcaaaaacccccaggggtcctttttttttaaaagccccgggcccttgtctttccccccctttttggtttttttttttaccccctctttcaattgcggaggcccaaaaaaatgcccccaagccctacctttcccttaaggggtgcccccccaaacccttttaaagggtgtttttaaattttttggggggggtggtccaacctttcccttctttttttttttggggtttgggcccccattttaaaaagactttttttatggggatgggttgcccaaacgggctttttgtccaaaaaaaagaaaacgaacttaaaaaaaaaaaacggggtttttta

SEQ ID NO: 726877 - DNA, 244 bp, Homo sapiens
gcacaggacctgatgtgtggtgtatgtatggtgactaggaagcgaatcaagtgagagtgtgcctatcggaaacagttacatcactgttcgtgcagttgtcgatgttcatcttaccttaagtagttgacatgtttggaatttaaaaaagaccttttatgttccgtgaatttttctagaaaacttaatttctacttctagaccttgcaccatttgtggatattccccttttatcctttcagaattg

SEQ ID NO: 726878 - DNA, 198 bp, Homo sapiens
cagaggcacaaggagggcagaaggaggatctggtgttatcttctgggcccccagcttctctgccagtgtgcagctggtccttgacctcctcgtagcagtttgcttgcaattcatgcttgatccctgtcagcttcttcttgatggcctccttggtgcctctggcctccttggtgcctctggcctccttggtgcctctgg

SEQ ID NO: 726879 - DNA, 481 bp, Homo sapiens
  misc_feature (10)..(10): n is a, c, g, or t
atggaatcanttgtgtgttgatactctacacacatctgatggaaccaggatgttatatggggaactcctcctgatgtactagtgaggaggacattagggagacaaagaggagcgaagcattatccttctgatgaagtcacatcctgtctatgagcccactaatgctgtaacataggactgaaagagagtgttctttaaaagcctatctcggactgttagtataaaaacatgatggtatcagctcttagcatgtatgcttgacccttatggaaggtataaatccacagaacttccttcccagagaactgggaaatagtcctagaaataaaccttgtacagttgagtggacatggataagcaacaatttgttactttgcaggatttgttccttggtaattgtttggttgttgtcatcctgtaaatattcatgatagtctgtatatatccttttgtatatcgtagatactggattcatttgggg

SEQ ID NO: 726880 - DNA, 542 bp, Homo sapiens
  misc_feature (57)..(57): n is a, c, g, or t
  misc_feature (76)..(76): n is a, c, g, or t
  misc_feature (80)..(80): n is a, c, g, or t
  misc_feature (82)..(82): n is a, c, g, or t
  misc_feature (87)..(87): n is a, c, g, or t
  misc_feature (93)..(93): n is a, c, g, or t
  misc_feature (95)..(95): n is a, c, g, or t
  misc_feature (99)..(99): n is a, c, g, or t
  misc_feature (101)..(101): n is a, c, g, or t
  misc_feature (120)..(120): n is a, c, g, or t
  misc_feature (126)..(126): n is a, c, g, or t
  misc_feature (146)..(146): n is a, c, g, or t
  misc_feature (158)..(159): n is a, c, g, or t
  misc_feature (161)..(161): n is a, c, g, or t
  misc_feature (166)..(166): n is a, c, g, or t
  misc_feature (173)..(173): n is a, c, g, or t
  misc_feature (177)..(177): n is a, c, g, or t
  misc_feature (183)..(184): n is a, c, g, or t
  misc_feature (187)..(187): n is a, c, g, or t
  misc_feature (198)..(198): n is a, c, g, or t
  misc_feature (207)..(207): n is a, c, g, or t
  misc_feature (211)..(211): n is a, c, g, or t
  misc_feature (231)..(232): n is a, c, g, or t
  misc_feature (234)..(234): n is a, c, g, or t
  misc_feature (237)..(237): n is a, c, g, or t
  misc_feature (245)..(245): n is a, c, g, or t
  misc_feature (248)..(248): n is a, c, g, or t
  misc_feature (259)..(259): n is a, c, g, or t
  misc_feature (277)..(277): n is a, c, g, or t
  misc_feature (286)..(286): n is a, c, g, or t
  misc_feature (297)..(297): n is a, c, g, or t
  misc_feature (299)..(299): n is a, c, g, or t
  misc_feature (317)..(317): n is a, c, g, or t
  misc_feature (330)..(330): n is a, c, g, or t
  misc_feature (338)..(338): n is a, c, g, or t
  misc_feature (344)..(344): n is a, c, g, or t
ggggccaagtgaagatcaaacgactggggctgcgccatctgttttctcttcccgccnttgatgacagttgaaatcnggancngcctntgttgngngccngntgaaaaacttctatcccanagaggncaaagttcagtggaaggtgnttacgccctccnntngggtnactcccngganagtgtnncanagcaggcagcnagggcagcncctncagcctcagcagccccctgnngntgngcaaagcnggnttcgagaaacncaaagttttcgcctgggnagtcccccntcagggcctgngnttgcccgtcccaaaaagnttcaccagggganagtgttanaggganaagggcccccccctgctcctcagttccagcctgaccccctcccatcctttggcctttggccctttttccccagggggcctacccctattgggggcctccaggttatttttcccctcccccccctcctcctccttgggtttaattatggtaatgttgggggggaatgaataaataaagtgaattccttgcccctgtgga

SEQ ID NO: 726881 - DNA, 107 bp, Homo sapiens
tgcgagctttctacacaggaaacaggtattaagttgtgaatgggaaaaacccggggggctttttaaaaaagaaaaagggaataccctataaaggggaaaaaaccgtg

SEQ ID NO: 726882 - DNA, 127 bp, Homo sapiens
  misc_feature (57)..(57): n is a, c, g, or t
  misc_feature (109)..(110): n is a, c, g, or t
aggtcccatgcgcgaggctccatcaaagaactactgacaacgaaggccgcgcctgcncttcccatctgtctatctatctggctggcagggaaggaaagaactgcatgtnngtgatggaagcgtcgcg

SEQ ID NO: 726883 - DNA, 144 bp, Homo sapiens
cagatgaacagttccctccttcatcaggtatgaaatggactgtgagcctcatgatagtgcccatttcttcacccgtaatatcttgtgtcagctcagaaatgtgttaggttggattggttggttggtttgtacacagatatgcag

SEQ ID NO: 726884 - DNA, 189 bp, Homo sapiens
cattacctaaaaaggctttttaagagagactactttctaaaagggtgaggtcttctttactgcctttacatgcaagagaggtgggaggaatgatacgaacgtacttaacagttgggcttgtgtcgattcatactacatatgaccgaaactgaactgctgccttattaagagctatacagcacatggagg

SEQ ID NO: 726885 - DNA, 345 bp, Homo sapiens
gtgatggattttgtagcttgctgcttgtttcacactgggtcaaatttaaccattaaattgccattcattttagaatcttgtattaagtaagtttgattttaaatgtccgttcatcttgttgcgacgaatctgtacttttttaaaagtgtgtgtcctctgaggtcctgagacaggtacaatgcagaactgcacatcttcctactgtatcactatttatattcatgcctgtgtagttcatcttacctatgaattccacataacagctaccttctggattaaatcaatatcatcgagcacttttagaatcgcaaagctctaaactcaatgagaatttaataaatttat

SEQ ID NO: 726886 - DNA, 389 bp, Homo sapiens
atttatgtgctcgtgttgtggcctgcagatgatccgtgttcatgtccatctctttcccgacgtgtcaacagagtcgctggtgaatcgctgcttctgtcctgagggcccatgaactacgctcctggctttgatgtctgcgtgaagacctgcggctgtgtgggacctgacaatgtgcccagagagtttggggagcacttcgagttcgactgcaagaactgtgtctgcctggagggtggaagtggcatcatctgccaacccaagaggtgcagccagaagcccgttacccactgcgtgaaagacggcacctacctcgccacgagaggtcaaccctgccgacacctgctgaaacattaccgtctgcaagtgctcgtgctagaactccagatagg

SEQ ID NO: 726887 - DNA, 1640 bp, Homo sapiens
gcccgcgccggcgtgtcgcctcccgtccccctagcagcacgctgcgtggctgctcgctggctatttaggacggaagctcggttggtgtttctccagaagtttcccccttgggcggtggtggaggtggtaaccgtgatagtagcagctccggcggcagcaacagcgactacgagggatggcggcggctgcagcaggaactgcaacatcccagaggtttttccagagcttctcggatgccctaatcgacgaggacccccaggcggcgttagaggagctgactaaggctttggaacagaaaccagatgatgcacagtattattgtcaaagagcttattgtcacattcttcttgggaattactgtgttgctgttgctgatgcaaagaagtctctagaactcaatccaaataattccactgctatgctgagaaaaggaatatgtgaataccatgaaaaaaactatgctgctgccctagaaacttttacagaaggacaaaaattagatagtgcagatgctaatttcagtgtctggattaaaaggtgtcaagaagctcagaatggctcagaatctgaggtgtggactcatcagtcaaaaatcaagtatgactggtatcaaacagaatctcaagtagtcattacacttatgatcaagaatgttcagaagaatgatgtaaatgtggaattttcagaaaaagagttgtctgctttggttaaacttccttctggagaggattacaatttgaaactggaacttcttcatcctataataccagaacagagcacgtttaaagtactttcaacaaagattgaaattaaactgaaaaagccagaggctgtgagatgggaaaagctagaggggcaaggagatgtgcctacgccaaaacaattcgtagcagatgtaaagaacctatatccatcatcatctccttatacaagaaattgggataaattggttggtgagatcaaagaagaagaaaagaatgaaaagttggagggagatgcagctttaaacagattatttcagcagatctattcagatggttctgatgaagtgaaacgtgccatgaacaaatcctttatggagtcgggtggtacagttttgagtaccaactggtctgatgtaggtaaaaggaaagttgaaatcaatcctcctgatgatatggaatggaaaaagtactaaataaattaatttgctctcatcgtattgtgtatattcacctaatgcccattgtgtattgatattgcattcttgaattttgaacactgaatatctttttgaaagattatacttctttacctctttgtgctttagaaattattttccttcaagtgttcaagtctaatgaagaatgaagataacattttatcacttctgtccttaaagatttcagacatggtgaaactgaataaagcatgtcatttgctcctagatagattcattctatctagttgtggggatggagaaatctttaatggtatattttcggttattgccttatttttgatacagtattctgtcagtaatttattagacctggcagctttgggtgagcttagatttttcaccttcagtgttacattgtgtttgcttttaaaaactgcttttgaatggagttgtaaatacaatttttctatgaagatgt

SEQ ID NO: 726888 - DNA, 946 bp, Homo sapiens
cccacgcgtacggacccacgcgtccgcggacgcgtgggtacgaccacacgcgatcgcgccacacgcgtaccgcccacgcgtccgagctgactatatatagctcttaaccgtctcagtgtcgcacgctgcgaagggagccgccgccatgtctagcgcatctgcaaatggatggtcgtgcggaactagctccagaattcctgatacaagaggaataccagcagacctacagacactgagcccaataccttgaaggcccgcaataaccttaccgctacaacggaactgattcacgcgcaaagactagtgggcgtggagcctggcagccgacggcacaggtgacaggggagggtcattacgcggagatccggccagcggaaagcctgagcacctacgtatgtagcggaacacacatcaacaagacactagctccagcggccaaagcagcagccaggcaatcagacacacatgatcacgcaacggaaccaagataccgaaccacgcacaggcgcatggccacccaaccgaccggggcccagcgcacatacctgcagcagccaacacgcctgaagactgcatcgaccacagcgcagcggcacccagcacacaaccaccgaagccccatgagcacaacaagaccaccacgaacccacacaaagacccaaaggagcaacacatcaccacacaaacaccacacacgcccaacacaccacaacaaacaaacccccccaacacaggagcagcacccaacagaccagccacgcaacacaccgacacacacacggaaacacaacgagtgagaccccacacacaccaaacacaacacaagacacccgccaagcgcacaaggccaacgccagaaaccaaacaagacagcacaaaaaacgcggaaccacaaagaaaaacacagccgccaaccccgccgaaccagacacaatacccaagcaac

SEQ ID NO: 726889 - DNA, 975 bp, Homo sapiens
gcccgcgccggcgtgtcgcctcccgtccccctagcagcacgctgcgtggctgctcgctggctatttaggacggaagctcggttggtgtttctccagaagtttcccccttgggcggtggtggaggtggtaaccgtgatagtagcagctccggcggcagcaacagcgactacgagggatggcggcggctgcagcaggaactgcaacatcccagaggtttttccagagcttctcggatgccctaatcgacgaggacccccaggcggcgttagaggagctgactaaggctttggaacagaaaccagatgatgcacagtattattgtcaaagagcttattgtcacattcttcttgggaattactgtgttgctgttgctgatgcaaagaagtctctagaactcaatccaaataattccactgctatgctgagaaaaggaatatgtgaataccatgaaaaaaactatgctgctgccctagaaacttttacagaaggacaaaaattagatagtgcagatgctaatttcagtgtctggattaaaaggtgtcaagaagctcagaatggctcagaatctgaggtgtggactcatcagtcaaaaatcaagtatgactggtatcaaacagaatctcaagtagtcattacacttatgatcaagaatgttcagaagaatgatgtaaatgtggaattttcagaaaaagagttgtctgctttggttaaacttccttctggagaggattacaatttgaaactggaacttcttcatcctataataccagaacagagcacgtttaaagtactttcaacaaagattgaaattaaactgaaaaagccagaggctgtgagatgggaaaagctagaggggcaaggagatgtgcctacgccaaaacaattcgtagcagatgtaaagaacctatatccatcatcatctccttatacaagaaattgggataaattggttggtgagatcaaagaagaagaaaa

SEQ ID NO: 726890 - DNA, 1071 bp, Homo sapiens
gcccgcgccggcgtgtcgcctcccgtccccctagcagcacgctgcgtggctgctcgctggctatttaggacggaagctcggttggtgtttctccagaagtttcccccttgggcggtggtggaggtggtaaccgtgatagtagcagctccggcggcagcaacagcgactacgagggatggcggcggctgcagcaggaactgcaacatcccagaggtttttccagagcttctcggatgccctaatcgacgaggacccccaggcggcgttagaggagctgactaaggctttggaacagaaaccagatgatgcacagtattattgtcaaagagcttattgtcacattcttcttgggaattactgtgttgctgttgctgatgcaaagaagtctctagaactcaatccaaataattccactgctatgctgagaaaaggaatatgtgaataccatgaaaaaaactatgctgctgccctagaaacttttacagaaggacaaaaattagatatagagacggggtttcatcgtgttggccaggctggtctccaactcttgacctcaagtgatccacctgccttggactcccaaagtgctgggattacaggtgcagatgctaatttcagtgtctggattaaaaggtgtcaagaagctcagaatggctcagaatctgaggtgtggactcatcagtcaaaaatcaagtatgactggtatcaaacagaatctcaagtagtcattacacttatgatcaagaatgttcagaagaatgatgtaaatgtggaattttcagaaaaagagttgtctgctttggttaaacttccttctggagaggattacaatttgaaactggaacttcttcatcctataataccagaacagagcacgtttaaagtactttcaacaaagattgaaattaaactgaaaaagccagaggctgtgagatgggaaaagctagaggggcaaggagatgtgcctacgccaaaacaattcgtagcagatgtaaagaacctatatccatcatcatctccttatacaagaaattgggataaattggttggtgagatcaaagaagaagaaaa

SEQ ID NO: 726891 - DNA, 1672 bp, Homo sapiens
gcccgcgccggcgtgtcgcctcccgtccccctagcagcacgctgcgtggctgctcgctggctatttaggacggaagctcggttggtgtttctccagaagtttcccccttgggcggtggtggaggtggtaaccgtgatagtagcagctccggcggcagcaacagcgactacgagggatggcggcggctgcagcaggaactgcaacatcccagaggtttttccagagcttctcggatgccctaatcgacgaggacccccaggcggcgttagaggagctgactaaggctttggaacagaaaccagatgatgcacagtattattgtcaaagagcttattgtcacattcttcttgggaattactgtgttgctgttgctgatgcaaagaagtctctagaactcaatccaaataattccactgctatgctgagaaaaggaatatgtgaataccatgaaaaaaactatgctgctgccctagaaacttttacagaaggacaaaaattagatagtgcagatgctaatttcagtgtctggattaaaaggtgtcaagaagctcagaatggctcagaatctgaggtgtggactcatcagtcaaaaatcaagtatgactggtatcaaacagaatctcaagtagtcattacacttatgatcaagaatgttcagaagaatgatgtaaatgtggaattttcagaaaaagagttgtctgctttggttaaacttccttctggagaggattacaatttgaaactggaacttcttcatcctataataccagaacagagcacgtttaaagtactttcaacaaagattgaaattaaactgaaaaagccagaggctgtgagatgggaaaagctagaggggcaaggagatgtgcctacgccaaaacaattcgtagcagatgtaaagaacctatatccatcatcatctccttatacaagaaattgggataaattggttggtgagatcaaagaagaagaaaagaatgaaaagttggagggagatgcagctttaaacagattatttcagcagatctattcagatggttctgatgaagtgaaacgtgccatgaacaaatcctttatggagtcgggtggtacagttttgagtaccaactggtctgatgtaggtaaaaggaaagttgaaatcaatcctcctgatgatatggaatggaaaaagtactaaataaattaatttgctctcatcgtattgtgtatattcacctaatgcccattgtgtattgatattgcattcttgaattttgaacactgaatatctttttgaaagattatacttctttacctctttgtgctttagaaattattttccttcaagtgttcaagtctaatgaagaatgaagataacattttatcacttctgtccttaaagatttcagacatggtgaaactgaataaagcatgtcatttgctcctagatagattcattctatctagttgtggggatggagaaatctttaatggtatagttgtggggatggagaaatctttaatggtatattttcggttattgccttatttttgatacagtattctgtcagtaatttattagacctggcagctttgggtgagcttagatttttcaccttcagtgttacattgtgtttgcttttaaaaactgcttttgaatggagttgtaaatacaatttttctatgaagatgt

SEQ ID NO: 726892 - DNA, 377 bp, Homo sapiens
aatgaactgtctaatcctgtaaggaaaaatgaagtctactttatgaggtgagagaaggacaggaaaaaaaaggaaaggaagcttggatgtcaacagtcctctctgacgcccacgtcctactactagtctactagcagctgtgtagcctccatggcagtgaccagcaaaagcgcaagggtgccgaagccacggcgaaaagaaagtccaagggtggagggataaacgtggagggacgtctgtgcacctagccccctgaagacccacgtgcgtctagggggcacattgcgggagaaggaacgtgatctaacacacagaaagggacagttttaaccgtattactgtatacatgtactcataaaactgtagaccggaaattg

SEQ ID NO: 726893 - DNA, 1085 bp, Homo sapiens
gcccgcgccggcgtgtcgcctcccgtccccctagcagcacgctgcgtggctgctcgctggctatttaggacggaagctcggttggtgtttctccagaagtttcccccttgggcggtggtggaggtggtaaccgtgatagtagcagctccggcggcagcaacagcgactacgagggatggcggcggctgcagcaggaactgcaacatcccagaggtttttccagagcttctcggatgccctaatcgacgaggacccccaggcggcgttagaggagctgactaaggctttggaacagaaaccagatgatgcacagtattattgtcaaagagcttattgtcacattcttcttgggaattactgtgttgctgttgctgatgcaaagaagtctctagaactcaatccaaataattccactgctatgctgagaaaaggaatatgtgaataccatgaaaaaaactatgctgctgccctagaaacttttacagaaggacaaaaattagatagtgcagatgctaatttcagtgtctggattaaaaggtgtcaagaagctcagaatggctcagaatctgaggtgtggactcatcagtcaaaaatcaagtatgactggtatcaaacagaatctcaagtagtcattacacttatgatcaagaatgttcagaagaatgatgtaaatgtggaattttcagaaaaagagttgtctgctttggttaaacttccttctggagaggattacaatttgaaactggaacttcttcatcctataataccagaacagagcacgtttaaagtactttcaacaaagattgaaattaaactgaaaaagccagaggctgtgagatgggaaaagctagaggggcaaggagatgtgcctacgccaaaacaattcgtagcagatgtaaagaacctatatccatcatcatctccttatacaagaaattgggataaattggttggtgagatcaaagaagaagaaaaaaaaaaccggggatataagggggggcggaaaaagaggtatggaaagggccttggcccaagctgtttccggacccagtttttgtgtccagggggaaaatcggcgggctcca

SEQ ID NO: 726894 - DNA, 1768 bp, Homo sapiens
gcccgcgccggcgtgtcgcctcccgtccccctagcagcacgctgcgtggctgctcgctggctatttaggacggaagctcggttggtgtttctccagaagtttcccccttgggcggtggtggaggtggtaaccgtgatagtagcagctccggcggcagcaacagcgactacgagggatggcggcggctgcagcaggaactgcaacatcccagaggtttttccagagcttctcggatgccctaatcgacgaggacccccaggcggcgttagaggagctgactaaggctttggaacagaaaccagatgatgcacagtattattgtcaaagagcttattgtcacattcttcttgggaattactgtgttgctgttgctgatgcaaagaagtctctagaactcaatccaaataattccactgctatgctgagaaaaggaatatgtgaataccatgaaaaaaactatgctgctgccctagaaacttttacagaaggacaaaaattagatatagagacggggtttcatcgtgttggccaggctggtctccaactcttgacctcaagtgatccacctgccttggactcccaaagtgctgggattacaggtgcagatgctaatttcagtgtctggattaaaaggtgtcaagaagctcagaatggctcagaatctgaggtgtggactcatcagtcaaaaatcaagtatgactggtatcaaacagaatctcaagtagtcattacacttatgatcaagaatgttcagaagaatgatgtaaatgtggaattttcagaaaaagagttgtctgctttggttaaacttccttctggagaggattacaatttgaaactggaacttcttcatcctataataccagaacagagcacgtttaaagtactttcaacaaagattgaaattaaactgaaaaagccagaggctgtgagatgggaaaagctagaggggcaaggagatgtgcctacgccaaaacaattcgtagcagatgtaaagaacctatatccatcatcatctccttatacaagaaattgggataaattggttggtgagatcaaagaagaagaaaagaatgaaaagttggagggagatgcagctttaaacagattatttcagcagatctattcagatggttctgatgaagtgaaacgtgccatgaacaaatcctttatggagtcgggtggtacagttttgagtaccaactggtctgatgtaggtaaaaggaaagttgaaatcaatcctcctgatgatatggaatggaaaaagtactaaataaattaatttgctctcatcgtattgtgtatattcacctaatgcccattgtgtattgatattgcattcttgaattttgaacactgaatatctttttgaaagattatacttctttacctctttgtgctttagaaattattttccttcaagtgttcaagtctaatgaagaatgaagataacattttatcacttctgtccttaaagatttcagacatggtgaaactgaataaagcatgtcatttgctcctagatagattcattctatctagttgtggggatggagaaatctttaatggtatagttgtggggatggagaaatctttaatggtatattttcggttattgccttatttttgatacagtattctgtcagtaatttattagacctggcagctttgggtgagcttagatttttcaccttcagtgttacattgtgtttgcttttaaaaactgcttttgaatggagttgtaaatacaatttttctatgaagatgt

SEQ ID NO: 726895 - DNA, 428 bp, Homo sapiens
  misc_feature (28)..(28): n is a, c, g, or t
  misc_feature (338)..(338): n is a, c, g, or t
  misc_feature (403)..(403): n is a, c, g, or t
ggaaatgcaataaaaaaaccacaatganattatataacactagatggctgtcataaaaaagacaaataataaaaattgttggtgagggtgtggagaaatcagaattctcatacgctgctggtggaaatgtaaaatagtggagagactttggaaaacagtctggcaattcctcaaaaggttaaacatagagttaccacataagcccattctattccatttctaggtatataaccaagagaaatgaaaacatacacccatgcaaaaatttgtgccaaaagttcatagtaacattattcataatagccaaaaagcgcaaacaacccaaatgtccccaaatngtctatgcaagtggatggaatgggatttaaaaattgtggttattacccaaacaccaggactattnacttcagccattacggaagggaggt

SEQ ID NO: 726896 - DNA, 772 bp, Homo sapiens
tgacccgccttctccccgcaccgccggacagggacccaggctcttgttgatgctgcgtctcagctccggagctgactaaggctttggaacagaaaccagatgatgcacagtattattgtcaaagagcttattgtcacattcttcttgggaattactgtgttgctgttgctgatgcaaagaagtctctagaactcaatccaaataattccactgctatgctgagaaaaggaatatgtgaataccatgaaaaaaactatgctgctgccctagaaacttttacagaaggacaaaaattagatagtgcagatgctaatttcagtgtctggattaaaaggtgtcaagaagctcagaatggctcagaatctgaggtgtggactcatcagtcaaaaatcaagtatgactggtatcaaacagaatctcaagtagtcattacacttatgatcaagaatgttcagaagaatgatgtaaatgtggaattttcagaaaaagagttgtctgctttggttaaacttccttctggagaggattacaatttgaaactggaacttcttcatcctataataccagaacagagcacgtttaaagtactttcaacaaagattgaaattaaactgaaaaagccagaggctgtgagatgggaaaagctagaggggcaaggagatgtgcctacgccaaaacaattcgtagcagatgtaaagaacctatatccatcatcatctccttatacaagaaattgggataaattggttggtgagatcaaagaagaagaaaa

SEQ ID NO: 726897 - DNA, 875 bp, Homo sapiens
gcccgcgccggcgtgtcgcctcccgtccccctagcagcacgctgcgtggctgctcgctggctatttaggacggaagctcggttggtgtttctccagaagtttcccccttgggcggtggtggaggtggtaaccgtgatagtagcagctccggcggcagcaacagcgactacgagggatggcggcggctgcagcaggaactgcaacatcccagaggtttttccagagcttctcggatgccctaatcgacgaggacccccaggcggcgttagaggagctgactaaggctttggaacagaaaccagatgatgcacagtattattgtcaaagagcttattgtcacattcttcttgggaattactgtgttgctgttgctgatgcaaagaagtctctagaactcaatccaaataattccactgctatgctgagaaaaggaatatgtgaataccatgaaaaaaactatgctgctgccctagaaacttttacagaaggacaaaaattagatagtgcagatgctaatttcagtgtctggattaaaagatcctaattttcagttcaaggcatttgggttgcctctaaagtaccttccgtccttatcattgcccaactcaaaatgccaatgttgggaattgcagctgatgctggtgttcagattgtggtgtatacggccattatgagagaactggactttgtgtgtttgtgtgtgactgagtctgtctgggtcacccacactagagtgcagtagcacaatctcaactcactgcaacctccactgtctgggttcaggagaatcgcttgaacccaggagtcagaggttgcagtgagccaagatcgcaccactgcactccagtctaggctacagagcaagactctgtctc

SEQ ID NO: 726898 - DNA, 1203 bp, Homo sapiens
  misc_feature (473)..(473): n is a, c, g, or t
agcggagtcccgtgcaagagggaagaggaggagtgagaagactacacagctcagtcaaagccccaacagcttcttgtattctctccagcccggcgcatagcccgcgcagctcctgcaggcactccctccatcttctggacacacagcgccacgtatactctgtattggtatagacaggtaagtctatgagtggacctcctggtgagttagccttagtacatcttctcgtttcttttctgggaggatgccgcatcgccagaactggaatctgcgcggagctggatcgcctgtggtctgtcagatacattcaccctacataggctctcgaggatcatcgcgggcggtcggctcatagagtgattccgggcaagcaagctagctaatgctacgagcgcaagggagatagcaaccacgtggtagtcggtgatggctctctcgttcgagtagcaagcaccgttcatagctatctgaangaagcatccgcattatggctagtcatcccatgctcctttcgaaaactggtaccttggctactagaggggcccagagtactattttcgtgctgcacacattcatccgttgctctccgtgcgattgatactgtgcgccttccttcacagaccactcgtgtcgcattatgcacaggctcccgttgtgccccaatgtttagttctgtgttttggttcttccctagcatgcttgatttgggctagagatggctgaatttggaatcctgacgcagagatttgaaatatttcgttcattggtatatcctacttcaagtcctagtcattggatgctcacttcccagtttttctttcatggaacacaggccccttccaaagtttctccataaatggtataaaatgtgcttccaaagagcccagtgaggagttaacctggggtttccaccattggtgcatttacctgtcccttttttccacccccccgcaaataatgagttttaacacttccctaggaaaacagcgttaacgggctcttgaacagtggggcgcacaccacgcttgtaaagagcgttagctatatacggtaacattggcgaaaacactgggaaagaacctgtactttttaggaacctgcatatttactaaattcagggttcacaaggaaaattcacctttaaaagcacttttcgctcaagattttaccttgtcctcccagtgtgaacaggtgaaacacaga

SEQ ID NO: 726899 - DNA, 396 bp, Homo sapiens
  misc_feature (4)..(4): n is a, c, g, or t
  misc_feature (17)..(17): n is a, c, g, or t
  misc_feature (50)..(50): n is a, c, g, or t
  misc_feature (55)..(55): n is a, c, g, or t
cctntttccccaacccnagagggactggggccctgggatggttggtaaangaccntggggaccctttgctatttgtagagccagacctcacccaaatgccccctaaatgtttgtcttggactcttccttcctagacctttatttttaacttagtttctccaccaataaaatccatgcttaggggagatgtcacaagtattttataacctgctgacctctacattatcttggtcagagaccataccagatcctaggcccttaagctataggacccatctttgtggtcggtgtactttgagctgagtttcaatgtaattatgcctcttatacccgggattgtattacatcaggaaacttttccagaattgtactattttaatatatgtttacagtaaa

SEQ ID NO: 726900 - DNA, 317 bp, Homo sapiens
atcccacagttttcttgtggtcgtactggttcgctccatattctgcatgctggctcctgggagccttgtgtcaaggagctctcgccgcctcttccctctctgtgttggattccccctgagcctcgggaatcgtacctggccgcgtcctctcctctagatgtaacgctcgctcctcaatgcctctccattccaaaccacgcagcaggtgattcctcttgagtcaccactttgacttgccagctgttccctttgtggaagcctcaataagcttcttgtattatattttttaaacttggaggatgtggcatcgataaaca

SEQ ID NO: 726901 - DNA, 166 bp, Homo sapiens
tagaggatccggctactacccgctacggaaactggtggtccccgctcctggaggtcaccatattgatgccgaacttagtgcggaccccgatcgcatagcgcactacagcccagaactcctgggctcaagcgatcctcccacctcagcccaccgtagctgggtgttg

SEQ ID NO: 726902 - DNA, 212 bp, Homo sapiens
cgaagctcttgccaatcctcgaagggttgacggcgaccatagcgtacgacgaacggttttggttgtcgcgctcgacggcgcgctgcatggtgatacacggtagaagacgacgtcgacgagtgccgaaacggggaggatgtcggcgatcgaagcgagggccgagtactctccgagcgagtgaccggcgaagatgcagttgttttggtcgacgc

SEQ ID NO: 726903 - DNA, 1511 bp, Homo sapiens
gcgaagatatccccatagcagaacagtccagcaaggacatccctgtgacagcacagcccagtaaggcatgtacatgttggtacacaaggaagcaacaatcccacccaccctcgcattaagtggacatccggacacagaaacgcaccacgctccacccccagcacccccccacaccccccgcccccccccgcacgcccccccacctcccccgcaccacaccccacactcccaggagacatgaccagatgagaacagagaaagagtacactagcgaagagagagacacacaaaagaacacaaaaacaacgcgaacaacagaaaagacggagacgccaggcaaaagaacaagcaagcacagcagagctcgagaatagagtacgacaagagaaggcgccaggaagcataggacgaagctaaaagaaatcacaccaccggcgacacaccgatcaaacaacacctcagcgtaccagcatgaccatatcatggaaagcgggccgagagaaggatagaccacaagaaaggacgggagcaacacgccgaaaaaagaacaataggcgaacaaaagaactagagtagacaaaaacaaacgaacaacgcacgcacgagtcagtgccaaaccggagagagaagcaatggaacaagaaaacaaacaagcacaaagaagcaacaagtaaaagccgccaccaggacacaagcaccgaacaccaggaaagatcagaaacacgcaaaagatggcaaaacagaaacagacagtgacaacgacctccaaccaacagagccacacgagactgagaaaaagccaggccataggaagacacaacgagtgggacacaaaccacaaacggcagaaaagagaacacagcaagagcaaccatcacgcactacaaaacgaacagaagagaaaagataagcacacacaagcaactccgacacaagcaaaacaagaggaagatacacgaaagatgaatgccaaatgagaagagaatagaccacaagcgtatagagaaacagcaataaaaacaaagaaacaaacaagacaaaccgtgcaagcataccagctcgccgtcactactactaagagaaagaaaccagaaacacaaaacgaaaccaagacaaagatgcacccagaaccaggacacgcaacaaatagtcataacagcagctaaagcaatgagagtcgccacctaacaacagcgacgacaaagcaccaaacagcgagtagcactccacagagatagcagcggaccaaaccagtaagccgcttaacacagacagagcgcacacaacgaaagcaagagagagacatcacataagctcaccgacatgggcccataagcgcagcgcacaccgacagacacgaaatccgccagccaacagcagtagccggataaggcagcacacaaacacgccgagacaagtcgagccaagcaagacgatacacatatagcacgacgcccgcacgcgagcaacacagcagcaagaaccaaccataatgaaatcgcagaaagcag

SEQ ID NO: 726904 - DNA, 530 bp, Homo sapiens
  misc_feature (14)..(14): n is a, c, g, or t
  misc_feature (42)..(42): n is a, c, g, or t
  misc_feature (73)..(73): n is a, c, g, or t
  misc_feature (169)..(169): n is a, c, g, or t
  misc_feature (199)..(199): n is a, c, g, or t
  misc_feature (251)..(251): n is a, c, g, or t
cacctgaaatggcncactcctggtgtccctctctttagtccncctttgctcctaagtccgtttgatccaaccnagtaaacaaggagttctctagtgttatacttcttcagtatttatcatattctttatggtgaaattccgctatcttctacttattcttatacagacntatccgctaatgtgatttgaacttgctgantccaaatcttatacactttcagtcccatggcggtatatgtgctcgaaagagntctcataggctgtttctgaatagtatttgctgtatcccaaatgcgctgacttgaacttccacaggcctgagcagagaacacttgccactgtcggggaactcacatagactgagtccaacgagattcggtcttgttctaaaggattatagaccacaaggtacctgcaaaaacagctgcttcattattgggatctcaaaatatttttacttcttacatatacatatacatgtagatatacatatacatatatatttttgagatagcgtctcactctgtcac

SEQ ID NO: 726905 - DNA, 601 bp, Homo sapiens
agacattcctaaacaaaggggctgcttgggttgacgtattgtggggggtggggggtgaggacagctgcatttcatcctaggttcttttaaaaaatgttttaataacatgattatttgtaaaaactcccccgaaaaaacgattttaagagtgttttgggaagtgcagctggataaatgaaacacgttaatgtcactgttgtttgtgctttatttacattggcagtgagtgtcagaatctacctagagcacatcttgccacttttgtccacaggagtcactactaatcatcataactgatgtctagtgtgaaagtgaagcttggaatgtaaacagaggccgagtgtgtgttggcatgtgactggattcactcctgcatgttgctagaagggaatttggggctgtataggaaatagcaagaggtgatgaagacaccttttattatctatttattgccatgtcgctggtagtatttagttccacacacattgtatttcacaagatgagtctcatccgtcttcctttttcaactttctcctaccagtgaaaaaataagccagggcagttctgatgacttcacatttcattggtatttgtttttcat

SEQ ID NO: 726906 - DNA, 359 bp, Homo sapiens
ggttaaaggggttccgccccgcccggtgctccccatttgcctggggttgtgcgcaaaactggaaaacatggctgttataaatgaattttttttttggggagccaaagcccacttaaaaccccgggcccaatttttctgtttttaaaaaaagagggggcttggggattttcctggaaaattataggggcccagctaaaacctgaaagccctccccccccccaggggtttgcagtttttttgtggggaacccctgaaggatttgttgttgctttaaaaaaggccatgatccaattggggtttggaaaacaaaattttcttcccttaaaaaggaaaagttcattgctgtttaaacccccaca

SEQ ID NO: 726907 - DNA, 363 bp, Homo sapiens
  misc_feature (10)..(10): n is a, c, g, or t
  misc_feature (27)..(27): n is a, c, g, or t
  misc_feature (58)..(58): n is a, c, g, or t
  misc_feature (60)..(60): n is a, c, g, or t
  misc_feature (223)..(223): n is a, c, g, or t
  misc_feature (324)..(324): n is a, c, g, or t
tcaatggtgnatgcgatgcaaacttcngtacaggacacaataatattatacagctaangngtacagaagggcagggccggttatcccaggtgtggagttaacggcttattataaccaaccaatgacgtacaaaacgtatataaccttgtataggatagctgtaggggagaacaagcaatgcccatccagtgtggacatggtatggtttgacctggggtactanaattgaaaccctgcctagttagatgctccgcgtaaggagccctgctgtacattgctttattgtacctgctgtgagtgtgcgttggcagtggtgtccttaanatctcactgagatacaaagcgttgccatgaggataatgt

SEQ ID NO: 726908 - DNA, 119 bp, Homo sapiens
tattcctgaaaataaacactctagagttttagtgtctataggaggtcatttagtttgcctccgttgtaacgaacacctgattgaaaatctccatttctctagacctcctgagaaagtag

SEQ ID NO: 726909 - DNA, 204 bp, Homo sapiens
  misc_feature (24)..(24): n is a, c, g, or t
ccttaccccacagatgagttaatntactgaacagcaaggataaaaatggaatagtatctaagaatcaaaatgtattagccatcttttcctattgatatcgaaattgtagtcagaattgtctttattgactttatttcagtttttgtacataaagaaaaatcatggttcatatccatcatgaacgaaaaacttaaacaaggcaga

SEQ ID NO: 726910 - DNA, 354 bp, Homo sapiens
ccctagcataaaaagaaaaagaaaaaaattttaactgctttttcggaagaacaacaccaaaaaagaggtaaagccgaatttataaagtcccgagacttcctgggcaaagaatggacaatcagtttccttcctgggtcgatgtcgatgttgtctgggcaggaaaaccagtttttgtgtaaagaaggtaaatttttttgcacccttttgaaatttagttactaataagccctactgtaatttagcccagtttaactcccccctcatttaaacttcctttgattttttccgcccatgaaaaagggcatagtttgcctggagaatcccctcccgttcataaaaagaatgttgatggca

SEQ ID NO: 726911 - DNA, 166 bp, Homo sapiens
tccaaagaattcggcacgagcctgacctcaggtgatccacccgcctcggcctcccagagtgctgggattacaggcatgagccactgcggcttgcctaggtatatgtatggttttaagggatattggattcattctggccaaaattccttcttagaggacccattgt

SEQ ID NO: 726912 - DNA, 857 bp, Homo sapiens
aaattatcaaggaaatttttcatagacctagattaaactattctaaaattaatctgaaaccaaaaagtctgaatagtcaacgtagtcataagaacaaaaaagctggaggcaatttattactcaacttcaaagtatacaagtcttcagtaaacaaaatagcatagtactgatacaaatacagacacacagaccaataaaacagaattgagacccagaaataaagctgtacacctacagcaatgtgatgttcaacaaagttgacaaaaataagcaagggaaaagacttcgtattcaataaatggtgttaagacagctggctagccatatacagaagaatgaaactggactctttcctttcactgtatataaaaaataactcaagatgaattaaatacttaaatgtaagacctcaaaataggagaatcctagaagaaaacctgtgaaacagcattctggacatcagctgtgggaaagaatttatgacaaactcctcagaagaaaattgcaaaaaaaccaacaattcacaagtgggacctaattaaactaaggagctgttgcatagcaacagagtaaaccggaaatctacagaatgggagaaaaatattcacaaatggaatgcatggatccgacagaggtctaatatctcaaactattaaggaatttaaacaaatcagtaagcatataaaaatactccatttacaagtaggcaagactggagagaatctctcataagagactaagggtaaaaaaaatgtgcatctggtgggaaggtcaatcaggatacctaccaaagggttaaaaaaaaaaaattgggccgataatgggggcgaagggaagggggaaagggaaagttaagg

SEQ ID NO: 726913 - DNA, 894 bp, Homo sapiens
  misc_feature (26)..(26): n is a, c, g, or t
  misc_feature (81)..(81): n is a, c, g, or t
  misc_feature (112)..(112): n is a, c, g, or t
  misc_feature (200)..(200): n is a, c, g, or t
  misc_feature (217)..(217): n is a, c, g, or t
  misc_feature (223)..(224): n is a, c, g, or t
  misc_feature (227)..(227): n is a, c, g, or t
  misc_feature (239)..(239): n is a, c, g, or t
  misc_feature (247)..(247): n is a, c, g, or t
  misc_feature (250)..(250): n is a, c, g, or t
  misc_feature (257)..(257): n is a, c, g, or t
  misc_feature (260)..(260): n is a, c, g, or t
  misc_feature (280)..(280): n is a, c, g, or t
  misc_feature (294)..(294): n is a, c, g, or t
  misc_feature (297)..(298): n is a, c, g, or t
  misc_feature (301)..(302): n is a, c, g, or t
  misc_feature (304)..(304): n is a, c, g, or t
  misc_feature (331)..(331): n is a, c, g, or t
  misc_feature (335)..(335): n is a, c, g, or t
  misc_feature (339)..(339): n is a, c, g, or t
  misc_feature (345)..(345): n is a, c, g, or t
  misc_feature (352)..(352): n is a, c, g, or t
  misc_feature (356)..(357): n is a, c, g, or t
  misc_feature (370)..(370): n is a, c, g, or t
  misc_feature (381)..(381): n is a, c, g, or t
  misc_feature (385)..(385): n is a, c, g, or t
  misc_feature (389)..(389): n is a, c, g, or t
  misc_feature (404)..(404): n is a, c, g, or t
  misc_feature (447)..(447): n is a, c, g, or t
  misc_feature (610)..(610): n is a, c, g, or t
  misc_feature (612)..(612): n is a, c, g, or t
  misc_feature (626)..(626): n is a, c, g, or t
  misc_feature (635)..(635): n is a, c, g, or t
  misc_feature (639)..(639): n is a, c, g, or t
  misc_feature (647)..(647): n is a, c, g, or t
  misc_feature (651)..(651): n is a, c, g, or t
  misc_feature (659)..(659): n is a, c, g, or t
  misc_feature (664)..(664): n is a, c, g, or t
  misc_feature (671)..(671): n is a, c, g, or t
  misc_feature (688)..(689): n is a, c, g, or t
  misc_feature (709)..(709): n is a, c, g, or t
  misc_feature (711)..(712): n is a, c, g, or t
  misc_feature (721)..(721): n is a, c, g, or t
  misc_feature (725)..(725): n is a, c, g, or t
  misc_feature (789)..(789): n is a, c, g, or t
  misc_feature (821)..(821): n is a, c, g, or t
  misc_feature (826)..(826): n is a, c, g, or t
  misc_feature (846)..(846): n is a, c, g, or t
tttattcccaagtataattttaaaangctgtttaggacccaaacatatttaaacatctcttacacatacagaatttcagtntacaaatattccagaaggcattttcttaagnagtgaaccatgcagaatactgttgctaaacatcgtttctgccttcctcgtgttctcttggtagtttttactgtttggcttgatcctgntgggggatgtgcttacngggggnngcngggggggggggngggggggnggnggggggngtnggggggggcggggtgtgggnggtgggggggtgtnggnngtnngnggggggggggtgtgggtgtttttgggntggntttngggtgntttaggnagannagtctggagtgcngggggggatgnaganaggnggacttgggctcatntttcatcagttaagtagccaattatctaacttgtatttctggnaactgaaaaggaaagtttctagaaaccgtaagaacaatttaagttgggatttagaatagctgacacatttttagatgggactgaaatgagtaagaaaggttctccaagatgtatgattttaagtccttactccataaatcttcattaaacacatctcagtttngncctgactcactggngtgtcagcnctantcaccctncctnaatacgtnagctncaccttngcaggaaagggctcacnngttacagatagagcttgatnanntcatcgctnactnctgagggtgtcagcacgcccaggtctgtaaacagcagagtgattaaggaaggggcagtgtagtngacccacggatgctcctctttgaggtcttgtncagtntgcgcgaccttgagagtgtntgccttatacttaaacttatctgggacgtcttgctggtttagtggaag

SEQ ID NO: 726914 - DNA, 1753 bp, Homo sapiens
  misc_feature (308)..(308): n is a, c, g, or t
  misc_feature (329)..(329): n is a, c, g, or t
  misc_feature (379)..(379): n is a, c, g, or t
gcccggagcgccgtgccgggctgatccgagctcggctccgagtttcacggcttcgtgttaatgcctagccgccgatcggtcggtgcgtacccatgtgcagatactgcccattcatgcattatacttaactcgagggagctctgcatacatgaacaacgtatgagaaatgttgctctcgatcattctgagcaatgataccgaggaagatcggcgggacgggattgtgcctctcggagaggtggcacgtgaggagacgcataggtcgacgtgagcggacaaagaagcgagtaaacaattcgcatcgcacntctcgcttcacatctcgggtngcaacagactgcacgtactccgcctttgcaagagcaccgcgaagggggcngcactagggctcactcctgcacaacaagctggcggaggctcacattgctagccttgtgcgtggttcgcgcatgcactgtgagtccgattggaacacccaaattcaaaatcgtggcaagggggaaaaatcaaaacgtctttgggaccaaaataaaagggatacgtcacattaaccaaacagaaaaaagattcaccagtaccaaacaacagcaattcttcacccgagttggaagagatttcccataacttccgaacagagggggggagacgagcgttgtgggcaaaaaggaagaagccgaaggaatggtaagccaccaaaggaagacgacggaacggtttcggagcacaacccccctactctcctgaagtctgaaacaccacagcgcggggggggccacttcgggacaacgcgacacagccgaataaaaggtttcccacaaggaacaaacgcaaatgtgacccctatagggccccctattacaaacatctcgtggtcccaacaacaagtcaagaaccccttaaaactaccaaagaacgtatatccattattctcaacctaataggggacatggaaaaacacgcgacaccaaatttgcgacaaccattttcccccaagagaaaaagttggggcccaacatttagaggatttatgcagagcattagcattatcactattctggaggcgcgagcaacaacttattatacccctccgcgagtctaggaccacgcggcgagcgaaacacttatgggcacgcatctcgcgtcttaggaaacacccccccaccgcccaaagcgctttacaaccttctaactttctgcggacaccattccatcatcccttgcaccctttactacataaaacaagccggcggggaactctcacggcggaggattctatccgacacacggcagacaccaacactttcgggcgggaaccaccaccacaaaacgcctgggcttcctacaaaacgaccacacacaaccttcgggttcgggcggcgccccaaacaaccgctcatcagcttacctactcgactcagcgacgagcgaacaatactccccttataagatctccacaagcccactcactgtgagtctatcccacacattccccacaattcatacacaccccctttgtgcgggcccatcatctccatctggacccttcatgtgccgtaccacacttccccccaaaacccacactcaaaaaaccccaaacccccacaggcggcagaaccccctctttatcaaaagcgcaacaacccaaaaacgaacgtctgcggacagcgaaaaaccctctggaaacacttcgcgctttcccaaactttccacttctttggacaagcgacacccttatccactacctcccacagtc

SEQ ID NO: 726915 - DNA, 775 bp, Homo sapiens
  misc_feature (366)..(366): n is a, c, g, or t
tgcttagtacctgcgacttgtggtatgagactagctagataggaagatgtcctgagtgacatgctaatgtcggacaccctgcccccaacttacttccgccacagtagttcatgccagtactggtcattgaatagatatcgacctgtctgactacaaaggaaacatatgtggtgtacgtcatgcaccctcttgacttcgccttagtgtgccccacggcttcatcgattgctattcaactagatcacggctgtacaaattatatgtaaacttacaagtgtgcaaattgagttggtagtctctactcgttgagaagttgctcgacttcatgatctgtcgttattcagtaggcgtcacatgacgagcctnaatcaagacgaagaaaaggactggggacccatagatcatgcctaaggtatcagacccgagatcacacgccattcgtatcaacgatgattggggtcttgtagatatgcttgatgaaaggctatcttcgtccaggggccttctcaatcagtggcctgatatagggtgattcttcggcatgatcacttgttatattgagcctccctgttggcgcgctcgggtggttgctactgagcgactagtgcatggccttcctggtcgctgactaggcatggtagactctgtgctttcagtgcttgggtgatgcgatgtttagactctcctctgccgtgtgatgggtgcttctggtgtttctcccttctgttgtcttgcctgggtcttttacttcttaaaggagggggactgggatccc

SEQ ID NO: 726916 - DNA, 903 bp, Homo sapiens
  misc_feature (26)..(26): n is a, c, g, or t
  misc_feature (81)..(81): n is a, c, g, or t
  misc_feature (112)..(112): n is a, c, g, or t
  misc_feature (200)..(200): n is a, c, g, or t
  misc_feature (231)..(231): n is a, c, g, or t
  misc_feature (252)..(252): n is a, c, g, or t
  misc_feature (301)..(301): n is a, c, g, or t
  misc_feature (320)..(320): n is a, c, g, or t
  misc_feature (354)..(354): n is a, c, g, or t
  misc_feature (361)..(361): n is a, c, g, or t
  misc_feature (365)..(366): n is a, c, g, or t
  misc_feature (379)..(379): n is a, c, g, or t
  misc_feature (390)..(390): n is a, c, g, or t
  misc_feature (394)..(394): n is a, c, g, or t
  misc_feature (398)..(398): n is a, c, g, or t
  misc_feature (413)..(413): n is a, c, g, or t
  misc_feature (456)..(456): n is a, c, g, or t
  misc_feature (619)..(619): n is a, c, g, or t
  misc_feature (621)..(621): n is a, c, g, or t
  misc_feature (635)..(635): n is a, c, g, or t
  misc_feature (644)..(644): n is a, c, g, or t
  misc_feature (648)..(648): n is a, c, g, or t
  misc_feature (656)..(656): n is a, c, g, or t
  misc_feature (660)..(660): n is a, c, g, or t
  misc_feature (668)..(668): n is a, c, g, or t
  misc_feature (673)..(673): n is a, c, g, or t
  misc_feature (680)..(680): n is a, c, g, or t
  misc_feature (697)..(698): n is a, c, g, or t
  misc_feature (718)..(718): n is a, c, g, or t
  misc_feature (720)..(721): n is a, c, g, or t
  misc_feature (730)..(730): n is a, c, g, or t
  misc_feature (734)..(734): n is a, c, g, or t
  misc_feature (798)..(798): n is a, c, g, or t
  misc_feature (830)..(830): n is a, c, g, or t
  misc_feature (835)..(835): n is a, c, g, or t
  misc_feature (855)..(855): n is a, c, g, or t
tttattcccaagtataattttaaaangctgtttaggacccaaacatatttaaacatctcttacacatacagaatttcagtntacaaatattccagaaggcattttcttaagnagtgaaccatgcagaatactgttgctaaacatcgtttctgccttcctcgtgttctcttggtagtttttactgtttggcttgatcctgntgggggatgtgcttaccactggaagccagangcaagattcggcaagtgtttnaagcctctaaacaaggcaccgcgtgttacgtcctgaccaagctgtgggncgtttgtggcaggaggggngatggctgcatatttcgccatgcatcttgcgtgntttaggnagannagtctggagtgcngggggggatgnaganaggnggacttgggctcatntttcatcagttaagtagccaattatctaacttgtatttctggnaactgaaaaggaaagtttctagaaaccgtaagaacaatttaagttgggatttagaatagctgacacatttttagatgggactgaaatgagtaagaaaggttctccaagatgtatgattttaagtccttactccataaatcttcattaaacacatctcagtttngncctgactcactggngtgtcagcnctantcaccctncctnaatacgtnagctncaccttngcaggaaagggctcacnngttacagatagagcttgatnanntcatcgctnactnctgagggtgtcagcacgcccaggtctgtaaacagcagagtgattaaggaaggggcagtgtagtngacccacggatgctcctctttgaggtcttgtncagtntgcgcgaccttgagagtgtntgccttatacttaaacttatctgggacgtcttgctggtttagtggaag

SEQ ID NO: 726917 - DNA, 197 bp, Homo sapiens
cgatgttgaggtgatctaaggatccccaaatctgatctcgtgatctgctgcctcaaactcctgtactcgtgatctgcccacctaggactccaaaaatgctgggattacaagtgtgagccaccacgcctggcctactgtgatcttttttttttttttttttttttttttttttttttttttttttttttttttttttt

SEQ ID NO: 726918 - DNA, 379 bp, Homo sapiens
  misc_feature (26)..(26): n is a, c, g, or t
  misc_feature (31)..(31): n is a, c, g, or t
  misc_feature (191)..(191): n is a, c, g, or t
  misc_feature (195)..(195): n is a, c, g, or t
  misc_feature (343)..(343): n is a, c, g, or t
  misc_feature (362)..(362): n is a, c, g, or t
  misc_feature (372)..(372): n is a, c, g, or t
  misc_feature (377)..(377): n is a, c, g, or t
gtaattaagaagaccctacctatttncccancccagcaaaccttttttttttgcctttttaaaaagattgatgcatccccacatgttatgggggcaccatatgatacctttgataaattgatataatgtgtaaagttcgaatcatttgagaggccgaggtgggtggatcacttgatgtcaggagttggagnccanccctggtcagcatggcgagatcctggctctactaaaaatacaaaaaaattagctgagcttggtggcgggcctctaattccagctactcgggaggctgaggcatgacaatcacttgaactcaggaggcggaggttgcaatgggccaagntcatgccactgcactccancctgggtaantggangt

SEQ ID NO: 726919 - DNA, 1284 bp, Homo sapiens
ggtggcacgcacctgtagtcccagctacttgggagcctgaggcaggagaatcgcttgaacctgggaagtggaggttgagtgagccgggaccgtgccattgtactccagcctgggtgacagagcgagattcctgtctcaaaaaaaaaaaaaaaaagcgcccaccttgaaagccttgtcttctttctccactttggtgggcccttctccagggggatatatcgagagcattgtggtttttctcataggtgcctttttctcctttattccaagggggtggcttcgtgaggtgggtgttttttttttttgttaaaattgcggcttgtggtttctaacaaatctagtgtctaaaagggcaagtcccaagaagcctatttccaagccaaattgtggtttcctccttactctcgtgcgtgcatacattttttctctctccccctctcgcgggcagagggggaacccagggtttagaacgcaaagtggagaaacacacgcaggagatgtgtgagaaagcggagagaggcggggttccacacacggtgcatgtggttaccataaagcgccaaggggagggcgttttaaagacgctctcccaaggctattatagcgggggcgttgtgagagaacgccccccttgggggggcgttcccagcgggaaaaccttgtgttgtgctccaagtggggttgcaaagttgttgaggttgttagtgggggcgccaacccggcgggggcacaagaagggagaacagcgttgatgaacccgggcccaaaggtattcttcacgagaagatatcccccagtggtggggatctcctgggcggtctcacacaggggggggacgagcctaagaaacaccgctctgtgttcctctacaaccggagtatacactaggggggagggttttgttggtagggcacccccggggacccccgccttcccctattattttgtcgagccccccgttggagaaaacacccagaagatagggtccgccacaacaacaaacggagcaactaccgggtgacgaggaaggaacaacttattcatgggggaagaaccgggacacgcctaccagagtatttgagtaacacatggttctaccaatataattcgccataatcggcggggcggagtaagacacagcgggacaagtagatacctccacatcttttaacacagctgtggtagtgtcgccccataaaaaattggggggcccagtggtctttaccaaaccccgtggttgtcccccccgtgacacacgtgttccacaggtggtacaggttttag

SEQ ID NO: 726920 - DNA, 137 bp, Homo sapiens
ctacgcgactgcactctatcctggcctacagagcgagaccctgtgtcagaaaagaaagaaagaaaccaatcctgatatcctttagctatttactctctctcactgaagcatcttgcgcgtggccagcaagggggtac

SEQ ID NO: 726921 - DNA, 285 bp, Homo sapiens
  misc_feature (257)..(257): n is a, c, g, or t
attccgggtcatggcgccccgaaccctcattccttctgcttttggggggccctggccctaaacccagaccctgggcccgctcccactccatgaggccaccgccgcggaggtccaagaggggagcccgggggagcccctgggttggagcaggaggggccccgagatattgggacccggaagaaccaaaaagtacaagggcccaggcacaagtttacccggtaaacctttggaaacttgggggctatttaaaacaaaangacaggggggggttttaaaaacctccca

SEQ ID NO: 726922 - DNA, 779 bp, Homo sapiens
  misc_feature (553)..(553): n is a, c, g, or t
  misc_feature (779)..(779): n is a, c, g, or t
agcgtgtgggcaggcggatcacaagatcaggagatcgagaccatcccggctaacatggtgaaaccctgtctctactaaaaaatacaaaaaattagctgggcgtggcggcgggcacctgtagtcccagctactcaggaggcagagccaggagaatggcgtgaacccaggaggcggagcttatagtgagccaagatggcgccactgcactccagcctgggcgacagagcgagactccctctcaaaaaacaacagcaatgcctgaccctcagggtctagccagcgctgggctgtgactttgtgacttgcagctggtgaactggtctcctgctcagtgcccaactcagggcacacggttaatgtcgagcccacacagaggccggggcccagggactgggtcctcagcttcctggggtcactggggagcccacccacctggagctgccacctcggtgggccttgggggacggggcgctccctcctggtgacaggcagcctctaggtctgcagggacccagccccatcctaaggcagccaacttgtggccagtgccctngaatttcaacacccaaacagaccaacctggcttggggttggcttgggcccgggggggcaaccagcaagtgggccccaaacatacccccttttggggaattggttgggggggacctttccttggaccgggaaagggggaaaaccaaggggtttaaaccccgggggtcccccttttcccccaaaggggccaaaaacccctttgggtaaaacccgggggggccccccgn

SEQ ID NO: 726923 - DNA, 282 bp, Homo sapiens
gaagcacacttctaatacgaaacactgaaatacatgtgagctctacgtgcatttaagaaggtaagatcgccctgtctgggaagtgaggagcacctctgcccggcccctgcattgtctgggatgcgaggagcgcctctgcccagccgctgtgcaaccctccaagtgtgaagtgacagccttgtgtgtgatctttctgccctccccaagtttgcattttcgacattaaagtttactttttaattaagttctaaattggagaatatacatttcaagtacaaaaca

SEQ ID NO: 726924 - DNA, 126 bp, Homo sapiens
ctaaatcagctcggtaccggaaatccttggcttcgcgcagcgcgagtacgagcagatacgccgcaggccggttggtcggaacaaccgccttcactgtggtggcagagtgtctgccaatgtacgcag

SEQ ID NO: 726925 - DNA, 322 bp, Homo sapiens
gagaccggtggcagtcggccagcccccttctccacggtaaccaggtgcgaccggaaaggccgtgatcaaaaaggcggacaggtcggaagagatgcaacaggactcgggggagtgcgctactcaggcgcgggagaaatacaacatagagaaggacatggcggctcatatcaagaaggaattggacaagaagtacaatcccaccgggcatggcatcggggggaggaacttcggtagtgatgtgacacatgaaaccaaacacttcatctacttctaccggggccaagtggccattcttcggttcaaatcgggtaagggatgcggt

SEQ ID NO: 726926 - DNA, 218 bp, Homo sapiens
  misc_feature (45)..(45): n is a, c, g, or t
tcactctagagatcccctgtcgctgggattacaggtgtgagccancgcgcggcgctgttgtatttaagatgcaaggttaaacaacctgagagtgtttaaaaactgtatttgttgtttatacttcacttcatcctgaaagactattcaaggtagcttacagagatgtggagaagccaaaaaaaaagagagaaaactagaacaaaagtgaaataagattg

SEQ ID NO: 726927 - DNA, 502 bp, Homo sapiens
ggcacgaggagagcagagcgctgtctgagccgagcgctgtgctctgcgccgaaccctgtggcatgtagagaggtgagaacacttggcgcggggcacgctgtatatcggagccaggccgaggacctgagaggtggaaggcttcttttccgtgagcatgctttcgggagaacgtgtggggcctgagctgatgcacgccgtcaaggaagtgtgtcaagggtgtcgctgtgccagaggagtttcaggagcaccacctgagtgaagtgcacaaaggtgccattaatgggagtataccccgaaggagtataagggggagctaggctcctatgagatgccgctgaagcgtaagttggacttaatgccaacgtaatccatgtgaagtgacttcctggtatatgaattggacaacaattatacctgggagcatttagagccacacaagggagtacagattttgggacatggaagcaagggggtgaatggagtttaagtggacacgagccag

SEQ ID NO: 726928 - DNA, 251 bp, Homo sapiens
tgagatcaggccactgcactccagcctgggcgacagaaggagacaccatttccaaaaaaaaggactgcagaaaccgtggcgctcttttacaaagtggctgtatcattcagcattcccatcagtaacgtatgggggatccagttgctccacatctgtgccagcatttaacattatctgggtgattgggtttggtgttacttttagtcattctaatagatgtgcagtgggaaaatcacgatggggcttttttt

SEQ ID NO: 726929 - DNA, 393 bp, Homo sapiens
ttgctgttcttgtgtacactgtatcagcaatgggcacagtgcgtgtaatccactacttgggatgctgaggaggaggatcgcttgaacccaggatgcggaggttgcagtgagctgagatcgtgccactgacatccaacctgggcaacaatgagcaaaattccgtccaaaaaaaaaagctgggtggagtggctcatgcctgcaatcccagcattttgggaggccaagggcaaggtggatcaccctgagatcagggagttcgagaccagcctaaacaacatggagaaaacccttgtctctactaaaaatacaaaattagccgggcatgggggcacatgcttgtaatctagctacttgggaggtgaagacaggagaatcgcttgaacccgggagaac

SEQ ID NO: 726930 - DNA, 165 bp, Homo sapiens
aaaatgaccaaaataactgtcctgtgaaaccctgtttacctcaatatctttggatggttttttttctctaaatagtgctgccataaggagtcacctcctactcttgattcaactgcaccagcctaacccttgccgtcacgcttacctcaaatggacccttagtgc

SEQ ID NO: 726931 - DNA, 137 bp, Homo sapiens
  misc_feature (88)..(88): n is a, c, g, or t
  misc_feature (98)..(98): n is a, c, g, or t
ctggagcaactaatattaaagcaaaaggagccgaccagtctttctccattagttactggtaatcaatgccatggtgattatatttctnggattctctntgtcatccaataacacctgacatcgacgctacagcagat

SEQ ID NO: 726932 - DNA, 231 bp, Homo sapiens
taaaaaaaaaaagcttcatcacagaatacttcccagttcctcttttatacttttttgaaaaattactttttaggacctttgggtatgatatgcttaaaattatttatccatttagtggcaaaagtgatacaagtagcttcttgattgaacatcatttacctcagatttttcacccagacagttacgtttttttatgcagctctcaaccccgaagctgggtggtgggggatc

SEQ ID NO: 726933 - DNA, 954 bp, Homo sapiens
  misc_feature (48)..(48): n is a, c, g, or t
  misc_feature (619)..(619): n is a, c, g, or t
  misc_feature (621)..(621): n is a, c, g, or t
  misc_feature (623)..(623): n is a, c, g, or t
  misc_feature (626)..(626): n is a, c, g, or t
  misc_feature (648)..(648): n is a, c, g, or t
  misc_feature (660)..(660): n is a, c, g, or t
  misc_feature (662)..(662): n is a, c, g, or t
  misc_feature (665)..(666): n is a, c, g, or t
  misc_feature (670)..(670): n is a, c, g, or t
  misc_feature (672)..(673): n is a, c, g, or t
  misc_feature (691)..(691): n is a, c, g, or t
  misc_feature (693)..(693): n is a, c, g, or t
  misc_feature (702)..(702): n is a, c, g, or t
  misc_feature (709)..(709): n is a, c, g, or t
  misc_feature (711)..(711): n is a, c, g, or t
  misc_feature (721)..(721): n is a, c, g, or t
  misc_feature (725)..(725): n is a, c, g, or t
  misc_feature (727)..(728): n is a, c, g, or t
  misc_feature (732)..(732): n is a, c, g, or t
  misc_feature (755)..(755): n is a, c, g, or t
  misc_feature (764)..(764): n is a, c, g, or t
  misc_feature (772)..(772): n is a, c, g, or t
  misc_feature (782)..(782): n is a, c, g, or t
  misc_feature (788)..(789): n is a, c, g, or t
  misc_feature (797)..(797): n is a, c, g, or t
  misc_feature (802)..(802): n is a, c, g, or t
  misc_feature (817)..(818): n is a, c, g, or t
  misc_feature (822)..(824): n is a, c, g, or t
  misc_feature (835)..(835): n is a, c, g, or t
  misc_feature (844)..(844): n is a, c, g, or t
  misc_feature (846)..(846): n is a, c, g, or t
  misc_feature (848)..(849): n is a, c, g, or t
  misc_feature (869)..(869): n is a, c, g, or t
  misc_feature (877)..(877): n is a, c, g, or t
  misc_feature (953)..(953): n is a, c, g, or t
aactcagcaatatgcgatacagcggggtagaggggagatgtaaacagncgggaggggacagcaccctgaccccccaagagaacacagggagccaatgggaatcttatttggcagctaaatacaaactggggattggaggaagaaaggaggggtcacaggggccctgggctcccccacccaagacccctggaggaaggggtcaattccacggtgtaaacaaaagctaataaataaatagaggcttcctctgggtcagggcgggatcagctaagcagcatcccccctccctgggccaagctgctctggggagttaagggtggaaggcactagggagagagggatcccctggcccctctgtagtgtaggagggtccctgccccaatggctgagatggagggcaggaggagcccaaggcacatgacagggctgggggagggacttataacggagggcacagggtgaactctgcacccgagccaagaggtgcagaatggacctgcatctatctgtccctttcaccctctgttcctgccccagaaatgcagggcccagcctgcccccaccttgacctggcacaaggacggggcacagaggctagcacacaccctgcaggtgcatnananagnattaggcaccaagggtaggagnaagaaggtgggntnagnncttntnntttgtcccctttttggtntntagtgttantgtttgntntaagagagcnaagnanntggnagaggaaggggctgtggaatggnagggtcttnctcttgcnctgggaagtntagganncatggggnagtgntgagattttagagtnnaaannnaggataataantttgaactntntnntggtgggagcagggcaggcncccgggantggcgagggagcaggttagataaggaaggggatgaaaaaagaggaaaaaatagaaaatttggcaaaaaaaaggagnt

SEQ ID NO: 726934 - DNA, 429 bp, Homo sapiens
  misc_feature (4)..(4): n is a, c, g, or t
  misc_feature (14)..(14): n is a, c, g, or t
  misc_feature (429)..(429): n is a, c, g, or t
aaanaaccggtgcnaacatagtgaaccccaatctcaaaaaaaaaaaaaaaaagaatttatttcctgaggaaagttaacaatggattaggtcctactcgatactgacatgcctagcttggctgtctcataagacatatggcagccagcccaggcacggtggctcacacctgtaatcccagcattttgagagaccaaggtgggcggatcacaaggtcaggagatcgagaccatccctggctaatacggtgaaaacctgtctctactaaaaatacaaaaaattagccaggcgtggtgcgggcgcctgtagtcccagccactcgggaggctgaggcaggaaaatggcgtgaacccaggaggcggagcttgcagtgagcagagatggcaccactgcactccagcccaggcgacagaatgagactccgcctcaan

SEQ ID NO: 726935 - DNA, 293 bp, Homo sapiens
gggtttctccaccggattaatttctcccttcaaattctgggctcggttttttctctggtagccgggtcctcgggtgtgaacaggagcagataacaaatagcacctagctgggtgacaacccataggaggtatgcctataaaatgccagggaccacagaggtgtcacggtgaggattgacactatgggcagggatgtggatgattggtattgtgacctacggattgagaatggctccagagtggggtacggaccagccttctctaggtgtccagacaccggtctgagtttctgg

SEQ ID NO: 726936 - DNA, 412 bp, Homo sapiens
  misc_feature (10)..(10): n is a, c, g, or t
  misc_feature (81)..(81): n is a, c, g, or t
  misc_feature (174)..(174): n is a, c, g, or t
  misc_feature (311)..(311): n is a, c, g, or t
caaactcctnagcaaggtgtaggtctgaacccagctcacttttcccaactcatctctttacacttccctgcttcccctggnctccagcacatgtgatgtgcaggtctccagatctaccatgtttatttcacttcattgcatgtgctgttgctcctgctgcttaaaatacctttncttctctttttcactgcaaacaactcctactcagacttccaagcacaagtgaaatataacttcctctgtgaagtcttccctaacttcatctgctcactccatccactttgctgctaaaatgttttcatatttacagntatttctctgaacagtacttactgcatgggcctgtaatcaaatgttacatgcctgttgcagtctgctgcaagcctgggtgagggccggggccatatgggat

SEQ ID NO: 726937 - DNA, 189 bp, Homo sapiens
caggctacccggctgtggtcctggctcttgtgtaagaattctgagcgcaaataaccatgcctacggaaggcccggagtcgttctttcgtccgggattgcggtctcgggcgatcactcggaccatgactcacgcaggacagacgcacatgtcgtttctactgacgaccttatgccgagactacggtacac

SEQ ID NO: 726938 - DNA, 164 bp, Homo sapiens
ctggtggccgggggcgctgtgcgctcggtttccttcttctgttggcggcgggtgcgtggcgcttgggtattggggtttaggttttattttgactctgcctctgctttttttttttttttttttttttttttttttttttttttttttttttttttttttttttt

SEQ ID NO: 726939 - DNA, 961 bp, Homo sapiens
  misc_feature (10)..(10): n is a, c, g, or t
  misc_feature (67)..(67): n is a, c, g, or t
  misc_feature (302)..(302): n is a, c, g, or t
  misc_feature (310)..(310): n is a, c, g, or t
  misc_feature (319)..(319): n is a, c, g, or t
  misc_feature (366)..(366): n is a, c, g, or t
  misc_feature (373)..(373): n is a, c, g, or t
  misc_feature (388)..(388): n is a, c, g, or t
  misc_feature (393)..(394): n is a, c, g, or t
  misc_feature (399)..(399): n is a, c, g, or t
  misc_feature (408)..(408): n is a, c, g, or t
  misc_feature (411)..(411): n is a, c, g, or t
  misc_feature (426)..(426): n is a, c, g, or t
  misc_feature (440)..(440): n is a, c, g, or t
  misc_feature (446)..(446): n is a, c, g, or t
  misc_feature (449)..(450): n is a, c, g, or t
  misc_feature (454)..(454): n is a, c, g, or t
  misc_feature (457)..(457): n is a, c, g, or t
  misc_feature (461)..(461): n is a, c, g, or t
  misc_feature (464)..(464): n is a, c, g, or t
  misc_feature (473)..(473): n is a, c, g, or t
  misc_feature (499)..(499): n is a, c, g, or t
  misc_feature (507)..(507): n is a, c, g, or t
  misc_feature (512)..(512): n is a, c, g, or t
  misc_feature (519)..(519): n is a, c, g, or t
  misc_feature (523)..(523): n is a, c, g, or t
  misc_feature (526)..(527): n is a, c, g, or t
  misc_feature (533)..(533): n is a, c, g, or t
  misc_feature (537)..(538): n is a, c, g, or t
  misc_feature (540)..(543): n is a, c, g, or t
  misc_feature (548)..(549): n is a, c, g, or t
  misc_feature (552)..(552): n is a, c, g, or t
  misc_feature (564)..(564): n is a, c, g, or t
  misc_feature (566)..(566): n is a, c, g, or t
  misc_feature (568)..(568): n is a, c, g, or t
  misc_feature (571)..(571): n is a, c, g, or t
  misc_feature (573)..(573): n is a, c, g, or t
  misc_feature (578)..(579): n is a, c, g, or t
  misc_feature (584)..(584): n is a, c, g, or t
  misc_feature (589)..(589): n is a, c, g, or t
  misc_feature (593)..(593): n is a, c, g, or t
  misc_feature (595)..(595): n is a, c, g, or t
  misc_feature (604)..(604): n is a, c, g, or t
  misc_feature (606)..(606): n is a, c, g, or t
  misc_feature (623)..(623): n is a, c, g, or t
  misc_feature (626)..(626): n is a, c, g, or t
  misc_feature (630)..(630): n is a, c, g, or t
  misc_feature (637)..(639): n is a, c, g, or t
  misc_feature (642)..(642): n is a, c, g, or t
  misc_feature (649)..(649): n is a, c, g, or t
  misc_feature (651)..(651): n is a, c, g, or t
  misc_feature (658)..(658): n is a, c, g, or t
  misc_feature (662)..(662): n is a, c, g, or t
  misc_feature (678)..(678): n is a, c, g, or t
  misc_feature (695)..(695): n is a, c, g, or t
  misc_feature (697)..(697): n is a, c, g, or t
  misc_feature (703)..(703): n is a, c, g, or t
  misc_feature (714)..(714): n is a, c, g, or t
  misc_feature (717)..(717): n is a, c, g, or t
  misc_feature (719)..(720): n is a, c, g, or t
  misc_feature (723)..(723): n is a, c, g, or t
  misc_feature (770)..(771): n is a, c, g, or t
  misc_feature (825)..(825): n is a, c, g, or t
  misc_feature (853)..(853): n is a, c, g, or t
  misc_feature (896)..(896): n is a, c, g, or t
  misc_feature (899)..(899): n is a, c, g, or t
ggttagtagntagggctagtaggtaggttcgtaggtagggttagtaggtagggctagtaggtagggntcgtaggtagggttagtaggtagggctagtaggtagggttcgtaggtagggttcgtaggtagggttagtaggtagggttcgtaggtagggttagtaggtagggttcgtaggtagggctagtaggtagggctagtaggtagggttagtaggtagggctagtaggtagggctagtaggtagggctagtaggtaggtctagtaggtagggcccgtaggtagggcgcgtagggagggcncgtaggcngggccagcngcgcgtctgcgccgcccccacctggcgccccccgctcccaaaccacnagggccngaaggtggcccccgntctcnntctcncttctctgngcnccagatggcgatttngctgacagctgccnagaaangcnncacncancagnccncatggcccngagatgtttatagaactgtttgaatngcagcccnccccngcccccncccnggnngaaganctgnncnnnntaagnngantcgggagtggcncncnttnanacccnnagacngtagngcancntgaagagcncnaagcacacggccgcacnaangctnacagggnnnccncccgagnancccatcncacnccccttgtaagggaantctggggcagctatggntngagtangccgtttgcancgngnntcnacccttagtaccttgccacccttttaaaacgctgctgtcatttcccnnttcttagtactaatgattctttgattctccctctattatgtcttaattcacttnccttcctaaatttgttatttgcatatcnaattctgtaaatgttttgtaaacatattacctcacttggtaanacnatactgatagtctttaaagatttttttattgttatccataataaatgtgaactatttaaaga

SEQ ID NO: 726940 - DNA, 1193 bp, Homo sapiens
  misc_feature (177)..(177): n is a, c, g, or t
  misc_feature (194)..(194): n is a, c, g, or t
  misc_feature (196)..(196): n is a, c, g, or t
  misc_feature (209)..(209): n is a, c, g, or t
  misc_feature (213)..(213): n is a, c, g, or t
  misc_feature (218)..(219): n is a, c, g, or t
  misc_feature (221)..(221): n is a, c, g, or t
  misc_feature (224)..(224): n is a, c, g, or t
  misc_feature (229)..(229): n is a, c, g, or t
  misc_feature (231)..(231): n is a, c, g, or t
  misc_feature (256)..(256): n is a, c, g, or t
  misc_feature (300)..(300): n is a, c, g, or t
  misc_feature (306)..(306): n is a, c, g, or t
  misc_feature (311)..(311): n is a, c, g, or t
  misc_feature (344)..(344): n is a, c, g, or t
  misc_feature (363)..(363): n is a, c, g, or t
  misc_feature (396)..(396): n is a, c, g, or t
  misc_feature (459)..(459): n is a, c, g, or t
  misc_feature (471)..(471): n is a, c, g, or t
  misc_feature (568)..(568): n is a, c, g, or t
  misc_feature (769)..(769): n is a, c, g, or t
  misc_feature (784)..(784): n is a, c, g, or t
  misc_feature (826)..(826): n is a, c, g, or t
  misc_feature (997)..(997): n is a, c, g, or t
  misc_feature (1002)..(1002): n is a, c, g, or t
  misc_feature (1012)..(1012): n is a, c, g, or t
  misc_feature (1016)..(1016): n is a, c, g, or t
  misc_feature (1022)..(1022): n is a, c, g, or t
  misc_feature (1035)..(1035): n is a, c, g, or t
  misc_feature (1038)..(1038): n is a, c, g, or t
  misc_feature (1047)..(1047): n is a, c, g, or t
  misc_feature (1050)..(1050): n is a, c, g, or t
  misc_feature (1087)..(1087): n is a, c, g, or t
gggccaactgaaccataggcatatccgctacacccgctgcaaggatgagtgggtgctggtgtcagctcacgcataaagcggccctggcagggtcaagtggagccccaggttttgaagacagtgccccgccatgccctttcaaccctttgtgttctggggccatccgagccaacgganaggtgaatccccagtangntagcaccttcctntttnacaannanttnccagntntgcagcctgatgcccccagtccagnacccagtgatcatccccttttccaagcaaagtctgctcgagaantctgtnaggtnttgtgcttccacccctgttcgggtgtaacgctncaactcttgtcggtccctnagatccgcgctgttgttaatgcatgggcctaantaacagaggagctgggtgcccagtacccttgggtgcagatctttgaaaacaaaggtgccatgntgggctgttctnacccccaccccaactgccaggtatgggccagcagtttcctgccagatattgcccagcgtgaggagcgatctcagcaggcctataagagtcagcatgnagagcccctgctaatggagtacagccgccaggagctactcaggtaggtacctctggtcctaaccagtgaggactggttaggactggtccccttctgggccacatggcccttccagacactgctgctgccccgtcggcatgtgcggcggctacctgcgcttacccctgctgagcgtgatgttctagcctccctcatgtagangctcttgaccaagtnttacaacctctttgagacgtcctttccctactccatgtgctngcttggtgctcccacaggttcagaggctggggcctactggaaccatttgcagctgcacgctcattactaccctccgctcctgcgctctgccactgtccggaaattcatggttggctacgaaatgcttgctcaggctcagaggggcctcacccctgggcatgctgcagaganactangggcattccngagnttcatnaccaccggggcanaangacaggganacngcaaccatcgcctgaccacgccgaccacagggccttnaatccttttttgttttcaacagtcttgctgaattaagcagaaagggccttgaatcctggcctggaatttgggcagatatagcattaataaaactgtgcatctcaaa

SEQ ID NO: 726941 - DNA, 194 bp, Homo sapiens
caacgagggtcctcagcttgatccagggaacccttggttaactatactgggatcagcgcaaagtaggggtgtggggttttggttggtttttttggttttggtttggttttttggctttttggtttttttttttttttttttttttttttttttttttttttttttttttttttttttttttttttttttttttt

SEQ ID NO: 726942 - DNA, 487 bp, Homo sapiens
  misc_feature (177)..(177): n is a, c, g, or t
  misc_feature (194)..(194): n is a, c, g, or t
  misc_feature (196)..(196): n is a, c, g, or t
  misc_feature (209)..(209): n is a, c, g, or t
  misc_feature (213)..(213): n is a, c, g, or t
  misc_feature (218)..(219): n is a, c, g, or t
  misc_feature (221)..(221): n is a, c, g, or t
  misc_feature (224)..(224): n is a, c, g, or t
  misc_feature (229)..(229): n is a, c, g, or t
  misc_feature (231)..(231): n is a, c, g, or t
  misc_feature (256)..(256): n is a, c, g, or t
  misc_feature (291)..(291): n is a, c, g, or t
  misc_feature (296)..(296): n is a, c, g, or t
  misc_feature (306)..(306): n is a, c, g, or t
  misc_feature (310)..(310): n is a, c, g, or t
  misc_feature (316)..(316): n is a, c, g, or t
  misc_feature (329)..(329): n is a, c, g, or t
  misc_feature (332)..(332): n is a, c, g, or t
  misc_feature (341)..(341): n is a, c, g, or t
  misc_feature (344)..(344): n is a, c, g, or t
  misc_feature (381)..(381): n is a, c, g, or t
gggccaactgaaccataggcatatccgctacacccgctgcaaggatgagtgggtgctggtgtcagctcacgcataaagcggccctggcagggtcaagtggagccccaggttttgaagacagtgccccgccatgccctttcaaccctttgtgttctggggccatccgagccaacgganaggtgaatccccagtangntagcaccttcctntttnacaannanttnccagntntgcagcctgatgcccccagtccagnacccagtgatcatccccttttccagctgcagaganactangggcattccngagnttcatnaccaccggggcanaangacaggganacngcaaccatcgcctgaccacgccgaccacagggccttnaatccttttttgttttcaacagtcttgctgaattaagcagaaagggccttgaatcctggcctggaatttgggcagatatagcattaataaaactgtgcatctcaaa

SEQ ID NO: 726943 - DNA, 721 bp, Homo sapiens
gcagagggtggtattatatgaagtgtgtgtagtttggagtgaataatgttttattttatgaataaaggttaagaatataataaatggtgggaggatttaaaagatgagtggggctaaagtaaaaatattatttataataaaaaaattttgaaaaaaaattatataagtaataaatttggtaagtgataatgttgttgattttttttaagaaagataggtatatagatttattagaatgaagttaattaaatattgaaataatgtaataatgtattaaataataataataaatttattaattttattaattaaatgatgatatattaagtattagtaaatatatattttaatattgagaatgttaaagtatgtatgaggtagattagtgaatcaatataagataatatgaagaagaaatataaaaatatggtgaatattattttattaaatatttaattttattaaattatagtaatatttttatttataagattaaattataagtagttttgaaatactatagatattttaaaaatgttagtttatattaaattttagtttattaaaaaaaaatatgaggattatataaggtttattgttataaataatatatatataatgatagtatagtttaatggaatcttatagtatttctagaataattttatattagagatatatattaatagaattatatttttttagaatgatgatttaaata

SEQ ID NO: 726944 - DNA, 1335 bp, Homo sapiens
  misc_feature (179)..(179): n is a, c, g, or t
acttgcaccgaagcatcactcgagaccccaaacctccagggctgaggcccaggccagacgcgccgagatgtgatgacgaagagaagaatgaaacggagtcccaatgccctggcctggtctccaggccaggtccaaggcgcccagggcagcactacggagggtccctgtggcctaccagncgcacaggcggttacctatgggcctaggagcttacctacattctgcgcatcctcgcaagcagcgggtccaagttcaagacgacgtagagcaaaagacgaatgtgcctgcctcacgtcgctgagcttggagggatgcgaaagcggcatctgctggctcgcctcctgcagctacttccttccgtgaccggagggtgactgattgtcgtactgatgcatggaaggggaggacgtctctgagaccatgcgtcaacctgagtttccagcgtctgtgccgggctgacatgggccgtatcgggaagtggaatgcgtccgtgttgatgcagtctggagcacgtttcggggagatgcaggacgaagactaggcggggtgaacttcagtgctggagtgtgtgctggcggagcgacggagggacgaatgaatagtgaagaggatgggagtcactgaggggcatgacagaggagcgagaagaagacaattggctgaccgtaatctggagcagctgcttatcaatctggcaagagctcagtgattctatccagaagctggatctgtacgaagaacgccgagcctgaggagcatgtcctgatgcgtagcgtccaacgcaggcccaaactgcacctctgcattctcttcaaacctggtgactctttacatgactcgggcgcgtgttctgcgtgccccaggtgtatggggaggggggcgttaatggaatttatcctatagaagtactgaacactgtaagacccgggatttcggggggcggaacacgtgccagttgagggcacaaggtacaggttgttcccgacacactttcttgacaagctggaaaacggacggccactaaggaggtatacaaggtcgagaaccacggacgacttcgagttgcatgtcaagaagagaccgaccgagcttgacaacagagagatacagcgtccacaaaagacaataacacaccaccagctcgaatctacacacagcaaagagaccagctatctagtcagaggcgagcaacgaactacattagcactacagcaatattaacgtaccagagcacagacgcgaccagcgaacaaacgtcagatcacagatagtacggaacagcagacgaacgcgcgagcagaacacagcacagaagccgagagaggacaagagaac

SEQ ID NO: 726945 - DNA, 108 bp, Homo sapiens
cacgaggtgagaaacattctctcaaagatttaacgtaccatttaaagctgttcttctttatcttgtcatgaataaacctgctgtgtattggagattatatggatacga

SEQ ID NO: 726946 - DNA, 280 bp, Homo sapiens
  misc_feature (15)..(15): n is a, c, g, or t
  misc_feature (105)..(105): n is a, c, g, or t
  misc_feature (135)..(135): n is a, c, g, or t
  misc_feature (214)..(214): n is a, c, g, or t
  misc_feature (254)..(254): n is a, c, g, or t
ttgtaatggcatggnaagtctactgagaagcagaaaagaagcaccatttaacaattatctgggctagtcaactggtagtgggtataaatgtaactggtaaggtcnaaggacaacacctaacctacaaatatgagnccaattagtttcacagaaataaaattaccttcctagctacaaataatcctaacccttaataccagccattggcccttgncaaatggatgaccaatagtccatacaggtgggggaatagnctcagtttaaccacttagctacatta

SEQ ID NO: 726947 - DNA, 1077 bp, Homo sapiens
ggagccacccggtccgccgcgtcccgtcaccgccgccgcgtccccgccggggcctgacctgagccgagccgggccggagcggcgggcgcggccgtggccgccatggaccacaatgccgctgctgcaggagcggccgcccgcctacaacctggaggccggccagggcgactacgcgtgcggcccgcacggctacggtgccatccccgccgcgccccgcggcgctacctatccctacctcgtcacagggatacccacccagccatcgccatgggttctacaaacatccagcagacggaccgtcacccgtatatccatgccaactctatcgtggtcgtagagatggctgtcctgtctagcatgggttgggagtgcatggagcgactgcttcacctttcctggggcatcttcagtggccactcatcctcattcccccttggaggtatcattatgcctgtataacgccttgagggcaagcgacgaatgcacccaatctgtgcgagccacccttacgcttaaagggaacaccatgaccggaatatacctacaacccagctcatctatattccttactgttacaactgtagcggtacaagtaagatttactacgacttaacgcctttcacgggacttgattatcgtaaaagccgacgttgcgtgaccctgaatgggggcaccaacggccatgctgacggcgaatccccgggagccgctggacacaacgccaaactctgtcattgccctcaccagaccccgaagtcctcaaatcacacaaacctccaaattacacgccacctgactacttaattaatcttagcaacatcatacacattttcatacaacggtatcctcaacaatcattgctccttcaactcaccttgcaacaattccgatacccactttaacacaaccaacaacaacgagcacccacacatcacagccaatcacactacaacaaccaccaataaacacacacggactaacttccatatgctacgccccagactccacacaccctacaccataaaccacaaacatcacgtccccaaacctgtatatcaccccggccgactcccccac

SEQ ID NO: 726948 - DNA, 295 bp, Homo sapiens
ccacctttagcccccatccctgccctgacccaaaccttgccttactcctctgtccctgcgtccccagtccagaccacccccttaatcccacctgtggccacaccttgccgatcgtctgctgctgcatcatctgccctggacctcaatgggaggcagtgctgagaccaactggcatgcctataatttacaaactattggattttttctacgtgtgggtttatacaacgacttaagccttttgattggtcgaggtcgggcgctaacatatcaaatcacaaaacacttattcgtgatg

SEQ ID NO: 726949 - DNA, 474 bp, Homo sapiens
tgtaatacactgtatatacatggactcaaagatagaagagaggaaaagtatagccacctggcttagagccccagatgagaatgacatgatatctgcttatctttataaaaaatatctaaaattcagtgattaaaaatgaatttatttcactatgtttcttctattgcctgtaggaagtagctcacaaaataatagagttgctgaatgtcactgaacttacccagaatgccctgattaatgatgaactagtggagtggaagcggagacagcagagcgcctgtattggggggccgcccaatgcttgcttggatcagctgcagaactggtaagattctccaaagcagaaaactggcagctgactggctaaccacataaacacataaatgtacctttgagctgtgttagttgaatggaccctgtcaaaacattagtatagagtttgacatagtccagcttctgcttaccctggaaaca

SEQ ID NO: 726950 - DNA, 1191 bp, Homo sapiens
gggatcgtgacctatccgtgttgccgccatcgcctccttatatgagtatgcttccttggactcgtcctgtccccaatagttactgttacaccacatccgtacgtccatccatggtataagcttgctaagagtagcgccataaatcaaggtagtatgcccaaactaaaattggactgctctcttaccacaggagccatgaaacagaagataccgtgtaagatgtacgtgcatcagtgttgggatagattgacttaagaatagcacagctctatggagtacagatggtgcgttccatacactacgaaaaggtatacgggctggaagagctcgattgcatctctaccagacgacatgggaaaacgagcagagatacagttaacacccccaaacaaaaaaaaaggatatagcacgttctggagcacaacaacgcaagcccagaggacacaagccacgcctgtgcaacatcccgagggcgggcccacggcgaggcagtctaatcacccctggccacaatgaacgatcaagcttagcgagcccacgcccaagaagcccatgcgaaacccgacaaccccatggcgcaaagcacacgggcagcgcgaccccgaagagactagagagggccaatacgcggtgaagggtaagggtccttgcgcgtaaacgcacaggtggggctgctcggccagtccccggaagcacccttggggggcgcaaaaagaatatgcgcatgaggccaaattgcctaaaagcaaaggggaacgcaccaggttgggagtggaccacgaaggggacggcatcgcacttgaaccagtgggttggacgcgcaagcggacattgaagagcaaggggaagtgggactcgcacgggaaaccgaaagggcgagtagaacgggacgtcggaagccacctgcagccatataaggaaacaagcccggggggaacgtcggccccctgtataaacacggcgggggggaaggacagaatgggggccccccccatggccccgataatagagaacgcgcacctggcacggacaaccgggaggtggaagacgggaccttcaaccgggaacagcgagttcgcaagcatgaactccggcccctgggagacggagcgccaacggaaagtgtagcggcgaaaaggcaccccgaaccgccgtgtggaacggacaacgataggcgggtaaagaggccgc

SEQ ID NO: 726951 - DNA, 928 bp, Homo sapiens
gatgacgtccgcacggaatgtaccgattctactgactgctcttccacctcacaccgcactggtgcaggaggatagacgggactaattgcgctggcggctcggcacattcatccgtgacccacgtgcagatcatggccttgtggtatgaaatatactcagatattatcagtcataaataggactacggagacatgacagcttgttcgaaggagattgcttcttggggtcgtggtagctcagaaggatccgcgcttggtcatttagctcaacctcggtttccatctctcgcgtcagcgaaacaatagcgcatgatgcctgatctatcgatggaagcttcactgatcaatcctggaaatgcattgcggagccgtacagccatggttgatcattggatacagtgcttctcgacaggtttgtgggcatggtgctaaatccattgtcccccatctacttaacataatttggggccttcgagtttacttagttttaggtcgcttgaggggcggacccttcgccttgggttacctttctttccaaggtatttaagcgcttttaaccacaaaggaccacttgcgccaagtttgaggacacggaataagtacttagataccggctaacctcctatttttattaggttgatttgcggccaattataaataagagcatgggctcccgaaaagggtagttcctggcatcctttactagcattataactgcgtccaatttatccagcgaaactttgggaacgttgcaccgttgaacaataacctcgaaatgtggggaccagttgtctggtgacacacacggaaaaaggacggcagtttatttctacccacacttagaagatgccattttgtatacaacacgggccagaaataatccaacgctatatggagctaacattgatgttgaaagaaatgtgccgcat

SEQ ID NO: 726952 - DNA, 244 bp, Homo sapiens
gccagaacactacgagccccagcttaaaactcaaaggacctgggggtgcttcatatccctttagaggagcctgttctgtaatcgataaaccccgatcaccctcccccccttttgctcagcctatataccgccattttcagcaaaccctgatgaaggctacaaagtaagggcaagtacccacgtaaaaacgttaggtcaaggtgtagcccatgaggtggcaaaaaatgggctacattttttccca

SEQ ID NO: 726953 - DNA, 439 bp, Homo sapiens
gtccatatcgaggcggggaaggatgaaatcattaagaatggcccctgaagaagatgtccgctcggatcaggaagtatcagatcttgaacaatgaggtctttgccatcctgaacgaaaacatgaagtccgtggagacagctgctcatccccccccccgtaaccccaaccatcctaacctctggtaaccaccatgtcctgtctacttctgtgagatcaattttgactccatatatgagtgagataatatgtatttgtctttctgtgcctgtgttatttcagttaacataatgttctccaggttcatccatggtgttggaaatgaaagaatttcttcttttttatgactggaccaatgtcccgctgtatgcgtattccacatgttctttatccatttgggtgtgtggattagcatttatttttttttttgagactccgtctc

SEQ ID NO: 726954 - DNA, 347 bp, Homo sapiens
ggtgttccaggagctggctgactgtcaggaggcctcttgcaagtcctcagtcttgcttatccatgcactcattcttgttgggggacgcagagtggattcctcttggtcaagcacagtgacttgtattaaccaacttaagggtgacacttataaaccagatgccaacttacaaagaaaaacagaaccactagagagccaaacagaagccaaactctagtgagaaaattgcttgatgtggctgggcatagtggctcacgcctgtaatctcagaactttgagcggccaaggcaggcggatccctttaggccaggagttcaaggccaacatggtgaaaccccatctctact

SEQ ID NO: 726955 - DNA, 377 bp, Homo sapiens
taaacctctgtgcacagatatcacactcatgcggctatacgcctgtgtgaattctcatgtggccccagagatggtgctccattgtgaatttcttaccgcagaccccacagctgtaagcccgaagccccacactgacaaggatacagcttgtcggtgcctgagaatcctaagtggaacgcttcttctttaatccctgttaccatttcaatattctcacgtgtaacctgctgcagaggacagcttcctgtctgtgcccaattagattcccatctgacctctctccggaaatctcttcacatggaagagccatagaaatccacctgctcatcataagtgctttcatcagcgtgttcatcaaactcagcttccactttctt

SEQ ID NO: 726956 - DNA, 850 bp, Homo sapiens
  misc_feature (401)..(401): n is a, c, g, or t
cagagatgacagaagacgagacacccaagaaaacaactcccattctcagagcatcggctcgcgggcacagatcctaggaagtctgtgcctgtcctccctgtgcagggtatcctgtagggtgacctggaattcgaattctgtttccctctgtcaaatatttgtctgtgctctttttgttagaacacaaaaaaagaaagaggctcggtgagcactggtgagtcactgcctggtaagtcccaggcactttgcgactaccagaggcgtggtggactacccctgcaggtgagggccagcttcgaggacgcagctcgtgaccacagcatggatgaaacccctttctctactaaaaagataagaacaacttagccgggccgtataggcgatgcgccgtgtattcccangctactcaacaaggctgcaggccaggagaatcgcctgaacccagaggcggaggttgtagtgagccgaaaatcagcaccatggcactccagctgtgggcaaccaatagcgaaccttccatctcacaatttaagacaaaaaatgcctacacgctctttaaacatggcaagggccttctcgtgaaaattaagcctaaactgaaccgggcgatcgacgctggctttcaaccttttggacataatattgtttcggccccaactcctccctgggtgtttcctaacctgaattacactgttttgaagaatcactctttacacaaggtacaacaacacagggggggcgcactcgcggagcgttaacactctaggcggcccggagataaagcggacccaacctgtgatgcccagagggtgccccgagacacgcgccaccgtccggggaagccttcgcc

SEQ ID NO: 726957 - DNA, 499 bp, Homo sapiens
gcatgaactgcaaggctcccctcagcgccatcgtgtctccgtatggcagcccgctgaggagctttcttgggctgcccccatactgctccctaagcaaggtgtacatattctgcgtagagtgcatagaccaaccagcttcccagggttcgtcgctgtgaggcgtaagggacatgaattctagggtctccgtttctccattatttattgcttagtggcatacatcatgccgctggctgtggatagtgcttttgtgtagcaaatgcgtccctccttaaggttactagggtcttcctgagtattggagagtgtggaagtactacgttaactgtctgtcctgcttggctgtcgttatcgttttcatggtgatgttgtgcttacaataagaagtacccgaggtttatttctgtggcctgagaaggaagggacctccacgacaggtgggactgggtgcgatcgccggctgtttggcatgttgccaacatggcgtgccgggcaggag

SEQ ID NO: 726958 - DNA, 214 bp, Homo sapiens
caggaatcactttccccaggtatactccaagacaatcatcgcaacacaaacatattatacaccaacgcctgtagcctatatattaacactacatacgctacctacctgacaagcagctatagccctcgagtaatacttctcacctaacaggtcaacctcgcttacaccacccttactaaacattaatcgaacataaccccaccctactaacccg

SEQ ID NO: 726959 - DNA, 196 bp, Homo sapiens
  misc_feature (22)..(22): n is a, c, g, or t
catccattattctttaattttnatttttagaaacagtgtttcactctgtcacccaggctggagtgcagtggcctgatcatggctcactgcagcctggacctcctgggctcaagtgatcttcctgcctcacagcctcccaaagtactcagattataggtgtgagccaccacggctggccaccatctattactttttg

SEQ ID NO: 726960 - DNA, 1646 bp, Homo sapiens
gcctttggcgcggttcactgcgcagatgcacgcggtcgtcggccaggctgggtccgcgcgcgtgccgagaccgaggtagctgatccgcgagctgcgtgcgccaggtgcgtacgtctctacgtggctgggctcaggtagctgcgagctgctggacggctgtggacgtcgcggtaccggcggcgactacgaggtaggatggccatgtctgcgctgggcctgcctggatgctgtgctgtagcgcatccgctcgggcgagcgctgctggtgcacgatgcgatgatggtgctacgcgctctggaccagggatggtgctgcgcatcagtgtcatcggtttcctgctgccaggctgctctgccgcctgctgccgaggacggagtcccgagagcctgcaagcgtgccgtgcgccccggatggtgttcgacgagttcaaggtgcgcgctgcaggaggctcgagctcgttggcatcacccagggtgagagatgcggctgtagtccaatgaaagccagcccagaggctgctcgggaactcccagggaccctacttgactgttgagctggatgtctcgaatagcaaggacagggccagaatgagggaatgtgcagacaagatccagtgccccaggaaggtcgctccagatgggagtctgaggaggggaaggaggcaggatggctcggagctcccgggagcagccaaggccaggaactcgaagggcggctcacaaccgacttgatgactgctaaccttggagccgactaagaaggaagctacctgccacagagaccaggtggccgtgggcccgtgaaggtgcatcgtagtgaacgcttggggtgtcccaagttgagagtcattcgcacattgcttgtccagtaaccgggcagacataaggactagacactatgacactcgtcattaagagaagacggtgagacacagacaagtaggtagcaaatctatactgtctttcctcgtgattagttagcagtaaaaaaactaaaaaaaagacagaactaaacgacaaagaaaagcagaacacagcagacgacgcaggagaagggcgaggcagagcgaggaggagggagaggcgaaggcgaagaagggagcgaagagaggaaggcgagagaagagagcgcgcggagcagaggagggagaagggagagagagcgggaggcggagaagagaggagcaggagaaaagcagagaggagaagagacgaggaagagaggacacggaagagaggagcggcagaagaaggagaagcgaaggaagggcagagcaggagaagagcacgaagcagacacaagagagagcgtacgcgactaggagaagcacaacagagacaagggcaaaaagaaaacaaaaggaagaaaggaagaacagcagaacgaaagaaagaagaacagagaaaaaacaaaaacagacagcgaaacagagaccaaacaagagagagagaggagaaaagaggagaagaaaaggagagacaggcagatcaacaaagcgaagaagacagaaaagagagaaagaaagacaagagagagagcaaagagaaagaagcagaacgcgaacacaccacagagacagcgagacaacacacatagaagagaaagcacgcccacagcacaaacacacaaaacaagacagcaaaacg

SEQ ID NO: 726961 - DNA, 122 bp, Homo sapiens
ctctatacgttgactgtccccttacacagatgaagaaacaaacacattagggccaggcgcaatgtggctcatgcctataatcccagcccttggggaaggccgaggcaggcacgttacctgag

SEQ ID NO: 726962 - DNA, 316 bp, Homo sapiens
  misc_feature (88)..(88): n is a, c, g, or t
agtaggactcatgacatcatagctcgtggttagaattcaatttggaataaagtcttgatgttggaatgggatcactgcactgggagcncctggtggtcaggagctgtgctttagccatcgccgaaatccagcattcgagtgcagtcctgctgcctgataacacactcagaagttaaagggccctccaaggtcctatggttcattcttttttaaaaatttaatttttaaaatattgacacataattaactaacatatattcactggaggaaccattagtgttgttcctaccatatacatgtataggtgctccacgtc

SEQ ID NO: 726963 - DNA, 315 bp, Homo sapiens
tagttctagatcgcgatctagaactagggctgcctctcctattatctattatcactgaaacttagtagcagacttcaccaggccctgaggccacaccttgcgcaccgttggcaccccgggggggaaatccggcgtaacatgatgagtagggatcttcagccattacggtaggcaactaagtccaagaccaagactgccgtccggcgtgactgttgggctcaccggatggatatggccgatgggcggcgctgtgcctcggggatggatacatttgaataacccccctgtgtggtaggggtggaagtgggtaaaacc

SEQ ID NO: 726964 - DNA, 127 bp, Homo sapiens
acactgggttcgagttcctgtggtgcattcattgatcagacaagcacaccgcaaaggcacagtatcggtccttggcgaggaatcatcaagggggagaaggttactgcaacctccagaaggcaggaat

SEQ ID NO: 726965 - DNA, 694 bp, Homo sapiens
agcttcatcgctctatgcgcttagtaccctttctctgtgaggaatgtttttacatatagaggttaacgttgaggtgtaactggcgcatagtggacttaggatgttttggtttatacaacgatatttttcatgtctgttagtaacactgtttcaccaaagagtagagagagaccttcactctgtgaaattccaaacaaaacgatgtgctgaatggttactcacagaaagatttgacaacttgaggtataacgccacctgaggtgtatacaacttgcaagtagtatacacctcaggtggcagaaagagagcgacccagagagagcgacccaaaaagagaacaaaacagacagagcaaccgagagagagagctacccagaaagagcaaaaagattacagcaaccaaaatagagagcaaacaaaagagatgccaccttaggttatactacttggccacctgaggtgtatactacttggggatccgtgcacgttaacgattactaggactaagcagaaccagagagttagataccgcgtttgtctatcgtctcgtttcgcttcgctactcatactccctctggtctctcttatccacttctttgattccttattagcctctcaccccttttcaactctcctatcatttccttctttctctttgccctactcttcattaagaatacttctatcctctccc

SEQ ID NO: 726966 - DNA, 309 bp, Homo sapiens
ctcatctaatcactacctacacgtcatcatatttcagctcttgagagcatactgctctcctttagatggctgtgaatctatatggccatctgggcttcacagcttgagttaaccttgcttttccgggaacacaaatgatgtcatgtgcagcttcgccccttgagacatgacacgcggccccaaatttgctattcccatgcattttggttggttcttcacttatcctcggctctgaagaagttttgtgaccacggtttgtggtttcttaaaataaaatgccgagacatgtgtttaagctgaaaaaaaaaa

SEQ ID NO: 726967 - DNA, 124 bp, Homo sapiens
aaatctgcaagctccgctacaccaggaaggacaagctgaaggtgcacatgcggaagcacacgggcgagaagccgtacctgtgccagaagtgcggggcggccgtcggccacaactacgacctgaa

SEQ ID NO: 726968 - DNA, 231 bp, Homo sapiens
gcgagaaggcagagggcgcgagaggcacaaggaggtgtaggttctgtgcctcgcaaagtgctgggatcataggcatgagccagcacgacccggcctggatgccagttctttatcagatatgtgtttcgcacatatgtccacccagatttgtggctgcttgttttcttttcctagtacctggatgttcgcttttagacgagtttggaccagtgatcctccttggtgccttgg

SEQ ID NO: 726969 - DNA, 482 bp, Homo sapiens
gcgagcatttgtcctcgggtgtggtgacttggagtgtaacagcgtgatctgaccaatagtacacacagacgcaaggtttaactggtacttgaaacaccagattatgttaacaaaataaccaagatttaaagattattttggtacacctttctttttagtgtcttatcagtgggttgattcatcttctacataaatcagtgttttatgaccaagaatattgcttggattgttttgaaagtacaaaagaaccacatagtttctactgacaggtttcagagctcccaaagattaatttccaacttagaggtttgtttttattttcaacctatgacgacttgactggtcttaaagctgctatttgatagtaattaaatatgttgtcattgatagaagcctgttggttcagcaaactgaaatgagtgttgcagacagggttttcttttcctcgttggtgttgctgatttgtgagcatgctttctgaa

SEQ ID NO: 726970 - DNA, 193 bp, Homo sapiens
tgaagaggagttggcaagccttgggaagtggataagcgagcaaaaaagcgctctaagatggtgtctggctcccaagatatctgggagggcatccaagataaatgagaacagggcttgaaggaagtcacctgcagtgatcctccgtggtacacgaatgactggaggtgcaagtgctctctaccaagaatccgat

SEQ ID NO: 726971 - DNA, 206 bp, Homo sapiens
aaaatgtcaaatgaatttgacacattctgatcagtaagatcccagaatatctaatagtcaaattcatttgacattttcaaagtataaacaactgttaaagagttgcctatttttattcataaattatacttagtttgttaccatggcaacaaaaatagcaacaacaaacccaaactgtcctgtccaattgatcttcctaaaaaaca

SEQ ID NO: 726972 - DNA, 777 bp, Homo sapiens
tgcgcgcaaggccaactgactggagaagctcggagaacggagggaggcggcacggacagccctggcggaccccgcgcaaactgctgcaacgatccaccagcgttctggggtccccaacgccaacagcactcagagcagatgctgctggactgttgtcgagccaagactcgcggctaccgagcacgtcgacatccagaacttctcctccaagcctggagtaaatgggagtggctcttctgtgccgctggtggcataactttcttcccttgaggccttacgagctatgggcagcttagccctcatgaaccgagcgtccagaactttacgaggctggcccgttctcatacatgcggtgactccatggcggactgcccgcagctccgtggatacatgaggacagtggtcgcgagcttcgagagctttcggactggaagtgcgtgtacacgtacatgccaggaattgctaccgcctgtcatggtccagataggggctggtaacaaaaccagataaagtcgctaagcccctgctcaggggccccacggatgctggtggactgtgtgacaccgtggtaggaggtggacgacatgatgatcatgggcaagaagcgctgaccccaagtggtcggtcacctatgtgcagtcgctctacaaccacctggacgccacgaactgcgcctgcgcggcaagaatgtttagcctgcccgcccgcattggccagcgcagtggcaagctgccgcccccactctccgggcaccgtctcctgcctgtggtccgccca

SEQ ID NO: 726973 - DNA, 835 bp, Homo sapiens
ggggatcggggatgcaggagttgagtggcagtttcaataacaggtcatgccgagaaaaggatagcactataatatgcagaaatctacaaagttctgatacttccgtggaaagcactgaagttctacccgccaaggcacaggagctgcgcatagtgagaatcaaaactgccaacagcccaccatgacaggctcagccaaagtacatccatgatcctcaccgatgtcgggaaggtcactgaacctatatccagacacagaaggaatcattcagcagcatatcttgaaagatgtcgattcctccattgaacaactgatggtggccaacgacggttatctgcaaaaagctaaaattgcagatggaggaccgagagtaaggaacacactggtctacttcctggatgttctttctagtcgaagaattgaatttacaaagaatccaaagcaacaggctctgtccaatatgaaaactggcacaaaccagacagtgtggattgtgtggagcacacatgaatgggccaggcaccattcgagcagaaagaatgtcttccagatcacaacagtatcaggacccggcgttccttctaacagtcagatatggactttcctcatatcggctcggttccacgctatcaacaatgcattggacagacttggcgacggctcacgtgtcatcagaaaactggattttcaaaatccaaagatctctagcctgaattgctaagtcccacgcaggggttcaagcacgaaccgagccagagaacttatgtcacgcggctcacggtcgacagggaaacggtaagcgaagaggatacggacaccggatggaaggtaaacg

SEQ ID NO: 726974 - DNA, 247 bp, Homo sapiens
gcttagggagtcactaactctttatctagtcaactcattacaaaaatttatttttggccaggtgcggtggctcacgcctgtaatcccagcactttgggaggatgaggcaggtggatcacctgatgtcaggagttcgagaccagcctggccaacattgtgaaaccccgtctctactaaaaatacaaaaattaggcgggcgtggtggtgggcacctgtaattccagctattcaggaggctgaagcagga

SEQ ID NO: 726975 - DNA, 301 bp, Homo sapiens
ctggtgatctctagcaggatccccagcaagaatggcatatcagtagccagttttaacggaatcagaacactttgggtacatgctgctaacagcccgtcagctcgtcatccttgttttttgtcaacctggctatccagtaagtaccaatgtcctctatttttgtccgggaagacttttgaatactttcaagtgcttatttttattatcacctgctcgttccttaatgtactagtttgttccagctactacttgagttttatatctgcacagtcttcccaattttccgataagatctccattt

SEQ ID NO: 726976 - DNA, 458 bp, Homo sapiens
gttctttctggccctggacaaggtttttattgggaaacattgcatctagaaaaaaggaccaaatgtgacaagttagatgggccccagcccaggattttaatagggtatacatgggaacaggttaacagggttattgggaaatgcattttttgaccaatataatctaaaaaggactggaatatttacaggcttttaatacataaataacttgggtcaaaaggacccttactggtaaatgctaattaatagtggaaaacaggctaaaagcaccatacaccccaccatagttttttcttaccgggtcacatttaaagaatatcagtttattttgtcaaaacactacagagatccaggactgggactgaattactaatttatacaattgcgaaaaaatttaagttataaaataagggtatggaataaagaagggtatttaattaggactaaatactgtgaag

SEQ ID NO: 726977 - DNA, 167 bp, Homo sapiens
tatggcccaggctggagtgcagtggtgcgacctcagctcatcgcgaacctccgcctccgtgggttcaagagattctcctgcctcagccttccccagttagctgggatttataggcacattgccaccatgtgcccgggcttaatttttgtgtattttcaggtaagaag

SEQ ID NO: 726978 - DNA, 427 bp, Homo sapiens
ccatgtgaagtgtatacaaaacaattagccttatctaggtaatacacactgatacaccatattgtcaccatttcaatgaagatatgaacctatgataggtcctggatctgagggggtttttgtctgtatataggactgatatatttattccgctcaactcttgccttttcttcatactgtcctaggctgtttaaatagaaccaatgactacgaatagtttctcatattttcactacacgtttagccagaaagcataccctccctctctcttacctagtatttacttgatcgccatcacctcctctggtatatgtttatttgtttaactctttcttcattgtcagttctgtttgctgctgtcttctcagcacccagaaccaagcctggcatggtgagtgctcattaatatgaggtgagtaaaagaaca

SEQ ID NO: 726979 - DNA, 394 bp, Homo sapiens
  misc_feature (24)..(24): n is a, c, g, or t
acaccttttaaaaatttatttttnaaaataacccatgcaattttccacattgtaagggcccactttttccatgtatcatttatctcctcttcctcagcctaaagactggggcccgggcacagtggctcactccctgtaatgcccatgactttgggaggccgaggtaggcggtttgccctgaggtcaggagttcgagacccagccctggccaacatagtgaaaccccgtctctactaaaaatagaaaaaaattagccaggcatggtggcatgtgcctgtagtccagctactcgggaggttgaggcaggagaattgcttgaacccaggaggcggaggttgcagtgagccgagattgcgctactgcactccagcctgggcaacagagcaagactcca

SEQ ID NO: 726980 - DNA, 515 bp, Homo sapiens
cattggagaactggagtgtctggagttcccacggtgtagtggaccagaggccacctctcctgggcttctcaagtgtcatacgccgagcgggggttccgggccttgaagccttggatttggacatagcccttggccgggaatttaaaacaagctaaacattaagcagtacatgctgcctcaaaccttttgggattttcagaatgactgacactgccgaagctgttccaaagtttgaagagatgtttgctagtagattcacagaaaattgacaaggagtatcaggaatacctgaaaacgccctcctgagtctccttccaatttgttgaaggaattggaatagcagagctggtggggaaccaaaaggaaacaggagggcaaatcgcgttgcaagaacaacagacagttcagaggcagggacaacagatgggggtggccaagtgacaatcgatccaatcagtggcatggacgatcctggggtaacaactacccgcaacacagacaagaaccttactatc

SEQ ID NO: 726981 - DNA, 155 bp, Homo sapiens
ttccatgtaatctgcaattgaacatgggtcagtcagtccttagagcattggctgagcgccgttccgaagggactggtgctgatggactccgcttgccctcgtggcgatcgaagatgggagtcgcgcttgttgtccgagtaccgaggctcaatttc

SEQ ID NO: 726982 - DNA, 192 bp, Homo sapiens
ggtcatgtccatgccagagtaaaggaccctgggtgtccccatcaccctccagccccgtgtgccagacgcacctatatggtagttggtgccaagctcgtcaataggcacagaactaggatacagctatactacgtagatagctagaaaggaacagtagccaggcgctagacgacaggcacagagtaccacgta

SEQ ID NO: 726983 - DNA, 499 bp, Homo sapiens
  misc_feature (71)..(71): n is a, c, g, or t
  misc_feature (308)..(308): n is a, c, g, or t
  misc_feature (325)..(325): n is a, c, g, or t
  misc_feature (328)..(328): n is a, c, g, or t
ctcaccatttccattacaatttcattctgttgtcctgctctgacctggccagaaccctggtcttcgaacantggctgcaaacatagatgctcagaaagtgtaactgttgaatgactcacttgctgaaaatgaatttaatattttcaaagcaaacagctaagaaagccaacaaagttgctttaaacttgtttaaaagttgtaaaaatcaccctgtttgcacccaagtcactgctaaggggcccaatggcaggaaacatccattggtgggcacactgctttctgaccattcatcccgataactcaggaantcactgcaaacacgcantcnagtggagaagacggaactggctgaaaattaattaaaaaaaaaaaaagacaagtcgaatgtgttggctcacacctataatcccagcactttgggaggccaaggcaggtggattgctcaaccccaggagtttgagaccagcctaggcaacatagtgagaccccatctccaccc

SEQ ID NO: 726984 - DNA, 1180 bp, Homo sapiens
agcgggggggggaggtgagccgcaggggccgagtgactgacccctgggactcgcggtcccaggcgcaagggtgccgcggcgcgggacggagggactgggacacccgatggtgagtgacgggtgccgggggtctggcgccctggcggcggctgcagtagagcgtcggtctctggtgaccgtgccctggggtgtcgcgtggatactcctggcgtcggggtgaggggcggacttcggagcgttcggcgtatgatccacgcacgtcacgttctagtgtgacttgcgcgagacactttgttgcgtggcgtagccatggcgtaggttcttgcgtgtatcggtggcgcaagcattgggagagttgacccttgtgtggcccatcctaagcaaaagcaatgccgcctctggacacgccttggggacggccatgggatcgcaacttgggtgcgggccaaggcgccgtatgagccctggggagcgaagcggcgaagagccctttgagaacgggcaaaatggctggttaggccccaaaccttgcaatgtggtcctgtggtcggcgttggtgcctttgggtggtgtgcaacgccagtccacttgcggtttcgcgtgggagctcgaggggggtgcgatagcctttccattggggttcgtgttgttgcatttcgcgtgtggaggcaatcgggcgcaccgaattggggatggggatggggcctttgagtgcggagccaagagcgccgtttcgagattcggatctgcgattcgccgcattcgcgggggcggtcacagaccgaggcacggacggtcgcgccatacccgacgaagcgaagcagatcccaacaggttggttgaacaccgacaaaggtcacccagcatccgttaagacagctcattaaattatataccttcacagccaactttgcagatagtgacctaaccaacttggcggacactgggggcttggggcatgtgaccacaccacgccatgggcccatgtgtctgtggaccacagaattgtgtgtgttggtcgcgtgcggtacccccgtttggcgacaccgggcagacctacgcggagtgcgcttggcgcgcaaaacggttgctaccatattgtcacggacctaggctgcccccgaattcgagtcaccaacttgtatcggccggcacgcttggaagctaacttgcaactggc

SEQ ID NO: 726985 - DNA, 652 bp, Homo sapiens
  misc_feature (336)..(336): n is a, c, g, or t
tacgaactggtggcggcgcggaattctcagcggcttccacaccctgttgactccaaaaccacgtcggatgttttaaggtttgttttggagcagtacaacgctctgtcctggctcacgtgcaatccggccacccaggaccgtacttcctgccttcccgtttttttgtgggtgggcactcagttgtacaatgccatcatgaatatactccaattggaaaagcacttgttctctctggctcagttccttctccctgcagcctcagtccaaggaacctgctacactctgcaaataacccacatgcttttcttcagaccactctccacaggcctgtactgngattccttctcagtaggcacatgtcaattctgcagttgtcattaccagagtgacttcttgacacttttctcatggaccttgggaacttccataagtggagaccttcagccagtgcgtggggcgtgtgttgccccaaccactgggtccccagtaagccccgccgggttgtcgccttttctggtggtttcctgttccgtccagttttcttttcgctctcgttctttcctttccccccccctttttcttctcgttttgtgtctctccccttttccttatattctttttccctcttgtctatatgacatataaaaatata

SEQ ID NO: 726986 - DNA, 745 bp, Homo sapiens
gggcgaaggcgcacccgccgatacgcgcgcggagctgcggccccaggaccccgcgtcccagcgcagtgccccccgatccgccggggactctcgtgtcctcgtcgtctgaccccctcaagtgtgggtgaatgtggggactgaggctgcgtggtgtccgtccggaatagaggactgcagggaggcgtgccggcaggtatcagggacgccgcccggttacattgagcctggcggtgctcctcctggaacctgctctcttcatcgtatctttaaggaagcagagtgatgagaggtccagacccgtgcgccaggggaatgagaccgtatgactcctacagccacggttccgggtcggggaaggcgatgcccatcagccggccctgcgacgacccgtgcctgggcatcatcgatgaggaggaggcagaaggcaggagccgacgacgacgggcagggaccacacagcggccaggggacccacctgtggagcgggagccgcgaggtcaggaggttatggcatccagcagggcgtgcccccggtggtcgtgcgtcctctgctggggctctgtccgcgatgctggtgtcgtgcgtgaactcgcgtcgctgcggtcaaggtgcgaatgccttggagctcttccggagtcacgtgcggcccttttggctgaggtgaaatctccttcacgctgatgctcacgtgagcggggaaccatgcgcgggagctggtgcggtcggaggagctgggcggtgggag

SEQ ID NO: 726987 - DNA, 176 bp, Homo sapiens
ggtggacgggcagcttcttctcgagatgtctgctgcttgagagctattgcttgttacgatataaaaaggggttcttttgtctttctgtaggtggacttacagcttttgattgaaagtcctagggtgattctatatctgctgtgatttatctgctgaacagctcagctggggtcgtc

SEQ ID NO: 726988 - DNA, 256 bp, Homo sapiens
cgttccacataccttctctcaactcatatataatctgttccacagtccttccgctcaattcatagataatcctgtccacattccttccctcaactcatagataatccattccacaagccttccactcaattcatagataatccattccacaagcctttctctcaattcatagataatccgttccacagaccttcttctcaattcatatataatctgttccacaggtcttccctcaactcatagataatcctttcca

SEQ ID NO: 726989 - DNA, 1061 bp, Homo sapiens
  misc_feature (53)..(53): n is a, c, g, or t
  misc_feature (57)..(58): n is a, c, g, or t
gagactgtagacgagttgggttcgtgtgtatgtgtgttgtgtgtgtgttgtgnaggnnggcagacagctccgtcgcagactacggacctctccggggtctcagccgccaaagaccctgtccggtaggtgagtggcacgctttgagggcaaggcttctcggatcgaggcttcttcatggccgctcgggtcgcaagtggccggggcttcgctctttgcggaggacggcgactcagagagcgcagttgatttgaggaaacactagccgggcatcatgagtggctgtcgagtgttcattgggagactaaatccagcagcgagggagaaagatgtggaaagattcttcaagggttacggacggatccgagatattgacttgaaaagaggttttggttttgtggaatttgaggacccaagggatgcagatgatgctgtttatgaacttgatgggaaggaactttgcagtgaaagggtgacgattgaacatgcccgggctcggtctcgaggtggaagaggtagaggacgatactccgaccgttttagcagtcgcagacctcgaaatgatagacgaaatgctccacctgtaagaacagaaaatcgacttatagttgagaatttatcctcaagagtcagctggcaggtttgttgaaatacagtttgagatattttttaatgtggcatttaaaagtgttaatgggtagttaatgttttattaatatatatcttattaaatgctttatcttaaattaatttaatgaactataattttaaactttaggttacatgttactggggggatgcttccagactgtatattagggggatcccatgttcacatgtgtcgggggaatatgccagttttgaaaatctcatttaccccatatttaacccgtttttggccggctatctgtggtgcgggctattaccacagaggcctgggggtaccaaagcgggctggccacctggttggccggtgaattccgcagagcccagacaagcgccctaatattgtgggcgtcgaaacccggcacaaagcgaggcacaccacactgtattacacacag

SEQ ID NO: 726990 - DNA, 1202 bp, Homo sapiens
gcaagatcacggatgtgtggcatctacgattcaagcgacgtggtacccatacgaggtgcgtggatgcaatcagcactcttccatcgtcaatatgggccagtgcggtggtgcgtccggatgctcgaccgacgcctacctggtggtccctgagaggagcacgtcttcgaacatatgtgctgacattgcattgcatcccttgggatccttggtactgatcataccaatccatcaagctggatgcttgcgattcctaagcaagacaactccgtgtacttgcaaacgatgatgaaacggccactacatgcgcttgtctctacatgagtctattccgtgcgacagacgatgcaggatagctgcgaccgaggaccagatgattgcacgttcgtcatgaacggagggaggcacgtgatgcctcgcattgcgagtggcgtccagggtgcttggtgtcctcgcaagtcgcggatcgtgccttgtgatggatacctgatggtacatacgtacaaggcaggaatgagggcaaatcgggaagtcttggccatcgactcatactgatgctcatccacatgggtgcagggagcaatggtacgttatcccgtcggtggcttgagtgacgaagccccttcgcaccagggggtgccctgaaggtctagagggactgctttcatcctggtacctactggcgaaagattgggagaaatcgttctgatctggatacaggcaaggcagcgcaatgcgcggaggacgacgcgaacggcttgcgctcgaaaccatagccctcttgactttcatcaatccaagatggaactagcctcgaaacaggactcaggggtctcggtccttccgtgaggggcggttgagacgccaactggttcaatacatgctcttcagggacatggcgtggaccagaccaaatagattggcctgggccttggtctacccttttcagccatatttgcgaccgtgtagggggttgccttcgagggacgccaatcggggcacaacttcacttggccatgtgccggccaagcgggctttcgattgaagaatgcggaatgggtcaaaaacgctcttggggagaccaaaggccccacaggggggcccgtgggctcgaccattttggcgcccacttagggcgacagagcgattctctggagaagcccacttggggcgcagcggcagaactaatagggcgagaggcgctc

SEQ ID NO: 726991 - DNA, 296 bp, Homo sapiens
  misc_feature (278)..(278): n is a, c, g, or t
cgcgccgcgcgatacggctgcgagagacgacagagggtggacgaaaaaggaccagagaggagagaccaggcccacctgccccaggctcagccagggagctgctggaggtagtagagcctgaagtcttgcaggactcactggatagatgttattcaactccttccagttgtcttgaacagcctgactcctgccagccctatggaagttccatgcattggaggaaaaacatgttggctctcttgacgtgggagaaattgaaaagaaggggaaggggaagnaaagaagggggggagtct

SEQ ID NO: 726992 - DNA, 935 bp, Homo sapiens
  misc_feature (53)..(53): n is a, c, g, or t
  misc_feature (57)..(58): n is a, c, g, or t
gagactgtagacgagttgggttcgtgtgtatgtgtgttgtgtgtgtgttgtgnaggnnggcagacagctccgtcgcagactacggacctctccggggtctcagccgccaaagaccctgtccggtaggaaacactagccgggcatcatgagtggctgtcgagtgttcattgggagactaaatccagcagcgagggagaaagatgtggaaagattcttcaagggttacggacggatccgagatattgacttgaaaagaggttttggttttgtggaatttgaggacccaagggatgcagatgatgctgtttatgaacttgatgggaaggaactttgcagtgaaagggtgacgattgaacatgcccgggctcggtctcgaggtggaagaggtagaggacgatactccgaccgttttagcagtcgcagacctcgaaatgatagacgaaatgctccacctgtaagaacagaaaatcgacttatagttgagaatttatcctcaagagtcagctggcaggtttgttgaaatacagtttgagatattttttaatgtggcatttaaaagtgttaatgggtagttaatgttttattaatatatatcttattaaatgctttatcttaaattaatttaatgaactataattttaaactttaggttacatgttactggggggatgcttccagactgtatattagggggatcccatgttcacatgtgtcgggggaatatgccagttttgaaaatctcatttaccccatatttaacccgtttttggccggctatctgtggtgcgggctattaccacagaggcctgggggtaccaaagcgggctggccacctggttggccggtgaattccgcagagcccagacaagcgccctaatattgtgggcgtcgaaacccggcacaaagcgaggcacaccacactgtattacacacag

SEQ ID NO: 726993 - DNA, 789 bp, Homo sapiens
agcggagtctcttggaaaggaatctcactatgcgggcttgactgcgaatgggtctgtagcgctattcactgtaagaaatgcaagatgcattttacaaactttaactacagtatcagctccctgattgcctgtgtggcaaagcagatgaattactcttcagcgagaagtgaataccatgggtgcaacatttgagtcccgtctttagggacgtatgacagaggacatcatcgcgtttcagtattttataggagcttcaaatcgcagtcagaagtaacactttaggcaactccctgttcttccgtcagcaagaatgtccagagtcgtccagtctgtcgatgaagacatgcagtctttcgtgggaaaaggaaatgcacagtttatattttgctcagaccattacactataggaaagctcacacctggctccgccaaatccagacaatcacgtttctgatctcccctcccgactctctccgccagtgggatggaaacaagtggaacgatgcgatctccagtcataaatctatgatctcttatatgccatctccgaagctggggccaggggaaaagtatgaattgcacgcagacgactgacaccagctcccagcgtggtggtccatgtatgtgagagtgatcaagagaaggaggaacgaagaggaaatggcaaagaatgacggagacctaagccaaaaattatccagaccaggagggcggagtacacgccgatccacctcagctgaactggcacgcgacgaggacgcattccaaatcatactcacgggaggaatc

SEQ ID NO: 726994 - DNA, 407 bp, Homo sapiens
ttgcgccccacgcgtccggtccaaaaacgcaaacggcttgaaacagctgagagatttcaaaagcccctggaccgagtaattgaaatgattcagaattgcttggcttcttggcctgatgatttgcctcattcagaagcaggaatgagagtaaaaactgacccaatggaggctgatgatagcaccaattgttctggccagaatgaacctcaaagagaaaattcgggtcatgggagggatcagattatagagaaagatgctgccttgggtgtcctaattgatgagatgaatgaaagcccatgaaagatgtttttttttctttttttccttttgaaaaaggcatcataaattggttcttttttttttggccagtcttaaaagaagtttccctaaaaatgtaaacagcttta

SEQ ID NO: 726995 - DNA, 137 bp, Homo sapiens
gtctgtatctgttgtatctggaaaaagcaacatatttcatgctttgaatattttctctggagaatagttttaaagttatttccttgtgtaacattcaaaagtaaaacacacatatataattccatcaaggattctct

SEQ ID NO: 726996 - DNA, 1170 bp, Homo sapiens
atcatcatagcaggcgagatatgaggtggattaaagccaaacccagctacgcaaaatacttagcatactacctcaattacccacataggatgaataatagcagttctaccgtacaaccctaacataaccattcttaatttaactatttatattatcctaactactaccgccttcctactactcaacttcaactccagcaccacgaccctactactatactacgcacctgaaacaagctaacatgactaacacacacttaatataccatccaccctacctctccctaggaggcctgaccaccgctaaccgagctaatatatagcccacatgggccattatcgaagaattcccaacaacacaatagcctcatcatccccacacatcatagccaccatcaccctaccttaacctctacttactacctacgcctaatctactccacctcaatcacactactccccatatctcacaacgtacaaaagtcaaatgcagcgcactgcaacactacaaaagcgaacaccaaacactcccacacactcagtcggcgcttaacacgtcaacatctacctataatcacacttgacatagctactaactctgcacccacccgcgcacacccaccacaaccaaaccacacagaacaaacacgagcacaccggacacagccggagaaggagaggaagccagcagacgccagaggacagcggccgcaaccgcccaccagcgcgcacgcgcggccacgcgagcgaccgccaagcaaggccggcgacagcgcctaccagagacacggaaataacgaagcgaggaactccacgcggcgacgcgcgattgccagaaacgaagccacagaggcgtagcgtcgtcgcaccgtcgcaccacgccgtctcacgccgatgacgagagcaagagatcgagggccgacatgcggtgcccctccatcgtacccagaacgaggcgcagacacaccataagggcaggcatcaacaaaccacggcgcgaacgagccgggaggaggcgggtgcaaaccagccaacgcgagcggagagtactacatgatcgagacaacaacacaaacataatgaaacggagcgatcgaagtgtcgccgacggaactcgatcggaagcaatccggggcggtgatgcaagctagttgcacagcaacccgaaaca

SEQ ID NO: 726997 - DNA, 874 bp, Homo sapiens
tgaaacaggatcttgctttgtcacccagggcttgcttggtcacgcaggctaaagtgcagtggcgcaaacatggctcactgcagcctcaacctcccaggctcaagtgatcctcccacctcagccccctgaatggctgggactacaagcgtgcgccaccatgcctggctaattttggtatttttgggagagatggggtttcaccatgttgcctaggctggtcttgagctcctgagctcaaacaatccaccctcctcagcctcccaaagtgctgggattacaggcttgagccaccacacctgacctattctgtgtttcttataaaaataaaactttttgggataaagcttatttctggtttttccttttcctttttttttttttccgagaccccatctcagaaaaaaagaacaacaagacggggtacagatgtgatttgggaagaaaaagatcaggctgatgaggttaggatccccaggcccttgggacttaaagatcactagtgtctaaatcccatcgagggctttccagtctataggtaacctccctggacctggattggcagacggttcacccatcggatatatggcgctccggttaggtcctagaggagcgttccctgaacttgctttgctgccccccgtctgtaaacttcatcctgtaatgaagtttactcaactgtcctcgtgtcgcgtgcccacggcgttccccgacattctttcgggcccctaatagtcttgtcaagggtctaaaccctgtttccagggggccctctgccttggttgcctctgaaacctattaatcagagagattgccaggccccggccgaccacagcggcacccatgttttcccccgggggggccccacactagggcg

SEQ ID NO: 726998 - DNA, 916 bp, Homo sapiens
  misc_feature (475)..(475): n is a, c, g, or t
cctccagtccatctctgcaagtccatgagccgtgtgttccgccattagtatatcttggtgctccttcaagtcgcatattcatgcgtggcaaaagtgtcacttaagatctgatgaattacatcactcgtatccgatgagatatagtgaattatgttggcatccaaagcatggcggcatgtaaaccagtagaatagactgcatatggcgtcgtaccaatcgaatataaccatagatcgatactagtacgtaactatgctagattcgtcgaagcctacatggctggaactgtgccgatctcatataccgcatgatttacgtggtgggtatgggaatcaccaggtactggtcatcgcgttgctttgtggcccataccgtagtagtacagtaggcggcccgaattgtttgcaccgagcaataacctcgcgaacccgttaataatccgatagagtgtagaaacaagccgatacagacgttngctcacatgcatagtatctgcgcactggattgactcgatcacctgtacctatgtactgggtattatagtgcgtacacacggtaccctcccctgtatgcagagaagttccctagaaactatgcttgggcgtcacgtaagttgcatcaaactgtgtagttcgctcacacaagaatgagctagagattgtggtgagttgccttactccactgtaccgcctggtggtgcctgtcaagaccgtgtctatgcgctctcatcgaatgagagcttggcaagtggccaggatgagaagaccgtacagcagaatcgagtacagggggccagtggtgtcacactgtaatgaggcataaccggatattccaagggcttctggaaaattccccggaattattctgcccaattgcacgtaaccaccatatcaagctgcctttgggggtttgtacc

SEQ ID NO: 726999 - DNA, 137 bp, Homo sapiens
aaggaggattcacggactcagagcttggggtggagactgaaggaacagacaggagagaaagaaggtccaggtatgccggcatacctggaccttctcctctagtcctgagccatctttagtctctgtcagctctttcg

SEQ ID NO: 727000 - DNA, 358 bp, Homo sapiens
taaatttttccccttaaaatttagggggggttcggtttttcaaaaatttagaaggggttttgttttttgaggttccaattttgggggggggggcccaacaacccgttaaaaaaaatccttttgtccttccaaaatatgatagggaattatgggttaaattttttggttatttccaaaacccccaaagagagaaatttgtttttttccccccccaaaaaaaaaataaatgtttggggggagggattttcccgttcccctgttttgttccttccccctcaaaaacatgggtttaaatttcccctggcccccccaaaaaacaaacccctttggtttttccataaataaaaagggaaaccca

SEQ ID NO: 727001 - DNA, 154 bp, Homo sapiens
tgccctaaagacagggttttgccatgttgccaaggctggtcttgaactcctgggctcaagccatctgcttgccttggcctcccaaacggtagggattataggtgtgagccaccacgtctggcctccaacttgattattgaatacagtctttctc

SEQ ID NO: 727002 - DNA, 225 bp, Homo sapiens
aagcgaacatgcggccagagaggacgtgtcagctcctcgtgggactgaagagctgctgaccagtgcagagtggtgggcggggagcctagggtcctacacaccaagcaacagtgacgatcgtggctgaggaggtggtctgcacacctactggccgaaatgactttgtacatcggtggacccttgggactgggagaacggatggcagcagagtcttctgaaagcaga

SEQ ID NO: 727003 - DNA, 126 bp, Homo sapiens
gctgatataaggatcttgggagtagtcaatgattgtaaaagtgtagcttacttgttgtctccgattcaggttagaatgaggaggtctgtgtgctaggagtaaataaatgtgatatggttagtgggc

SEQ ID NO: 727004 - DNA, 513 bp, Homo sapiens
  misc_feature (5)..(5): n is a, c, g, or t
  misc_feature (32)..(32): n is a, c, g, or t
  misc_feature (62)..(62): n is a, c, g, or t
gatcnaatcctcgggcccctgaagttaatccnggagggcctccatcctggcaaaaaaggacnaaaaattaggtaataaaaaaagttagggccatggaaaagtaaaacatttatccctagaaaaagcctaaataacaaccccaattacctttggttaatgggcaaaaacccccacaaaaatccccataaaaacaaacacaaatatttttaattaattaaactaattgtctggcctgcttgaaagtgtcatcaatttagtgaagtatttaagactagctactcacacctataatctcagcacatttggaggccaaggtaggcggatcacctgaggtcaggagttcaagaccagcctagacaacatggtgaaaccccatctctactagaaacagaaaaattagctggttatggaggcacgtgcctgtaatcccagctacttgggaggctgaggcaagagcgaatctcttgaacccaagaggtggaagttgttgtgagccgagattacaccactgca

SEQ ID NO: 727005 - DNA, 299 bp, Homo sapiens
ggctcagctcaggtatggggatgatgtgctccgggctgctctgcacggggctcacggagccagctccagaacgctatagtgctagggttgccgtgtggctgtccaggagcaacagagaggcacaagcagaggccgtgggtgaggatgagccgccccagcgactcaagccgcagaggcagacgccacctggactgctcctccctgccagctgggcctctctggcctattcctaccttccaggcccactgcactcctgtctgggaggcccttatgagggcagcccagccccccgcacccac

SEQ ID NO: 727006 - DNA, 355 bp, Homo sapiens
gtgttagaatgcctctgggttggattagatgtcggagtactatgtgttccaatcactagacatatggaaacatggtgacaggtatctctctgtcgtggggaatatttcgggagctcacacagcactctgccactagcaatggagagacttacactggtttgatgaggacaacactaagaagcacctgtgtggagcagaataagaaattctgtaaatacctagacaattagctaaccagaccctatgaagaattgatgcctataatacctcatatagaaacccattactgctatgtggttaaagcaaaacgttccattactgctcattgtgtcgtagagaggagcttggtgtctct

SEQ ID NO: 727007 - DNA, 483 bp, Homo sapiens
  misc_feature (4)..(4): n is a, c, g, or t
  misc_feature (18)..(18): n is a, c, g, or t
  misc_feature (22)..(22): n is a, c, g, or t
  misc_feature (75)..(75): n is a, c, g, or t
  misc_feature (77)..(77): n is a, c, g, or t
  misc_feature (82)..(82): n is a, c, g, or t
  misc_feature (91)..(91): n is a, c, g, or t
  misc_feature (101)..(101): n is a, c, g, or t
  misc_feature (163)..(163): n is a, c, g, or t
  misc_feature (177)..(177): n is a, c, g, or t
  misc_feature (185)..(185): n is a, c, g, or t
  misc_feature (187)..(187): n is a, c, g, or t
  misc_feature (200)..(200): n is a, c, g, or t
  misc_feature (203)..(203): n is a, c, g, or t
  misc_feature (212)..(212): n is a, c, g, or t
  misc_feature (215)..(215): n is a, c, g, or t
  misc_feature (222)..(222): n is a, c, g, or t
  misc_feature (238)..(238): n is a, c, g, or t
  misc_feature (242)..(242): n is a, c, g, or t
  misc_feature (268)..(268): n is a, c, g, or t
  misc_feature (274)..(274): n is a, c, g, or t
  misc_feature (296)..(296): n is a, c, g, or t
  misc_feature (298)..(298): n is a, c, g, or t
  misc_feature (310)..(310): n is a, c, g, or t
  misc_feature (326)..(326): n is a, c, g, or t
  misc_feature (354)..(354): n is a, c, g, or t
  misc_feature (368)..(368): n is a, c, g, or t
  misc_feature (397)..(397): n is a, c, g, or t
  misc_feature (400)..(400): n is a, c, g, or t
  misc_feature (409)..(409): n is a, c, g, or t
  misc_feature (454)..(454): n is a, c, g, or t
tcanaaaaaactttattntganaggcggggctgatcccccccatgttgggagacaccatgtggcaagtgacaaancnctganccccccccncttggggccncagtggtaggggtggggggagggggtggcccccatggctggggtagtaccatgactgggggnggggggggcaaccngaggcctncngctttgggggggngcnttccccccnccntgtcccnccccctctggggtccnggcnaggcccttcccgtcctccttttcctncctctnccccagggtaggcccaatcctntnaaatttgggtcnctttgccgggtcttcnttcctgccgatcttcctgagcttccccncatggggggaaatncctggtggggtggttggccgcccctcccnatncccccttcnttcccatctcccttttggggaggtccgccaagggtccctcccgtntcacccgtccccccagaagccctgcaaaa

SEQ ID NO: 727008 - DNA, 296 bp, Homo sapiens
caggtgaatcattcacaatcacactgctgtttgttgccgtatccattggctactcgcttattttgtagggtaaacagcttgtttctattaaattccgatcgccatcgattgcgagtcagagaatgcaggtgtgtgttattgatgtgggaagatcatatccgagagcgagggagaaaacagtcacaagtttcatggggcattttcaatagactggacggaacaaactttcttgtatttgaaattcgtttaacatgtcataactccttctaaagagttgacgagcgatcaacgaaatg

SEQ ID NO: 727009 - DNA, 121 bp, Homo sapiens
gggtgcggcgtcaggcctgtgggtgtggtgtttgtgtggtgcggtgtgctgttgtctgctgccgggggactcctctacgacgtctgaccctgccggcctgcacagcttggacctggccgtc

SEQ ID NO: 727010 - DNA, 289 bp, Homo sapiens
tgctcttctgtgattctgtacttttcccgtaacttcaggtgcagctcttcaacatttcttcttttctttttatcttgctgtgtggcgaatctcagactacagagttctttcgccactctcgtgtgtttcatgctttaactcgcgattttatttctctctttttcacgatagtctctttagtagctacactacgccttatttttcagcttttcagactttttactctaagcttgctcacgagggattatcttttaagcttctgttaatccttttaccataaaccaaaatg

SEQ ID NO: 727011 - DNA, 152 bp, Homo sapiens
cacatctagcccaagagcatgagcacgtggtccaggagagccttcaggcccttgaggccccatggggcagtgctgtgtgggcagaggaggggtagatatgcagcagcgagccagtgaaggacctctgggcaacaagttcccaggccctaaat

SEQ ID NO: 727012 - DNA, 454 bp, Homo sapiens
gctgtctccggatgtgtaacaggaccgatcatgttatatccagatactaggctagtgattagcatcgccatttaaagtgaggaacctgctgtataaagatatgctggtcctgcattaattctcgtaggataagggcctccgactgcatacatgtcgcagccaaggacgtaatttaatgcttaaaaatggctgcctagtatcaaatagtgtatacataccatgttttctttatcagtccaccatggacaagcatctgagttgattccatgttttagctatggtgaatttggctgcaatgaacacatgagtatatgtgtctttcatagacagcacaatttatacacctgtgggtatttacccagtcatgggattgttggggtaaaatggtagttctgttttatgttattgcagaaatctccaaactgctttccagtagctgaactaactcacattc

SEQ ID NO: 727013 - DNA, 543 bp, Homo sapiens
aggaaggaattttatgagacagagactcgttctgtcgctcacactggagtgcagcggtgcgatctcgcagacctccacctcccaggttcgagagattcttgagcctcagactcccgggtagttgacattacaagcaccacgcatggctaattttatttttaagagagatgggctttccccatgctggccaggctggtcttgaactactaaacctaaagcgaactgcctggtttggtctaccacagtgcttggattacaggcgatagccaccatgcccgccctatcttctcttataaggaacaccagtcatattggattaagggcctgccctgctgcagtctgacctcatcttacctacttacaaccacaacctcagtatttccaataaaggacacatactgcggctccatgaagtgcatgaattttggggaggacaccactcaacccagtgcattacagttctatttaacataaaagactaatcccatactatacatggtgaaaaaacgacttattaaataggtgaaagactgccgtatatac

SEQ ID NO: 727014 - DNA, 118 bp, Homo sapiens
gaatggcagcgtctggatttggagactggtttagtacccaagggagcactttatgggcaataaactgctgtcagttccatgatggatccttccgtcgccagtgtaaggggctatgaat

SEQ ID NO: 727015 - DNA, 129 bp, Homo sapiens
tcgactcagaggatcctcttctcgaaaggcacagtattatgggtacgaatatcttaaaggcataatagggtccagttaaaccatactttctagccattattgcatattaatcaagacttctgtttattt

SEQ ID NO: 727016 - DNA, 962 bp, Homo sapiens
cgcagatatacagaggccgaaggagtggttgtccaaaagtccgtgtacatcttgtgatcacaagagtctggggaccccttacaacgagaacttatgcctcaggacttttcgctgtaggttaatgcaaagtgccttgccttcccacggtttaacgacagatcactttccttcggtggtctattaccgtcacataaacaaccctcgcgaattatcctttcttcccaaaggtaacagaacggggtccaacctaagtcagtcttaaagatattggaacgtataagtttcgaaaagtaggtgtgatcttatgtccgatttcaaaaattgaaagtttttgcgcttattgtgcgaggttaaggcgcgtaaatgggcctgagttgtaagtgtataaagcgagatttaaagcgtactgctaccgagtagagatctctaactacctttagtacaactggataagcgtatacatatttcatcgtgtactttgattgatatgaacgaatatcatcgaaatattgtttctttcaatagagaatccaaatgtatctgtggcatgctgtaagttgaattatagaacctacgcaaattataattatgtctctatatatttattgcaaggtaaggaatataaggaattagtaggagagacatatgaaactgtgcaacgagtgcaaaagcttctgagcatagtgctaaaactgttaacatacttagactctcaccgaaatggcaaaactcctatttagcgtgcagaatactttaattcaatgtagaattttcctattaatcagtcaagtatgaatcctaacaataatgctcatgtgacaacctagtttagattattccagaaattaaattcaatttattttctagagcttaagtaaccactacgttaacctgaaatgagatgttaggtttcccgtgttcctccgaatggttcttccacactcaaaataatggaatatacc

SEQ ID NO: 727017 - DNA, 1423 bp, Homo sapiens
  misc_feature (374)..(374): n is a, c, g, or t
gcacgctacctagctagtgctcatagctaggagaccgacagtggtacttccagtatccatgcgttacgcagagcttgtggagtgcggacatgtcccatgaaggaacgtatgcaccactaccgtgagaccaggtcgtgtgtctcctagttggcatcagagtcctggcatgtaacgcgcagtgagtgatactacgagctcaccacatggcgtgaatgagtggatgctcgcgagtgtagagcgagtagatgcaatcgtcgctcgcttcggtcagtaaggaagtagagcccccgagggcgaccttcaatttgcttgcgacaagattagactgtgtccctctcggatctattcggaggtgaccacccgaatcttcttantaagcgtacgtggactctctagctagctactagcgcgtcatggggcggtcgaattgagctttgcgcgcggtactgtaccgatttgtagacgccttccagaagttgtgtggagccttggagccgcatgagtagttagtacgtggggcccccttgtcccggatggcccagttctacccaaacgcccaacacgtactacgcacgtactgccccttgacttctatgcgagaaagttgacagatcatagaccttcgtagacacctgcttgtcgcgggactgagttgggctcttggagaaaattaccgcgggagcgtgctaacgctacattgggacacgacaagtggcttgccgtggccttgcgactaaccttgatccaattggcgacagcagaaggctctatataaagatttggcgcccccttttcttttaaacacgcggccaacttaaaaacaaaaagcgcaaaccaggggcattgaggccaacttggcaccaccgaccttaggggcttcttggactcgcctagtgtaccttatggaagacggccgcagttggaaaaccgcttggtttgccaccctatttggccgcacattatgccaaattatgatcaagttgtgcaacgacacccaaggcgatgaggacacacacgcaacatttcccccctgtgcggcaaaattacacgcggtaaattgtcgtaagcattaggccctagacgcgcggcaagggggtgaggcccgtttttccgacaacttgtgggctgaggtttcacggggctcaccgcgttgttgtctccccccgtgtaaacagggccctttccattggggggcgccagcaacgtttgtgcaacggccggctttctgttcaaccttggcttttgtttattaccccttgaggtatgtccggactttttataaccttgttaggggtcggtttggggctttggcgcggaggtgcaccgcgcggcttttgtgaccgcctaaggtttctctcgggcgtcctgatctccacccatttttgtgtcgtcgttgtgttgggcgccgttgtcgtgtttaaca

SEQ ID NO: 727018 - DNA, 205 bp, Homo sapiens
aaaaaaaaaaaaaaaaaggggaagggaactttcctttttcttgctcctaattcttgcaatgtaacatgcccactcccctttttccttccccaatgatttaacaattctgagggcttcctcggaaaggtgagcagatgccagcaccatgtttcctgtaaagcctgcagaactgtgagtcaattaaccttctttataaattaaaaaa

SEQ ID NO: 727019 - DNA, 116 bp, Homo sapiens
tacggatgatcagcacgcacaggtgacacagcaagactccatctcaaacaaactaacaaaaaacaaaactcaaactgcacattaaataacagtgcatggccaggtgcgttgctgat

SEQ ID NO: 727020 - DNA, 251 bp, Homo sapiens
tgactctagcggatccctcataggttcgcagggtcgtgtgggagggggtggctccctggaggagaagtccatctggtggtggagaagggtctagtgcaaggatgcagactgggccagtatgtgtgggtccatgcaggaagctgagggaggtggaaggcccgtggggctcgagcgcatctgcccgccctagtcggggaagagcaggaagccggagaagacgctgtcagagccctggacctgcgaacctatga

SEQ ID NO: 727021 - DNA, 539 bp, Homo sapiens
ttctcagtcaatgtagccacccaactgtgggggggcaatgggaaactgcacttgcaattgttcttgtcttggtaagtttaggcctggtgtgtgctgcaagggacactgggagccctgagaaaggcttcttaaagtggggactcctaagctgagtacttaaggacgagaaatttgctaggtaggcaaatggtttgtgtgtgttgtggaggtggaggggatgggaacagcaggtgggtatatcagatatcatttggttctttcattaatcatttctctcttgagaaatgatttctttctttaatcacctctctcttgagaaatcatatttttcaactcattgaaagcaatttttgttttacttcattgaggagagttctaatagctgtttaaaaatcattggctgctaattccagtatctggcacatcttggcatcggactcagttgattttgagaatatgtttcattttcttggttctttatatgataggtagtttttcttattgtatactggaccttatcaatattaagttgtagaaat

SEQ ID NO: 727022 - DNA, 495 bp, Homo sapiens
aggcggacaatttgctacaagatccgtattcgcacccaccaagctccaccttgccaacatcattgtctgcaatctttgtaaacgtccgatgaaaatgagtgatgaaaccgttcctgtacctggtggaggcctatgagcgagttgaggaaaacaagcaggtaagcatcctagtgaactgttagaaaaaactatgcgagtatttaacacagactaagactaggcacgggatatgttagaagcagttgatagtacttctgatattagggactatgcttaatcagataggatcatggccaatggagagcagacagaaaaagcctcagattcatcctttacttcgtgtatggcacattccctttaagcttcaacctcagaacccacaaatgatcctcaggctagtttatctccaaggtctgaaagcagcctcaggtatttggcaatggggagttctgtgatcaatgcttggcctatctccataatagggctcttcaatag

SEQ ID NO: 727023 - DNA, 212 bp, Homo sapiens
ggtttaaaaaacccccctgccctccggcctgggtgaaagggcaaggccccctctccaaaaaaaaaaaaaaaaaaaaaaaaaaaaaaatgtagccatgcccatgttttaagaaagggccaaaaatattataaatagcaaaaacccccttttttttttttttgagacaaagtccctgccctccggcctgggtgaaagggcaagactccctctca

SEQ ID NO: 727024 - DNA, 202 bp, Homo sapiens
ccgggcgccgggtgcctctgctgctcctccttacggctgtgggtggttgtgtcgcttcccacttactgtgtttttgggacgacgtcctgtccgtggtacgtcctactccttgtgggaccgacttacgttttacggccttggacgtacggtttacggttactgtaccgtacgctctacggaccctacgtgtgtgtggacgact

SEQ ID NO: 727025 - DNA, 147 bp, Homo sapiens
atattcagcaggtcatatatcatttccattctgcctctttattatctctggaatcctttccttctctccatcttaactgccacgaccattaacacttcttacttagatgcctactgaatcctcacgactggttgccctgactccagg

SEQ ID NO: 727026 - DNA, 430 bp, Homo sapiens
acatttccaattttgatgctgaataaaagtgtcatgtgcccgtcatcccagacagtagttcacaaacagacacacctgtgcgtacatctgtctatctgtttcctgagctgggtaaaacaacagcacagaaccttcagtcctggtgagtgggtggctgtgcccctgtacccatggcaagcacgaaacccagtcgtgagaaggaaacaagtgatgaagcttaggcacgtggcactgtgctactctcaggacgcctcaacagctctctcccatgttagcccttcaacagggaagacccaaacctgtgaggaggcgactgtcccagacctggggtcccaggcgaatgtccacaagttactcaaagatgcaggacgcagtctccttgaacctgccatttccacaggggccagaggaggtggggtttaacaaaagc

SEQ ID NO: 727027 - DNA, 1492 bp, Homo sapiens
  misc_feature (1347)..(1347): n is a, c, g, or t
gtgtttctgtgcgcctttctcgtcttcttgcgtctgtcgctattggtacagtgtcgtccttattggcgggggtcgtgtagtgtctcttcctctgctgttcggtctgcttgtctcgtttggtgcttgggtcctgggacgggctgcggtcgccgctgcttgtgtgctgcaatgcggctgctctgtttatgtaagtcttgtcgatgtgccttgcttccgttgtgtttcatgttgctttctctgtctcggcacctgttcttgtggggggtggtgtgtcttatcccgtaggggcgcgtcgcctgtgctcttcgctgtgctcgtcgctgcctacttttgtgggggtgtgtttgtgtggcgcggttctttgtgtggctttgttccactttggttttggcaatctcttggccgtcccctcctctgggttgtggtgctgggggcaatgtgtgcttgtttcaccccgggggctcattcgtgtgcgctttgtgttgcccgggggtggcctcggtgtccttttcgggggtcgcgcgccgtgcgcgcgtctggtgtgtgtgtgtagccctgctgctcgcttagtggccgtttttgggggccccgcttcagccggcttttgcacagcgtgggatttgtgtgttgctctgtggtcctacattgtgcgccccgtagtttgagggtgtcttttgttggggcgcgtgcctgggtgtagtatcacggtggcgtgttttggagcacttttcccccgagtggtgtgtcccttgtattgtgtggtttgtgttctccccggccccgcttgccgctgtgcgcccccgagtgtgtttagggggtatgtatggccaccggtgtgtgtctccttcctggtaggctagctccctgtgcggggggggggggtgtgtgtgtgtacgtgcggttttctttgtgtgacgtgtgtcgttttgtggttttatatcgttgaccggggttctgtaaggggcgcgcccctgatgggtggtttttggtgtgttttggttttgctgatgcctgtgtgttcttctggaaccgcgtggaccatacctctcgttctgggacctcgtttgttgtaggccgcggctctctgtttgccccggagcgcgcctgtaatgtaacgagtatggaaagggcgtgtggtgtgccgggatccccttgtggattctttgagacacttgtcaaaattaacaccctcggtcacagccgacgtttatagcctctgcccccatctcgctgtttctccacgagtttaggctgtccggggacggggctcgagacgggtgggggactggaaacccctctccccgcggagaggacgtcgccacttctgggttttccactttatgtacntgtttaccactgaaagataacgatacctcctctgctttactggatacccctgatgttccagtatttagacctatgccatatttctttacttttcctttataaacatgtttgtttacaaccctaaaaaataaaaaaacaataaaaa

SEQ ID NO: 727028 - DNA, 160 bp, Homo sapiens
tttgagtcgtgcataacactccatgcatttcgattccatttctgccagttttcttccattttattccattccgttcgattccattccattcgatggcattccattcgaatcctttccattccatttcattccattcctttctattccattccatttcatt

SEQ ID NO: 727029 - DNA, 335 bp, Homo sapiens
acatgagtgtgtatactgaaggaactgccggactggttcggtgcagaaatataaagatccttgatcctcacgagccacaccatcgagatggcctctttcttgtccagtgtcacccagggactggacacgccatccaccaacagctggtattctgcagcggaatactctatgtagtacacaatcacagtacattgatatttccctgagtcataaatccggacttcaggaatgcatcactctctgtgctcttcatggaggagatgttgtatatcagcacgtcatccttatagaacagcatctggtgcttaggctcgacgtgagaggtggtgctgaca

SEQ ID NO: 727030 - DNA, 715 bp, Homo sapiens
  misc_feature (548)..(548): n is a, c, g, or t
aacagcgactcatcacttgcatcttatatcttaggacccatgccgtgacgcgcgtaaaacaactgggatcgctctggagctcctcctaaatagaccctgccggaactagccaagtaggtagatctcgctctcttacaaatacacataaccgctccttcagtacgtgagtgccgtttagaatcacaacacagctattccctagttcctactgagttggctcagatggtgagcatgaggactgaatgcagcgctgtcgggagaggccgagacgagtttcgatcgatgcatagtcacagatatgcaaggcactacctgaataccgtgagattacttcccgtgagtaactatatgacacatgcaactagataagtttgaaaattcaatacaagcgagctggtgatctgattgcccttttttagccaggtccaaaaggcactaaggtagtatatacgccgcatcatatttagggagggtgaccactatggtacgcaccggaagaaggttatcgtcaaacgaacgtatgaagagttccgccgtatcgaaggtcnccatactggatgagtaacagtcatcaacggttaattctatgcccgagattcaggatgttatcgagatctaagtgtgtagacatatggctgaggtgagtggtaaaattcgagaacctaaacacgggaaaacgcctttagtaggttgaaatgacaaatgggttctgtta

SEQ ID NO: 727031 - DNA, 188 bp, Homo sapiens
gatatggtgctcccctggcaggcaggcccagtgggccagtgtgcactcgacacagtgggcagatgtggcagcaggtgcaggagtagatggggtggcagtgcatggcaatgggggagctggggccatcaatgcagggcacatcggtggggtcagtgccagtgacctctgctgtgtgatgtgtagcagtg

SEQ ID NO: 727032 - DNA, 816 bp, Homo sapiens
tacggctaggtacgaggctgggtttgcgttgccactctcgcactctgttctttcgccgctccgccgtcgcgtttcctctggccggctctgcatgtggcctgaagatatcgccgcgctggtcattgccaatggctccggcatgtgcaatgctggttttgctgcggacgacgctccccgagcccgtgtttccttccatcgatcgtggcgccccgagacgaccagggcttcatggtgggtatgcggccagcaaggtacgtcctacgttgggcgacgaggactccagaatcaagctggctgcgtcgatcctgaccctagtaatgctacctccacttgacgcatggcatcgtcaccaatctgttgactgatcattggcatgagaggagtcttgcggtcatccaacagccttactagcaacgaaggctgcagtcgtgaggccccggaaggagcacccatttgctgctgaccgaggaccctcctgaaacctcaggggcatatacgagagaatgatgatgtcacgacttactgttcttgggatcgcttacaatcgactcccgagggcatgtggcgtaggcgcatactcacggtcgcgtgctgtcctctctgagcgcctcttgtgcgctccactgggcattgtcatggctctctgggagacggggtctcccacagggtgcccatgctccttgggctagctgcctcgcccatgccattctgcgttctgtacctgtcttgcctggacctgagcgattgctcttgaatatctcatttggctaagatactgcttctgcagcactgtctcgcgggaattttgcgctaatc

SEQ ID NO: 727033 - DNA, 886 bp, Homo sapiens
gaaagtttccttctcaggcacaggggatcctgaaaggggaacttcatcttttagttcttggagagtacatacaaatattcataataacacatatttgtttataaaaatctataatctcttctaggtgatatgatgacattattttataacttttattgtgggaaactattttttctaattatgctaaaacttaaaggatgggtaatatgcagcattactatttgcacataattccaaaacatcgtattttcttattcatgtatctctagtcttcttttagacagtggacccttttttctttttctttttttttttttaagtttggtgaacaatcctggggaagtcactaggggtctgggggggcggctttaaaataatggagtaatttggagctggccagtaggatctatggccgggactaaaatttatttcctaatcttcggatgaccaagaagggaaaacttcaggttggcagatgtgagatgaaatatagccggtgaatatgcatacggatcggaatgaaggaataacctttcaagtcaagaggaacggtcgtggttggcgggaaagtgagatttccctgcggagtggggagtagttgtggttaaatctcctcttgggaacagctgggccttttctccaggtaaagaacccctagttggtgcgggtaattctttctttaaaagagaacgtcggtttaaataagtaaagcccaaaactccctctatttttatcccaaagaaaacctggtaaggggagggaattaccgcgtcattcttctaaacaccttttcaatgtgttttacacagcaatggcgttattaatttagggcacaagggagaaattcacttacacgcaaaaagggggggatcacacacaggataga

SEQ ID NO: 727034 - DNA, 138 bp, Homo sapiens
atcatgctggaaaggcattgtttatcaccaaattgttcctggatggttgggagaagttgttcttggaggatgtgttggtaccattctttatttatgactgtgttttgaggtaaaattgtgagtgagcccactcccttg

SEQ ID NO: 727035 - DNA, 1736 bp, Homo sapiens
  misc_feature (388)..(388): n is a, c, g, or t
  misc_feature (498)..(498): n is a, c, g, or t
  misc_feature (810)..(810): n is a, c, g, or t
  misc_feature (1559)..(1559): n is a, c, g, or t
gcagatcgatggcggcgcttcgtgcccgagcgaggtgcccgcgtcatccgtgcgcgatgcggacgattgtaccgctgactgctagcgcacctaatcgtgcgaggacgtgtaccctcgcaccagggctcgacgcaagtgtacggactccaggcgttatcgcacacgtaggaactgccacattttcctattgtgcttttgttgcgagtacacagaaggactagctcgatactacagggtagtggaaccatgggcttctttggtatggagcatgctagccgatacaatgccgagtgaggaccggtgtctctggtgcagacactatctgcctcccagaaaggccttgtccaatactggtcaatagtgcaaagagagaatgttcctggtgtgntgtaatcactccccaccgatgattcagtctgcgtgtcaactgtgtctgtagctgagtactgttcttgagatgtgtgaattcacttgtgagacaatgtgtcagtgcaacgnaccaaagagggtctcacagccaatctcacaccggaccgttagtcttccaataggccacctcgacacgtgtgtcacccctctgcgggagctccactctcacaggagtggtcctggaatcctgtggttcgtagcgtaccaagctatacataaacagtggggacgagtctcacgtttgagaaccgcgacaccttacgtatgtgttttgggagtcttcccgtacgttctacacatatacgtgctatcgcaaagacatcctatatatgagaacatcccgtgaattggttcgcgcgaaatttttggccctcgtgggcnttcgtagttgttctgcttgtgcacaactctggggggtcatacctggtgggcatcgaccttgcgtgaggaactagatgggcttgcttggggggcctcgaccgggggaggtcggtcactcccaattttcccccaagtccccacgttggcccttcttgttccatcgggccccctaagatgcgtacccgagtgggcatgcgtccgttacctccgcgtgaataagccattggtttggccgcccagagtgggtcccttaagtccaactcttttggtggcgattggcccttcgccattgtgttctcgcccgtatgagtggggcgcgcgtcctttccttcataagtttccttcgcggggacgcgcaactggaccttctctctcgagtctccggatggcaaaccgggcacgccgttggagtgtaacacctcgcgccatttctacacctgggtgtgtaggcgcttaggcctcaatagtgctcgagcagacccatgagggtgtgcccatgataccccgttaggtgcataatataccctcaacgaatgtgcggccccagggcggtgccctgggggcttgtcgataacctccttggtgttgcacagatccatgtcccaacgctcccggggaacgcgccacatgatactagatgcccccaagatttgtgaggaacccgccaccacagaacaacccgcgaacagacacagcagggccatacacatacacggggcggggcagacagcagacacaccaccaggagncgcgagccaccaatcagcgcttggcagcaccgccacacgtacagacacggcagcaacccccagcgcgccgctccccacgacggtgccacacacaccaacacgacacgcgcacgagctacgcacacagaccagctccacccactacacaccccaccgcacccagcgtcacaacagaca

SEQ ID NO: 727036 - DNA, 157 bp, Homo sapiens
aggtgtgagccatctgtgcctggccttaggcgttatgttctttaaaatagagaagcggtaggattacatattattgtgtggcagaataaagtttttctgttataccataatttgtctcaagtttttggcaattactacttctaattctagctttaac

SEQ ID NO: 727037 - DNA, 371 bp, Homo sapiens
  misc_feature (31)..(31): n is a, c, g, or t
  misc_feature (33)..(33): n is a, c, g, or t
  misc_feature (36)..(37): n is a, c, g, or t
  misc_feature (55)..(56): n is a, c, g, or t
  misc_feature (65)..(65): n is a, c, g, or t
  misc_feature (70)..(72): n is a, c, g, or t
  misc_feature (78)..(78): n is a, c, g, or t
  misc_feature (81)..(81): n is a, c, g, or t
  misc_feature (99)..(99): n is a, c, g, or t
  misc_feature (101)..(101): n is a, c, g, or t
  misc_feature (114)..(114): n is a, c, g, or t
  misc_feature (119)..(120): n is a, c, g, or t
  misc_feature (122)..(123): n is a, c, g, or t
  misc_feature (126)..(126): n is a, c, g, or t
  misc_feature (140)..(140): n is a, c, g, or t
  misc_feature (143)..(144): n is a, c, g, or t
  misc_feature (156)..(156): n is a, c, g, or t
  misc_feature (162)..(162): n is a, c, g, or t
  misc_feature (164)..(164): n is a, c, g, or t
  misc_feature (166)..(166): n is a, c, g, or t
  misc_feature (176)..(176): n is a, c, g, or t
  misc_feature (183)..(184): n is a, c, g, or t
  misc_feature (188)..(188): n is a, c, g, or t
  misc_feature (191)..(191): n is a, c, g, or t
  misc_feature (200)..(200): n is a, c, g, or t
  misc_feature (212)..(212): n is a, c, g, or t
  misc_feature (229)..(229): n is a, c, g, or t
  misc_feature (233)..(233): n is a, c, g, or t
  misc_feature (236)..(236): n is a, c, g, or t
  misc_feature (242)..(242): n is a, c, g, or t
  misc_feature (250)..(250): n is a, c, g, or t
  misc_feature (253)..(253): n is a, c, g, or t
  misc_feature (262)..(263): n is a, c, g, or t
  misc_feature (275)..(275): n is a, c, g, or t
  misc_feature (289)..(289): n is a, c, g, or t
  misc_feature (291)..(291): n is a, c, g, or t
  misc_feature (302)..(302): n is a, c, g, or t
  misc_feature (305)..(305): n is a, c, g, or t
  misc_feature (309)..(310): n is a, c, g, or t
  misc_feature (319)..(319): n is a, c, g, or t
  misc_feature (326)..(326): n is a, c, g, or t
gttgtaaaatagtacagtattcgttatggcncntanngtgttagtccgtatggtnnacagccctnagtannnggtttngcnggaaaatcacaagattcncnccatcctcggtantagannannacnagtcattgtcacanttnnctttagctcttntacagngntnatgtaagctntcatgcnntctnccngagagtccnttccagctcgtnccaggcatatcacttgncctngcncgtgangtccaacntcngggtccganntgtacctatgtngccagcagttgctngnttgtagtggtnatncttnnacagcatcntgtcatnccatgtctcggtcaaagtgtgcctaactcactctcaagctttctc

SEQ ID NO: 727038 - DNA, 424 bp, Homo sapiens
ataatagtgcacactgtatagatggcgcgtggctgcattcctctgtgtcccaagaactatctctccccaattgggctgtcccacccctcggctggtcacagtatccgggcagtgctgcgaggagtgggtctgtgacgaggatagtatcaaggaccccatggaggaccaggacggactacttggcaaggagctgggatacgatgcctccgaggtggagttgacgagaaacaatgaattgcttgcaggttggacaaggcagctcactgaagcggctccctgtttatggaataggcgcctcgaatcctatacaaccctttacaaggccagatatgtattagtttcacacaacttcatggtcccagtgctcacagacctgtggacctggtatctccccacgagtcaccaatgacaatcctgagtgccg

SEQ ID NO: 727039 - DNA, 416 bp, Homo sapiens
  misc_feature (5)..(5): n is a, c, g, or t
  misc_feature (77)..(77): n is a, c, g, or t
  misc_feature (89)..(89): n is a, c, g, or t
  misc_feature (145)..(145): n is a, c, g, or t
  misc_feature (260)..(260): n is a, c, g, or t
  misc_feature (286)..(286): n is a, c, g, or t
  misc_feature (347)..(347): n is a, c, g, or t
caaangaaaaagaagattaatttcgggtttaaaagtatatgtgggaaaggagagctgttcaagagttaaagaccttnaaaaattatagncttaaatgcatgtcctgcaaattatattagaactttattagggctgggcacagtgnctcatgcccagtaatccccaacactttggaaggctgaggcgggcggatcacttgagtcccaggagtttgagatcagcctgagcatcatgatgagacctcatcactacaaaaactnaaaaattacctgagtgtgatggtgancgcctgtggtcccagctactcaggaggctgatgaggcagaattgcttgagcccaggaggtnaaggctgcagtgagccactgtacatgccactgcactccagcttgggcaaaaagaatgagaccctgtgtc

SEQ ID NO: 727040 - DNA, 142 bp, Homo sapiens
acggtagtaacagagttcgtgatgtttaagaacgcattcattctaactgggtgagttcgctgtctgtacatcggcgccctccgatctaggggtgcgcgccccagcttgggacactcgcggcgctcattctaagactacagcg

SEQ ID NO: 727041 - DNA, 447 bp, Homo sapiens
  misc_feature (389)..(389): n is a, c, g, or t
caaattcatgtgttgagtttctaatcctaccacctcagaatgtcaccttatttgaaaataagatcattgcaaaagcaatttctagttatgatgaggtcatagtggagtaaagtgggcccctaaaccaatatgactgatgtccttatgaaaaggagatatttggacatagacatatacacagggacaaggctgtgtgaacctgatggttgatattgagtgtcaacttgattgaattgaaggatgcacagtattgttcctgtgtgtatctgtaagggtgttgccagaggagattcacatttgagtcagtgggctggggagatgcagacccaccctcaatctgggtggggcaccattcttaattcagcttgccagcattaaaaggcagggcntgggaaaggaggcaggactttgcttggaggtctttcccaggcccacccttctttttct

SEQ ID NO: 727042 - DNA, 287 bp, Homo sapiens
  misc_feature (21)..(21): n is a, c, g, or t
  misc_feature (41)..(41): n is a, c, g, or t
  misc_feature (107)..(107): n is a, c, g, or t
  misc_feature (151)..(151): n is a, c, g, or t
  misc_feature (153)..(153): n is a, c, g, or t
  misc_feature (176)..(176): n is a, c, g, or t
  misc_feature (283)..(284): n is a, c, g, or t
atgtgtccagtattttaccantggcctagatgtacaaaccnttataccagaagccacaacccctatccatttttaaataaaaaccagggaaatggtttaacaaaccnagggttggtttgccccaagtcattgccttttaaaaatggtttcncnatacataatatatatggaagtgncctaagaaataatagaaacatctttcagaagaatgtagtttgatatttatttagtataaaacgtttgtgcacagtgttaacaaatacaatttttacaaatcaatttnnaaa

SEQ ID NO: 727043 - DNA, 204 bp, Homo sapiens
gtcgaccagcaatatcccagactccttggagtcttgttcctgccaccaggtttctgcctgaggagcctacccagtttataataatgtgtcatgagctcagagcccaaacttttttttactttctgttctctgtgaatgcgcatatgaacacaatcaacaagcctttcaaaagatccacagccacacttctcttgtcgacgcggc

SEQ ID NO: 727044 - DNA, 557 bp, Homo sapiens
gtcctgttcccaccttacctgaaggcattacagtggcatacacagtcccaaagaagacggaggattcggcttctgaagtaacagtggaagactccggcgaaagcttggaagatcttatggccaggatgaagaatatgtagacagtggctggcttctgtcttattttctctgcttatgctagtcccttggaattgaacaatcggaactaataaaacttagcgccgccttagttggcatgtgtatcttcacggagttgttatgctgtgtggaactctagtggtttcctcctgcttccgtatacaacctaatcagtaccacagcgacagaaagagaaggggtggaccatcccatccgtgtctgtgcgtacggctctggacgataaatagcacaaattgaggatggactgactgtgtggcctggtggctgtggctgacaggtgtctgagtgaatggcttcctactggacagttactcactactactctgaccaggagtgactttaaacagcctatagaataaaaacatcaatgtaaatgagctaaatacctaataaaaaat

SEQ ID NO: 727045 - DNA, 320 bp, Homo sapiens
caggaagtcccttgccatcctaaaagcccccccccttttttttaaggagaatggcccagtcctttcccaagtccccccagggggggggatagcattgctttcgtgtaaattatgtaatgcaaaatttttttaattttccccctaaaacttttttattttttttttttttgaatgatgagccttcgggcccccccttcccccttttttgtcccccccctttagaggtatgaaggcttttggtctccctgggggtgggtgggggcacccagggcttccctgtcccctgacttgagcccagttgaataaaagggcccccctta

SEQ ID NO: 727046 - DNA, 757 bp, Homo sapiens
agcggaggagtctggaggagatgcacttcgacaggggaatctggtcggcagccctgacctggagacctgggccgagtgacagcatttaagccagaaggccgcgaccccagtcagcccgagtcggccggctacaatgcgctgcactatgccaggcgaatggggacctacgcatgtggtggccgctatgctgcgttgaaaagcgggagactcaaatgttgagtggccagaaaccacggggggtgccactggtctggcgaccgaagccagggtacatgcggggcacacagaaattcgcggcggggccctgagtatcacactgtggtccacaccccaaagggtgggtgggatgacgacagggctgagccacggctggcgataaagctgactgagaagaggggtccacccaggggacatctagcgcgcatcctcccggggaacacagaccagagtctgaaagaggggactaccggggagacggaaaaggcagcggggtagacactgtgacactgcgggccttgccaaaaaagtgagacctgacgggagactgctatacccaagactgaggaccgtgcagcctatttcgcagcgtgccttttacaagggtgacgacaggacacacggttcctccaaagcccctgtgctttggtgccagcatttcatgctgctgggcccaaggaaccgtggaggggcaagaacataccagggaagaagccccaagtcttggtcacctgggggaaagccaggggagtatcccttt

SEQ ID NO: 727047 - DNA, 107 bp, Homo sapiens
cctcggcctggtgggcgctcgacgcttgcattggtctatcaaaaacatcaaactcagtgggtcagaacataaggtcgagcgcgccgacgccgtcgagcgcgccgacg

SEQ ID NO: 727048 - DNA, 126 bp, Homo sapiens
ggtgaagttcagtgctgaatcgcaacactcgccagtttggaaaaaaacatcttttcggccagggatgaggagacatgttggaactcagaccagacctggagatctccgagggacccgacagccgaa

SEQ ID NO: 727049 - DNA, 831 bp, Homo sapiens
cccgtcttatagagggtcttccttatggagaccgatggtggaccagaggggtcttgtaacggggtggtgccagtgttgaaaagtcgtaaaagagggtgaaaaccagattttggggactatacgtttgttggcccaccccaagtaaatttgttatagcagcatgcgcccgagacgctccttctcccggggtgttgaagccaatgacacacggggggttttcgacacattggcacctacgcccacggtgtttttccggcaattcccccgcacttaaggcccaatagacgagtttggcccgaaaaagtctcctcgtctagcgggagaaccccttttgagggcccgaaacagcttggtagcactttcctctaatacccccagggtatagacgcaagtgttttttgagtcctcctaatacgggaagaaggtctttctgcatcacacgggaccacccagtgcgtcagtgcagcccgtgtctcgtccttaggcgagccggcggtgctatgccccccctagcccgtgtccacacaagagggtctctcccaattgggccgccggaatccccgtgtcgcttccacgcccgggcatcttgcccggcaatcttcaagagaccccatcttcgaacaactccctgaaggtgcgcaaaaggggtgttgagaagagttttattgtaaacaccccccatgaccttgtgtatggcgcaaacccgggcgtatattaagaaggactactaatctaagaataagcggtgtttggaagaagagtcgacaccttcgcaagatgattactacctcccgtaggaacaggagaaaaaattggtgtattttttatata

SEQ ID NO: 727050 - DNA, 154 bp, Homo sapiens
  misc_feature (40)..(41): n is a, c, g, or t
  misc_feature (154)..(154): n is a, c, g, or t
cacaccctctggagctctgccgacgaggacttctctctcnnataaggtccacgtcgctacgagccatcactacaggaccgcgctctgcggcccacaatctccggggagcctgcatcaagatggaggtgagaatcaaggccttggttcactcttn

SEQ ID NO: 727051 - DNA, 407 bp, Homo sapiens
  misc_feature (55)..(56): n is a, c, g, or t
ggcccggggtccctttccagggggggggaggtgttcaaaacaaagcccccccccnntttttccctttttcacaagggccccacccccttgggggggtttttcccctttggggaagggccccaaacttttttctttttaaaaggttgttgggggggaccccaaaaaggggggttccccccccccaagtcctttttggggcaaaaaaaaggggggggtttgggaaaaatttcccttttttttttttccccccccccccggtttggcccgggccccttcccccccctgggggggaaaaaagcttttttggggccccttaaaaaaacccccttttccaaggaaaagggggttttttccccgggcccattttttcggtggggggggttccctaaaaagtttttttcccctta

SEQ ID NO: 727052 - DNA, 889 bp, Homo sapiens
catggtggctcatgcctgtaatcccaacacttgggaggccgaggcaggcagatcatgaggttaggagatcgagactgtcctggctaacacgatgaagccctgtctctactaaaaatgcaaaaattggccgggcgtggtggcgggcgctgtggtcccagctacttgggaggctgaggcaacaagaatcgctgtgaaacctggaggcggaggtaagcagtgagccgaggtcgcgctacagcactccagcctgggctacaaagctagactccatctcaaaagaaaccgaaaaagaaaagtcaaaagaccattctggagtcctctgatgaaaatgagatctatgtcgtgggtatgaaaatgacccatcattcacatgtgtttcctaggcagagtcactgctttgagtgctattggtatcatggtagcgtttgacagccaacaggaatttccttcttagtattcacattgagaaactgtgattaaccatcattctgtggcctaaaaggcaaatcagcagctagaacagttttaaaagggaccatggcagcactctcaagttctgtagcccttttgttgtttgtttactctaatgaggtcctgtgaaaatagccagtgtttgcatagataaatacgcattgtgggcgggcgcggtgctcacgcctgtatcccagcactgtggaggactccaccctggtggatgaagcgagacctcgtccaaaaaaaaaagaaaacaaaaaatgttgggggggcccgcctcaagagttttaacacactcgtggggccgggccaatggaagaacggcccctggccaggactcgggcggacgtgggttcccaaaaaacgcggggccgggtgcacacagggcgggctcgcaagggtagcacacacaccg

SEQ ID NO: 727053 - DNA, 424 bp, Homo sapiens
  misc_feature (281)..(281): n is a, c, g, or t
  misc_feature (399)..(399): n is a, c, g, or t
caaagagaactcgcttctctttaaagtcacggacattgatttttttccctctgactaatcttgagctcagcactagccagtattctcagaagtggctcctaccctttctgttgttctgtgtttgtctctgctcggtgacacccttccctggagagcccagtcctccgtgtattacaccagtgttaactgacatagcatagaccttcttcacacttcagattcatagcagcgatgggatcccttcctttgaagtgaacaagtccttgtagataggtcacccngtcaaaagtgtttgattatctacctttcaatcaacatgagattgcctcttaccattttcaacgattgttgacaggggtcctttgtttgaaaataactggggagagatacgggatttcnaatttgaataagattaaatatattt

SEQ ID NO: 727054 - DNA, 279 bp, Homo sapiens
  misc_feature (26)..(26): n is a, c, g, or t
  misc_feature (243)..(243): n is a, c, g, or t
  misc_feature (245)..(245): n is a, c, g, or t
cgacacttttcaggaacaacaagcanttattcctactttccaagttattttgatgccatggtggctcatacctataatctgagtactttgggaggctgaggtggactgatcacttgagcccaggagtttgagaccagcctgggcaacatagcaagactccatctctacaaaaaaagacaaaatttagctgagcgtggtggcgtgttcctatagtcccagctacttgggaggctgaagtgagtngntcccctgagcccagagaggtcaaggttgtggtgg

SEQ ID NO: 727055 - DNA, 131 bp, Homo sapiens
tgctatcactctattcttactctaaagaagactcaagtacaacgcagaaaataagcggctgaggaggaccgggagtcagtgtggaaagcgagcagcacatgcaatgttgctgtcatgcccctagccggtct

SEQ ID NO: 727056 - DNA, 521 bp, Homo sapiens
  misc_feature (2)..(2): n is a, c, g, or t
gncgacgtactattttcgtttttagaggtgagactgtatgtagttcatggttactgttatgacagcgagagatgtccatctgttggacagcactattctagagaactaaactggcttaacgagtcacagcctcagctgtctgggatcgacccttgtctccctgggtaggggggggggaatgggggagggctgatgaggcccagctgcggttttagtcttgggaccctccctctcctgagaggggaggcctggtggcttagcatgggcaggtcgtgtctcctcctgacccagtggttgcggtgaggggaaacaccctcccttgacgtcaccagtgggccattagctcccgttaccactgcaacccagggttccagctggctggttccttcttctgcccccagttgccttacccttgggttgttgttggagtgagcacctcctctgtagggcacctctcacactgttgtctgttactgattttttttgataaaaagataataaaaactggtaatttctaaaaa

SEQ ID NO: 727057 - DNA, 190 bp, Homo sapiens
acacattaacattggggtctgagatactgcgtttactgtctctacaggatgctattcggctatggctccgcctacataggtctattgggttctctgtctcctgcagacctttgttaatttttgtcccaaaatctgaataaacatcttgcaaagcattgagttataatagtttactgttaggtctacctgg

SEQ ID NO: 727058 - DNA, 241 bp, Homo sapiens
gttcattgatctagcaggatccccttgcatgttcggggtacgccggcacgtgttgaagagacgagtgcgcgcgcgggacgagagacgatcacgagaacgggcatcgccaattgcccggggtccttcactttgcagtcatcatctgtacaacctcttcataattgacctggccttctccatcgatgtcagcctccctgatcatctcatccacctcctcatgggtcagcttctcccccaggtt

SEQ ID NO: 727059 - DNA, 585 bp, Homo sapiens
aaccggattgtaatccttggactcaataccattccattgtttgtgcagttgctttattctcccattgaaaatatccaaagagtagctgcaggggtcctctgtgaacttgctcaggacaattaggctgcagaggccattgaagctgagggagccacagctcccctgacagagttactccactccaggaatgaaggcgtggcaacatacgcagctgctgtcctattccgaatgtctgaggacaagccacaggattacaagaagcggctttcagtcgagctgaccagttccctcttcaggacagagccaatggcttggaatgagactgcagatcttggactggacattggtgcccagggagaagcccttggatatcgccaggatgatcccagctaccgttcttttcactctggtggatacggccaggatgccttggggatggaccctatgatggagcatgagatgggtggccaccaccctggtgctgactatccagttgatgggctgcctgatctgggacacgcccaggacctcatggatgggctgcccccaggtgatagcaatcagctggcctggtttgatactgaa

SEQ ID NO: 727060 - DNA, 1003 bp, Homo sapiens
  misc_feature (7)..(7): n is a, c, g, or t
ccccaanaaaactaacggggctaggtacgaggccggggttgaatcacatctccacttcacataacgcgtgcttacgctaatgccggtggtcttgctgacggcgagttccgcagcgtccgattggctgagggcaactccagcgcagtggagaactgcgttcttccagaatctgcgcgtgcgcttcaaactgtgagagattgactttgcatggcaagtgccataatgtagagagtttctctgaagtctaacagagaaccgttttttcagtgcgcgatcttagactggtaacattagcctctttattgaaggagcctgagatgacgtaacgcaggccgtaagactggctcgacgacgttcccggtgatgacatcgaagacgaagacgatgaaatatatctgggtcagtaagaagtgaaattaaaggtgatgccgaggagctaaaacgccttggagcggacatggtgatctggggaagaacgcgctggataaagatcccgttagatgcggatctgcgcgcggctatggagctcgcccagggtattaagatggaaggtcgccgtcgcagttgcagctcatcggtgaagatgctgcgccagcgcgagtagagcctattcgtcaggcgctggataagctgaaaaacgtcagaacagcaggtggggctgtccatagactgggaatagctgcgcgatcgtctgatcgatcaaggtgatgacgccctcgcgtgagggttttaaatctcgtgggccgatgccgatagtcaggcacgtggcgtaatcatgatccgcaagcgaagcaagggagagaacgggcataagcggggcaatcggaaggcagaatttccaggatctgggcgagtttgcgggaccgagggtaaatccgccgcgagagagaaagcgggcggaagggggccacttggggggaaaaccacccaccggggtaaggcccacgttcatgcggggggggggaaccacagcgcgccaccatatttggtggcaaaataggcc

SEQ ID NO: 727061 - DNA, 1149 bp, Homo sapiens
ggtgtggcagccgtgcggtgctccgagtgacctgtgagcgcaaagcctcagtgcccctggctccctcctgagctgctgccgtgccaggcctgccctgccggtgatgcagttgtggcctgtgtggcctggctggtgtggctgtgggcctgctgctgctcctgtgcttgtctgcagctgtgtgcatgacccagtgtcagtcttggctcttggctagggtaccagcagaagctatcgtcttaccatgactgcgacagacgatacgctgcaagttgagccgctggccagtaccgctggagcttggaaccacagacgcttggcctatctctctgtcttgactcagttggacgcctagctggcaggcatagcaccccagggcccactgttgctagaccccgaccagacggacgcatgacagatgggagtgtaacgtagcaatgccgtggttgtgctgtgacttgggctgcacatgtggcacttacttgccaacgcacatcgactatgtcacgaagatattgtagctatggcatcattcgagacacacacgaacctatggggactacccgacagggccaaactcgaggggacgacctaacctggggctagaaagatactccggaatacccattcactactccttgagacaaccctatacccaacacagaggactgagacacacagcaagcggcggacaaccccacgacaaaaacaaccagccttgacaggcgatcctataccataaacccccaaggcgggcggcacggaacccacggcaacagtaaacccaaccggacagccccattgcacactgacaccggccacaccaacgaccaatggatgacgacacgattggcgaggcgggaccaaacacacaacaaatatgcgaaacttgaggcatgggaacagacaaccagagagccccagtagaagacacgaatacaaaattcacccgcaaattacccacaacaaccacttggagacccaattaatgcgcagcccatgggggcacacgaacacacaagtggaacctgatcccaagccaaccccccaagatgaaacacttatcgccattacaacacacacctaacatcatccattaactaaccctaccatcatcggcaataccataaaattgtccatccgcgaagagac

SEQ ID NO: 727062 - DNA, 213 bp, Homo sapiens
cgggactctgcatgactgggagcaagtcactttaacctctctgttgctcggatttccccttttaaaaagttggggcaaatgaatccttgtgtggtaagaactgtttactacggagtgctgagtaagggcaaaataatacccctttctctatgtatctctgtatgcacacgcactatatatatatatatatatatatatacattcatgtaatca

SEQ ID NO: 727063 - DNA, 762 bp, Homo sapiens
tatagtggccaccattgtctccaggaaggccctcccttgaagttccttcatggatgatgttccgcccccaccatgcacccctgttcccccccttttattcggcccccctttttagagccttcgaccctgcgacacaattttgtttccacccggtggggtttttgacaacagaaggcgtaaaacagaaataggatttcttttcttccccccccccgcatatataacctctcttgttttataatgtacccacggcctaagaccacgcccacctcggcgcttgtggtgcgcggaaatagggccgcgataactgattgaggtgccccccttctcttgcagagatacaacaggatatattgtcacgcacactatattcaccgtgaacacaaaagtttatacccgcccgattctgtcttgtctaccaccacggctgtcatgacaaatgtcctctgatacattatacattcacatctctacgcattatgtccccacacacatgtgctgggtcctcctctaccccacaccactttaatatatgtggcctgaacaccttcttctctcccaatataagatgttttagctagcagttttcggatagttatctcatagatgaccctttcctcgtatctcgcggcgagatttccatatgataacatctgatctactgatgtctaatatctccaaaacaccaggattcttcttctacgcacctatatcggggaaccaaaaatatggattccccacagtcccaacaatagtcacaac

SEQ ID NO: 727064 - DNA, 473 bp, Homo sapiens
ttgtagagacgaaagtgttattttgattcctagccgcagtaattcacacgccgttgcctctaccatgctctggtgtgatacggcccaactctgatttgacatgggagggaactacataagtgggtggaaacaggaggtaaagatgactgggggccatcttggaggccagctactatgcccagcatccccacccagaccttgggcagagcgaggcctgggagtggggacggtggggggaaggagttggacggggcctttctgatggcaagggaagggtcaggggctggttgcctggccgaaggttctctgacccaaacctagagccttgccatggacatcacagctccaggtaagttccagaagcccagaagctgatacctccagattagatatcctgcatggcagaaagaggagcaccgtgcttctggctactgcccccttggtaggcgggacactggggtgtgcagcaagaa

SEQ ID NO: 727065 - DNA, 120 bp, Homo sapiens
  misc_feature (4)..(4): n is a, c, g, or t
ttgnttcctctacgacatcttcttcgtgttcatcacgccctttcctgaccaagagtgggagcagcatcatggtggaggtggccacttggccctcggacttcaagccacccggtgaggaag

SEQ ID NO: 727066 - DNA, 128 bp, Homo sapiens
cgccaagcctactcttgagcgcttgcttgagcgcacgaacctacaatctaatcacgtccacgcaacgcctgtggatgtggaacgtagcaactaacaacagtcacttccgatcggaagtcgtgcatgtt

SEQ ID NO: 727067 - DNA, 171 bp, Homo sapiens
tccccgacttttcacggtgctggcgtgttgagcttgaacgctttcttaattggtggctgcttataggcctactatgggtgttaaattattttactctactctacaaggtatatttcactagctgtccacaagagctgttccctctttgcgactaacagattaaattttaca

SEQ ID NO: 727068 - DNA, 1550 bp, Homo sapiens
  misc_feature (173)..(173): n is a, c, g, or t
  misc_feature (378)..(378): n is a, c, g, or t
  misc_feature (387)..(387): n is a, c, g, or t
  misc_feature (1063)..(1063): n is a, c, g, or t
  misc_feature (1193)..(1193): n is a, c, g, or t
agattagccgccgctaatatgattaataacacacctcattcagctgaacttacccactcaccatctaataattgtctcgctatgcaatgaatctatcgagggtcacatcataatggcgacctgcccgtgatacctaggctagaccttccatccacagggtaatgatcctaagncgcttggcatctcacgtcactcagaatcgcactcaatccgttcagttatgcatctagatccgtgtcctgcaacttcacttatcgacgcagcaggtaaatatttcgatcgcgcactcgaatgtcagctcgcccggataaccaatgaccacgcgttagagaatgagcagaccgtaaagacctagtgtctcaattgatatctaaaggnctcgatctngtttcaacatagcgagctattctagtgaacgatccgagctccatagtctactataacacggaatataccaaatgtatcgtgtcttataaatcaaagaatgatccttatgaacatcaaatctgcgtctagttaagtccgccgtgcgcgtgaactatcgcgaaagcaatatgcaaatcaaggccgatatcagtatgtgcataattgtgttcctatactcccggatggaagggggcaccacacaaatggaatacatgtgactcgaaagcggagaagccgtagcattcgtagaatgtagcatcataacctataatcgcaacttccatggcgaccatccctccagtaacatactcggtgccgaatcatatgaagcggcttaaagttagtaacacacttcggacaaattcgtaggaaagagaatgtggcttaaccatacacgtgtggacgaaccaaacgatagcgcacaaaattcggccgcatttcgagcaaatctgtaatttatggcattgttgtaaagcgcctttggttctacttcatacaacttcctttgggccctcatttctaattataattgttgccgaagcccccgtcatgcgatggcaacattctcgcgagctcatacacatcatttttcttttgggacgagccttgaaatggtcgttgcaatacatgtatgcanagcgcgcacttaaggtaagtactaagccttgccacagtgtcgcggaaatagtaactccaaccccgtttccgaagcccatctaacttacccaccaagcgtgcgagagaaggaagcggctccttcagaggantataacctatagtacgtttgcgcgtcgttcctccttttttagaatggaaaccgattttacgctaattgtcttcacccagaagcctccctaaaagcgaaccccaggataaattattaaccctttaggccgagcccccctttataaaaaaccccttccccccagattagaggcccgaaaatgataataatgcgaatatcggcgtaaaacagaaggctctgaatcggtccgctaaaaaaatagagagagggtgctggagcccaaaatataaatacacctgctactagaaaatatacccctcgccgatatttctataaaaagtatatatttgcccgagacacattatttggcaatatcgaa

SEQ ID NO: 727069 - DNA, 978 bp, Homo sapiens
tgccccctgcggggtggcgccggtagctcttccggcggggcgggattccctgtggcttacgacctggaggaggtgtttatctcgcgcccgctcagcccttttcggacctatatgtcccggccctctgttgcgaagcctttcgggacggtctggcccctcgagcaccagctcttctgaggccctctggccccttttctggcgttcccggaggccccagtgctggccccccaacaggtggcaacccctgcccaatcccatgcttgtggccctggcgccccctgagcacgcctgagcctccgggccacaggttcgttctcagggaccaaacctgaggcagcccctttggatgccctctacagcccttgcgttctctcagcctaggttccccaatttggggacttcaggaccccagaggcccctatgggcttccctctgggaaagccccttagccccgggtgggtcccgccacggaccacgctaagggaaacacgcttggttccctagccactgttccgaatatgcccactcaattccgaggtcattcaatctcttgttttgctgcccttcctggccacaccacaggtggaaagaaaagtttcccaagctataggtcttggcccccttggggaatttcacaccacgtggggcacgcgaagggtgcctgaatttcgcgggaagtcctgaacccgagccctgttgtcacagagttgtggaaggggcttctgagccacgtgtttgggcacggcccgggtttcccactcccgaaggccacgcgttcctgtgcacgagccccactccacctggttctttgccctgaggccacacaataatgtctgtgccacatgggctgaagtgccaccgacacggcccctgtgacacagctgctgcccacacgcacatgtggaagctaggtgggactcattcctaattctgcccttgtaatgagacttgatccccccccccgccacttttttgcca

SEQ ID NO: 727070 - DNA, 447 bp, Homo sapiens
ctacaattctcagatcttacagcagttgatgggtggggtgggcaagacaatcttcccgtgaccacagactgaccaaattcctgcttcatctttgctgagcttaaggaattgttgtgagagagagctggacacaggcatgacacggtttcctaacagcctgcagaggctattaggcatcagtttggcacagagaactacatgcatggcatatctacatatttttctgcgtatctttaaactatcactccaggaagacatgaaggattgctacttagcataagcatttcccctgtgcagtgactgcctgcctcagaatctacctgtgcctacgatcttaagcccagttaatacacacacccatgccccagtatgggacggctcctttgtccgagcagcagggaaagacatgtctttccctgctgctctggtcacagtactagatgggac

SEQ ID NO: 727071 - DNA, 187 bp, Homo sapiens
ttgggcgccaccgttaaaacactccgggattttttttttgtacctctttggctattgcccttgtgtttcccgcccgccccctgtgtgcccccccctgtccatccagatgggtgtttattaaatcccccccttttaaaataaattttttggaattccatgggtaaataaatgctgctttggggatata

SEQ ID NO: 727072 - DNA, 433 bp, Homo sapiens
aggctctggatgcacattgctaagttctcactcccgtatttttttaaaccaaaaatgaccaccacagggtcacccaaacaacaaaacactcacagcttctgttgagctgatggttggaaaataagcagcaagaaagagacaagattagggtcttgggctttttagagtcaaactcatgccttgttccagaacacaaggcagacagtcaagtcagcaaatattcacggagcatctcctcttcctggggcgaggagctggacccggcctctgtccggaaggggcatttcctgcctcagcacaggcgctacagctttgctctcagtcccctaagtaaaggagctgctcagccttgactagcctacaacagccagggctttccggtagattctggcactttctatgccccaccccttgtggtttcttagggctgctg

SEQ ID NO: 727073 - DNA, 1018 bp, Homo sapiens
ggtggtggcggcgcgatcggccgggctgtaaccgtcgtctgtccgggagcgggtggtagcggctagtcggcggccggggacggggcagaggtgacgccacaggtacagcggccggaagcggaggaccagcgggcggcagcaggagacgcagcggcagggcccggagtcagcaagcaagcaaagagggactcgctggaagatgcggcagatcgcacgacccgtcggaacggggactccgggaccggagatatcagcgtcgccgaggactggcggggggaggtcgccgcccgccgtcgtgacatccggataccggacctgcacgaagccggccgccgagggatgaacacgccggacagtcgaggggggcatttctttaggatacacacagacaagtggattgcgaaggttaaagtgatggccatatgtctccactagtttgcacgaagaggtggttttaagagcggaggcgaggttcagttagtgtgggtgagcttcaattatgaaatgggggcagaattacttgaagttggttgaaggggggaggagctttgatggggaaaagggatacgagagaagaacatggaatttgatccgccgtgggagaaaagtgatggaggattcggggagggtccctaattgtggccaagggaatgttaccactgggacctttggaatcatgaacttccctgggatcaatacggatgaatctgggctcctcaaataaatactagttagggcgttgtcatgaagacagctgtgtaacatgctacatgacattacttcgtcacaaataggaatccttcgcaggaggaattaatacgggtagtgcattacagaagtggtggaaaggtgtgaccacaacgagtcttaacagtatggttgggcactgtaaggtgtcactacatgtggtagtcaaagagggtcggatatgggtttccgaggaattgtgcgagtagggaattctttgcaggtagaaacgggaaggaagtacagctggaggaatatatggggagtaatg

SEQ ID NO: 727074 - DNA, 157 bp, Homo sapiens
  misc_feature (5)..(5): n is a, c, g, or t
ccggntgagctcaaatgattgataaggtcaagcaagtcacatgatcataggacacggggcccttcccttataggtagccgaaacagagagggaaggcagcatacgtcagcgttttcttctacgcacttatcggaaagatcaaagacaggccgggcgc

SEQ ID NO: 727075 - DNA, 125 bp, Homo sapiens
actagaatctgactcgcattctgttagacaagcttcttacttctgatatgacatgatgtatggtattctgcaatacggattttatccacaggatcatggtcatcaaaagtaacaaagcaaagctc

SEQ ID NO: 727076 - DNA, 460 bp, Homo sapiens
  misc_feature (353)..(353): n is a, c, g, or t
  misc_feature (360)..(360): n is a, c, g, or t
gccgtgaccgggcattgcgagcctattgctccgtgcactcgtggcctgtgcctgctttagtggtgtttaccctgtcttagaaagcgttgtagtcaaatcagtgggcctatcgtttgaaaccaaaatcaaggagactgccagagaccagcaggggatctaagggatttaccactgggttagcacagacactacacttgaagatttcctagcggctgctgctgctgtttccatgataagaattcagtgagacaaagaacctgccaagctcattaaccgagtagcaggaagagctactgtgtagcctctggtgttccccaactgactcagccctgcagatgggacatcctgtaggncatgtgnatatcacacgtactgatgcggatgttctcagacaagcctagcatacgccaccagtcagaaaggctgtcaaaatattataccttctgtccgctaacaacat

SEQ ID NO: 727077 - DNA, 357 bp, Homo sapiens
gtccatgaaagattgtaattttgaagaaggaaagtgtttttcaccacacatagtctgggcgatctaggccaggcacaatgctcacatctgtaatcctagcactttgggaggccgaggtgggtggatcgcttgagcccaagagtttgagaccagcctgggcaacatggtgaaaccccgtctctgaaaaaagaaatacaaaataatttgcccggtgtggtggccacatacgtgtagtcccagctactcaggaagctgaggtgggaggatctcttgagcccaggaagccgaagccacagtgagctgtgattgcaccactgcactccagtctgggtgacaagagtgagaccccatctcaaa

SEQ ID NO: 727078 - DNA, 139 bp, Homo sapiens
  misc_feature (53)..(53): n is a, c, g, or t
tggtgagtttcagttcttccatacatttcttttttttttctgggacggagctntgctctgtcacccaggccagaggttgtggtgagccaagatcacgccaccctactgcagactgggcaacagagcaagactccatctc

SEQ ID NO: 727079 - DNA, 181 bp, Homo sapiens
  misc_feature (74)..(74): n is a, c, g, or t
  misc_feature (132)..(132): n is a, c, g, or t
gcatgtgccattctatactgtcattccaaattctcatggactacttgcctgcttgctgaaaactgctttgaaanctgcactgaaagctgcactctgctctgtcatctttcatttctgtaacatgatcctcancgatgtaacattcacccaacataaagtattacagttcaagaaagaaaaa

SEQ ID NO: 727080 - DNA, 331 bp, Homo sapiens
aaaagcaaagcaaggccagagacaaccccgaacggaacgccagctgcctggcagattcacaggacaatggaaaatctgtaaatgagcccctgaccttgaatatcccctggagcagaacgcctccttgcagaacagcaatgcagacagacccaggagcccaggaaatgaggtaagagatggcagatcatgaggaatgctggtctgggaaagatgcatcagaggtcattgctgcaaagacttgacagggttacgagggtgtcatgttaaaaaaaataataataacttttggttgcccgtgctaaaaaaataaataaataaaaactccataatt

SEQ ID NO: 727081 - DNA, 675 bp, Homo sapiens
  misc_feature (306)..(306): n is a, c, g, or t
  misc_feature (340)..(340): n is a, c, g, or t
  misc_feature (381)..(381): n is a, c, g, or t
aaccaggtgtatcaacgcaagttgccattacggacgggattatcgatcatgttcgtactaggtaggatagaaaatcatggtagtgaattatgtcttgctgtacgcctttctttcttacaaggaagagatgattcgtctagatatcatgtggtctagatagttgttcgagagtgtctctacagatatctatacataacgtgtataccctaaaattgatgttttaaggttgatgaaatcagtaatttttgatatttccccagttctttttaatggggtcaataatggacattctagtttaaggtggtngatggatttagccatatatgctgctaaagaaatngtctaccttttcttcctcacctgttccatttatgtaaagtngagattagagggaaagcattttctatatcaattgtgtttaaacctttcaagaaggttatttagctagcttagtgttgaactaaattttttttaaacaaggcaaggtctaatgctgttttgagattctgaaattaatgaaaatacttatttcagaaatgcatttaatgctttttttcttgtgacagttacgcaaatcagttgaattccatatgtccctgagttatttttatcataaagccacaaatgtattataacagggcaaattgtaatatatataaatcctgaaatcatgac

SEQ ID NO: 727082 - DNA, 255 bp, Homo sapiens
  misc_feature (217)..(217): n is a, c, g, or t
ccaaattctcatgcctcaggctccccagtagctgggattacagccacacaccaccatgcccagctaattttttgtagagacggggttttgtcatgttgcccaggctggtcttgaactcctaagctcaggcaatctgcccgccctcaacctcccaaagtgctaggattacaggcgtgagccaccacacctggcctatagtaggcattttaaatgactntcctacctttgcctttcaaaggatttgaattggcactg

SEQ ID NO: 727083 - DNA, 412 bp, Homo sapiens
cacgatctaggatagcagatactagatgtgagatatagtgtagacggatgtatggtgatattgcagggtgcgctcattaggtgctgagtaggtgctgcgtaatgtagcgggtagcgtacgccaaggctattggttgaatgagtaggctgatgtttcgataataactagtatggggataaggggtgtaggtgtgcctttgtggtacgaaagtgggctagggcatttttaatcttagagcgaaagcctataatcactgcgcccgctcataaggggatggtcatggctaaggtttatagatagttgggtggttggtgtaaatgagtgaggcaggagtccgaggaggttagttgtggcaataaaatgattaaggatactagtataagagatcaggtctcgtccgctgtgtattccg

SEQ ID NO: 727084 - DNA, 236 bp, Homo sapiens
gactatttggagtcgtccgcacggtgctcacgtgtcgacggacacttgtcccgggcggcctgccccgcagtggtcactacacgtcgaccaggctccagctgagcgatctccggaggtcagcacggtgctcacgtgtcgacggaacttgtccacgggacggcatgccccgccgtggtgacctaccaatgtcgaccctgcctgcctgtcgtgccgctgctccgggtaacctggaggac

SEQ ID NO: 727085 - DNA, 187 bp, Homo sapiens
gtgcgatgcgatgcactgtaggcagtcccctgcgtataaggcccacgctgaatatcatcttgtacctgtatggagaagacaccagaccctgggacaggaggacagcggaatcgtgccactgcttcacaaaggcaaaagctctgatgcttctatgcttcttgctgctacgtgctgcttgctgcaaggt

SEQ ID NO: 727086 - DNA, 369 bp, Homo sapiens
tgttagtacctccgctatgcacctcacgtgctcggtccccagcgtcttcccatttgttctctggtgattctgcggtaaggcacctggtacattgcttggcctgtgcttggctctatgtgactcttaacagctaatgatgatcatgcatcaccacagcaggtccttcaaagtgcgcgtgtgggtaccccagctccctaatgtaggctcaaggccccacgaggagctggctgtgtgggcatgaccatcgtctgtgctcagcggtcggtttggcctcccccggttggcgcggtgtgacgggtgctttgcggcgtaagcccggtcacagcggtgggggtatccgtcaggttcagcttgtatactgcttcaatc

SEQ ID NO: 727087 - DNA, 813 bp, Homo sapiens
ggtttttaaaactgttaaggcaagaagtgtcaaatgcttcagagttaaataacagatcactgatttcaaagacttggtgtatagtgttaaaaattaaagcttaaaaggtggttagaaaagtggattaatgcaaaaggggtaataaagactgcaacattctcaggaccaaattaaactgctaaaaaaaaaaaaaaaatgttgcatcgggactggcttagtcgatatactcaaatgatgataacccctacatggtgcaaaggctcacgttaagagatggtcacagccagcagtgctaccggtggtgtggccctggctttgccatctggggagaagaaagaattagccagtcattaagcccattgggtacgtcgccctttgctgtgcttgatcccacgggaaaggcttgacaacgacgataaagtcagcatacagcacagatgccacacagagtgcataaggctgtggtcttcgggctggggtgaaactgaacagttcctccttacatctctgaagaggtttaccccccattgcaatcttacgggcactttgtcgcacttccagctgtttgagcatgcttgtggcatactctgcagaagcaacttcatttgaaagtggtcttagattatctggaaatacgtttgagcctatcatttataagggattagtggggtctcagtcttcacgaatagaacttatagaaacaacgtgcggaccacaagggcgttccacatctagctacaggcccactttttagcaagggaaccttagctacaaatgttcctaaatgccctggaacataaaaaaaccaaaagg

SEQ ID NO: 727088 - DNA, 240 bp, Homo sapiens
cacgagggggaatcgcaatccatcaggtaattctagacctcagtgtccacgtccagtcggggagatccaccattaatggcaatcggatatatagatgacgtggaattcataaggtacccaatcaaaactttgagaccgaggcaggagccatgggaaccgtgtccatcacataagggtgcgtcttgttgaaactgaaacatacacatcaacatggcccaaccatagacagccccttagagc

SEQ ID NO: 727089 - DNA, 345 bp, Homo sapiens
gcgtcgacggcatcctagaccaaagaataagtaatgatattttcacttaaaagagtgaacatttcggccgtgctcacgcctgtaatcccagccctttgggaggccgaggtgggctgatcacctgaggtcaggagattgagaccagtctggccaacatagtgaaaccccgtctctactaaaaatacgaaaattagccgggtgtggtggcacgcgcctgtaatcccagctactcaggaggctgaggcaggagaatcgcttgaacccatgaggcagaggttgcagtgagccaagatcgtgccattgcatttcagcctgggcgacagagtgagactccgtcttaaaaaa

SEQ ID NO: 727090 - DNA, 470 bp, Homo sapiens
  misc_feature (230)..(230): n is a, c, g, or t
gcttttggaaaaaatgtttccttaaagggacgggttttcttccttgcaaatcctggtggcagatttgatatcccccctggggcagtattagagaacaagattgtgtttggaacccttcgcctcttgggcccctgaaatgaaaaaaactgtgggcccttaaataatggggtagtttcttcccatgaaatgttctctagggttttaaaataggcggggccttttctatggtnctggcccccgcagggttgatttttaaaatagagttttctccggggtgcttttagtttaagaaaagcccagatggggcaaacctttccttttttgaagagaatccccaaagttggttctttttaaagggccatattgttttattttaaaacggggcccctttgggagaacttttaacagaagccccaatgatggtccctttgaattggttggggtttcaaaaataaagccggggagccata

SEQ ID NO: 727091 - DNA, 135 bp, Homo sapiens
atacaatgcatgaaccaccgcgcctgcttttctacacattttttaaaaaaccaatgacagagaaacatgtagaagatgttaaaaatgctgggctctttatctaaagtcctggtaattattaaacactcagcacca

SEQ ID NO: 727092 - DNA, 752 bp, Homo sapiens
gagaagaaaaaacggctaggtagaggcccgggttaatcggcgagggtccatgcgggaatcaacgggctgtggctgcacaacaagctgagggccacggacgagctgtgggcgccgaccagcatcgcagatcctgactcacggacgcggtcatcgacaacatccgtctctgacattccatggacctctcgtcggcagtgaagctcaagttgctactcgggacgctgcacctcccgcgaccgcacggatggacgagatgaagggcgccctaatggagatcatccagctcgccagcctcgactcgagacccctgggtgctcatggtcgccgacatcttgaagtcctttccggcacacaggctcgcttcaacctggcagctggaggcagcagaatcccaacgttccaggatattttgggagaaccttagcagcacaacaggtgggtgagtgtgcaagcgtctgccatgctgccactggcagtgccagatacttgcaacaaaaaacgccctgacgaaccctcgacgggacaccctcactcccccggtgaagcattttcagttaaagcggaaacccaagagcgccacgcatgcgggcggagactgctgcagaagtccacaggagacagaccagcagttgaagcggagcagccggggtgaccttccacgccaagggcccggggatgctgcggaaaatggacaccacaacccactcaaaggcatccgacgcaggcgccttacaagccccggagcccaggtc

SEQ ID NO: 727093 - DNA, 690 bp, Homo sapiens
gtttgtttttcataagttaatatagttaatccggactaattttgggttccggcaggctcggaacggaatattggggcaacctttgggccacgaataagagagcacctagggcgaaaatactcaaagtcgccagcgaggtaatgtttccagcggcaaaataacttggcagggggcccaaaaatctcgttatagggcacgtgggaatggcgggcacgggttggaggagggctcggggtatatcccttctcagcaaagcgggacaagggcttcgggaacggtatggctgggcggaatattggtacatcttcccgtgggcctcaagaaaaataaaagcgggggtgcttccaatactcccagtcgcgtagccaggtggaggatcccagaaccccaaagcgggtccagtggcgggcaaatatcacagccttggcgctatagagcttcccgcccacgagacctcccaaaggggcatagaagctcgcgtgacagagcggaaacattcgcggccgaagaagaaagaaagaataacaccgagtccccccggggtgagtgggcaacccggaaggagaggctagggagtctcagggtgcctcgaaaggtggctcgctcgggaaaagccctgtggacgcggtggggcctcaaaaaggtggccatggaaagaaagctctagggatttccgcacatcgtggaatt

SEQ ID NO: 727094 - DNA, 220 bp, Homo sapiens
taaaaggaactgtgggctttgggagcttttttgggtttaaaaaggggtggggggaggggatccctcccggggtataaaggcagcccaaggtttcccaaagggtcggggggaaacccttttggaaaacatgggtttttgttgcctttctgtgttgtgaaaataaaaaactgctttgtttgttaaagctttttttcccccataaaaaaataaagggggggta

SEQ ID NO: 727095 - DNA, 219 bp, Homo sapiens
agttcgacggagactctcatgcctcagcctggcaacaagacgaacccgtctctactaaaatcacaaaaaaatagctgggtgtgatggtgggcacctgtggtcccagctgtttgggaggctgaggcatgagaatcacttgaactcaagatgcggaggttgcaatgagctgagatcaagccactgcactccagcctgaaccacagaacaagactccgtctc

SEQ ID NO: 727096 - DNA, 459 bp, Homo sapiens
atggttgactctagtaggatccctactcctccagcgcttccggaagcaggcggaggagatcggtgagaagctgcaccgcacgagctcgccacccaggagaaggtgaccctgtgcagacactggagatccagcgacagcagagtgaccatgatgccgagcgcctgcgggaggccatcgctgagctggagcgtgagaaggagaagctccaacaggaggccaaactgctgcagctcaagtctgaggagatgcagacggtgcagcaggagcagctgctgcaggagacgcaggccctgcagcaaagcttcctctctgaaaaggacagcctgctacagcgggagcgcttcatcgagcaggagaaggccaagctggagcagctcttccaggacgaggtggccaaggcacagcagctgcgtgaggagcagcagcggcagcagctcgcgcctgagttagcagctcgcg

SEQ ID NO: 727097 - DNA, 437 bp, Homo sapiens
gaaaaataaaatgtcaaaaagggaattttttcgaaatccccgtcgccctgctcaaaatattagtgaagattttgtagggcatctttatgccaatatctcccttattggccatggggcggcataaaaagcccaattgctaggacttcagttttttcttcagactaaagctacccaagggcttaccaaatatgggggtttcatcagtggctggtcattgtagcctaagtatacaaccaagcttcagggggcaccctttttttcttttcccattttttgttttagtaatttccttggggaactaaataattttccaaaatttttcctaattttgtttttcccgttttgcccaaaacaaagcccctgtttaacccacctgttaacgaataataaactgcccttatcctttaaaaaatggggtatttgtcccccccgtgtta

SEQ ID NO: 727098 - DNA, 265 bp, Homo sapiens
ctcggctcctgcaactctgtctcccgggttcaagtgattctcctgcctcagcctcacgagtagctgggattacaggtgcctgccaccatgcccgactaatttttgtatttttagtagagacggggtttcaccgacgttggccatgactgttcttgaacgtcctgacctcaatgtgatctgcccacctcgtggctcccgaaagtgttgtgaattacagtgcgttgagccactgtcgtccacgcctccaccctgtctgcgttttcta

SEQ ID NO: 727099 - DNA, 320 bp, Homo sapiens
tgcgggttcttctgcttgggcacaagttgcagaacaccctctctggggacgagggttaggctgtgacacggttggtgggtgctgggtgcacaatgcttggctggtattggtctgaagacagagccgggtaaactcgctcccagccccacgcaacggccaagcccaacccggctgcacacaggactcacgaggacccagcacctccagcgtgcccagagctggtgtcacagcctcggctcggttccccagcaaagcagctgagacctccgctggagaggagagttcggcctgaagccctgcccactctgacccgctagggg

SEQ ID NO: 727100 - DNA, 1368 bp, Homo sapiens
  misc_feature (189)..(189): n is a, c, g, or t
tctgaacttttaatgggcctccgggatccccaaagggtacccgggcttctggctgggctataatggcctcagacacacttgggtggtcaatgggtctcagaacaccacttggccatccattaataccggcgggaaggagaggctacttatgggataggtttgagctatgggcagtagctcgctggtccnagaggacatcaccaagaactataaaggtccatgcgaccaatcattaccagacacggcggagcgagatagaggtgggcgaatattcagacctcacagtgttgtgaccctgtgaatgattacagcagaggggaccttcattaattccgtggggccagtggacgcgcggaatccacactcaggcaccagaggatcagtggtgcccagacactcagtggcacctccacaggggtgccaagcaaagggactcccccgatgaggaggccgaggcctcacacatcatgaatagagaggcgcatacgcgggggccctcaccaccttacaccttcaaggccgtgtatatcgtcacacaagactgtgggcgcttctccacgaatgtgttccactcatgtgggaggtccccgcggggctcgaatctctcacacagggcactgtggcacgtgatacgcgatgtctacagcaattctgtggtaaagcagaatcgatgcattcacagccaagagtgtcccaaaaaccctctcgagaacacaggacagtgggtgtgttgttgtgtggaacccccacagttggttgggatgagacacaacgctaccgtaaaaagtccgtgggaaagtggaggcaccccagggtacacatgtgtgtcataagccctcacacagttactacggggaaaacatatcgccgaaaggcccaagagcatcggcacgcaaccattagatgggggccccgcgaggcattggttgtggaccccaagggcaaatccaatggggacacggagggccccccgtgaaacgaaaatgagggggggggaacaacttcgaaacagcaagcaccacaggggaaccaaaaacgcaccacaaacaagatgtgggagcaactacagtggggaccattgggaaacaggggccccattgtacgaaacatggcgcccaacacacgcaacgagacggaaacacaacgcctagagcaggtggcacaggagcggacggagaacacaagctgccttgtgtgagaagagccgtagcgacaagccaccgggggaaccacccacaccgggcagaaccagcgttgtagtaacccaaggcgtgcaacagaaactcggggaaagaggagcgggcgctcaaagagaagttatcaccactctggaaggggggcccccaagagagctacacgcggtaaccc

SEQ ID NO: 727101 - DNA, 1292 bp, Homo sapiens
gcatgttgacaggatatgtgtgtacacttctgactggtgatcagtgcccggcccacggccctgagcggactgcagcctgcttagggacgatggtcaggtcccatgtttgtccctgctgcctccttactggagtgggtccacttgtggccataacgcgcccatccactactctggagaaggtcggatgccgcagtcctgcttgcacctgttgccgcttctgggcatcttgtgagttactttattatggctgtggattgtggtagaaaggatagccagacacattaaacgagttgtgtgtcccccagaagcgcactggagtaattcttatattggtagtattacttgtgcctgtcctgattggcctgtcgtggccttgggagcacggtcgggagaagtagagatatcataagtcagtagccacatcagaggcagggcagtgtctgaggagacatagatgcctgtacctgaccatctgggcctgttgtacctggaggtgctggtaccaatgacctgcgtggagatcaagatactccatcgacatttatactcaaccatgaccaaccgtggtagaccatgcaggacatatttgattaccagtgggatgttcccctttgaggttctggatcacactaagaagtgagtagatcgccccggacttatagactggtgacgaagcgatcccctttgttgcgttgagatgagggccccaaaggtatgggggcattttggcaccccattccaaggactaaacccttttgattggtacacaatggcccatgcaggcctatcttcgcgcaactcccgcgatcaaatactagacgtaagaatcaccccgtggcacaaaggacccattttgaagcccacaaaagtgcgcgaaggttgggcgcaacgcgggaaaacagacacgctatacaaccaattggaggccgaacaacaccgacaaaccagaggggggcttaggcccccgcgcgttggtcaccacaagacaccacgagagataacggagtccgtaccactagggggccagcccatggacacaaggaggtagcagcgacaccagaacagacacagaaaagaataggaaattgcaagcaacccccgatgggcgcagttagccaccttggccccactataacgggatgcgcacaaccccacgaggggagagacagcgaaaggatagcagagtaggacaggcggcagtgaagggacacagcacagggggaagtcaatcggcataggggggcgagagagcaatgagagacgcattaacaactagacaaaggagaacccta

SEQ ID NO: 727102 - DNA, 418 bp, Homo sapiens
  misc_feature (161)..(161): n is a, c, g, or t
ccatgttggttaggatggtcttgactcttgactcctgatcgtccgctcaccctcccaaagtgctgcggttacaggtgtgagccaccgcacccagcctgtggttctcaatgtttaatgcacatcagattgacctaaagagttattaacacattgctgggccncacctccagtatttctgattcaggaggtctgcattggagcctgagagttggcatttctaacaagttcccagataatgctgatgttgctgctctggggaccgtgcttttggaactgccagtacggtatacggcagcagtccccaacccttttggcaccagggcccagtttcatggaagacaatttttccgtggatcagggaggtagtgggggatggtttcgggatgaaaggattccacctcagatcatgaggcattag

SEQ ID NO: 727103 - DNA, 1453 bp, Homo sapiens
tataagaaatcaagcgggtttatatttccctcaaaacgtgaaattcactcttacgggtctcctcagaagctaaacttctccaaagctacagctcagcaattttctccactcagaaacccaagggagaaggggcccgggcataaaagaaaacgaaatgtgttcacagagaggctatataaaagaacccaagtagaaaacaagagggtgcgacaaaaggcgccacatatattcttcactcctcgtgtctccttctctcaggtgggttatcccaaatctctacaattcttggtgtgacacaccacttaagcgggcgcccaggtctcgcgggcgcacaaatgtgtgcgcactgcagacacacagtgcaccaaccgtgcgccacagtgaacaccacaaatcacacagccccccccaagacccaccccacaacacagagaaaaggcaccactcagacaccccccccacacacctacacacagcgggccaaccacctctacccaccagagtagggacaccaccctcccacagaacaaagtgcgcgggagcccacccccgcaaagccgcgcgccacaccaggagagagcccacgaacacaacgaggaagagagaacgccacacacccacaagagcgggcatcaaacaacgagcagcacccatacttccaccacacaactatcaaacaacatgtgcagagggcaacacctcttaacccatctatcttattttcacaaaaaacacaatatctcaccccactaaacaactacacccgactctctccttactaatcccccactctacatctataatctcgtgagccccactacacatcctctccctacataccaccccatcacatcataacccctcttgcccccctaatgaaaaccccccctcagccttccttcacgcgcccagcgcgaaccacaccacgcgccaacccgccatcacagcagaccgcgctcagtccacccacaagacccgggccagccccacccatctcaacgagcaagacgactacccacacagagacaactcataaaaccagggcggccaacccacacacagcgccgcccacaacaacccacacctccccacacaccacccacaaccgcgcgggaaacaaaaagctacgaaaacccccccatcaccaagagcgctctccaaagaaggacttccccgttgggcacgccgacaatcagaccctgtgtagcaaacgaccccaaaacaatacaactcacacatgacaaagaacaaaacacctacacaaacccgctccccacaaacaacctcccgtaggagcggttacagaccacacaccgggcaaccaacagcgagctctccaggcacacccgtcataccaaccgggacaatcgcccacaccacagggggacccccaacccgtcaccatacaccccaggccccccccgattccccgcagcacaaccctacgacgcac

SEQ ID NO: 727104 - DNA, 228 bp, Homo sapiens
ccaggtgcttcgagtaataactagtatggggatcaggggtgtaggtgtgccttgtggcaagaagtgggctagggcattatattaatcttagagcgaaagcctataatcactgcgcccactcatcaggggctggccatggctaggttaatagatagttgggtggttggtgtccatgagtgaggcaggagtccgaggaggttagacgtggcaatacaaatgattacggat

SEQ ID NO: 727105 - DNA, 398 bp, Homo sapiens
  misc_feature (372)..(372): n is a, c, g, or t
  misc_feature (395)..(395): n is a, c, g, or t
aggaacttagattgctgtcagtaaaatagggagccattggagcaagggggtgaccttggtatttcaaagaattgcttttgctgttgtgactagactgaagggagggaaaggtagaaacagggaaatccgttaaaatattgtggtaattcagtccagaattgatggttgccttgaccacaatggtagtggttagcggtgattagattctttatatattttgaaggtagaagcaaggatttcttactgtatttaattcccagtaggttttggggggaacaggtggtgtttagttacatgaataaagttcctttaagtccgtgatttcctgagatttttgatgtacctgtcaccccaagccatataccactgtgncccattgtggaagtccttttatnccc

SEQ ID NO: 727106 - DNA, 253 bp, Homo sapiens
tgccacaaccattcaatgtgggaaagaacagtcttttcaacaaatggtgctgatgaaactagatatcaacagtgtgaaagaatgaatttggggctgggcgcagtgtctcacacctgtaatcccagcactttgggaggttgcggtgggacgatcgcttgagtgtggaagtcctagaccagtctgggcaatacagtaagactttgtctccacaaaaaataaacatgagcatggtggcgcacgcctgtattccagc

SEQ ID NO: 727107 - DNA, 659 bp, Homo sapiens
tgggctctaaagggggtaaagggggtgctatagggtaacatacggaacctatttcaaaaattttaagggggaattaattctaggacgattgggcattgaaaactgtggttggctccacagatttcagagcttttgaccgtagtatacccccggtcgtgtagcggtgaaagtggttgggttataaacgtccgggaattgcactctgttttataaccctaagtgtgtggggcacagctcatgaagttgcaagaacgatctgtggtgatgtaattattatacaaatgggggcttcaactcgggagtcactactcgaatgtgtcaaacgtcaaggaagtcgcaaggtctcgccgtggttctctaggaacataagtgggggaaatgtatgttaggaagtttgaaaacatttagtccagcgcggaaacatccgatgttacatcaataggggtcacagacacctatagggggatggccaaaatacgaatctgcgacaaggcataaaaggggaaagaggaacaactccaagaaaccactacgaacacgagtcaatgtataaacaggaactgcgcgcaaagaggaaacagggcaaggggcccacaggaaagggccacactaggacaagagcagatggcacgggacaaaggaaaataacagtcacaaaa

SEQ ID NO: 727108 - DNA, 628 bp, Homo sapiens
  misc_feature (5)..(5): n is a, c, g, or t
  misc_feature (13)..(13): n is a, c, g, or t
  misc_feature (85)..(85): n is a, c, g, or t
  misc_feature (106)..(107): n is a, c, g, or t
  misc_feature (138)..(138): n is a, c, g, or t
  misc_feature (168)..(168): n is a, c, g, or t
  misc_feature (175)..(175): n is a, c, g, or t
  misc_feature (187)..(188): n is a, c, g, or t
  misc_feature (194)..(194): n is a, c, g, or t
  misc_feature (197)..(197): n is a, c, g, or t
  misc_feature (202)..(202): n is a, c, g, or t
  misc_feature (208)..(208): n is a, c, g, or t
  misc_feature (220)..(220): n is a, c, g, or t
  misc_feature (222)..(222): n is a, c, g, or t
  misc_feature (227)..(227): n is a, c, g, or t
  misc_feature (235)..(235): n is a, c, g, or t
  misc_feature (242)..(242): n is a, c, g, or t
  misc_feature (261)..(261): n is a, c, g, or t
  misc_feature (267)..(268): n is a, c, g, or t
gtctntaaacccnaaccccctttaaggcatgtcggtctcaaggggatttgggattgaagcacagctttctgttgaggaaacctangtgtcactttttagaacattnngaagaaagttgtagggtgggcttttccattnaaaggaatgtgatgatcctaggttctgatnagtgatnagtggtctccgnntatacnctntcttnttttgncacctgtaagtncnggtantggccatnttacatnctcatgtcctgctggaagngcctanntgcctgcaaagccagctaaggcttattatctcaaaagaagatgatttcatgagtgacaggtaggcagtagaggacaaatggacgcacgatactgtatatccaactcagctgggtggcaggatgggttgatgagtgaagtcgacgctcactattggattcttacggactgagagttagtcttgcctctacacggagtcacaggaagggcataaatgcatgttccctgatgtgccctcccccaaagaatgtacctgtactcaaaccaggatgctgttttgctgcattaatcatcaatcgacaagttagtggaagacttcgaagaacaaagatcttttttttttatttgatgtcccagatgtt

SEQ ID NO: 727109 - DNA, 612 bp, Homo sapiens
  misc_feature (5)..(5): n is a, c, g, or t
  misc_feature (13)..(13): n is a, c, g, or t
  misc_feature (85)..(85): n is a, c, g, or t
  misc_feature (106)..(107): n is a, c, g, or t
  misc_feature (138)..(138): n is a, c, g, or t
  misc_feature (168)..(168): n is a, c, g, or t
  misc_feature (175)..(175): n is a, c, g, or t
  misc_feature (187)..(188): n is a, c, g, or t
  misc_feature (194)..(194): n is a, c, g, or t
  misc_feature (197)..(197): n is a, c, g, or t
  misc_feature (202)..(202): n is a, c, g, or t
  misc_feature (208)..(208): n is a, c, g, or t
  misc_feature (220)..(220): n is a, c, g, or t
  misc_feature (222)..(222): n is a, c, g, or t
  misc_feature (227)..(227): n is a, c, g, or t
  misc_feature (235)..(235): n is a, c, g, or t
  misc_feature (242)..(242): n is a, c, g, or t
  misc_feature (261)..(261): n is a, c, g, or t
  misc_feature (267)..(268): n is a, c, g, or t
gtctntaaacccnaaccccctttaaggcatgtcggtctcaaggggatttgggattgaagcacagctttctgttgaggaaacctangtgtcactttttagaacattnngaagaaagttgtagggtgggcttttccattnaaaggaatgtgatgatcctaggttctgatnagtgatnagtggtctccgnntatacnctntcttnttttgncacctgtaagtncnggtantggccatnttacatnctcatgtcctgctggaagngcctanntgcctgcatagtctactaacgctcataattactacggaagattatgtttgcgagtcagatcgctggcatgactggttacttagtgaagtcatcgatgacttctggattcttacctactgagagctatgctctgctctacacggacatgcatgaacgttctatgtgcgtgttcctgaggctcactaccgctgagaatgtacctgctctcaatccacgatctgatatagctgattgaatcgttcgactacttagtagaggtctttagatgcacaatgcagagctgtgtctttgcgtgtgaggatgtcctacgagaggcccttgtgcattagtatagtctagggctg

SEQ ID NO: 727110 - DNA, 819 bp, Homo sapiens
  misc_feature (59)..(59): n is a, c, g, or t
  misc_feature (65)..(65): n is a, c, g, or t
  misc_feature (67)..(67): n is a, c, g, or t
  misc_feature (71)..(71): n is a, c, g, or t
  misc_feature (303)..(303): n is a, c, g, or t
  misc_feature (317)..(317): n is a, c, g, or t
  misc_feature (323)..(323): n is a, c, g, or t
  misc_feature (327)..(328): n is a, c, g, or t
  misc_feature (388)..(388): n is a, c, g, or t
  misc_feature (398)..(398): n is a, c, g, or t
  misc_feature (401)..(401): n is a, c, g, or t
  misc_feature (407)..(408): n is a, c, g, or t
  misc_feature (438)..(438): n is a, c, g, or t
  misc_feature (455)..(455): n is a, c, g, or t
  misc_feature (459)..(459): n is a, c, g, or t
  misc_feature (466)..(466): n is a, c, g, or t
  misc_feature (557)..(557): n is a, c, g, or t
  misc_feature (581)..(581): n is a, c, g, or t
  misc_feature (589)..(589): n is a, c, g, or t
  misc_feature (593)..(593): n is a, c, g, or t
  misc_feature (600)..(600): n is a, c, g, or t
  misc_feature (609)..(609): n is a, c, g, or t
  misc_feature (622)..(622): n is a, c, g, or t
  misc_feature (633)..(633): n is a, c, g, or t
  misc_feature (642)..(642): n is a, c, g, or t
  misc_feature (655)..(655): n is a, c, g, or t
  misc_feature (671)..(672): n is a, c, g, or t
  misc_feature (685)..(685): n is a, c, g, or t
  misc_feature (783)..(783): n is a, c, g, or t
  misc_feature (805)..(805): n is a, c, g, or t
ataagtgaatttaaataatgttgctggatacaaagtcagtatacattaaagcaattacnttattnanatantttggatatttgtccccctccaaatctcgtgttgaaacatagcctccagtgttggaggcgaggcctggtgagaggtattttggtgggcggcagattcttcatcaatggcttggtgccattgtgtccagaattggtgggttcttggtctcactaacttcaagaacgaagccacggacccttgcggtgagtgttacagctcttaaggtggcacgtctggagtctgtcccttctngatcgttccagcangtgttncggnnttttccttcccttctcggttgggtttcgtggtctccctcagctccaggattgaagtccgncaaactctcncgncggtgnnttttcaaaaacctttaaggcaagcgcgttntgggagtcgtttcgttncctncccggtngggctcgttgggctccgttaggctaccagggagttgaagctggcagcacctttcgcgggtgagataattacaagctctttaaagggcagtngcatactgggagttagtttcgttncctccctnggtnggggctncgttggtcntccctcggggctncagaggagttnaaagctagncagaatacttacnacaattgaagttgttnnacaggctttcatnaaaaaaccagcgtggggaccttaaaaggagttaagccagttagttaaggatggtatttgcaaaagagttgaaaagaaacaaaagctttccacaagtantggaaaaatcccccgggaattncccggacccggtta

SEQ ID NO: 727111 - DNA, 112 bp, Homo sapiens
cttccagtagccgacagtatcaggtgcagcgggtcatgcctgcataccacgcactatatgacgaggctaagagatggtagatcactatgcggtccggagcccaagaccagcc

SEQ ID NO: 727112 - DNA, 908 bp, Homo sapiens
atgctgctattggtgggaaaggaactgctcgcgagaaagaagaaaggtggtgtcatagagacagccacagctagatgacaaaaaacttcagttctccgttaaagaagttaggggtaaacaatatctctggtatcgaagaggtgagatagtgttgtacaaaccagggaacagtgatccactttaacaagcctaaggtgcaggcatctctggcagtcgaagcactttcatccattacaggtccagtgctgagacaaagcagactgacagagaatgctacccagcatcttaaagcagcttggtgcggatagtctgacgtagtgtaatggagactggtccggagctctgcacaaacaatctgtggatggaaaagcagcacttgctactggagaggatgatgatgatgaagttccagatcttgtgggagacatttgatgaggcttccaagaatgaggcaaactgaatggagtcaacttctgacagataaaacctgaagaagttactgggagctgctattttatattatgactggtttttaagaaatctggttcatggatctgataaaatctagatctctaatattttaaaggccaagcccctggacactgcagctctttcagattgggttatacacaattcatccttgacgtaataagccgagaagccgcggaatcacagtcggaaccaagattaactaagggtccttggcctaaaagaacaacaacagaacgcaaaacaaaccatgtggggcggcactgggcacagagaaacgtcaagaaccacgcggggcgcggccccaatggacatcgaacacggcacaacggctgccacggaaccgggcacacaggcgtggccccacaaaagccggcgcacaggcggataccaacggggacgcaaaggaacaaggcgca

SEQ ID NO: 727113 - DNA, 579 bp, Homo sapiens
  misc_feature (17)..(17): n is a, c, g, or t
tgatctagaggatcccnacgagggtgtcccagtgtgttgggattacagcatgagccacattcctggccagcacccattttaaaggcaggtactttgaaagtagggaatttaaacaatttacctataccattttctctctatggtttgctaatgggaaaagataattatagagaaaagattatttgaaaagagaagtaaaaatgaggaactttggttcttatggtctcgggttataattttttgggaaacccattaatatcttattcagatagcggagactcgttcttcgtcttcctttttagggaaagaaaacagtagaagaaactttgaaaagatgcatactttaattagaattgctgaaaaaatattggagattttggctgtggtagttaaggttttaacaggctttacttttcagctgaaacctgatttggcatggcaagcaaaggtcctcatttctttagatgaaagtcgcctttagtaatgatccctcaattatttcctctctttttttctcaaggatttttttctacacttgggtttggaacttatttcaaaatctctcaacaactgatttca

SEQ ID NO: 727114 - DNA, 327 bp, Homo sapiens
tgttgcgaggaatgctgaggcaggaggattacttgaggccagactgggcaatatagcaagaccccatctctaaaaaattaggcatggtggtgcatgcctgtattcccagctactcaggaggttgaggtgggaggatcacttgagcccagaagttcaaggctgcaatgagctatgattacaccacggcactacaaccttggtggcacagtgagaacctgactcttaaaaaaaaaaattgtggattggaaggaggcaagaaagaagtcaggacacgggtggcctgtaagtccctaaggacacaatcttactcagaattcctcgcaacgg

SEQ ID NO: 727115 - DNA, 752 bp, Homo sapiens
attgacgaggttgattgaggcgttgcgagccttagctttctcccgaacgccagcgctgagtggacatcgagtgtcgcgggtctcccgactcatcgtgtttgtgtgctcgacatgctggtctgaggtcgtgctctgccgtgctgtccgcggtacaacgtagacaggcgaaacgcagcacccgaacagtgacgaagctttaacgacgcccatctggcaattgtctcctcggacgccggtgacgtccctcccgctggtcatccactccgggaccagaaagctgtgaaggtcgaaacagctgcggtttcctgttttaaatgttacgcagttgtgtaatactagcctgctttgtggagtaggaaatgtacagatgaggagctatcgttcacataactcaacagtctagtgattgtcaagtggggaacgcgacagattctgttcctgtttccacggtcactccagtgccaaaggcagttctacagctaaggccagcagttcagaacctccccttctacaattccaaagacagttgactacatcaggtacagtcaacataacagctgtgactcaagctcacaaactgtgccgagaggtctaccgtttggatgcagacaggtttcattcgggaggaatcgtccctggtcctcggagtgtgcacggctgtaattttcttgcgttcaataatttctgccgatcctacggacgtgaatttaccaaactctgacacagtgccctccacaggcaggcagacaaca

SEQ ID NO: 727116 - DNA, 537 bp, Homo sapiens
cggcacgaggggaatttagtcataattagcaatacaacaatatcataatagatgttgaataaagtactatggagacttcgaggctgaagcgattaatttggtgtcagtttgagaatgaagctggaatgtttttatatattaaagttgaatcttgataatcaatactaaataaaagaaatgaagtggtaggcagaagtaacaccataaaccaaagcatagggttgtggcatcatatctgtaaagagaatccaggttagctggagggatgaggcattagtagagcacgtggagatgtaactggaaaagggcggcgggttaaaggttaaatgttaacacacttaaagacaaccaagaagttgaatgttgttccctaacttcgcggagccctgaagtggcagagcagcataataatatctctgcattgggaaaagccaagtttgtggcaggaagaaactagaagaaaaaaatattgtagccatcctcgtgtgatataatgagagatggattaaagcagggatgagaggctttttaaggaga

SEQ ID NO: 727117 - DNA, 108 bp, Homo sapiens
gggctcggtcctactcttcagccagacagcagtattacagtggatatcagccagacaagcagtattaaaggtggatcatccagcccgacaagcagtattaaaggtgga

SEQ ID NO: 727118 - DNA, 175 bp, Homo sapiens
tggtttggtttggcttttggttaaaacatgtctatagagtgggcagtaaaggctgaattggtcaaatacccctttccaaaattatactggtatttaaaaaataaagggatctacctaatttctatggatttaattggcagtttggtcttataaaaggggtatgtttctcaggggt

SEQ ID NO: 727119 - DNA, 147 bp, Homo sapiens
ttctctttgcaaaaccgatgtgatccttgatcgagaaaaaaatccagaaccctgggaaactgtggaccctagtgtacctcaaaagcttataacaatcaaccaacaatggaaacccattgaagagttggcaaaatgtccaaagggtga

SEQ ID NO: 727120 - DNA, 1283 bp, Homo sapiens
gctgcggtggctcactgcctgtaatcccaggcacttatgggatggcctgaggcgggtggatcactgatggtcagtgagatctgagaccatcctgtgctaacatgtgtgaaacccctgtctctactaaaaatacaaaaaaaatttagcctgtgtgctgcggttggcgggcacctgtagtcccagctacttgtggattgcttgagtgcaggagaatgtgtgtgaaccctgggagctggagggtttgcagtgacgctgacgatcgtgcatactgcactccagcctggtgggacagacacagagactcctgtctcaacaacaaacaaaacaaaaaaacaaacaaaacggggggtggaaacggagccataacaccaacgggccacacccgtgaggctgcagagcgcagaactggacacaaactggtctggcgtggcacccctttatttccaccaactatgacaccgtttaaatatacgcaggacttttaacaaagaagataccatcacagccaaggcgacaggggagagaaaagcggagaaacaggaggagagggggatacccccgagcgcctatatacaagcggcgcagtgggagacgcacattagccccagagggccacagaggcgagcgagcgaaccaaaacttaaagagggcccagccgccaaacacgaacaaaagagacaccaaagagcagcacaaagacaggcacaccccagaaggcaagccaacagagggaacaccccagaggagcaaaagcgaagaggagcgagaccaacaaccaccaatggaaaagcaaggggggcaaacctcgcgcccgcggacccaccccacacaaagcacaccgaccaaccacggccacaaccgggaagaacaacaccgaggtagggcgacagactgtcccacaccaaagcgacatagtgcaccagcggaaacaacaacacaccacggggattcacggacaacggtggccacgagaggcaggggagaaagagagaaaagaagagccaccaacccacatctgaacgaaaacaaggagagccgccgacaaccacacacaggcgggacgagaggaagaccaatcggagaacaggcgaggagaagccacgaagaggacacgaacggcgagagaccaccagaagagagggtcgacaaacagatagaaaggcacacgatgactcacaccccaatgcggcagaaagaacgcaccgcgaccgaacccatgatagcacaagagataacagacccgacacaccacagaacacaaaaccccagaccgtccgaactga

SEQ ID NO: 727121 - DNA, 1054 bp, Homo sapiens
  misc_feature (1)..(1): n is a, c, g, or t
ncagcctgcgcaccttttgtccccgctcgtccccagtgacggcttccgaaagcctttgggtttgcagcgcatttactttgcccctttgtgtagatgttgatggaacctcaggccgcatgtgcagtccgcgggggcccccaggtgtgttcccgcccgttatcctgtggaaagaacgctggcgcgtgtgtgtcccccggcgcgtccccccaggtgaattttcggaccccgtggtcatggtttatttcagccagggcctccaaaggtttccggcacattggccactggggtccacgaggccttgatggaccccccgatttgagtaccccttgcccggagacaccgccggttaggaccttttccccaggaaagtgacccatgttgcaccggccgctgatgcttccagggcccagagtccccttaattatttggggttgccaaaatggtggtattcctccattctgtccgttttgccttgcccttattatgcctgggaaatggtttttctaagaaaagtgtttttctctttttaatagctctatttctcggttaccccaccgtggtaccacgcttcacatattatggaaagggccacggagtaaaatggcttgagtttctttggcttcttgtaccacactaagtttttaaagagtatatgccacttaggttgtctcgtcccaggagaaggtgaagtggtgaaagggttttttacacacaaataataccacagagaattcactgggctgggccactggtgttcttaatgcccgtaatcccacgccacctttgggaggcctgaggctcggaggatcaccactgaacccccgcgagtttgagaactagttctgggcacacacactatgtgaccacccctcgtctctaccgaaaattataaatataaatcacggtgggtgtggtagtgcctcgcctcgttgtcccacgctatttctggaggctgagatgggaggatcgcttgggcccacggaggttcgaggatgcgtgaagctgtgaccctgcccccaccttcccgcctgggcgaccgccagtccttgtctta

SEQ ID NO: 727122 - DNA, 211 bp, Homo sapiens
  misc_feature (155)..(155): n is a, c, g, or t
acccacgctcctacagatatgcttctttaattttcagatagctgctgattgtgtttaactgttcatttatagcatagacaggtatttttgagcaccaagaaacaatccctgaaaattgcagttaaaatacagaaattagctgggagcggtggagntatcgtgtacatgtttgtactaatggtcatggctgttatgggggcggaggggatcc

SEQ ID NO: 727123 - DNA, 139 bp, Homo sapiens
attttacagtctatacagaaactaattaagacaagagttcatattttagctgttcattacattttaggtatttagttagttacaaaccctttcttcttgcgttgagaagcttgggtaccgagtcctcgaagttcgctaa

SEQ ID NO: 727124 - DNA, 122 bp, Homo sapiens
atgatacttcgagtcacttgatgtgtgttgagcatggtctcaaagtcatcgggaactattttcggtacttggttaaccaggctcatcagtgaagcggcccacagtattgctcagtgctagct

SEQ ID NO: 727125 - DNA, 214 bp, Homo sapiens
cttatcctcaccctgatgagtagctagtgattacagcgcgcaagccaccacatccagctaattgtgtgtgtgtgtgtgtgtgtgtagtgtgtgtgtgtgtgtgtgtgtgtgtgtgtatatacctgtgaatctacatattgtgataaaaattctgattattgagagaagatggaccctctctgtcgcccagggtggagtgcagtggcaacaactc

SEQ ID NO: 727126 - DNA, 243 bp, Homo sapiens
ctcggtttattgtgcacatggggaaacccaggtctttagacacacacctgggcacatggcgaaacccagtctctacacacacaaacacacacctgggcacatggtgaagaccagtccctacacacacacacacacacacatgcacatgcactacttgttcagggatgggcatacttcttctgcaatggccagatcataaagttttgaggctgtgtagaccatgtaatgtcacacccactcacc

SEQ ID NO: 727127 - DNA, 274 bp, Homo sapiens
  misc_feature (36)..(36): n is a, c, g, or t
gggtcgcaatgcttgccaatggcaccggacctgctnccccggcagctcgaatgacagcagtgcccggtcacaggaacgggcaggtgggctggggccgagagacgccaccacatcggtcagcgagtccctgcccaccctgtctgactcggatcccgtgcccctggcggcggtgcggagatcaacgaagacacaggaggctttgagtccctcgcagaaccctttgcctgaagcgcgtggggtggggggtggcggggtgtggggttggtgggggggg

SEQ ID NO: 727128 - DNA, 183 bp, Homo sapiens
aacattcgtcctcaaaagcagtgatctgctcctccagcatatctgttccaactttatcatcttcaagctatcacacatgtatttagtaagtttcttaacttcactgtatccctactggacactatgtttaggatgagaccccatgactaatgccgtctggtacacgaagtgttcacgggtacc

SEQ ID NO: 727129 - DNA, 528 bp, Homo sapiens
atctttttcctcaaaatacaagtcactctgaataatatcacagcttatcttgtatgtgtctggcaatgactggctgtctctgtgtcatagatagctcttattattttgagatacgtcccatcaatacctaatttattgagagtttttagcatgaaggattgttgaattttgtcaaaggccttttctgcatctattgagataatcatgtggtttttgtctttggttctgtttatatgctggattacatttattgatttgtgtatattgaaccagccttgcatcccagggatgaagcccacttgatcatggtggataagcttttggatgtgctgctggattcggtttgccagtattttattgaggatttttgcatcgatgttcatcaaggatattggtctaaaattctcttttttggttgtgtctctgcccggctttggtatcaggatgatgcttggctcataaaatgagttagggaggattcctccttttctgttgattggaatagtttcagaaggcatgttccagttc

SEQ ID NO: 727130 - DNA, 337 bp, Homo sapiens
tctagaggatcccgtgatcggtaactatggttgggtgaacctcatctttactaaaaatacaaaaattagccgggcgttgtgacgcacacccatagtcccagctaactccggaggctaagacaagagaatcacttgaacttgggagacagaggttgcagtaaatctgagatcactccgctgcactccagcctgagtgagagtgagactgtgtctcaaacaaacaaacaaaaaacaaacaaaaaaatttgcattgtaaattgtacctcaaatttgagcagttttagtgtttgtgtaaattaaagtcaaaagcagtccacaataatgtttagtaatactg

SEQ ID NO: 727131 - DNA, 316 bp, Homo sapiens
gaggtgatctagaggattccggtattgagtggcatgtgacaaggatctgagatccatcagagtagacttcaagttggagaaactttatttggacaggcattcttgttacttgaagtggtgatgctaattttcaaaaacagtaaaagctggtttctcctaaactattttccttgtggtagtagagatcaagtgggtcagaaacaagtcctgagcacttggtttcctttcgagacgcgtcattcggaggcaatctgtaaaactagcacaaggtctcccgctgttaccactggctcatccacatgattagcagcagtgc

SEQ ID NO: 727132 - DNA, 133 bp, Homo sapiens
ccgaggtcaaccaccccgggaacccctttccaccatagagacaacccctcgctagacgtgaactcagatcttgtcggaggaaggacaacacaacccaacgcgaaaccaatttccttattcctagttgctaagt

SEQ ID NO: 727133 - DNA, 557 bp, Homo sapiens
  misc_feature (14)..(14): n is a, c, g, or t
  misc_feature (65)..(65): n is a, c, g, or t
  misc_feature (114)..(114): n is a, c, g, or t
  misc_feature (129)..(129): n is a, c, g, or t
  misc_feature (239)..(239): n is a, c, g, or t
  misc_feature (262)..(262): n is a, c, g, or t
  misc_feature (397)..(397): n is a, c, g, or t
  misc_feature (426)..(426): n is a, c, g, or t
  misc_feature (429)..(430): n is a, c, g, or t
  misc_feature (443)..(443): n is a, c, g, or t
  misc_feature (446)..(446): n is a, c, g, or t
  misc_feature (456)..(456): n is a, c, g, or t
  misc_feature (527)..(527): n is a, c, g, or t
cccacatgacccanacacggtctggagttcccctggtggaccgaaaccctttctatgtggaagtnattgtcatgtggcccttgcttagtaaacaatgggtcagtctctggagancagtctatgtctctngaggggtctcacgtgggcgtctatttctccgtcactattggtgtccgtcgcgctgccgaagcctcacccgggtcctggtggaatcctaccggaagatcaaggaggcaggncagaacttcgagatcatcttcgntagtgcagacaggtcggaggagtcttcaaacagtacttcagtgagatgccctggctcgccgtcccctacacggatgaggcccggcggtcgcgcctaaaccgggtgtacggaatccaagggttccccacgctcatnatgctggacccgcagcgaggtgatcacgnggnngggggggggtggnggnggtggaaggngggggggtggggggggtgcgccctggcaccccaagcccgtgctggagctctccgactccaacgccgcgcanttaaacgagggcccctccctcgtccttttt

SEQ ID NO: 727134 - DNA, 535 bp, Homo sapiens
cctcatctgccgcagcgccagcaggcgcatctgcgtgtgcgccagcacgcggatgacatggcagtacttcttcatgctgctgaagtccttgtccagctgccgcttgccagcgtcgtcctgccacttcttgcagtacttggtgaaggccttcttcttcgacttgtgccagttcttgtagaagcgcctcttgcactcgtcactgatgtgctcggcgaacaccgtcttgaaggtgcggaggccccgcggggtctccacgtagcccacgatgcccacgaccaccatgggcggggtctccacgatggtcacggcctccaccacttccttcttgttcaccttggagcccggccggtccacctcccgcacgatgtgcgtcatgccggccttgtagcccaggaaggcggtgaggtgcacgggcttgctcgggtcgtccttggggaagctcttcaccttgccgcggtgccggctgctgcgcttccggggcaggaagcccagggacccgtgcctgggcgccgagaacttcctgtgcgacatcgtg

SEQ ID NO: 727135 - DNA, 147 bp, Homo sapiens
atgcttgaggggctggccggccgatatcgacgtatcccggaaccggtacgacgtgaccgcttggcgtaccgtttgtacctgccgtgattgtcaatcgctgttggagcgtgcgcccagggcttctgaacactggcgtggccagaagga

SEQ ID NO: 727136 - DNA, 207 bp, Homo sapiens
ggtgttatcgatgccacatacccacttgctaagaactttcttgcgtgcttatcttttcaaggcaggtgacagctttacatagtaaataggccttcatactcaaagagactaggtcaggagccacctttttttttttttttggcttctttaaatagctagtgatttggaaaggatggaggccccggccacggggacccttgagctcag

SEQ ID NO: 727137 - DNA, 196 bp, Homo sapiens
ggccggaaggttaatccaagccaaaagatcctttcccattttaattaagtggctggccacggtcccggcccaatccgccttttaactggaaattgggtggtgaaccaaccccaaccttggcttttctggtggccacaggtggcccaaccctccgtttgtagggatttttggcagcttccccttctgtcgtcttctc

SEQ ID NO: 727138 - DNA, 340 bp, Homo sapiens
aatagtgttttcttcatagggctacagtgagccagtgcgtagtgtctggaatgtgggacgtgctcagaaaagggtagttatcactgctgctgagtaacgagagcaggctagaggagaatgttcatagccccctacctctacctttgcccccaagtcagtaagcggcaactaaaggcagggagccatctcggaagtgctggaggcccacactcaaggactccaagtgtgactgatattaaagaacagcaacgtagattttagggcatcatctgtctaccccattggtactttgaacacttcaagtaattattatctctgttataataaataatgcaattga

SEQ ID NO: 727139 - DNA, 981 bp, Homo sapiens
aagcagtcgtatcaacccagagtggccattaccgccgggaatcatttgaactcaggggacgaaggctgcaatgagcagagatcggcgccactgcactccagcctggtgacagagtaagcactctggtctcaatggaaccaataccaagacacagagaaccaaacaaaacagtttgtggcgggggcactagcgagcggctgaagatgatttcattatccaccccggggttggggcggcaccgggcccccaatcgagtgtggtgacaccgtggggcacagagggggtgtggccatggggaccacccggggcacaacaacaggcgcggtgggggtttcgccgcccaatagaaaaccccggggggaacccccgggtgttcttcaagacacctcccaggggaggggtcctggggggaccaccctgcgggttctcacagcagggaggcccgagaggcggagtccgagattgacatatactccccggcgcgggggggtttacccaagtactgcaaaggacaatggcacgggacttgaggatggcaagaagcagctggaagacaggccttcagcagccatgaacgcagttctgccaagtcattccgtgtcattgccacaccagatgcgcctgtttcctctgcgccagaaggaaggccacctgatggagatccaaggtgaacggaggcactggtggggcgagaacgctggactgggcccgcgagacggttgagcagaaggctactgtgaccaagtgtggggcaggatggagagaccgagtaacggggtgacagggcagggtacaagggtcccagctgtggccaccagaggctgcccgagaccacgagactggcaagggcggagggacggaaccgggaggacattcgtgccggggcaaggccatcgggaacaaaataaggcgggcctagaggggcgagaaagccgagacacgaaaccgcggcgcagacagcgaggggagaagacacagcag

SEQ ID NO: 727140 - DNA, 2062 bp, Homo sapiens
  misc_feature (222)..(222): n is a, c, g, or t
  misc_feature (230)..(230): n is a, c, g, or t
cgttaataattttcttcaatgtaaacattcctaataattttgattgttgctccttagtcaatcatttcccaaaacatgattatttttaatatatgtaaaatatttaaataataaataataaaaggtaatgtgtccattttaaatttgttcccagccatacacagtagttccctgatacaaaatgctatgagaataccgactattttttcataatttaatttnaccactgnacctgattttagtacataagagtctaaatattaagttattcattctaaaaggggaaatcagtaaaagcaaggaatttatgaaatttttgctgtaatttcagtatctgttatacaggggaagaatgatcaggaaaaatataagctgacaacttacccttttgctttttaacaacaaaataatattgaaaatatattagaataactcacagatccagaagttggtggaaatggaagaatgttttagaaaataccatccatatgtttatctaagaaagtctcagaatttagtgacactaatacagttcataaatactgtaatacagtggagagagttggaatgttattttggttttatttcatcagcacaattattaaaaacaacaaaattaatgagacgttttgttataatcagattttttttttaccatattgcaagttataaaatgtcaacttatactaagtacctaacaactgacttttattcacttgttgtgacaagtttttaattaccaaattaagaccttttcagtatctatgagtaaaagaaatagatgattatatcagaccaggagcagagaatttataatatgtgctttatagcaaaatgtattaaattgtggttaaaatttatagctcatatgtagctgctgccaataagaaggctcagaattgttctgtggattaatttttacatcctgttttctgtcacttttaccaatcttcttggcctcatgtacaataatgtaaagccaatttgatgaaatggttcaggttgtagcagtctataaattgtcggtacattcagctcttctaggtgagcaatactgctgctatttttctagaaatagcaatcatttaaaaatgccaaatagctaactgctaccaactctttcttgtatcttgtctctttagagaaggaaatttttgtgtgccagtaatcatcaaagaggtgttttataagagtgttgatgttcagaagttcatgaaagtattttatccgtataatttgctagtgagctaaaacaatataatttatgtaaatctttatatgtacaaaatatatagtctgttgtacttgagtaatttggtctatggaattttaaatgccttcatttagcagtaatattcacatttttattttagacagttaagttcatgtgtttgattttgtcatgtcagcataaatgagaaaaagaagtggatcatgcagctaatgagtaaccaacattttgtaaagttttaaagttttagcaaacaacattattccatctcatttaaaggttaaaaaagaagagacaactctagccaaagtagaaatttatattctacacgtccaaactgtctcctagcagcttttggactatatatcacttgatgttaaagtatcttttatttgtaataaatattccaaatttctatttagaagctctaatgtatacctagattaaatcaaatcacagttttatgcttttaaaatatattgtatttcaaactgtatattttaatttctgagtgcatgttatatagtatttaatacttcagatgtcttggcaaattcaatataagtatttattcccacaagcgatatatgggatatctcttaaaaattatgaatatgtaccatttccttcaaagtcatcctagcctatgctgtatcaaaagtattgtatattttatggagatttagtgatatacatgtaaatgttttttaagttattttattgaagttcaatctttacataaaattaaaatctttttttaaaaaaagtgtcagtgccagaactgtaaatgaaaataatcaaataaaagttaaaataattcattactcctta

SEQ ID NO: 727141 - DNA, 441 bp, Homo sapiens
  misc_feature (55)..(55): n is a, c, g, or t
  misc_feature (142)..(142): n is a, c, g, or t
  misc_feature (364)..(364): n is a, c, g, or t
aaataagagaagaaggaagggagggaaggaggaagggagggatcaggtgggggtnggggagtacatatcaccatacagcctgcctggggaatctgagtcctcctttgctatgacatccaaaaaagattcagaaatgctgttngctattttttattcacccacaaatgtaccagttaacccactaggcctcgaattccagccagtagctaaaattattttcctatgagaaaaacgctcttgaagcgttagaggtttcttatctgcagggtctctgggaaggtttccaaatttgttacactacagaaatactttggttctttttttccccttcctcattgcaaaatctaagcctctcgcttgtganaatcttgatttataccaggtttttgtcctgggctagctccagttccttctttctggatctactggtagttagcgtcc

SEQ ID NO: 727142 - DNA, 1064 bp, Homo sapiens
  misc_feature (222)..(222): n is a, c, g, or t
  misc_feature (230)..(230): n is a, c, g, or t
cgttaataattttcttcaatgtaaacattcctaataattttgattgttgctccttagtcaatcatttcccaaaacatgattatttttaatatatgtaaaatatttaaataataaataataaaaggtaatgtgtccattttaaatttgttcccagccatacacagtagttccctgatacaaaatgctatgagaataccgactattttttcataatttaatttnaccactgnacctgattttagtacataagagtctaaatattaagttattcattctaaaaggggaaatcagtaaaagcaaggaatttatgaaatttttgctgtaatttcagtatctgttatacaggggaagaatgatcaggaaaaatataagctgacaacttacccttttgctttttaacaacaaaataatattgaaaatatattagaataactcacagatccagaagttggtggaaatggaagaatgttttagaaaataccatccatatgtttatctaagaaagtctcagaatttagtgacactaatacagttcataaatactgtaatacagtggagagagttggaatgttattttggttttatttcatcagcacaattattaaaaacaacaaaattaatgagacgttttgttataatcagattttttttttaccatattgcaagttataaaatgtcaacttatactaagtacctaacaactgacttttattcacttgttgtgacaagtttttaattaccaaattaagaccttttcagtatctatgagtaaaagaaatagatgattatatcagaccaggagcagagaatttataatatgtgctttatagcaaaatgtattaaattgtggttaaaatttatagctcatatgtagctgctgccaataagaaggctcagaattgttctgtggattaatttttacatcctgttttctgtcacttttaccaatcttcttggcctcatgtacaataatgtaaaaacccatttggataaaaaggggtcaagggtggtacaatctcttaaaatgggcgggacacattaaacttttttgagggggacaaaaa

SEQ ID NO: 727143 - DNA, 116 bp, Homo sapiens
tggaatcgagctcggtaccactagtccacggttgggtactagatccaggggtggctactagtcacggttggctactagtccacggttggcttccacggttggctactagtccacgg

SEQ ID NO: 727144 - DNA, 265 bp, Homo sapiens
cagtgcctgctgtcgtttattgccgaccaagctggagcacggaaaatctacgcggtggaggcctgcaccatggcccagcacgctgaggtcttggtgaagagtaacaacccgacggaccgaatcttggacatcccgggcaaggtggaggaggtgtcactacacgagcaagaagacatcatcctctaggagcccatggtctacatgctctataacgaactcatgctggagagctaactacacgcacaagaagtacctatagcccatc

SEQ ID NO: 727145 - DNA, 940 bp, Homo sapiens
  misc_feature (342)..(342): n is a, c, g, or t
  misc_feature (369)..(369): n is a, c, g, or t
agcggactggaagttccgtctactccgtgcgtttacggggtcctggaggtagagctcctgggacctcaagcttgggggaaagttccggtcggggagattgactcccacccgagcaccattctttcaaatcgcgacctaccgggacgcctgggtcctaccgcgagggaggagcaggcgggaggtcgtatgccgatagcttataagactcaatccaagcttgcagtagcatgggggcgcagactttgtctactacacggataagctcgtctccacatgaaggaagatagacgaggcgaccctctggagcaccccaggtgtctagcctgtcaccatctcattgcnagagctacattagttagaagatccttngtagggaatagtgcaacttatgggacgctgtggcgcctgcttcaacaaccaggaagttcaatcatgttttgggtaacgcagtgattgcgcattagcaggcaattccaaggactgcccaattcacgatcctctcagaaattctcggtcaaagtataactccccgatggggactggttgataccaattgttggcactgtaggtgcattgatgcatcggacccttggtctggacagggtgcgggttccaaagtgcaaagttgatgggccagagccaaccaatgtacggtgaacccgcggtgactcacacctggggggtccgatgcgcaccagacaggttaaccttagttcgggcagtaacgcgacgtcctaggtacctcgggggattacctttgtgttccgccacaggatgacccagttttcccacggggagctccccacagagggttgtttcgcggggtaccccttggagcggctatgattccatcttaggtcggtggctagtttgtttgtgggtggctggttgtttgctagtacgctcgttgtggtcggtggttgtcctggtgtttgttggc

SEQ ID NO: 727146 - DNA, 128 bp, Homo sapiens
cgtcctctcacctgggcttccaaaatgctgggactacagcatgagcaccatgcctggcagtgtcatggaaattaacctgttgtgcattatgcaaatattatggtcccattcttgtgctggttccgctg

SEQ ID NO: 727147 - DNA, 544 bp, Homo sapiens
  misc_feature (11)..(11): n is a, c, g, or t
cggagagaggntagggatgctgtcgtgttgtgtacgtgtctttctcccgctgctgcatataatttttcaagggcttgttgtatttttttcatgactcctttagggggcagcacataatagcaatcaagctgttattggatatctgaacaatgttgaagcaaaagtaaacttggcattgttattttgttatctgtgagttgtttgacctgatataaattctaggtatcagtttaggtcagtcaggagcgcttttctttccctgtgcatttcttcttgtggctcatattgatacagcccctgattgtttaggtttttcaaaaaagggatttggttattttctggtggttgttccccttagggtgaatatattcaacccaaaggcccccttgccttcacaggcggaaaccgtttcccaagaactaccttggaaaggcatttcttgggacaaattgtgggactttggaacacttggaagggagatgcattgaccattagaagggaaaggagctgatgccaagttctgcgggagctttgagttctgaca

SEQ ID NO: 727148 - DNA, 650 bp, Homo sapiens
  misc_feature (3)..(3): n is a, c, g, or t
cancactaagaaaaatataaacatactattcaataccaaagtgacagaaaaattacttatatctacttatcataatactaaactctcaactagcaacataaccaattttcataataaaacagtctttactaatttaatcttcatacttcataacaaaccaaaaccccataaaatttccacattacataattttaccttactaacacaatcatatccttaaagataaccatcattcccccaactaaaacaaatacaaactaatatatcatatttttttaactaccatatcaatataatctaaatcttcaataaagattgtatataaataaataaatactactaagtcaatatatataaaatatacctaaaacagacacatatttatatacaatattcatacaatgcaaaattaaatatttttacaatatatatttaaaatagaaactcaccataatactaccatctaaaaatctttataaaattaatttaatatcctttagaatttggactctaatagaactatatgaaatttaagatacctgttcactcttgcatatctcataaaccttatgaaatcacctgactataatgccatatcgacctttacacacctatactttaccatgccatatatgccactattccacact

SEQ ID NO: 727149 - DNA, 938 bp, Homo sapiens
  misc_feature (67)..(67): n is a, c, g, or t
  misc_feature (70)..(70): n is a, c, g, or t
  misc_feature (76)..(77): n is a, c, g, or t
  misc_feature (79)..(79): n is a, c, g, or t
  misc_feature (97)..(97): n is a, c, g, or t
  misc_feature (130)..(130): n is a, c, g, or t
  misc_feature (135)..(135): n is a, c, g, or t
  misc_feature (161)..(161): n is a, c, g, or t
  misc_feature (168)..(168): n is a, c, g, or t
  misc_feature (184)..(184): n is a, c, g, or t
  misc_feature (219)..(219): n is a, c, g, or t
  misc_feature (231)..(231): n is a, c, g, or t
  misc_feature (242)..(242): n is a, c, g, or t
  misc_feature (245)..(245): n is a, c, g, or t
  misc_feature (247)..(247): n is a, c, g, or t
  misc_feature (249)..(249): n is a, c, g, or t
  misc_feature (255)..(255): n is a, c, g, or t
  misc_feature (261)..(261): n is a, c, g, or t
  misc_feature (287)..(287): n is a, c, g, or t
  misc_feature (323)..(323): n is a, c, g, or t
  misc_feature (325)..(325): n is a, c, g, or t
  misc_feature (338)..(339): n is a, c, g, or t
  misc_feature (350)..(351): n is a, c, g, or t
  misc_feature (389)..(389): n is a, c, g, or t
  misc_feature (392)..(392): n is a, c, g, or t
  misc_feature (394)..(394): n is a, c, g, or t
  misc_feature (504)..(504): n is a, c, g, or t
  misc_feature (509)..(509): n is a, c, g, or t
  misc_feature (522)..(522): n is a, c, g, or t
  misc_feature (600)..(600): n is a, c, g, or t
  misc_feature (627)..(627): n is a, c, g, or t
  misc_feature (630)..(630): n is a, c, g, or t
  misc_feature (640)..(640): n is a, c, g, or t
  misc_feature (645)..(645): n is a, c, g, or t
  misc_feature (671)..(671): n is a, c, g, or t
  misc_feature (707)..(707): n is a, c, g, or t
  misc_feature (716)..(716): n is a, c, g, or t
  misc_feature (755)..(755): n is a, c, g, or t
  misc_feature (821)..(821): n is a, c, g, or t
  misc_feature (831)..(831): n is a, c, g, or t
  misc_feature (873)..(873): n is a, c, g, or t
  misc_feature (875)..(875): n is a, c, g, or t
  misc_feature (894)..(894): n is a, c, g, or t
cggcgggacctgctcggaggaatggcgccgcgggttcaagcactgtcttcctgttggccctgacaancanagccannanctgggctctgacgcccantcactaactcaacaagcatgacgtggagagaanaaaancctcgctggatcgccctttcaaaaanttggaanctgccttctactccancgtgggactcagcagccttggtgctcaggtgccanatgcaaaaaaanaatgtacctanatnananataaanttgatnccagcaatgtggattccctcttctangctgcccaggccagccaggccctctcaggatgtgananctctatttcaaannagaccaaaganntgcttctggcagctgtcagtgaggactcatctgttaancananataaaatgcagttgcagctctaagtggctttggccttcccttggcatcccaagaagaactcagtgcccttactgctcgtctcagcaaggaggagactgtgctggcaacantccangctctgcagacancatcccacctgtcccagcaggctgacctgaggagcatcgtggaggagattgaggaccttgttgctcgcctggatgaantcgggggcgtgtatctccagtttgaanaangactggaaanaaaancgttatttgtggctgccacctacaanctcatggatcatgtggggactgagccatccattaangaggatcangtcatccagctgatgaacgcgatcttcagcaagaagaantttgagtccctctccgaagccttcagcgtggcctctgcagctgctgtgctctcgcataatcgctancacgtgccanttgtggttgtgcctgagggctctgcttccgacactcatgaanangctatcttgcggttgcaantcaccaatgttctgtctcagcctctgactcaggccactgttaaa

SEQ ID NO: 727150 - DNA, 153 bp, Homo sapiens
tagtactctagcggatccttattttttttttaaggatttgagccagtaaagtagtttcactaatgggataaaagtgtcaacatagtgatggcaaaacaaaggcagctccagcccttgtttccacctttgtttgcagctcaggggcgctgtccc

SEQ ID NO: 727151 - DNA, 200 bp, Homo sapiens
  misc_feature (13)..(13): n is a, c, g, or t
  misc_feature (45)..(45): n is a, c, g, or t
  misc_feature (52)..(52): n is a, c, g, or t
  misc_feature (86)..(86): n is a, c, g, or t
  misc_feature (106)..(106): n is a, c, g, or t
  misc_feature (118)..(118): n is a, c, g, or t
  misc_feature (126)..(126): n is a, c, g, or t
  misc_feature (134)..(134): n is a, c, g, or t
  misc_feature (138)..(138): n is a, c, g, or t
  misc_feature (142)..(143): n is a, c, g, or t
  misc_feature (173)..(173): n is a, c, g, or t
  misc_feature (179)..(179): n is a, c, g, or t
  misc_feature (183)..(183): n is a, c, g, or t
gtagaggtggggnccttccaagagggacaggcctctccccagcgngccttcnctcccacggtttttatggatctgcaccacgactngtaccttctgggggagatangcgatttgactntgaaaaantggaaacnggcnaggnncttttgaagacttttggaccatgaaaaggngcgagngctnttcagcaaaccgtagtt

SEQ ID NO: 727152 - DNA, 213 bp, Homo sapiens
tgaactgaacgccgaacagattttcgttcattttggttctcagcgctttgttataattttttatttttatggcgctttggtgagggaggtaggtggtacgtttgtgtttaactatttttagttgggtgatgacgcgaatagtgtaaggagtatgggggtaacttatggtgggccatacggtagtatttagtcggggcattacagataggccga

SEQ ID NO: 727153 - DNA, 309 bp, Homo sapiens
attacatgactcattacttaaggtctatatttaattacagagtgtaaatttatcaagtgcacattaggtttataaacaagaagctacatttttgcccttcagatactacttacagtgtcctgactggtatacacatattttggtatcaaaggggataaaagccaagtttgtctggtgacatttcctttcacgtatctctttaagcagcacttctgttactaaagttaatgtgtttactctctttccttcccacattctccattcaaaggtgagctaagtcctcctcggtgagtctgtattaactgcctg

SEQ ID NO: 727154 - DNA, 7119 bp, Homo sapiens
  misc_feature (4315)..(4315): n is a, c, g, or t
gggctctgggaccgcagttgctgaaatggaggcagaggtgtgggaggcagaaggctacaacctagttctggactcggacctgtatgatgcggatggctatgatgtcccagaccctgggctgctcaccgaaaagaatgagttgactttcacggagccgtcgcaggtcctgccctttttgaccagcagccaacagtggcaaagcctgaccccgcgcgcccgcgcccgccggctgtggctgcttctgcgcaccagcctccacgaagtcgtggaaaaggagaagagagccgagctgcgcgcggcgcgcctgacgcatgggctggaaccactgcgccgcctggaggtggcagccgggctgcgctcggtggcgcaggacccggtgggtggacgcttcgtggtgctggacggcgcgggccgcctgcacctgcacaaggaagacggctgggcacaggagacgctgctggcgcctgtcgggcttacggggctggtgaccgtgctgggcccgctgggtgccgtgggccgttttgtaggctggggccccgcggggctggcaattctgaggcccaacctcagcctgctgtggctgagcgagcagggggtgggcagggccccgggttgggcgcccacctgctgcctgccggttcccgacctcaggctgctgctcgttgcggagatgaacagcagcctggcgctctggcagttccgctcaggtggtcgccgcctggtgctgcgagggtcagcactgcacccgcccccgagcccaacaggcaggctcatgcgtctggctgtggcgccggttcctccccaccacgtcctgcgctgcttcgcggcctatggctcggccgtgctcaccttcgatctgcatgcctggactctcgtagatgtgcgccgggatttgcacaaaaccaccatctcggacctggcttactgcgaggaagtagaggcaatggtgacagcttcccgggacagcaccgtgaaggtgtgggaggctgactggcagatccggatggtgttcgtgggccacacaggcccggtgacggctatgactgtgctcccgaacacgaccctggtgttgtcggcctcgcaggacgggacgctacgcacctgggacctgcaggcggcggcgcaggtgggcgaggtagcgctgggcttctggggccaggacaagctgtcccggcgcgtgggccgtctgctggcgccggtgcgcccgggctggccggtgctgtccctgtgcgcgagcagcatgcagctgtggcgcgtacgcgagctctactcgccgttggcgcaactgcccgccaaggtgctccacgtgcagttggcgcccgcgttgcccgcgcctgcgcaccagtcgctgcctacgcgcctcgtgtgcgcgtgcgccgacggctcggtctacctcctgtcggctgccaccgggcgcatagtgagctcactgctgctggagccggaggactgcgcggcagccgtggcctactgcctgccgcgcgaggcgctgtggctgctgaccagggctgggcacctggtccgcgccaacgcggcgcgctgccccatgagcgtgctgcaccgcgtgtgcccgccgccgccccctgcgccgcagccttgctgtctgcacctgtacagccacctcacggatctcggaggcgccttctcctcctgggagatcgtgcgccagcactggggcgagttgcgctgcagctctgtggcctgcgcctggaagaacaagaaccggtacctgccagtggtggggcacacggacggcacgctgtcggtgctggagtggctctcgtcgaagactgtcttccaaacggaggcgcacagcccgggcccggttgtcgccatcgcatccacctggaacagcattgtgtcttcgggtggggacctgacggtgaagatgtggcgcgtcttcccctatgccgaagagagcctgagcctgctgcgcaccttctcctgctgctacccggccgtggcgctctgtgcgctaggcagacgcgtcaccgcgggctttgaggacccagacagcgctacctacggcctggtgcagtttggcctgggcgacagtccgcgattagaccaccggccccaggacgaccccacggaccacatcactggcctgtgctgctgccccacgctcaaactgtatgcctgctccagcctggactgcaccgttcgcatctggactgctgagaaccgcctcctgcggctcctgcagctgaatggtgcccctcaggccctggctttctgcagcaacagtggagacctggtgctggcgctgggatcccgcctctgcctggtgtcccacaggctctacctgcctacatcctacctagttaagaagatgtgccggaaggccccagacgtggtggacgaccctccgctgccactgatgagccaggagtcactgacttccgcccaactgcagaggctcaccaacctccatggggcagccagcctcaggtcccatggaggcctgctcagccctcctggaggccctcctttcccactctgggtgggggcctggcggtgtggggccctctggagttgatacaagcctgcctgagccctggcacacccgtttggggttggtccttgtcccagcctctgccccagcccactggcatgccacccagcatcccacctgtgcctgtccctgtttgcagcgaggccttgtctctcatccatcgtcggagggcaacatctcagcacctggtgccgaaggaggacttggacgccatagtggcccgggaccgagaccttcagcagttgaggctggggctagtggtcccagcagcccagcccccaccctcctggcagcagcgccaggaaggctttgacaattacctccgtctgatctacggctctggcctgctgggcatgcagtctggaagggggtcccagcagtggagtgccgggaccctcagagtggagagagagacccgggatgtgtgtgctgtaccccaagctgcccactgtcttgcccgggctgaggtcagcactgcagcccaaacagtgccaacagccctgtccccacaggacctgggagccctgggccagcacttctcccagtctccccgagtcacagtgccgatcccacccacccaccgtagggtgcacagcaaggcatcccagcttctggcccgctcctcactgagccactacctgggcatcagtctggatctgcagctgcagttggagcagctccgagggaggacgaccatggccctggacctgccatcctcccacttgcagtgcaggatcccactgctgccaaagagatgggacaaggaacctctctctagcctcaggggcttctttcctgccaccgtgcagccccacaagcactgcctgaggcccatctgcttccccggctatgtgcccaactccgcggtgctacagcagatgtggctaaatgcggagccaggggcaagccaggatgccctgtggttgtggcgccccaggccatcccaagcccagtggcagaggaagctgctccaatggatgggggagaagcctggggaggagggggaggaagacaagaaggaagaggaggaggagaaggaagacgaggagctggactgggccttggcttccctgagcccgcactccaaccagcagctggattcctgggaactggaggatcagagtgctgtggactggacccaggagccccggcggcgcagctgcaaggttgccaggacccaccctcatccctggcaccgtcatgggagtttgctcttggatgagcattacgggcatctgcccaagtttctgcatttcttcatctaccagacctggttcaaaaagttgttccccatcttcagcctgcaggcatacccggaggcgggcacgatcgagggcctggcctcgctgttggtggccctgctggagaagaccacgtgggtcgaccgtgtgcacatcctgcaggtgctactgagactgctgcccaacatgagcagtgatctccaaggccagctgcagggcctgctcgtacacttgctcaacctggaccagccccccagcctccaggaccagacacagaagaagttcgtgatactggcgctgcagctgctcctggcctgctccctggagtcccgggatgtggtgctggagctcatgtcctacttcctctactctcccgtgcactgccggccagagctcaagaagctgctgcacgggctgggccttcaggacccagagggcttcctattcaaggagatgatgacctgggtccagggcccagacctggactccaaggccggcctgcgcacttgctgccaccagaaactggaggacatgatccaggagcttcaggagaccccancgcagacgtcagtggtctctggggcacccacacgcgcctccgtgataccctcgggcacctcctggtcggcctccggcatcttcgggaggctctcgcaggtctcagaggtgcctttgatggtggtctcacctgcggagccgcactctttagccccggagctccaggcccagcggatgctggcacccacgcgcagctgggggacccctcagctccgtctcagagtgctctccgagacgctgaagagcttctgcctggagcccgaggcccgcctgcaccctgccgggcctgctcagctgcccggagagccgccgccgctggaggagaccgactggtcgcactcgcagctgctggacttgggccccatcgacgcgctcaacttcttctgtgagcagctgcgggcgcagcagcggagttcgctccaggagaaggctgcgcacccacacccgccagtgccctacacggtggcgccggtgcccgacatggtggtgccacctccgcgggagcactggtaccaccccatcctccggctgcaggaggccaagccgcagaggtccgcgaggtccgcgatgagactgaggggccccatgccgtcccggctctgtgcgggccgcaccctggacggccccatccggacgctgaagctgccgttgccgcgtgtggagccgcagcctttccccctggactggcctatgcccccgcgcccgctgcccccgcggctcctgcagccggccctgcagcgctactttctgccagcggacgcggaccctgacacctacagctgaccgggctggtggcctcagcccgcctggctctggggcctgtcattggtatttggccaaggcctgcatcgggaataaagtccagagaatttctttctgcaggatgccgcctgctttggagggccccggggtgcgcacggcgtgtgggcgtgcggcctgaacccacagtggcggcggaaggcaggagccggaggcctggcggaggtggccatcgtgggcaccagcgttcccggaggggtggccggcctagggcagaggagacccatagcggggtaccatccgctgggcactgagcaaacgttttctgctcaagtactaggtgttgagatgcgggctgaccttagagaacgtgtcctgggccagcccacagcctggtgtggaggggagtccgggagggcctgggcggtcccaggatgagccttccgggtcgatgcaggtgagaccaggagtttgcagaccttgctttcgttacttttattctggaaaagagaagaattgacaaaggcaccaggagcttttttctgagcggcaacgcagagcatcctctgacccctttagcctgaaagtccctaggggaggggcttggtccggaagggctcggcctctgggccgggctcctctgccctgtgtggcctggcagggcgcaagacctgtgcacagagttcttggggcagctctggggggaatccccggcttttacacctgtcttttgtgttgtctgagcagtgatttccctcctgtatctgtagcctctgactttactagtttcttcttgatggctctggttagaatcgcttctccacaccttccctgtcaccccaaactgtgcggtggctcttgttatggggccaccaaatggctgctctttcccaggccggtgcttgacacagtggtgccaccatcccaagagcatgggtgcgcaggaccgtgcgggacagccaagttgctgggcccagctgaacctgcctcttcacctccaggcactaccgcatcctcccactgcagaaggccaaggttcacaggtgtgcgatgagactgaggactgagtctgtcactagaggacttgacactttttataaaaaaaatgagtaaacctagatacctcgatcagtgtctagcgatgtcaaggcccccagtttgggttcaagcctgctgggacagtcctgcagctgctgggtcacagagtggccaaggccctctgatttttggtcaggacacagaaagatagcagggggcagggggggatctgagggaccccacatgacttacaatcagacaaggtaggtcagaggatttctttatggctatctgttttgttttgttttgttttgttttgttttttgggatggagtttcggtcttgttgcccaggctggagtgcagtggcgtgatctcggctcactgcaacctctgcctcccggattcgggcgattctccttcctcagcctcctgagtggctgggattgcaggcgtgtgccgccacgcccggctaattttgtgtttttggtggagatggggtttcgtcacgttgaccaggctggtctcgaactcctggcctcaggtggtccgcctgcctcagcctctcaaagtgctgggattacaagcgtgagccactgtgcccagccttctttatggctatctccaagacagcaaaggcaggggaaagtcctgccttggggagaaaaaggagggtgggaaaaggtcaaagagaaagatgctgttgtctgagtcttgcctctgaggcctaagttccccaacattataacaagggatatgggagttataagccaggaactgtggatggaaaccaatgacagatatcataatatcacacccacacatcaggcaagagacttgttccttaaaaattatctagtttagccgagcgtggtggctcacgcctgtggtcccagctgcttgggaggctgaggcaggagaatcacttgaacccaggaggtggaggttgcagcaggcagggatcacaccactgcactacagcctcggcaatagagcgagactctgtgtc

SEQ ID NO: 727155 - DNA, 6351 bp, Homo sapiens
  misc_feature (5479)..(5479): n is a, c, g, or t
gggctctgggaccgcagttgctgaaatggaggcagaggtgtgggaggcagaaggctacaacctagttctggactcggacctgtatgatgcggatggctatgatgtcccagaccctgggctgctcaccgaaaagaatgagttgactttcacggagccgtcgcaggtcctgccctttttgaccagcagccaacagtggcaaagcctgaccccgcgcgcccgcgcccgccggctgtggctgcttctgcgcaccagcctccacgaagtcgtggaaaaggagaagagagccgagctgcgcgcggcgcgcctgacgcatgggctggaaccactgcgccgcctggaggtggcagccgggctgcgctcggtggcgcaggacccggtgggtggacgcttcgtggtgctggacggcgcgggccgcctgcacctgcacaaggaagacggctgggcacaggagacgctgctggcgcctgtcgggcttacggggctggtgaccgtgctgggcccgctgggtgccgtgggccgttttgtaggctggggccccgcggggctggcaattctgaggcccaacctcagcctgctgtggctgagcgagcagggggtgggcagggccccgggttgggcgcccacctgctgcctgccggttcccgacctcaggctgctgctcgttgcggagatgaacagcagcctggcgctctggcagttccgctcaggtggtcgccgcctggtgctgcgagggtcagcactgcacccgcccccgagcccaacaggcaggctcatgcgtctggctgtggcgccggttcctccccaccacgtcctgcgctgcttcgcggcctatggctcggccgtgctcaccttcgatctgcatgcctggactctcgtagatgtgcgccgggatttgcacaaaaccaccatctcggacctggcttactgcgaggaagtagaggcaatggtgacagcttcccgggacagcaccgtgaaggtgtgggaggctgactggcagatccggatggtgttcgtgggccacacaggcccggtgacggctatgactgtgctcccgaacacgaccctggtgttgtcggcctcgcaggacgggacgctacgcacctgggacctgcaggcggcggcgcaggtgggcgaggtagcgctgggcttctggggccaggacaagctgtcccggcgcgtgggccgtctgctggcgccggtgcgcccgggctggccggtgctgtccctgtgcgcgagcagcatgcagctgtggcgcgtacgcgagctctactcgccgttggcgcaactgcccgccaaggtgctccacgtgcagttggcgcccgcgttgcccgcgcctgcgcaccagtcgctgcctacgcgcctcgtgtgcgcgtgcgccgacggctcggtctacctcctgtcggctgccaccgggcgcatagtgagctcactgctgctggagccggaggactgcgcggcagccgtggcctactgcctgccgcgcgaggcgctgtggctgctgaccagggctgggcacctggtccgcgccaacgcggcgcgctgccccatgagcgtgctgcaccgcgtgtgcccgccgccgccccctgcgccgcagccttgctgtctgcacctgtacagccacctcacggatctcggaggcgccttctcctcctgggagatcgtgcgccagcactggggcgagttgcgctgcagctctgtggcctgcgcctggaagaacaagaaccggtacctgccagtggtggggcacacggacggcacgctgtcggtgctggagtggctctcgtcgaagactgtcttccaaacggaggcgcacagcccgggcccggttgtcgccatcgcatccacctggaacagcattgtgtcttcgggtggggacctgacggtgaagatgtggcgcgtcttcccctatgccgaagagagcctgagcctgctgcgcaccttctcctgctgctacccggccgtggcgctctgtgcgctaggcagacgcgtcaccgcgggctttgaggacccagacagcgctacctacggcctggtgcagtttggcctgggcgacagtccgcgattagaccaccggccccaggacgaccccacggaccacatcactggcctgtgctgctgccccacgctcaaactgtatgcctgctccagcctggactgcaccgttcgcatctggactgctgagaaccgcctcctgcggctcctgcagctgaatggtgcccctcaggccctggctttctgcagcaacagtggagacctggtgctggcgctgggatcccgcctctgcctggtgtcccacaggctctacctgcctacatcctacctagttaagaagatgtgccggaaggccccagacgtggtggacgaccctccgctgccactgatgagccaggagtcactgacttccgcccaactgcagaggctcaccaacctccatggggcagccagcctcaggtcccatggaggcctgctcagccctcctggaggccctcctttcccactctgggtgggggcctggcggtgtggggccctctggagttgatacaagcctgcctgagccctggcacacccgtttggggttggtccttgtcccagcctctgccccagcccactggcatgccacccagcatcccacctgtgcctgtccctgtttgcagcgaggccttgtctctcatccatcgtcggagggcaacatctcagcacctggtgccgaaggaggacttggacgccatagtggcccgggaccgagaccttcagcagttgaggctggggctagtggtcccagcagcccagcccccaccctcctggcagcagcgccaggaaggctttgacaattacctccgtctgatctacggctctggcctgctgggcatgcagtctggaagggggtcccagcagtggagtgccgggaccctcagagtggagagagagacccgggatgtgtgtgctgtaccccaagctgcccactgtcttgcccgggctgaggtcagcactgcagcccaaacagtgccaacagccctgtccccacaggacctgggagccctgggccagcacttctcccagtctccccgagtcacagtgccgatcccacccacccaccgtagggtgcacagcaaggcatcccagcttctggcccgctcctcactgagccactacctgggcatcagtctggatctgcagctgcagttggagcagctccgagggaggacgaccatggccctggacctgccatcctcccacttgcagtgcaggatcccactgctgccaaagagatgggacaaggaacctctctctagcctcaggggcttctttcctgccaccgtgcagccccacaaggtgagaccccctcccagctcctggagagccactcctctccaggcatcactcttgtgcctgccatctcccctttgctacaaatctttgtgtccaaatctgacccaagggccatgcccacctacaaccagagggccaggctgtagcctcccacgcacccctcacccctcacccttcaccctctgtctagccctgttccagtacagctgtgtttgtggccacaggctccttgctgctctgggagctgacatcaggcaaagccagtccccccagccggttatgccacacacccctttcccccgtggaggcgctgggagggcaggtcccctagggacttttcctggaagatcagaatccctgccctttagaggagcaaagtcaagggaacctggccctttagaatccactgtcttcccaccctcacgtacaccaggtgcccaggcaggcctcagcccctcccccagcatattcctggcactgtcacctgcccacgtgggtaattgactctttgggcctgggtgccaccatcatgctcttcattgccctttctccaagctccttccttcctccctggcccctgtgcttcttttagactttcttgtcccagggctggggccaagtcctgtaaggagcttgcagggtgtcagggcccctacaagccagcacttctccaggtttcccttctcgtttgtcagagctgatgctcactgagggcctcgcccctggtatctcagggttctcctgccatctgtgttgagagtaggggttgctagctcagccagctctcggaggcctggcaggcagagctggactggcggctgaggggctctgagaggttatacaggtgaccaagggtggtgtccaggctgggggaatccaggtcctcagcattccctgctgtgcccacctccagcactgcctgaggcccatctgcttccccggctatgtgcccaactccgcggtgctacagcagatgtggctaaatgcggaggtcagcagcctcggatccccgactcagctcgcctcccagagaaagctcgaggcaaggggcagggctgggggttttgccggcaggggagggctctgctgtccttgcaacccatcaggcaccatctcttgcccctctgcagccaggggcaagccaggatgccctgtggttgtggcgccccaggccatcccaagcccagtggcagaggaagctgctccaatggatgggggagaagcctggggaggagggggaggaagacaagaaggaagaggaggaggagaaggaagacgaggagctggactgggccttggcttccctgagcccgcactccaaccagcagctggattcctgggaactggaggatcagagtgctgtggactggacccaggagccccggcggcgcagctgcaaggttgccaggacccaccctcatccctggcaccgtcatgggagtttgctcttggatgagcattacgggcatctgcccaagtttctgcatttcttcatctaccagacctggttcaaaaagttgttccccatcttcagcctgcaggttggagggaactggggatgcatgagaagcatgggttagggtgagggacaggggagaaggtaggggctggcttgggtgtgacatgggagcagggcctcagcatgctaccctgcaggcatacccggaggcgggcacgatcgagggcctggcctcgctgttggtggccctgctggagaagaccacgtgggtcgaccgtgtgcacatcctgcaggtgctactgagactgctgcccaacatgagcagtgatctccaaggccagctgcagggcctgctcgtacacttgctcaacctggaccagccccccagcctccaggaccagacacagaagaagttcgtgatactggcgctgcagctgctcctggcctgctccctggagtcccgggatgtggtgctggagctcatgtcctacttcctctactctcccgtgcactgccggccagagctcaagaagctgctgcacgggctgggccttcaggacccagagggcttcctattcaaggagatgatgacctgggtccagggcccagacctggactccaaggccggcctgcgcacttgctgccaccagaaactggaggacatgatccaggagcttcaggagaccccancgcagacgtcagtggtctctggggcacccacacgcgcctccgtgataccctcgggcacctcctggtcggcctccggcatcttcgggaggctctcgcaggtctcagaggtgcctttgatggtggtctcacctgcggagccgcactctttagccccggagctccaggcccagcggatgctggcacccacgcgcagctgggggacccctcagctccgtctcagagtgctctccgagacgctgaagagcttctgcctggagcccgaggcccgcctgcaccctgccgggcctgctcagctgcccggagagccgccgccgctggaggagaccgactggtcgcactcgcagctgctggacttgggccccatcgacgcgctcaacttcttctgtgagcagctgcgggcgcagcagcggagttcgctccaggagaaggctgcgcacccacacccgccagtgccctacacggtggcgccggtgcccgacatggtggtgccacctccgcgggagcactggtaccaccccatcctccggctgcaggaggccaagccgcagaggtccgcgaggtccgcgatgagactgaggggccccatgccgtcccggctctgtgcgggccgcaccctggacggccccatccggacgctgaagctgccgttgccgcgtgtggagccgcagcctttccccctggactggcctatgcccccgcgcccgctgcccccgcggctcctgcagccggccctgcagcgctactttctgccagcggacgcggaccctgacacctacagctgaccgggctggtggcctcagcccgcctggctctggggcctgtcattggtatttggccaaggcctgcatcgggaataaagtccagagaatttc

SEQ ID NO: 727156 - DNA, 145 bp, Homo sapiens
tgagctcggtcctcagtacatggaggatgagcgccttaggatctctttggcaagtttgggcctgccttaagtgtgaaagttatgactgatgaaagtggaaaatcccaaaggagtgggatttgtaagctttgaaaggcatgtaaga

SEQ ID NO: 727157 - DNA, 429 bp, Homo sapiens
ctgggtctatgcatcattaatatgtatatgcccgtgttattgcctcttgtgtgatctgtaagaaaggctattgctattgattcatcatcagattaatctcttatgttgtatctttatcagtggcaatattttgttcatatattcctgtggaattaaggcttgatataaacccttgtaaaggttttttgttccttcccaatagcaataataatcaagaatcaatgtgtatctcatgcatactgtcgcaagaaaaaatataagtattatattaaaaccattctatattgtgacaaatgttcaaaataaaaaatggttgtaattgttgtgattttattttttaaatcaaccaaattattgatttcttaatggttttgaaggtaactattagtattgtgttgtctaaaaaataaatataaaaattaaagttga

SEQ ID NO: 727158 - DNA, 102 bp, Homo sapiens
aaccttccatgtgtgtgggagggactgtgtgggagatgattgaatacggggcggtttccccacactgcctcgtggcacgaggatggggatctctagagtcga

SEQ ID NO: 727159 - DNA, 209 bp, Homo sapiens
catgtaatcacgtttggaataccatgcaacacaagtcagcaaggacaggagtcggtccaaaggagccagctagggggaaaggtgacagacacggacacgcacgcgctggcgaccgacctcgcctgtggtctctaagggggccatgtggttaatttataaggtttcctccccacaggagttctgactgtgctctggaggtacttggcata

SEQ ID NO: 727160 - DNA, 113 bp, Homo sapiens
ctatcgtgtcatggagatgagagtatggggatggcttaggttttggctgggtgtcagaggttaagataagaggtgtcatgacatgatggacttacgaggcagagaacagacag

SEQ ID NO: 727161 - DNA, 157 bp, Homo sapiens
gtttatcctgctcagctcctgggtagctgggattcaccaggcgctcgcccacacgcctggataattgtggtactatatagtacgcgccgcggtttcaccactgttgtgcaggctggtctccaacctcctgacctagtgatctgctcgccttgacctc

SEQ ID NO: 727162 - DNA, 281 bp, Homo sapiens
ataagtgaccaaggcccaagacacattccccaggagtgtctgagaacacgtacccaaggtggttggttacagcttgattttatacattttagggggacagaagcttcaatcagacatcaatcaatacatgtaagatgcgcattgcttcggtctgaagagttggaacaactcaaagtgcaggcttcaaggtcataagtggattcagagattttctgattggcaattggttgaaagagttaagtaattatctaaagacctagaatcaataaatagaaaggagt

SEQ ID NO: 727163 - DNA, 558 bp, Homo sapiens
  misc_feature (131)..(131): n is a, c, g, or t
  misc_feature (175)..(176): n is a, c, g, or t
  misc_feature (178)..(178): n is a, c, g, or t
  misc_feature (197)..(197): n is a, c, g, or t
aaatgtccacttttcagataatataatgcctaccattatactaacagaatcatatggtaggtgatttatttgtttattcattatgtatacctgtgggattgcgggttcttgacgctatgataaaaacactnaatgtattctgacatgagtgctctaatagcctccttctcctcanngntaaactgcatacattactntcaaaataggtataatattctgtccgcctttgagctattacctgttcctgtttccctttgtcacctaagcaaggctttttctgagaaagtagggaatggtttcaaatgttgcatactataagaataatcattgggtaactgttgtttagaccaacacttagaaatactctatttgcgccttctcattcttaatcttaatgagtgttgatatgtggagcacaaataatgaaggtgccactatatggcttgccaaagttacctccttgaatagacatggggcattgacttggataggtcactggtgaaccttgcttgaaaaaaggaccccctccccttggggttttcgcttgagtaactgcgt

SEQ ID NO: 727164 - DNA, 140 bp, Homo sapiens
gccagccggcgccatcacgcgggagtcatacccgtccatttcgatccaggcctgcccatccaggcgccgaatgcccaatgcgtcctggccggtggccgcaacgggggcctggctttgaaacggcgtcaaatcgagttgcc

SEQ ID NO: 727165 - DNA, 433 bp, Homo sapiens
tttcaataatcctgcttgatgaagctaaatgtagataaaaaaaaaattgcaaagctagttagaaacatgctccataaaggcaatacttttcacaaatttgcttttcactagctacaagctaaaccgtaaccatcgtccatgatgagaatgtgagtacatttttatttacgcataattttaatataattttaaaaaataacaggcaaatgaatgtggctgacatctgggaagtattaatatagttgaatgctaagttaggtctgaacatcctgacagctaggacaaaaatatataggatttgttttgatcttatccaatgagaccaattttcctataaacaagacaagttttatccttaaattcaagggagaactgattgtgtaagctcctaaaacaatgtaaaataaaacaaaacgaagttaaaacaatgaaa

SEQ ID NO: 727166 - DNA, 1192 bp, Homo sapiens
acaaatactaggacacaggagcatgaatgttacattctctagtgcgcttcacctagtttaactagggcaggggggctacgaatagttatcaagtgatatcactcgtgtgataggtgctaagaagagccgatggcacagagtctctgaggcacatagggaaaactcttggtacagtacacgatggggaccacagtgtcatgcggaaatagtgtcagggcaggctccttagtagatcgagggagtgctagcagctgagtcttgagtatgtagctcttgcatagtgtaagagctatgaggcgaagtggaggcgatacaatagtatggctactttgaccagataatgatcagtgtggaatggttggatggtagaggtgttagtgttgggagatgcagtcatagggtagcagctgcataagattctaaggggttaaggtatgaatcattaagtggtgatggagaatcactggttgtttgcttaaggtatagtctgctagtttgatgtttcctatgaaagcaggttctcacttgtcattgcgccaggtctggcagtgcaggtggctcgatcgtgattcacgtgcattctcgagttctctgggctcaggtgattgtcccacccttggcctctggcaatacttggtaccaataggcatgcaccaagctaagactgggtcgtatgggtacgaagacgacagaagtctcactatgttgcccaaggctggcatcaattctgggctcaagcaagtccttcaaccttgggctcccaaagtgcatgggataccaggcatgaagccattcataatggctcggaagatacattggaaaacatgaaataccattggaagcttgatcaaacagaagataggcaacaacatgaacgacacaacagttaggagagaacaaagagaaagagatggaaaccgctaatgagcgagaggtaggcctgccgcagaacaagggcggaatgaaaccacaacggacaagaaagaagaacagaaagagagcaaagaaaacgagaacaaagggtgaggataccacaatccacagaaagataaccaatatgaacaacgtgcaacaccaaccacaacctacgaaagcaacgatacaaagaagacaaaaagaggcagagaaccaacaaacagacaccaagcagaagcggagaccagcagcagcgcgactcctcagaggccgacct

SEQ ID NO: 727167 - DNA, 431 bp, Homo sapiens
gatagatagggtggttgcgagtggtaaatgagttgacgcaggcgtccgagtagcttagttgtggcaagtaaaaatgattaaggatactagtataagagatcaggttcgtccttaagtgttgtgtatggctatgatttgtctgggttttttctttcttttcaagtttcagtgatttataatcaaagtatagtgtgatagcagtttgattttgctcaggttcttttactttcttttaggaaataggagatgattatgcattctttggctgaggtgaagagaactcagacataacattggagttactgtatcttggcacttaatctctaggttccctagattttttttttgtttttttttttgaatccttagtccccttttccaaacttttcttccggggcatggggacgccaattttctcccggagacacatc

SEQ ID NO: 727168 - DNA, 272 bp, Homo sapiens
ttttggaagttaaaatttaaatggcttttgccccaaacaatagattttcatatgggtgaggggaattccatgtggatatcagttccccaacattacaaaaaaattttatggcccaaaatgaccaacgaaattgttacaaaagaatttatccaattttgatctttttaaatttttttaccccccctggaaacagaccaaaaaacattttggggttttaaaatgggaatttgtataaagcattactttttttcaaaaaattgttttttaattta

SEQ ID NO: 727169 - DNA, 199 bp, Homo sapiens
  misc_feature (58)..(58): n is a, c, g, or t
  misc_feature (60)..(60): n is a, c, g, or t
  misc_feature (75)..(75): n is a, c, g, or t
  misc_feature (124)..(124): n is a, c, g, or t
  misc_feature (156)..(156): n is a, c, g, or t
agcactgcctccctgtgtgactggagaagaggacgttgtcacagataaagagccaggntnaccagctcctgacgnatgcatcatgaccatgagacacaactggacaccagacctcagccctttntgggtcctgctcctgtgtgcccacgtcgtcantctcctggtcagagccacaactgttttgcagacccaccaaaag

SEQ ID NO: 727170 - DNA, 264 bp, Homo sapiens
aaggagagcccacggaggtgtgagtacgagagagagctccttgtcctacattcgttgagaatggtcttggcctatgccttatggggggggccgttgtgggcggagtgagccgcctaaaaccatgttcctcaaagatcatttgttgcccaacactgggttgctgaccagaagtgccaggaagctgaataccatttccagtgtcatacccagggtgggtgacgaaaggggtcttttgaactgtggaaggaacatccaagatctctg

SEQ ID NO: 727171 - DNA, 472 bp, Homo sapiens
ttatgggattcaaagctctaagcagatccgtcaaaagggggtgcgtggcagacgctcagttaagcaaatgctgagagtcagaagggcagtgaagctggcagccactgtttccattccagttttcagccgctgcctgtctccagcaaagcttcactaagtaattttctgagaacaaaagagattgaaactttctcctcaaatcgcctggtgtggtcgaatactcctgtttggtttggttctgcttgtgctccctctcgtctcgtaggtccactgtgataccgtgataaccatcggagggcggccattaagcggctttgcagtattctgaaaatcttttacagaagcagctgcttggtatttcgataacttgaccccactgttctcttggcttagctatggttctaaactttattgtaagtaaacattttaaagaaaaactgacgcttgttttcaaggaaaatcatacataaag

SEQ ID NO: 727172 - DNA, 335 bp, Homo sapiens; identical to SEQ ID NO: 710916
  misc_feature (25)..(25): n is a, c, g, or t

SEQ ID NO: 727173 - DNA, 266 bp, Homo sapiens
  misc_feature (76)..(76): n is a, c, g, or t
  misc_feature (110)..(110): n is a, c, g, or t
  misc_feature (121)..(121): n is a, c, g, or t
  misc_feature (183)..(183): n is a, c, g, or t
cccgagttccttcaaagtgtcctaaaagaccccctccccaggtgtggatccccaccaataaagccatttaaaatgntatgggctccctggcctcccaggcccccaaggcnggcaaaaaggncaaaaaggaggaagccaaaaagttagactggagggaaagggtagcttagtctgcttaggggnctgcatgggaagcccggaatatagggttaaatgtgtgttatctgtaaccattacagcctaaataaagcttggcacctttttta

SEQ ID NO: 727174 - DNA, 392 bp, Homo sapiens
gaacggacctaacaggactctgctgaaggcaggccatggtgatcagactttacccggggatgatggaggacaaggaacctgatcagatatcacggtgatcagataccacatcaccagaggcatgatggaggatgaggaactcaatcagatatcaagggtgatcagtatcaatggtgcaggattctggataaactgacttagcaggattagacaatgtgcagagataaacacagaagcccaaaaatcagggcttgagaagagttcagggagcatgagtagagttcggtcgagaaaatcttggtcaatagcagtcctgcttttttttttattcttttcgtgggatacaaagtttccctctggtggcccaggcgggagtacaggggggcgatctc

SEQ ID NO: 727175 - DNA, 563 bp, Homo sapiens
ggccgtggaggagccggatgctgagccgggaagcaggaagaagactggaggagccgggcgatagttagcaggtgcaatgccgcggctactctccctcgtagcgctccaatcgtgcgcctgtcatcgctgctcttcctcctggtgcgcaataccgaagaaggtgtgcccatgaggataacggaagttcctgatctaatgagcacactcctttgtatcagcggccacgagaagagaacggactgcgaggcgccatggaggctcatgggaaggagaacgcccatgggccggagcaaggatgtgcgtgggcgcggtgagcccttctagttctgttgtcgtgaaccgcgaatccagcactcctgtatccctcactgggtcaccgcccggtgcgatgagctggacacggaagtactgcgaggccatcttgtccgggatggacggctctaacatgaaataatgcttggaatatgctgtgtatggtgaaaggatccccttctgctccggacgcatcttggtggcgccttgacctgggggtgggctcccgcgtgcagcccagggcgaggatt

SEQ ID NO: 727176 - DNA, 194 bp, Homo sapiens
ccaatgcacctttgaaacagctcctgttgacaccagcacacctgtgaccaatttttccgaagcccgttcatctcctacaactggtgaaggtaccagcatgccaacctcaactcctagtgaaggaagcactcgattcacaagtatgcctgtcagcaccatgccggtagttactcctgaggctagcaccctttcag

SEQ ID NO: 727177 - DNA, 361 bp, Homo sapiens
  misc_feature (347)..(347): n is a, c, g, or t
  misc_feature (352)..(352): n is a, c, g, or t
caacgaccgaggcgatgacggcgacccgcaggctcatgctctttttcattggtgctggacgcgtgtggtgaactcctgccgatcttaagccaatgggcttgcgtcacgcaattgatcgggtatcgtcccgattgaccggcacgcgtgaaagaggtgcgccccgttcacccgtcgaccggcttcatcgtcctcaggcaatccgccgccagttgctgataaatccgcgtgcctttcgccttcgcttcgatctccgcgtcgctcagccgccgcacgacgcgccccggcatgcccgcgagcagcacgccgcgcgcacgttcgttaaccggcctttcacaaacgcggcaggnggcgnacgattcgt

SEQ ID NO: 727178 - DNA, 349 bp, Homo sapiens
acctgcagggattggggctctctctggtttgttcgcctaactcccgcctcaaaggccacgaatttcttgaaaccaggtaaccgaccaaaacctaatgtgcatcagtaacattaacatttatctactgccccgactctctggcttgccactacctactggtgtccagttgcagacagactaaaatgcactgacggactcttaggattgctgcctcctaagttatcaaagcctccctctgttgatgtgaatgaggaactgcttggttgttaaaggacattttgctccctgctggcccaaacaggtccttatctaggtttgctccccactgccccaaacaggtctggcagga

SEQ ID NO: 727179 - DNA, 231 bp, Homo sapiens
gtgcctagagggctttccccgtacgccaaaccaacagaatatactttcttctcatcatcacatggcacatactctaaaattgcccacataattggatataaaacaatcctcaagaaaagtaaaagaaccaaaatcataccagacacaagcttggaccacagcacaataaaaatagaagtcaagactatgaaaattgctcaaaaacatgcaattatattgggcgtacgggga

SEQ ID NO: 727180 - DNA, 481 bp, Homo sapiens
tgggaaagacccactcctcccattcatgataaggtaatgctatccaataaaaaccccaaagcaggcataaaatatgaagtagcgaaactcaggcaggcagaaagcagagtggtttagacatggctgctgtctgcagcagggagaagttcctggcaacatgaccctgaaaataacaatgagtgactgaagctaagaaggaagaatcttccaaggactctgaaactagatattttctcaagccccacctatggacaaacacaaatcatggagaaataaagatgccagtctccaggaagcaccagagttaaattcattctggaatttaactcctggcattaacggttagctgggagattaaaacaaaccaacacacaaacacaaaaaaataatcagtggaaaaaagttaaaaaaaatcaatggacagtggtttcatagcagatggcaaagaggaatattaaaagctgtattttatttgaaaatc

SEQ ID NO: 727181 - DNA, 622 bp, Homo sapiens
cgaacgggtagatagaagaaggcagtcatcgataccagctacgagccatgtgaccagcttgcagaaacgaggactgtaattgtcgtgaggtatttcctccttcttttaaaaacatggccaggtgctgtggctcacgactgtaatcccagcattttgggaggccgaggcgggaggatcacttgaggtcaggagctcaagaccagcctgacccacgtggtgaaaccccatctctacttaaaatagaaaaattagctgggtatggtggtgcacacctgtaatctcagctactcaggaggctgaggcaggataatcacttgaactcgggacgtggaggttgcggtgagacaaaatcacaccaccacacttcagcctcggcaacagagggagactctgtcttaaaaagcacacaaacaaaaaacaatcaaaaatgtttgtgcatgtatacacttgtactaacaaaaatgagttcattttatttcctttctcttttatcaagtgacataagatttattgaattcacaccagcatttaagtatcgttaactttatataatagtatttgggtaggggataggtgagtttctggtcgtatgaagtatagttatgtagggtgtaatatgatc

SEQ ID NO: 727182 - DNA, 125 bp, Homo sapiens
tggagtcggtaccagaactcaaatttcaggagggtcccacaaatttccagactgataaaagtggctcaatgtgcctaaactgttcatacaaacaatttggtttatcataaacacctgtttccttc

SEQ ID NO: 727183 - DNA, 1285 bp, Homo sapiens
gcttgtccattcagtgttaatcccatcaccatcttccaggagcgagatccctccaatattcaagctggggacgatgtctaggacgcgtgagtacgtcagtggagtccagcatggacgtgcttcacctaccgatggcatgcaaggcgtgggtggctacattatgctagggcgggtagccataagagggtcatcatctctgcccccttctgcatgcatgcccccaatgtatcgtccatgggtgtgaacctatgaagaaagtatgcactaacagccttcaagatcatcagacaaagtgacactacactgcgacacaccaatcatgctatagcaacgccctgtgcacaacgtgtcaatccatgactaactattaggatattcgtggacaggactcatgtacccacgaagtaccatagcacatacatctgacacaccaggatagactgtgaagatggtgcccttccggagaaactagatgcgccggtgatgagcccagcagggggtctgactaccagacaacatacattccctgacactactacatgtgcgctgaccaaggctgatggggcaacgggtcaatcccttgcagctgcagacgtggacagctccactgagcatgggccttgtcacgatgtccaccaacgtgccaaaaatgtgatcgagtaggtgtgaccgtgcatcatgccgttctagcaaaaatctggcaaaatatgatgcacatcacggaaagagtgagtgaaagcacgggcgtcaggaaggaaccgcccgtcaaggggcaatcctgggctaccactgcagccacacaggatggaaccacctcatgacacacagaagaggaaaaccaatcacacaacaaccttatgaccgcacagggagaggagaaggccatcaaaagaacacagacggacaagagccatcacccgtggagaggacgaggaaacaagggcacagcagaaaaggaaggaggcacaaacaaggcgccaacgagccgatcgaagcaagaagaacacgtgaccgaaggcgccgagagaaaacaagaagagacacaagcaacaggaagggagggagaccgggagcgagcacgcccgcacacgaaagaccacggaggggcgcgagatcgacaaagagaaggagacgaacgacagaagaaaagagcgaacaccagccagcaagacgagacgggaccgagagggcaagcagccggcgcggcgaaaggaggtgacggagcgagaagaacggaagcacgaagaaagaagatagacacgatcagaggagaggagagcagcag

SEQ ID NO: 727184 - DNA, 949 bp, Homo sapiens
  misc_feature (197)..(197): n is a, c, g, or t
  misc_feature (221)..(221): n is a, c, g, or t
  misc_feature (452)..(452): n is a, c, g, or t
  misc_feature (502)..(502): n is a, c, g, or t
  misc_feature (603)..(603): n is a, c, g, or t
  misc_feature (656)..(656): n is a, c, g, or t
tgcctggtttaccgagctgagacccagacataccagctcttataacaatagactcggcttaaacgagaatgatctatcgtgctcctgtggtccggcaggcccaacagtgctccaagcataattagtagtaggaagccactgggctggtgccgtggcgcggttcttgataccacactatgaatataacactcgccacntggaagctgcgcacagaactaganacactacagacatcactgtcgaacgccttgcgtgaagaactagtataacaagaatctggacggcactcctatgagaactagagctaggagtctcagtgactatagtatgtgaatcgagcgcagacaacaccacattacttgttgtcctcgtgttgattacgcatgcgtctgttcccatagaatacgcaaaccacatagtatgcaaagcgtttatacttgagggcacgcacnacgaaagctccttcttagacaacacttctatagtgatagtattgacgctngctctagcgcgcatagagatggctaactagacatcatcttggaagcatcatagtgacacaaatactcttgatatcaagagcagtgtagcaatgttgcatcnacctcattacacagggcactcagaagctacagcactcaatgcaagcatgagcngttacagagcatctaagacaccactcgcttcactcgattttctgaggtcccacgtgaagaccatgtagtacttttgtggcacgaattaaatagcattgcagtgctggcattttcagagcctcacttttgcgcacaattaccgcctctatttaggtggagtgcgtaattaccaatgtcacttgggccggtccgttttaaccaacggtctgtgatctggttataccccctggcggttacccaactttattagcctttgcaggaacataccccgtttcgccaggatggcgttaata

SEQ ID NO: 727185 - DNA, 704 bp, Homo sapiens
accaccatctgaaaatatatcatagtatattaatatatcaaaaatggcatatacaatataataataatattcaagcacaagctaaggaaagtaaagcatctaaaaatcatacatgttccaggatagctgctaagcggataaagaaaataatagtattatagaggacagcgattaaaaatgtagaaaaatactgtcttattagcaacttatcataacacatattacatttggaacccctgaagagcaataccatgtacttatttgtctgaataccatcaaacctaataaagtacatttaccaaaagtagacaataattgtttcccagataccccagtactgtatgcattggatatgtacaataaaaagttgctgatccattgaaagaaccaataaacaaatttaagtttgtagaatgatcagggtatgctcagccctgagacattataacaagaagacacaaaaaatcgaaaatacattcatcatccttcatatacaaaaccgtattaaatcaagtaatgaaaccagctaaaatgaattacatgcccacaggaaacataatgaagtgctcctgtgcattctaatataactgttctttcccatgtctcctacttgcgccaaatttcctccaaatctgcaccaaaattcttcataaggcaggtcgctataaatatatcaacctcatgagtcgtgagaatttacccta

SEQ ID NO: 727186 - DNA, 591 bp, Homo sapiens
  misc_feature (1)..(1): n is a, c, g, or t
  misc_feature (30)..(30): n is a, c, g, or t
  misc_feature (66)..(66): n is a, c, g, or t
  misc_feature (69)..(69): n is a, c, g, or t
  misc_feature (79)..(79): n is a, c, g, or t
  misc_feature (85)..(85): n is a, c, g, or t
  misc_feature (88)..(88): n is a, c, g, or t
  misc_feature (105)..(105): n is a, c, g, or t
  misc_feature (131)..(131): n is a, c, g, or t
  misc_feature (143)..(143): n is a, c, g, or t
  misc_feature (146)..(146): n is a, c, g, or t
  misc_feature (155)..(155): n is a, c, g, or t
  misc_feature (161)..(161): n is a, c, g, or t
  misc_feature (165)..(165): n is a, c, g, or t
  misc_feature (226)..(226): n is a, c, g, or t
  misc_feature (278)..(278): n is a, c, g, or t
  misc_feature (282)..(282): n is a, c, g, or t
  misc_feature (291)..(291): n is a, c, g, or t
  misc_feature (296)..(296): n is a, c, g, or t
  misc_feature (384)..(384): n is a, c, g, or t
  misc_feature (409)..(409): n is a, c, g, or t
  misc_feature (417)..(417): n is a, c, g, or t
  misc_feature (440)..(440): n is a, c, g, or t
  misc_feature (445)..(445): n is a, c, g, or t
  misc_feature (453)..(453): n is a, c, g, or t
  misc_feature (461)..(461): n is a, c, g, or t
  misc_feature (580)..(580): n is a, c, g, or t
ngttacggcagcccttttatttttccttanacaatgacgtgttgctggggcctaatgttctcacanaanagtagaaaancaaaanttnttgtcatctcttcaaanaatcgagaattgcgtacaaaaaaaancttacataaatnaanaatgaatanatttanaggngtaaatgcaaaccgcttccaactcaaagcaagtaacagcccacggtgttctggccaaaganatcagcaaagaaaggaaactgggtcctacggcttggactttccaaccctganaganccgcaaganaaaanaactggttcttgccagcctctagagaaatcccagaacactcagccctgacacgttaataccctgcacagatcagaggctgctggccanacagactcaccaagccacaaacttntcttccanaagcacgttcttaccttagccangaagnaccaagcnaaaagtantaaaggttgaactcaaagatatgtacagggtattaaacaaataccaaggggaacagttaacttcaatacaaggtcaaaatcagcaacaagttctacaatccagtgctgatatcagaaanaagcttcaagg

SEQ ID NO: 727187 - DNA, 730 bp, Homo sapiens
tattatagttccaaggggaactcaggggttaattatcgggctagcaaagggagggaccagtaacaacgtgccagaaggcctcagggactcagaagggaggcagcaggctaaaaggagccggtgaccacactttggggggcatgagatactcacataagacgtggtgcatacggcgcaccgtggcgcttgggggccaccgtggtcgtggagtgggcagtggtggcgctcaagcggggaggaaagagggtgcttacctcttcttagtgggtcccctcgtgtggtccgaggcgcacacaccagaagtctgtgggagcaacacacctggggggtgcgctccggagtattcccacaagtgctctcaacacaccgcagggggccccacgctatacacggggacatctctgtgggcagacacaacagcggggcatttcacacaaatatcaccgcgtggaggaaaccggggcgtctacaaggggaccacgggggggtatgtgtgcgatacagaagggcgcacatctgtggcacaagagaatcccgtgggccacttccacgtggttgtgagcccagcttcccacaaaaacacctcgtgggggaggagtccacggcggggtgatacccggggcacagacacgacaagagagttatgacccccaaagaaaagatttacggagaacacttaccgccatcccaccaaacgcgtcgtagggggacccacctctgagaaccatga

SEQ ID NO: 727188 - DNA, 125 bp, Homo sapiens
cgcagtggggttggggtatttcgttaaatgttagtaagggtagggaaacgaggttgacctgttagggtgaaaagaattattcgaatgctatatggcttgtcagggaggtagcgatgaaagtaata

SEQ ID NO: 727189 - DNA, 119 bp, Homo sapiens
actcatcacgctctcatggcaagaatttgagaaagtacatatatactcaggttctaattttaatagggaaggaaaaagttacagctcagtgcaccatgaagttgaggcagagatggaga

SEQ ID NO: 727190 - DNA, 408 bp, Homo sapiens
ggtatccccagctgcggggggggtcccagacattctgcagttccctgttattcataaaaaactccacccacagtgtgcggagagacttattaggttatggtacacgaggtccctacgggcaggaaattgaagtgcaggttttcgactaggatccagatcaagatcactttcttgggcagaatgaagctggatgtatggaatgtgttacaggctagcgttctggattattggttccctctactacggtgggcaaggccaagtttcacttgcacgtgctcacgaactggctgtcacttttgtccgcatgcagatgatcctggtgcaggttctactgtgaacatcggggagtctcctctctaccagatcccccgtctgttgccctctttagttgtctacctccgatcgggg

SEQ ID NO: 727191 - DNA, 138 bp, Homo sapiens
  misc_feature (60)..(60): n is a, c, g, or t
  misc_feature (74)..(74): n is a, c, g, or t
  misc_feature (135)..(135): n is a, c, g, or t
gagcccccacatggtgctggatggctcgcagcgccgctgtcattctaacgagagccaganccatcgatgacaanctgggagtgtgctggcaggaagtgggggctgacctcgtgtgcagccaccctcgggtggacngtt

SEQ ID NO: 727192 - DNA, 263 bp, Homo sapiens
gccaagcagtcatataatgaaccagtaagggtcatcttgaagactttggaagccaaccattttccctttagccttttcatagtcttttttgtactgaatgtcactcgccgcctgcctaagcagcatttggcagctctaatgggaatcgcatcagttctcaggtcatatcccttcttgctcaagtctttcaagtctgctttgtacatattctcactgatattgtaggcattaactttagcctggatgaactgcttgggctgttt

SEQ ID NO: 727193 - DNA, 229 bp, Homo sapiens
tactggcctgcaggaggagagtcgctacctacgggctgtcttagccaacgagactggactggactcgcttgctgagccgggtgagcggcgtgggatctgcgtgttgagccacctcgcttcttcagagactcgcgccgccggatggccacgtactagcgctctgtccggctgggcaaagcaggaaggcagcgacctggctggatagacggacgatctcggccggtggagg

SEQ ID NO: 727194 - DNA, 860 bp, Homo sapiens
aaacttgcgtatatagactactagttctgggcttgatgtctgcatttaatactccgtgattgtaaatcagtccctgtttctcaaaacctcaatttcctgatttatgaggtaggaagctgtgagaattaaaggagataaaacattttgtgtagtgtctggtgtagagtggaccgttcaataagtgttaccttttgttataatcagatgctaattatatattaatagtctataatcctttgtaattagatttttgtgtaattttttaattagatgtaatgttttgtaattatatatattttataatgagatgtgttttggatcataagtcctctgggagtcagaagaaaaatatacttttcacagagtagggtaagatatgaaccaagccctaaatgacaggtgtgattcgttaaccatgagaaaggaagggaggctcttcaaagccaaaagccaaaactgcacctggcgtgggagcttctaaacccgcgatctttgtgagactgaagggacacaggcctgaacagaacctgtgcttcggggagcagtggggagaacagagcatctcagaggcttgtttcaccctctagtgtaagtcttctgtgccttttctgttctaaagaaacttttggaattgctacctgcttattgtatttttttggtctctttaaactgctctgacaagttcaatacaacatttcccacttaaaaaaaataggcagtatgaatatcacacaaagagcagtggatgagcctttaaatatcaggcaaaataaacagaccagaaaaatatggacattctagaagctgaggcattttttaaatagctgttttgtttttataattactttgtttggataaat

SEQ ID NO: 727195 - DNA, 158 bp, Homo sapiens
  misc_feature (8)..(8): n is a, c, g, or t
  misc_feature (52)..(52): n is a, c, g, or t
  misc_feature (55)..(55): n is a, c, g, or t
  misc_feature (147)..(147): n is a, c, g, or t
gcgtcagnacggtcgtggggacatcggaagatgtgattgggtgtagtgcacnacnaacgtacagtttgttctgattgcgtggatgtatcttggagcgagttgcggacgtataatcgaatgcgggaagtgatctggcaatttcatcangcccgaggagc

SEQ ID NO: 727196 - DNA, 460 bp, Homo sapiens
gagtgtcttcaagataagccaaagctgcaaatctatagtaaagaaaacagccaggcatggggtggctcacggctgtaatctcagcactttgggaagctgaagcaggtggatcaccagagatgaggagttcaagaccagcctggccaacatggtgaaaccccatttttactaaaaatacaaaaaatttagctgggcatggtggtgcggttactgtagtctcagctatcatccggaaaactgaggcaggagaatcacttgaacctgggaggtagaggttgcagtgagccgagactgctccactgcactccagcctgggcaaaacagcgacacttggtctcaaaaaaaattaattataaaaaatatgctttgtgttgatagtgacatcttcctataaaaagtaccatgtactctcatcattcaggggcgcatttgtatgccatcttgaagaacactcgggtac

SEQ ID NO: 727197 - DNA, 114 bp, Homo sapiens
catagtgataacgccctgcctcacatgatcatcagaacatgcatattaccatcacaatgagataccatcttaagccagtaagactggctattattcaaaagcctgaacacaatg

SEQ ID NO: 727198 - DNA, 1596 bp, Homo sapiens
gaggttccagccggagcggtaactgggcgcaggtcccagccgccgcactaaacccggcccgtgcggtgattggacgcaggccccgggccgcggcggaggcgggcgatccgaaagaggctggtgctggctgcatggggaggcggcggcagcgggtggaccccgcggctggggcccgggccggggccctgcctgaggccatcgccgcgttgagtcggtcgctgccctcgggacccagccccgagatcttccgccgcgccaagttcgaccgtccggaggcgacctccgcgctctggcagctcctcttccgtgtgctctcgccactccctgcgggcaacgccttggcatcgctcgccctggaggtccaagcccgcttggtgaagtcagcactatgctcccagggctacccgaggctggcactggcacaactacctgaggatggctcgcagggcagtcgggagctgctgctggctctgtcctggctcttggcccgaggacctgtgcccgagcagatgctggcccaggcccgagtgcctctgggtgacgagatgactgtgtgccagtgtgaggccctggccagccctggcccacctgcaccccacatggaagcagagggtcctgtggatgtccgccatgtgcagtggctgatgggaaagctgcggttccggtggcgccagctggtgtccagtcagcaggagcagtgcgccctcctgagcaagctgctgcggactctggagcgtgagaaccagcgcctggaggctgtcctggcgtggcggcgctctgagctggtcttctggcggtggatggacacggtcctgggcacctgtgccccggaggtgcctgctgcagcctcacagcccaccttcctgccctgggtccccgagcgcgggggtggcgagttggacctggtagtgcgggagctgcaggcactggaggaggagctgcgggaggctgcggagcgcaggcgggcggcctgggaggccaaggctggaggctgtggacgggggccagagtggagtgccgcgcggcgggcctctcgggaggctgtggaaaaggagctgggagctctacagcagtgctgggagcgagacggtggcccggcccagccccatgggccacaccggctggtgagacgagaggatggggcagcaggggaccgggacctgcgggcagctgtggtgatcaggacgctgaggagccaggaggcctgcctggaggcggtgctacgtcgactacagggacagtgtcggcaggaactggccaggctggtgggagcccgccctggtctcatctggatcccgccacctggacgctgagggcctgtcgacgggccctcgtgtgggaagcctgccctggcccagcctggctgggtcttggaggagcagattccaaggccaggtggccgcagggacgatgcagatgcagagcccacgtcacatgctcgctccaggggtggggctgggctgactctggccggatcccaggcctgtggctagcagcactggggacaggaatggctggtcccttgaggaggtcgtgacaggctcagcctggtggtctggaggggactcggaaataaattgtagcagctttcctgcc

SEQ ID NO: 727199 - DNA, 1540 bp, Homo sapiens
gaggttccagccggagcggtaactgggcgcaggtcccagccgccgcactaaacccggcccgtgcggtgattggacgcaggccccgggccgcggcggaggcgggcgatccgaaagaggctggtgctggctgcatggggaggcggcggcagcgggtggaccccgcggctggggcccgggccggggccctgcctgaggccatcgccgcgttgagtcggtcgctgccctcgggacccagccccgagatcttccgccgcgccaagttcgaccgtccggaggcgacctccgcgctctggcagctcctcttccgtgtgctctcgccactccctgcgggcaacgccttggcatcgctcgccctggaggtccaagcccgcttggtgaagtcagcactatgctcccagggctacccgaggctggcactggcacaactacctgaggatggctcgcagggcagtcgggagctgctgctggctctgtcctggctcttggcccgaggacctgtgcccgagcagatgctggcccaggcccgagtgcctctgggtgacgagatgactgtgtgccaggatccacctgtacacacgcggctgccacagcgaccagagccttagccatctgtctgtcactgaagcagagatgctcagggacccagagggaggccagcagctgctgcggactctggagcgtgagaaccagcgcctggaggctgtcctggcgtggcggcgctctgagctggtcttctggcggtggatggacacggtcctgggcacctgtgccccggaggtgcctgctgcagcctcacagcccaccttcctgccctgggtccccgagcgcgggggtggcgagttggacctggtagtgcgggagctgcaggcactggaggaggagctgcgggaggctgcggagcgcaggcgggcggcctgggaggccaaggctggaggctgtggacgggggccagagtggagtgccgcgcggcgggcctctcgggaggctgtggaaaaggagctgggagctctacagcagtgctgggagcgagacggtggcccggcccagccccatgggccacaccggctggtgagacgagaggatggggcagcaggggaccgggacctgcgggcagctgtggtgatcaggacgctgaggagccaggaggcctgcctggaggcggtgctacgtcgactacagggacagtgtcggcaggaactggccaggctggtgggagcccgccctggtctcatctggatcccgccacctggacgctgagggcctgtcgacgggccctcgtgtgggaagcctgccctggcccagcctggctgggtcttggaggagcagattccaaggccaggtggccgcagggacgatgcagatgcagagcccacgtcacatgctcgctccaggggtggggctgggctgactctggccggatcccaggcctgtggctagcagcactggggacaggaatggctggtcccttgaggaggtcgtgacaggctcagcctggtggtctggaggggactcggaaataaattgtagcagctttcctgcc

SEQ ID NO: 727200 - DNA, 1499 bp, Homo sapiens
gaggttccagccggagcggtaactgggcgcaggtcccagccgccgcactaaacccggcccgtgcggtgattggacgcaggccccgggccgcggcggaggcgggcgatccgaaagaggctggtgctggctgcatggggaggcggcggcagcgggtggaccccgcggctggggcccgggccggggccctgcctgaggccatcgccgcgttgagtcggtcgctgccctcgggacccagccccgagatcttccgccgcgccaagttcgaccgtccggaggcgacctccgcgctctggcagctcctcttccgtgtgctctcgccactccctgcgggcaacgccttggcatcgctcgccctggggctacccgaggctggcactggcacaactacctgaggatggctcgcagggcagtcgggagctgctgctggctctgtcctggctcttggcccgaggacctgtgcccgagcagatgctggcccaggcccgagtgcctctgggtgacgagatgactgtgtgccaggatccacctgtacacacgcggctgccacagcgaccagagccttagccatctgtctgtcactgaagcagagatgctcagggacccagagggaggccagcagctgctgcggactctggagcgtgagaaccagcgcctggaggctgtcctggcgtggcggcgctctgagctggtcttctggcggtggatggacacggtcctgggcacctgtgccccggaggtgcctgctgcagcctcacagcccaccttcctgccctgggtccccgagcgcgggggtggcgagttggacctggtagtgcgggagctgcaggcactggaggaggagctgcgggaggctgcggagcgcaggcgggcggcctgggaggccaaggctggaggctgtggacgggggccagagtggagtgccgcgcggcgggcctctcgggaggctgtggaaaaggagctgggagctctacagcagtgctgggagcgagacggtggcccggcccagccccatgggccacaccggctggtgagacgagaggatggggcagcaggggaccgggacctgcgggcagctgtggtgatcaggacgctgaggagccaggaggcctgcctggaggcggtgctacgtcgactacagggacagtgtcggcaggaactggccaggctggtgggagcccgccctggtctcatctggatcccgccacctggacgctgagggcctgtcgacgggccctcgtgtgggaagcctgccctggcccagcctggctgggtcttggaggagcagattccaaggccaggtggccgcagggacgatgcagatgcagagcccacgtcacatgctcgctccaggggtggggctgggctgactctggccggatcccaggcctgtggctagcagcactggggacaggaatggctggtcccttgaggaggtcgtgacaggctcagcctggtggtctggaggggactcggaaataaattgtagcagctttcctgcc

SEQ ID NO: 727201 - DNA, 107 bp, Homo sapiens
gctggatataatacacatctgtcgaaatacttataaaggccatcaattttgatcgaagctcccgactcatgacggatttgtttactccgctgaccaccttcgtactg

SEQ ID NO: 727202 - DNA, 462 bp, Homo sapiens
  misc_feature (35)..(35): n is a, c, g, or t
ggatgtacataaagatagaatatgtaacttgaagnacaagaggaaaaaagttaaaatgaataaggccccagagaaatgtcagacaccatttactgcaccaacatacccataatagaatagcagaaggtgaggcaaaagagaaagggacagaaaaaatattcaaagatataatacctgaaagcttccctaattttatggagaacattaacatacatccaagaaatgcaacaaactccatgtaggaaaaatgcaaagagaaccacactcagacatacagtcatgatgttgaaagccaaagatagaaaatcttgaaagcagtaaggtggaaacaactcatcaagtaaaagagaaccccaacaaaactatcagctgacttgttagaatagagaccattagatagtgaaatgacatgttcaaagtactgaaaatagcagaagtactgagaatagcagaaggtgagga

SEQ ID NO: 727203 - DNA, 200 bp, Homo sapiens
gcctttttttacccgccggaagctacagcttttgcccccccaaaaaaaccccacccttttacccaccgcggacccaaaaacagcaaaaaccaaggacctctcccaaccccaacccctcctttttggcccttccttccccccctcccagcccacccccagacacctcaatcccccaaaaggatgccctaaacctctcctaa

SEQ ID NO: 727204 - DNA, 181 bp, Homo sapiens
ctgtattctgtggtcgattctctacacggatcccctactactgtgcggctgtttgttgtcatcgcactccttatcggatcccgatgttccatggtcatcgctcctgctgtcgattcaatcaacacgcttttctggaggtctgatgagcgtcggcctccgctaaggagtgtgtcacaattca

SEQ ID NO: 727205 - DNA, 364 bp, Homo sapiens
gtcgactctaaatggatccccatagatggcccactgcactcctacattcctctgtagtagagacaacgtgttgtaatctcagtctgcctgtagggcgtgattctcagctcaccagactcaacttggagatcttacattgatagcgatcatgagacactgaacggagatgctacatattcctctcttgcagcaaaaggttttaaatgcgttcgactaaacctacatgataaaagatcaccaactcagagtccgatcacagtgaatggaaactcatgaggtgcctgtgagtctgataagtccctatcggaggccgttttccccctcggcatattctctcatttgcctctctcctgctttttttcct

SEQ ID NO: 727206 - DNA, 204 bp, Homo sapiens
gtgctgtcgatcttctgtgataggctcgaaggtgtgggtcgtttgggtaagcatcagtactccatggcagaccagccctctggggacaggtctgtatcatccagctttctaaggtttgggtggctggcctgtactttgcttcctgtatcttacttgtacttatagcttctttcactctgttgttggactgggtcgtgtactgtg

SEQ ID NO: 727207 - DNA, 310 bp, Homo sapiens
cccccaaatccccaaatttgggggccccggggggtttttttggggccccaaaccccaaaataggccccccttttgggtttttcggtttctatttaaccccccaaaaccaaaggtccccccggtttggggtggttttttaaaccctttttttcccttttttaggttttttttaaaaattttttagggggaattttttaaccgggggaccccccgaagggggttttttactggttccccccatttgggccaggattggggggttccccggggttccccccgggccaaaaggggggggaaaaaacctttttta

SEQ ID NO: 727208 - DNA, 256 bp, Homo sapiens
acctcctaccacgcataattctatgttaagcctaaacctcagtatgtcagaacttgactatgtttggagatagggcctttaaagagaggagagttaaaatgagatcattaggatatccctaatccaatctgacctgtgtccttataagaagaggaaatttagagtcacagccattcaggaatgtacatgtacagaggatagaccatgtgaagacacagtgaggaggtggccatctgcaagccgtggggtaggaggt

SEQ ID NO: 727209 - DNA, 1007 bp, Homo sapiens
  misc_feature (14)..(14): n is a, c, g, or t
  misc_feature (16)..(17): n is a, c, g, or t
  misc_feature (346)..(346): n is a, c, g, or t
  misc_feature (598)..(598): n is a, c, g, or t
  misc_feature (634)..(634): n is a, c, g, or t
  misc_feature (675)..(675): n is a, c, g, or t
  misc_feature (695)..(695): n is a, c, g, or t
  misc_feature (747)..(748): n is a, c, g, or t
  misc_feature (754)..(754): n is a, c, g, or t
  misc_feature (881)..(881): n is a, c, g, or t
gagataaggaaganannaaaataaagataattcgggagtacaattgacaaagcgtgtgggcgccagcctccagcagtaactgtgttccattcttggagggttccggtgagaagaacgcccctactgcggtatgaggacgcagagaatcggcccctggacatagacgaggtggaagcgcctgaggaagtgagtctggacccgaggagattcgagcagttctgccccggtcatcaacgagatgcgcgaggacatcgcgtctcttatacgcgagcacgggcgggcgtacctgcggaccaggagcaagctgtgggagatggacaatatgcttatccagatcaaaacgcangtggaggcctcggaggagagcgccctcaatcacgtgcagcacccgagtggcgaagccgacgagagagtgtcggagttgtgcgagaaggctgaggagaaagccaaggagattgcgaagatggcagagatgctggtcgagctcgtctggcgaatagagagaagcgagtcttcttgaaggaggagatccgtggtacggtcggaactatgctgagcttggatgaaactcagtagtcgccctaagcatgggtaaccngcgccctgtaaaaagtactgtctagggctgcatccnccactttatgcatcaaacattgagcattgggaacaaacgtngcggtcaagagggaaagaantgcgtgctggctttcggtagggccgtagtatacccgctttcttgttggcctnntccttnccacactgggtactatgagaaagataccaggtaccttcggtttacgttttgtgaaacataaaagccactctcataaggcagtcgccagagtagacctgctatgcactaaggagcttggggatgccantgagacctaggcctggagcacagtgtacgccgggagaaacctgggaaggagatgtagagtaaagcacaaggccttacctcgaattccaagatggtctatagaacaagtttgtcagagacccgggtt

SEQ ID NO: 727210 - DNA, 1156 bp, Homo sapiens
gagcggattcaccattttccatcgagaaacacagctttgcactggatgacgatattaaatcgaactcacttatgggaaattttgccctcggggccaggaatttcggcccgaggcccaaatttgagtggggagcaaaccatttctcggttgccctttcccattttgtgccacatcggagaaccgttattcctaagagaatttttttttctacaataaaacccataccccatttatttctttacgtgggaaagggtatttgtaaaagcaagacaaactccaaggttggtaatgaacaaattgacaccagctggtatatttcccatcaccctagcaaaaacaatttctttcctcactgcaggcgaagaacaagctaatcacagaaattacgtctactaaaattcctaagtttacaaaaataaggtccactggatcaagtgtatacccactggatcaagaatgtcacaacatgactaggaaacaatgcagccaacttaaaagaaaaaattaacttaaggatagcaaaatgccatacatttacatagtctcagacaagcaacatccattcttcaatgtatctggtgccagctaagaactataaaacctcaagttaaatcaaatagcagctacaggggcaagttccaaaatctctatggatttatagagcacgagatagttaccattttgaaaacttacctttcagtacttaaatacctaagtttaaaaaatggcttctgcaccagctaccctcactgagcaagcattcttttgtcatttatggctgtttgagattatggcagaagatcagcctgtagttcctcattgaagaaatgcagaactcgatcagtacttcagcagttaatcgttggaaccgcgatgccccgttccctggccgcggccgcttctccaggacccgcggcgacggcaagagggcgagaactgaggccccaagtggctccgcgccgagaagcctcttcctgggcgccctgacgggaggttaaagtacgcttggccgggccagcccggtaagcgaccccccggatacccccgcggtggtggcgacgcagacgcggaacagggggagagagtggcgacagagcggcggctgaggtgcagagcctccctaacgcgagcgggaggagacggctggcggcccgct

SEQ ID NO: 727211 - DNA, 1178 bp, Homo sapiens
  misc_feature (14)..(14): n is a, c, g, or t
  misc_feature (16)..(17): n is a, c, g, or t
  misc_feature (346)..(346): n is a, c, g, or t
gagataaggaaganannaaaataaagataattcgggagtacaattgacaaagcgtgtgggcgccagcctccagcagtaactgtgttccattcttggagggttccggtgagaagaacgcccctactgcggtatgaggacgcagagaatcggcccctggacatagacgaggtggaagcgcctgaggaagtgagtctggacccgaggagattcgagcagttctgccccggtcatcaacgagatgcgcgaggacatcgcgtctcttatacgcgagcacgggcgggcgtacctgcggaccaggagcaagctgtgggagatggacaatatgcttatccagatcaaaacgcangtggaggcctcggaggagagcgccctcaatcacgtgcagcacccgagtggcgaagccgacgagagagtgtcggagttgtgcgagaaggctgaggagaaagccaaggagattgcgaagatggcagagatgctggtcgagctcgtctggcgaatagagagaagcgagtcttcttgagcgcggtcggcggtttccagccaatggattctggtcacactggtggagattggctgacaccctggagaaagccgaaaccagagagcctttgtgtttcctctttttccctgttctatgctctgttctcacttacgcactacgttgccgtgctatggtctgtggttgactgacctcaatatgagtttcgatgtgtacccgtgttttggtcgggccgtacatctgttgtgacaagatgctctcacaatacggacacttagggcctagattgtaagctcttggcacgcagtcacctttgtttcccgggcttgtgcgtggttatttctaacattttttggaggtgctgtggtatttcttgttgtgaccctgatagctccctgggaactttgggtctgcgtgtgaccccattgaggacttcccagttgggggtcctcccagctctgggggtgccgaaggactgcttaacttctggcagaccgctccttgcgcacctactgggcgaccggccccatttcacggggagtgtggttcgccgacctggtgggcccgtgactctggcaaacgctcgggaaggatatggcgtttggcactcactggtgggcccagcgcggcagtttttcgcacaaatcgtgtggcccacttcgtcccgtggggttttgcc

SEQ ID NO: 727212 - DNA, 575 bp, Homo sapiens
  misc_feature (28)..(28): n is a, c, g, or t
  misc_feature (66)..(66): n is a, c, g, or t
  misc_feature (252)..(252): n is a, c, g, or t
  misc_feature (389)..(389): n is a, c, g, or t
  misc_feature (391)..(391): n is a, c, g, or t
  misc_feature (410)..(410): n is a, c, g, or t
  misc_feature (412)..(412): n is a, c, g, or t
  misc_feature (418)..(418): n is a, c, g, or t
  misc_feature (432)..(432): n is a, c, g, or t
  misc_feature (448)..(448): n is a, c, g, or t
  misc_feature (450)..(450): n is a, c, g, or t
  misc_feature (454)..(454): n is a, c, g, or t
  misc_feature (458)..(458): n is a, c, g, or t
  misc_feature (470)..(470): n is a, c, g, or t
  misc_feature (475)..(475): n is a, c, g, or t
  misc_feature (483)..(483): n is a, c, g, or t
  misc_feature (486)..(486): n is a, c, g, or t
  misc_feature (560)..(560): n is a, c, g, or t
tggggtgggcagggggtgagggggatcngctagcgaaggctgcgctcggggtcagcgatgcttctncctctgggacactcatcatgcccgtccctagggcacgttgcctctcttcttttgcgaagctttcatgaggtctgacatgaaatcttgctccccgcctcctgctccgccggggtgccctgggttctcttgcctcttggggggcacaggaggcctcttggccaccgcggggggcggcctggcggggtngggggcgggggcgggcgcggagcgcgggcgagcggacggacggcgagacggagaggcagctctgagccacgcgatccacatgcgtaacagaacggcgggggcgaggggcacgaaagtctgggggcggctccatgaantncgggggcggcggcgggggnanagggtnatcgaggggaggcngcggtggcggcagcgncnaganatcntcgggtggggcnggcangcccccgncgnctgtgcccttggccttgaggggcgtggcgggactgccgctggtgtcggaggacctccgcaccggagggagcggnggaaggctggacttg

SEQ ID NO: 727213 - DNA, 222 bp, Homo sapiens
taaatttttgaaaagcgaaaattgaggtccttctattcccaaaccagtaaaagcggggtcttcatttctagggctgatgtgaaaacccatggtcagttgttgctgcgtcaaaaatattaaaaattctttttttttaggtgggcatccctgataaacttgtccgtgaaaggtgaaaaccccttaaatgtaagatgcgtgagtaaaattttggtaaagaggcca

SEQ ID NO: 727214 - DNA, 827 bp, Homo sapiens
ggggagacttccggcagggggggcgcggggtctgtgctgaacggtcttcgtgaagcgctggggcgcgatgattgacgctaagggcctttaccggcgacgactgtcgccgcttcgacaagtattcgcttggatccacgttacagaaagttatgggattcctttctaggcctacattatacctcggctctactggccagtagtattacattggtgccgaggcaccttggtggagaatcagtgggttatatcatgggtaaagcagagggctcaggagctagggaagactggcacgggcaggttgcagctctgtctgtggccccagaatttcgacgcctctggtgggctgctaagacttatggagtactagcaaggaacgatttccagacgggaccaagggtggattctcgtggatctctctgtaaagagtatctaaccaagttgcagttaacatgtaggcaagcagttgggctacagtgtatataggacggtcatagagtactattcggccagcaacgtggtgagtctgatgaggacgctcatgatatgaggaaaggcaactttccagggcatactgggaagaaagtccaatcgttaccattaccctcagtcctgtgaggcctgaagacatttgcataaccctgtggcagtggttcttcaggcaagatactctagcatgcttatggacaagatccttgtcatgggtgactctggagctctattagggggacccgtctcacttcaggtcttaagattccagacatcaggtttcattattaacctcttgtccgttgccatatctctaacggattggcccatcataaagggcg

SEQ ID NO: 727215 - DNA, 655 bp, Homo sapiens
ttcctcatatagtccacaacgtggcgtactatgaatgggaacctcattgtctggatgtcctccctgctgcagctcatcaaagtggaattccaatatttttggttacaagaacggagttcagttactcaaggaaggggaggagctcttcctcatatcgtttgtttgcagccagaaatcaaaagctgtcgtttctgttcagtacttaaatacctaagtttaaaaaatggcttctgcaccagctaccctcactgagcaagcattcttttgtcatttatggctgtttgagattatggcagaagatcagcctgtagttcctcattgaagaaatgcagaactcgatcagtacttcagcagttaatcgttggaaccgcgatgccccgttccctggccgcggccgcttctccaggacccgcggcgacggcaagagggcgagaactgaggccccaagtggctccgcgccgagaagcctcttcctgggcgccctgacgggaggttaaagtacgcttggccgggccagcccggtaagcgaccccccggatacccccgcggtggtggcgacgcagacgcggaacagggggagagagtggcgacagagcggcggctgaggtgcagagcctccctaacgcgagcgggaggagacggctggcggcccgct

SEQ ID NO: 727216 - DNA, 1165 bp, Homo sapiens
  misc_feature (14)..(14): n is a, c, g, or t
  misc_feature (16)..(17): n is a, c, g, or t
  misc_feature (346)..(346): n is a, c, g, or t
gagataaggaaganannaaaataaagataattcgggagtacaattgacaaagcgtgtgggcgccagcctccagcagtaactgtgttccattcttggagggttccggtgagaagaacgcccctactgcggtatgaggacgcagagaatcggcccctggacatagacgaggtggaagcgcctgaggaagtgagtctggacccgaggagattcgagcagttctgccccggtcatcaacgagatgcgcgaggacatcgcgtctcttatacgcgagcacgggcgggcgtacctgcggaccaggagcaagctgtgggagatggacaatatgcttatccagatcaaaacgcangtggaggcctcggaggagagcgccctcaatcacgtgcagcacccgagtggcgaagccgacgagagagtgtcggagttgtgcgagaaggctgaggagaaagccaaggagattgcgaagatggcagagatgctggtcgagctcgtctggcgaatagagagaagcgagtcttcttgacggacggagatcggtgcgttcacagctgaggactgtagtcaactggtaaggatgaactgacaccttgcaggcaaactgaaacagcttgtcattttctctgtctgtattccggtatagtacagttacaccccatgtaacagtctcccttatggtcagtgcttcgatgacctcgatatggatacagattatcaaatgtgtctgggttccgggacaatattaactcttgtcaacagacatacgtctcaggacagagcaaccatggcggcttacttacagtacggatacaaacaggtggatcacgtaatattactatgattacttcgcctagatagttactctgacaaatgtagggagcaatagggaccttcgataattcatatgggctggtaaaccctatggtgaaccctgactcggtactcatcggaagcacgttcaagcaacgttgagaatccaggaattcttcccaagcctctttacgcagggttccatgtggggacagcagccagtaaccggcctacttgggcactggaagacccctgggttgacacgcacagtgttcatttcacttgggagacctgccttttggcccttcaccaacttggggtgaaggaaacagcgagagaaccgggggcagcaacttcgccc

SEQ ID NO: 727217 - DNA, 107 bp, Homo sapiens
taggagggggcaggcgaatataaagggaatgggcccagtaggagaagagaatcactaaggcaggccaggcaggctgctcagctgcccacagcaatctcaccctctga

SEQ ID NO: 727218 - DNA, 682 bp, Homo sapiens
tagttgagaaaaggtgcatcaagtatatacactggagacacagaagaacaaggttaagagagtttttgaagaaaaagtctaaaggggttattaggtgaggttacgatctgcttccgtaaccgaatccacctctttatccgctgtcgtatatctgccaaagccactccactgtctcagcatttccattgacttgaaaaagtccttgttgctccagacctcctttcagtacttaaatacctaagtttaaaaaatggcttctgcaccagctaccctcactgagcaagcattcttttgtcatttatggctgtttgagattatggcagaagatcagcctgtagttcctcattgaagaaatgcagaactcgatcagtacttcagcagttaatcgttggaaccgcgatgccccgttccctggccgcggccgcttctccaggacccgcggcgacggcaagagggcgagaactgaggccccaagtggctccgcgccgagaagcctcttcctgggcgccctgacgggaggttaaagtacgcttggccgggccagcccggtaagcgaccccccggatacccccgcggtggtggcgacgcagacgcggaacagggggagagagtggcgacagagcggcggctgaggtgcagagcctccctaacgcgagcgggaggagacggctggcggcccgct

SEQ ID NO: 727219 - DNA, 413 bp, Homo sapiens
gacgtatgaatggaatcatgctgttgataaagcatcacgttagtcacccatggactaggatcctgtcaggatgcgagtgccacctagtgggtgactgtagtgtgacaccctgagggacacgatgtccaaatgtaggaacaagaggagatgcgataaaaacctgccaagcacacaggaggacgcactttaccttccgatcagaactcaacagacattttccctcattacttatgaggaaacagaaaattcctaaattggtcccatttttcgaccaaagcactatttaagaagggattctagaagaatcaagtatacacatttcacatgggttacacggcattctatctacccacagaggtataaagaacagatccacaacacacaaacacatgcacgtcaaacagcattcgagg

SEQ ID NO: 727220 - DNA, 226 bp, Homo sapiens
tagctcacccctggctccttcccagcctgggcatcctatgagttccaaggactcatatcagctactcggaacatctacgaagcgctcactgcacacaggatactgaaggtgtagaaatatatactacacataccagatggttatctatctatatggcttgggtgagacggagctagtgtgttagtcatgggcatgattgctctgcatttagattgcatacccatgt

SEQ ID NO: 727221 - DNA, 631 bp, Homo sapiens
  misc_feature (20)..(20): n is a, c, g, or t
  misc_feature (53)..(53): n is a, c, g, or t
aactaacaggtgccctgccnacccagcccggcctaatttttttgtatttttantagagatggggtttcaccgtgttagccaggatggtctcccatctcctgacctcgtgatctgcccgtctcggcccccaaagtgctgggattacaggcgttagccaccgcacccggcctttcagtacttaaatacctaagtttaaaaaatggcttctgcaccagctaccctcactgagcaagcattcttttgtcatttatggctgtttgagattatggcagaagatcagcctgtagttcctcattgaagaaatgcagaactcgatcagtacttcagcagttaatcgttggaaccgcgatgccccgttccctggccgcggccgcttctccaggacccgcggcgacggcaagagggcgagaactgaggccccaagtggctccgcgccgagaagcctcttcctgggcgccctgacgggaggttaaagtacgcttggccgggccagcccggtaagcgaccccccggatacccccgcggtggtggcgacgcagacgcggaacagggggagagagtggcgacagagcggcggctgaggtgcagagcctccctaacgcgagcgggaggagacggctggcggcccgct

SEQ ID NO: 727222 - DNA, 811 bp, Homo sapiens
gctgcagtttgctgggggttcacttcaggtcctactcatctggttcactactgcacctggagatgacactcgaggaggctggagaacagcaaagatgggtgcctgctccttcctctgggatccctgacctcgagggacactgacctgatgccagtaggaatgctcacatatagggtgtctgacaagccctgctggagagtctcacccagttgggtggcaagagatgcaggaggacctgtttaaccaagcactttggctgtcccttggtggagggtgtatgccgtgctcgggggaaacccacttgtctgggctgcccggattccgcagaactagcaggaggaaagactaagtctgatggtctgtggagacaacggcaacccctcccactaaaggctcaggcccaggcagatcagagttctgtccctgagcccctggctggagttggagttcctgcagggaggccccgcccagtgaggagggataggtcagagtcaggcctgaagaggcactctggccacagcctgacacagccgtggtgctgggctgtgggaatacctcttaggaccaagccatccagcctccctggctcggtggaagtgccgcctggagctatggagatggttgctgcccttacccccgccctgggagcttagtgatttaggcaggctagcagtcccagtgttagctgacaccccactcccacaaggagctcagacagcttacgatagcaggaagtggagctgtggtggatggcaatcctcacctaagaactccgcaggttaggaatattctaactgaatgtatagagaaa

SEQ ID NO: 727223 - DNA, 229 bp, Homo sapiens
  misc_feature (44)..(44): n is a, c, g, or t
ttttttgtcccccggtttaaaggggggatttttccagagggggntgtttcccgcccgcccccccaggaccccaccaaaggcccaaaaccccgccaaaaaggctaggggtattgggtaaatgggcgggacgggggggcccttattatttgagttaagccgttgtttagggggaaaaccccgtaaaaaattaataataataataataaaaaaaaaggggccgccgttctta

SEQ ID NO: 727224 - DNA, 302 bp, Homo sapiens
cgagttagtctgcagaaattttttttacattccatttcaaacactgtcttgaattaccagacataatataaacacataaggtgccaaataacctattaatctagaggaaactttttctttacaggcttcccatctattcacaattgtgctgcagagtgtatgatgtcccctaaatatgcaggtggaattgtttttttgcctatttggtatatgtaattaactgtagtcgcttctagaaaggatagacaaaatttctacaaacttcacagagaaggaaccaaccatttacctcttcactcgaa

SEQ ID NO: 727225 - DNA, 388 bp, Homo sapiens
gcccaattgattcttatatatataacacaatctcaggtaatagaaaacataaagtaaattatgccctattagtctgaaaaagtgagtggctatccaaagtcccaacaatgtcaacactatttaagaatctagttcattaacaattacaaaacgtacatattcaaaagtaagagtaggcagggcgcggtggctcacgcctgtaatcccagtaatcccagcatttcgggaggccaaggcaggcggatcacaaggtcaggaaattgagaccatcctggctaacatggtgaaaccccgtctctactaaaaatacaaaaaattagccgggcatggtggtgggcacctgtattcccagctactcgggaggctgaggcaggagaatggcatgaat

SEQ ID NO: 727226 - DNA, 3318 bp, Homo sapiens
agcggggtgtgggcgccgtacgtgcgcgcgcgcggcggccagaaagcggcgctgggaccctgaggcggccgtggttaggcggctccccggcggctcctccgcggcggtgacggcgaccgcactccccgcttcccgctccccgcgctcctccgcccgggtccgccagccgaggccgctcccgagcgtcggaagatgccggccgtgtccaagggggacgggatgcggggcctggcggtcttcatctcggatatccgcaactgtaaaagtaaagaagcagaaataaaaaggataaacaaggaactggcaaatatcagatcaaaatttaaaggtgacaaggctcttgatggctatagtaaaaaaaagtacgtctgcaagttgctcttcatctttctccttggtcatgacattgactttggacacatggaggctgtgaacctgctgagttcaaacagatacacggaaaagcagatcggctaccttttcatctctgtgttggtgaactcaaacagtgagctgatccgcctgatcaacaacgccatcaagaatgacctggccagccgcaaccccaccttcatgggcctggccctgcactgcatcgccagcgtgggcagccgggagatggccgaggccttcgccggggagatccctaaggtcctcgtagccggagacactatggacagcgtgaagcagagcgcggccctgtgcttgctgcgcctgtacaggacgtcccccgatcttgtccccatgggcgactggacatcccgagtggtgcacctgctcaatgaccagcacttgggtgtggtaactgcagccacaagtctgatcaccactttagcacagaagaacccagaagagtttaaaacctccgtgtctctggctgtctctaggctaagcagaatcgtgacgtctgcatccacagatctccaggattacacttactattttgtcccggctccctggctgtctgtcaaactgctgagactgctgcagtgctacccacccccagaccctgcagtgcgaggccgcctgactgagtgcctggagaccatcctgaacaaagcccaagaaccgcccaagtcgaagaaggtccagcactccaacgcgaagaatgccgtgcttttcgaggccatcagcttaatcattcaccatgacagtgagccgaacctgctcgtccgtgcctgcaaccagttgggccagtttctgcagcaccgcgagaccaacctgcgctacctggccctggagagcatgtgcacgctggccagctctgagttctcccatgaggctgtcaagacgcacatcgagacggtcatcaacgccctgaagactgagcgggacgtgagcgtgcggcagcgggccgtggacctcctctacgccatgtgcgaccgcagcaacgccccacagatcgtggccgagatgctgagctatctggagacagctgactactccatccgagaagagattgtgctgaaggtcgccatcctggctgagaagtacgcggtggactacacctggtatgtggataccatcttgaacttgatccgaattgctggtgattacgtgagtgaagaggtgtggtaccgagtcattcagatcgtcatcaaccgggacgacgtgcagggctacgcggccaagactgtgttcgaggctcttcaggctcccgcgtgccacgagaacctggtcaaagtgggcggctacatcctgggggagtttggaaacttgatagctggagacccgagatccagcccgctgatccagttccacctgctgcactccaagttccacctgtgcagcgtccccacccgcgcgctgctcctgtccacctacatcaagttcgtgaacctcttcccggaggtgaagcccaccatccaggacgtgctgcgcagcgacagccagctcaggaacgcagacgtggagctgcagcagcgtgctgtggagtacctgcggctcagcaccgtggccagcaccgacattctggcgaccgtgctggaggagatgcccccattcccggagcgggagtcctccatcttggcaaagctcaagaagaagaagggccccagcacggtgacagacctggaggacaccaagcgggacaggagtgtggacgtgaacgggggtcctgagcctgccccagccagtaccagcgccgtgtctacgccttctccgtcggcagacctgctgggtctcggggctgccccccctgcccccgcgggccccccaccctcctccggcggcagcgggctgctcgtggacgtgttctcagactcggcctctgtggtcgcgcctctcgctcctggctccgaagacaactttgccaggtttgtttgtaaaaacaatggtgtgttgtttgaaaaccagctgcttcaaattggacttaagtctgaatttcggcagaatttaggtcggatgtttatcttttatggtaataagacctccacgcagttcctaaactttaccccaacactaatctgttcagacgaccttcagcctaacctgaacctgcagaccaagcccgtggacccgaccgtggaggggggcgcgcaggtgcagcaggtggtcaacatagagtgcgtgtccgacttcacggaggcgccagtcctcaacattcagttcaggtatgggggcaccttccagaacgtgtctgtgcagctgcccatcactctcaacaaattcttccagccgacagaaatggcttctcaggatttctttcaacgttggaagcagttgagcaatccacagcaggaagtgcagaacatcttcaaagcaaagcacccaatggacacagaagtcaccaaagccaagatcattggatttggttctgcacttcttgaagaagttgatcctaatcctgcgaatttcgtgggagctggaatcatccacacgaaaaccacccagattggatgcctgctgcgcttggagccgaacctgcaagcccagatgtaccggctcacgctgcgcacaagtaaggaagccgtttctcagagattatgtgaattgctctcagcgcagttttagtcctgaggatggaagaccaggctcgtgtgtcttgtgttgtcttcgtctgtgccgtttgtcttcgtggctatcctgcagatgagcaccgtgtccagtgccacagcacaaggcgcctccccgccccaccgccccacacctctcccctttgggctggacgggaacacacgtgtgtggctcaggaggaaaagctcagcctggactgtggcagccacggcagaaggtggatcttgggatcaatttttataaaaatcgagacagttctgtggttaaatctacaaattaaagggaaattagaagttggcgtga

SEQ ID NO: 727227 - DNA, 3151 bp, Homo sapiens
agcggggtgtgggcgccgtacgtgcgcgcgcgcggcggccagaaagcggcgctgggaccctgaggcggccgtggttaggcggctccccggcggctcctccgcggcggtgacggcgaccgcactccccgcttcccgctccccgcgctcctccgcccgggtccgccagccgaggccgctcccgagcgtcggaagatgccggccgtgtccaagggggacgggatgcggggcctggcggtcttcatctcggatatccgcaactgtaaaagtaaagaagcagaaataaaaaggataaacaaggaactggcaaatatcagatcaaaatttaaaggtgacaaggctcttgatggctatagtaaaaaaaagtacgtctgcaagttgctcttcatctttctccttggtcatgacattgactttggacacatggaggctgtgaacctgctgagttcaaacagatacacggaaaagcagatcggctaccttttcatctctgtgttggtgaactcaaacagtgagctgatccgcctgatcaacaacgccatcaagaatgacctggccagccgcaaccccaccttcatgggcctggccctgcactgcatcgccagcgtgggcagccgggagatggccgaggccttcgccggggagatccctaaggtcctcgtagccggagacactatggacagcgtgaagcagagcgcggccctgtgcttgctgcgcctgtacaggacgtcccccgatcttgtccccatgggcgactggacatcccgagtggtgcacctgctcaatgaccagcacttgggtgtggtaactgcagccacaagtctgatcaccactttagcacagaagaacccagaagagtttaaaacctccgtgtctctggctgtctctaggctaagcagaatcgtgacgtctgcatccacagatctccaggattacacttactattttgtcccggctccctggctgtctgtcaaactgctgagactgctgcagtgctacccacccccagaccctgcagtgcgaggccgcctgactgagtgcctggagaccatcctgaacaaagcccaagaaccgcccaagtcgaagaaggtccagcactccaacgcgaagaatgccgtgcttttcgaggccatcagcttaatcattcaccatgacagtgagccgaacctgctcgtccgtgcctgcaaccagttgggccagtttctgcagcaccgcgagaccaacctgcgctacctggccctggagagcatgtgcacgctggccagctctgagttctcccatgaggctgtcaagacgcacatcgagacggtcatcaacgccctgaagactgagcgggacgtgagcgtgcggcagcgggccgtggacctcctctacgccatgtgcgaccgcagcaacgccccacagatcgtggccgagatgctgagctatctggagacagctgactactccatccgagaagagattgtgctgaaggtcgccatcctggctgagaagtacgcggtggactacacctggtatgtggataccatcttgaacttgatccgaattgctggtgattacgtgagtgaagaggtgtggtaccgagtcattcagatcgtcatcaaccgggacgacgtgcagggctacgcggccaagactgtgttcgaggctcttcaggctcccgcgtgccacgagaacctggtcaaagtgggcggctacatcctgggggagtttggaaacttgatagctggagacccgagatccagcccgctgatccagttccacctgctgcactccaagttccacctgtgcagcgtccccacccgcgcgctgctcctgtccacctacatcaagttcgtgaacctcttcccggaggtgaagcccaccatccaggacgtgctgcgcagcgacagccagctcaggaacgcagacgtggagctgcagcagcgtgctgtggagtacctgcggctcagcaccgtggccagcaccgacattctggcgaccgtgctggaggagatgcccccattcccggagcgggagtcctccatcttggcaaagctcaagaagaagaagggccccagcacggtgacagacctggaggacaccaagcgggacaggagtgtggacgtgaacgggggtcctgagcctgccccagccagtaccagcgccgtggtttgtttgtaaaaacaatggtgtgttgtttgaaaaccagctgcttcaaattggacttaagtctgaatttcggcagaatttaggtcggatgtttatcttttatggtaataagacctccacgcagttcctaaactttaccccaacactaatctgttcagacgaccttcagcctaacctgaacctgcagaccaagcccgtggacccgaccgtggaggggggcgcgcaggtgcagcaggtggtcaacatagagtgcgtgtccgacttcacggaggcgccagtcctcaacattcagttcaggtatgggggcaccttccagaacgtgtctgtgcagctgcccatcactctcaacaaattcttccagccgacagaaatggcttctcaggatttctttcaacgttggaagcagttgagcaatccacagcaggaagtgcagaacatcttcaaagcaaagcacccaatggacacagaagtcaccaaagccaagatcattggatttggttctgcacttcttgaagaagttgatcctaatcctgcgaatttcgtgggagctggaatcatccacacgaaaaccacccagattggatgcctgctgcgcttggagccgaacctgcaagcccagatgtaccggctcacgctgcgcacaagtaaggaagccgtttctcagagattatgtgaattgctctcagcgcagttttagtcctgaggatggaagaccaggctcgtgtgtcttgtgttgtcttcgtctgtgccgtttgtcttcgtggctatcctgcagatgagcaccgtgtccagtgccacagcacaaggcgcctccccgccccaccgccccacacctctcccctttgggctggacgggaacacacgtgtgtggctcaggaggaaaagctcagcctggactgtggcagccacggcagaaggtggatcttgggatcaatttttataaaaatcgagacagttctgtggttaaatctacaaattaaagggaaattagaagttggcgtga

SEQ ID NO: 727228 - DNA, 658 bp, Homo sapiens
  misc_feature (107)..(107): n is a, c, g, or t
  misc_feature (335)..(335): n is a, c, g, or t
  misc_feature (345)..(345): n is a, c, g, or t
  misc_feature (436)..(436): n is a, c, g, or t
  misc_feature (445)..(445): n is a, c, g, or t
  misc_feature (572)..(572): n is a, c, g, or t
  misc_feature (634)..(634): n is a, c, g, or t
  misc_feature (658)..(658): n is a, c, g, or t
agtgtgagttcgaatgaagaaaaaaaaaaaaaaaaaaaaaaaaaaaaaaaaaaaaaaaaaaaaaaaaaacaaattaaaaaaaaaaaaacaaaaaaaatatttaaaanaaaccaaccttttgcctcccctcccccctttaaacttttttacccaaaaacccttttttttttttcccgggggggggcctatttccccctttcccccttaaaaaaagcgaataaccttccctgcccccctttcccccccccaactttgaaaaacccctgggtccccaacttaaaccctttccccccacccccccctttcccaccgtgtgtgaaaattaaaaggcccancccaattccnatttccaaaattttcccaacctaaatgtgaaattttaatctctcccccccattttttacccaaacccccccaaaattctagatacacccanaaccttgtnaacccccggggccgtttcggaaattcctctatattacccccccccccccccaaccccctatcccctttttgggcgtggcccccccctaacccttccccctacctttttttgcgccccaagcccaaancccccaaaagccccaaaagaccccaattttttcgggaagcccgggcttttccttttttttancttggtctcccctcccccccctcn

SEQ ID NO: 727229 - DNA, 590 bp, Homo sapiens
tgcctctacatgcgtatgcctgggcgcagaatgggcctgtccaccaccttctggaaggccgtcacccactccctctgggtcggactccgtctcgcaggctagacagaaacttgcggtcggtcgtgacttgtaatgaccctgtcgggccaggtggtggccctgggtggacggcgggaacccatgcagcaccgtgtagccactctccttgctgccaatgaagacttcccctcgggcgaaggcgtccagggggtctttgaagtacatgagcctgcggtcatccatggtgaaccagcgcttccggaagccttccgtttgcttgggccccgtcttctccatgtagccttccttcaggtagttcctggagagctttggcaccagatctgcgtcgctggcccctgggaatgccacctgcaggtagtggaagcgagcagctcggagtgcattgaaccagtccacaatctccttcccgtcctcatggtagatgaagatgttacgggtgctgttgtccttcaggtaggtgacctgcaggccgtgggggtgggcgatcttggacggctggaaagtggcgttcaggtgctcgatcttcatca

SEQ ID NO: 727230 - DNA, 1560 bp, Homo sapiens
agcggggtgtgggcgccgtacgtgcgcgcgcgcggcggccagaaagcggcgctgggaccctgaggcggccgtggttaggcggctccccggcggctcctccgcggcggtgacggcgaccgcactccccgcttcccgctccccgcgctcctccgcccgggtccgccagccgaggccgctcccgagcgtcggaagatgccggccgtgtccaagggggacgggatgcggggcctggcggtcttcatctcggatatccgcaactgtaaaagtaaagaagcagaaataaaaaggataaacaaggaactggcaaatatcagatcaaaatttaaaggtgacaaggctcttgatggctatagtaaaaaaaagtacgtctgcaagttgctcttcatctttctccttggtcatgacattgactttggacacatggaggctgtgaacctgctgagttcaaacagatacacggaaaagcagatcggctaccttttcatctctgtgttggtgaactcaaacagtgagctgatccgcctgatcaacaacgccatcaagaatgacctggccagccgcaaccccaccttcatgggcctggccctgcactgcatcgccagcgtgggcagccgggagatggccgaggccttcgccggggagatccctaaggtcctcgtagccggagacactatggacagcgtgaagcagagcgcggccctgtgcttgctgcgcctgtacaggacgtcccccgatcttgtccccatgggcgactggacatcccgagtggtgcacctgctcaatgaccagcacttgggtgtggtaactgcagccacaagtctgatcaccactttagcacagaagaacccagaagagtttaaaacctccgtgtctctggctgtctctaggctaagcagaatcgtgacgtctgcatccacagatctccaggattacacttactattttgtcccggctccctggctgtctgtcaaactgctgagactgctgcagtgctacccacccccagaccctgcagtgcgaggccgcctgactgagtgcctggagaccatcctgaacaaagcccaagaaccgcccaagtcgaagaaggtccagcactccaacgcgaagaatgccgtgcttttcgaggccatcagcttaatcattcaccatgacagtgagccgaacctgcaagcccagatgtaccggctcacgctgcgcacaagtaaggaagccgtttctcagagattatgtgaattgctctcagcgcagttttagtcctgaggatggaagaccaggctcgtgtgtcttgtgttgtcttcgtctgtgccgtttgtcttcgtggctatcctgcagatgagcaccgtgtccagtgccacagcacaaggcgcctccccgccccaccgccccacacctctcccctttgggctggacgggaacacacgtgtgtggctcaggaggaaaagctcagcctggactgtggcagccacggcagaaggtggatcttgggatcaatttttataaaaatcgagacagttctgtggttaaatctacaaattaaagggaaattagaagttggcgtga

SEQ ID NO: 727231 - DNA, 274 bp, Homo sapiens
ccgggccccctcatgtcacggtatcgataagcttatctgatgtatgctggctaagtttatacgttagtttgtaaagttggggttcactgtgtagcccaggctggtctcaatctcctggtctcagcctcggcctcccaaagtgctgtgattacaggaatgagccactctgcccaccccgtatataactattctaagtacctctcataacagatggaagcatgcaatatttgtccttttgtgtctggcttacttcatttagcacaatgtcttcaag

SEQ ID NO: 727232 - DNA, 519 bp, Homo sapiens
agttgtgggtgcctccagagagtggtccctgggcatggcccacagggttctgcatggcggatcctggacccgagggctgtgtgagcctcggcgtgcccgttgacctgctgtgctctctgtttcctgcaagcccagatgtaccggctcacgctgcgcacaagtaaggaagccgtttctcagagattatgtgaattgctctcagcgcagttttagtcctgaggatggaagaccaggctcgtgtgtcttgtgttgtcttcgtctgtgccgtttgtcttcgtggctatcctgcagatgagcaccgtgtccagtgccacagcacaaggcgcctccccgccccaccgccccacacctctcccctttgggctggacgggaacacacgtgtgtggctcaggaggaaaagctcagcctggactgtggcagccacggcagaaggtggatcttgggatcaatttttataaaaatcgagacagttctgtggttaaatctacaaattaaagggaaattagaagttggcgtga

SEQ ID NO: 727233 - DNA, 469 bp, Homo sapiens
ttaagaacaggtgaggtaggaacaaggcatacatagggtaaacatctctcgagagatgattcatataccactcccgcagagcccgcagaatctggcctttctttctcctttcaattctaatttccaatcgatcctccattcctcgggggaattggcgaatgagctcaagaaaagggggcctccaaacactgggccccaagggacattggcaaggcatgtcttctttccggagcccctcatctaaacgctccagctcttggcggaaatatttgcgcttgacatccaagtcgaggacacgaatgtagtctaccaggacagcaaaaggcccatcagcaaggtgggtcgtggactgccgtaggatctggtttaacacagtgcggtgagtctctgcaaagcgaaggaacttctgtgtgtcagggggcaggcttaaggagatgtgcatagatcagggctcccgggagaagaatgg

SEQ ID NO: 727234 - DNA, 375 bp, Homo sapiens
ggtctccgttctcggaggggtgctcttggcttgtctgcggacttgtgctggctgctccgtcggaggactggcggccggagccaagtctcttgcttggcgtgtagagagggcggcttggttgtggagtggcgacggagacgactctgtcggtgtgggctgtgttgttgcggtgacggccgggtgtggtggttccttgggttgttgcttgcctcccttgttgtcccttggtgttggtgctcgtcggcttgcgttggctcggtcagctagtgtgaggcagcgtgtgctactttctgctgtctagggtgtcgccctacgtgcccgcgtgggtgtcctcttctctggtcggggtatgtggtctagaaaactcgttcgcat

SEQ ID NO: 727235 - DNA, 159 bp, Homo sapiens
gagaatttcccctatttatgcactaggtttactgtgactctttactttgaggttctctggaggtaggatattaatttggataacctacatgggtaatgaaattatggatggaggacggtgtttataaattaacctatggtacagaggaaccgtacgtga

SEQ ID NO: 727236 - DNA, 189 bp, Homo sapiens
ccttctgcctccctctccatatctccttcccctacaccctccctccccacaacctccctactcccctgggcactcttctggcttgactggatggaaggagacttatggagacctacccgttggccctgatgtctttttttcttttttttttttttaaccaaaccaggaccaaacccaaaaatgtcccca

SEQ ID NO: 727237 - DNA, 842 bp, Homo sapiens
accgacgtcggattccgttccgacgcggagccgccagctgcatggtcgtcccgctggataggcggctgtcggacgcggactgggagcgcgcactgttgatgcgtcgagcgaacgtgacagggggccattggccgcatgccatgtgccacctgcggcttgtgtctcacctgtcatctggactcagcacccaggctgcacgtctgacacctgagaggcgagagagtggggccggcctaggagccaaggctggggccttgcgctctgtccccaggatggtggccttgtttgtcctaaacacacccagcacaggttctggcttcctgacatgctgtggaggcagggagggtgggtggccacatgtgcttgagggttttcaccctggccctcagttgcctgctgtgcgggtccctggggcagctgcaggggctcacggacccatcagggtctccacagctcccctgcagtgtgtgcaccccacaatgtctgcggctcttcttccggcgtgtcgggctttgatcacagcatagccacgtcagtggcgtgcgcctctcgcacaggccattctgggtctggtggtgccaggtgccgtgacacgccgtgctgggcttgtgctgcagctgggtggtgtggccctcattctcatgttccagctgctgggcagtgctctgcctgtgtgctgcgcctgcaggctgcgtgtgctgccgtggatctcctgcatcccttgacccctcccgccatcagaggaaaggctgctccccgaggcaccgcttccctgtgcggcgctgcagaggggccctcagtgtggcactcctcgtcaaagaaaaataaaggctagaactgca

SEQ ID NO: 727238 - DNA, 198 bp, Homo sapiens
acataacatttttgccttcatttcacccttgatgaatctgagcgattctgtgtcttgcagttgtccttcttgagtgagtatctccgtcgctgttctctgtagtttcctgcagtttgcctgctggccggctgtgcaaggttggggatgttctcctgaattatattctgcagtgttgtccaacttagttccatactcccg

SEQ ID NO: 727239 - DNA, 4627 bp, Homo sapiens
agcggggtgtgggcgccgtacgtgcgcgcgcgcggcggccagaaagcggcgctgggaccctgaggcggccgtggttaggcggctccccggcggctcctccgcggcggtgacggcgaccgcactccccgcttcccgctccccgcgctcctccgcccgggtccgccagccgaggccgctcccgagcgtcggaagatgccggccgtgtccaagggggacgggatgcggggcctggcggtcttcatctcggatatccgcaactgtaaaagtaaagaagcagaaataaaaaggataaacaaggaactggcaaatatcagatcaaaatttaaaggtgacaaggctcttgatggctatagtaaaaaaaagtacgtctgcaagttgctcttcatctttctccttggtcatgacattgactttggacacatggaggctgtgaacctgctgagttcaaacagatacacggaaaagcagatcggctaccttttcatctctgtgttggtgaactcaaacagtgagctgatccgcctgatcaacaacgccatcaagaatgacctggccagccgcaaccccaccttcatgggcctggccctgcactgcatcgccagcgtgggcagccgggagatggccgaggccttcgccggggagatccctaaggtcctcgtagccggagacactatggacagcgtgaagcagagcgcggccctgtgcttgctgcgcctgtacaggacgtcccccgatcttgtccccatgggcgactggacatcccgagtggtgcacctgctcaatgaccagcacttgggtgtggtaactgcagccacaagtctgatcaccactttagcacagaagaacccagaagagtttaaaacctccgtgtctctggctgtctctaggctaagcagaatcgtgacgtctgcatccacagatctccaggattacacttactattttgtcccggctccctggctgtctgtcaaactgctgagactgctgcagtgctacccacccccagaccctgcagtgcgaggccgcctgactgagtgcctggagaccatcctgaacaaagcccaagaaccgcccaagtcgaagaaggtccagcactccaacgcgaagaatgccgtgcttttcgaggccatcagcttaatcattcaccatgacagtgagccgaacctgctcgtccgtgcctgcaaccagttgggccagtttctgcagcaccgcgagaccaacctgcgctacctggccctggagagcatgtgcacgctggccagctctgagttctcccatgaggctgtcaagacgcacatcgagacggtcatcaacgccctgaagactgagcgggacgtgagcgtgcggcagcgggccgtggacctcctctacgccatgtgcgaccgcagcaacgccccacagatcgtggccgagatgctgagctatctggagacagctgactactccatccgagaagagattgtgctgaaggtcgccatcctggctgagaagtacgcggtggactacacctggtatgtggataccatcttgaacttgatccgaattgctggtgattacgtgagtgaagaggtgtggtaccgagtcattcagatcgtcatcaaccgggacgacgtgcagggctacgcggccaagactgtgttcgaggctcttcaggctcccgcgtgccacgagaacctggtcaaagtgggcggctacatcctgggggagtttggaaacttgatagctggagacccgagatccagcccgctgatccagttccacctgctgcactccaagttccacctgtgcagcgtccccacccgcgcgctgctcctgtccacctacatcaagttcgtgaacctcttcccggaggtgaagcccaccatccaggacgtgctgcgcagcgacagccagctcaggaacgcagacgtggagctgcagcagcgtgctgtggagtacctgcggctcagcaccgtggccagcaccgacattctggcgaccgtgctggaggagatgcccccattcccggagcgggagtcctccatcttggcaaagctcaagaagaagaagggccccagcacggtgacagacctggaggacaccaagcgggacaggagtgtggacgtgaacgggggtcctgagcctgccccagccagtaccagcgccgtgtctacgccttctccgtcggcagacctgctgggtctcggggctgccccccctgcccccgcgggccccccaccctcctccggcggcagcgggctgctcgtggacgtgttctcagactcggcctctgtggtcgcgcctctcgctcctggctccgaagacaactttgccaggtttgtttgtaaaaacaatggtgtgttgtttgaaaaccagctgcttcaaattggacttaagtctgaatttcggcagaatttaggtcggatgtttatcttttatggtaataagacctccacgcagttcctaaactttaccccaacactaatctgttcagacgaccttcagcctaacctgaacctgcagaccaagcccgtggacccgaccgtggaggggggcgcgcaggtgcagcaggtggtcaacatagagtgcgtgtccgacttcacggaggcgccagtcctcaacattcagttcaggtatgggggcaccttccagaacgtgtctgtgcagctgcccatcactctcaacaaattcttccagccgacagaaatggcttctcaggatttctttcaacgttggaagcagttgagcaatccacagcaggaagtgcagaacatcttcaaagcaaagcacccaatggacacagaagtcaccaaagccaagatcattggatttggttctgcacttcttgaagaagttgatcctaatcctgcgaatttcgtgggagctggaatcatccacacgaaaaccacccagattggatgcctgctgcgcttggagccgaacctgcaagcccagatgtaccggctcacgctgcgcacaagtaaggaagccgtttctcagagattatgtgaattgctctcagcgcagttttagtcctgaggatggaagaccaggctcgtgtgtcttgtgttgtcttcgtctgtgccgtttgtcttcgtggctatcctgcagatgagcaccgtgtccagtgccacagcacaaggcgcctccccgccccaccgccccacacctctcccctttgggctggacgggaacacacgtgtgtggctcaggaggaaaagctcagcctggactgtggcagccacggcagaaggtggatcttgggatcaatttttataaaaatcgagacagttctgtggttaaatctacaaattaaagggaaattagaagttggcgtgaacgtggcgtttgtgggagtgtcactgagatggcccgtgctgccgcccaccccgcctcggagcctctgggagcagcagtgccactgtgcatggcgtgggctgagccttggtgtgtggccgtcctggtggctgcacacctggcgtcgtcctgggcccttgggaggagcacagctgaccctggttttgctgcagtcccagctggactgttttcccaggcaggattttaatctagaatttagaaacatttgtatttgtaatgacttctggcaaaagcacgtgtcctggccggatgtaactgttctcctttcccagctcctgtttgtgaagggcgtctgttatgctcctgcagtcgccgaggccttggatgtgcagccaggggaggagcgtcctgccggccccgcagggcccccaggactccagggtaaagtgtgggccggtggcgcaagactcagaggtgtgctcgtctctttcctgtcagagtgggcgtccccaggccacggtgcaggcctgagtccttccaccggccccgtccagtcgtccctggaggggctgtggaggaaggacgcctctgtgtggtcaggaagtgaaggggccattggccgcatgccatgtgccacctgcggcttgtgtctcacctgtcatctggactcagcacccaggctgcacgtctgacacctgagaggcgagagagtggggccggcctaggagccaaggctggggccttgcgctctgtccccaggatggtggccttgtttgtcctaaacacacccagcacaggttctggcttcctgacatgctgtggaggcagggagggtgggtggccacatgtgcttgagggttttcaccctggccctcagttgcctgctgtgcgggtccctggggcagctgcaggggctcacggacccatcagggtctccacagctcccctgcagtgtgtgcaccccacaatgtctgcggctcttcttccggcgtgtcgggctttgatcacagcatagccacgtcagtggcgtgcgcctctcgcacaggccattctgggtctggtggtgccaggtgccgtgacacgccgtgctgggcttgtgctgcagctgggtggtgtggccctcattctcatgttccagctgctgggcagtgctctgcctgtgtgctgcgcctgcaggctgcgtgtgctgccgtggatctcctgcatcccttgacccctcccgccatcagaggaaaggctgctccccgaggcaccgcttccctgtgcggcgctgcagaggggccctcagtgtggcactcctcgtcaaagaaaaataaaggctagaactgca

SEQ ID NO: 727240 - DNA, 228 bp, Homo sapiens
tctaaaggatccccctcagcttatacttcccaaaaccgtagttgtgttaaaatatattgttattaaattgttgtgccagtatatattcactcagaaatcgtcttaagactctaaggtggtctcagtattgcaatatcatgtaagtgagtttctattggccggcatgaggattctgtcacaatgaaagaaaactgtttatatagaccccattggaaaagcaaaacgctt

SEQ ID NO: 727241 - DNA, 292 bp, Homo sapiens
tagttctgtgtacagatgacactggtggcacacatcggcgggtcagcgctagaatcgaacctcggcagctaggtagcgaacactcagctgactgatatacccttgggcaacattacttgacctttctgtgcctcagtttttcttacccattaagtagggcttattttgactaactacctcgtaccgtttctgtgaggattaaaagagatatgtcacacgtaaggaaatagtgcctcgcatgttagtatgtcctctgtgttttatagagtaacgctggagcttcaactttcta

SEQ ID NO: 727242 - DNA, 343 bp, Homo sapiens
tttgtcggcccccgggtcccgcttttttcaggtttccttttttgggttattccgcgcccggcggtttggtggcctttgtgccgggaaaaccggtccttggtgctttttttggtgggggccggtaaggttttttgtctttcctcccttggggggtttgggttgccctgggctttttttttttggtggggcccttttctgcctttggccgggtgtttttagccattttggggttccctttttggggttcgggtttttcccttttttggttttttgcttgtcccgctttttccccctttttttttttttttttgggatttccatgtaggggccttgtccctttcca

SEQ ID NO: 727243 - DNA, 475 bp, Homo sapiens
tgctatagataaatgcctggttttatataaacatttgtgaaatttaagaatacagttttcagccacatctaagtggaggaattatcagaactgctttaatagctctttgcataaatgtgtgcatatatatgtataaacgccacaggagatattaaatttaagtcaactggtgggcatctatttggaagggttggctaaatagaaataagaaaaacagtactgactgtagtcataaataatcagtaaatttggtcttactgtgcaaattccaaaaatcctacttcttgttaggcaatttaaaatacttgtgatacatcaggcaattattacggtataaataagcaactgaagtcacttcagataacactgaaaaactcttgccgtacagcactgataaaagataagcatatcaaacacagttttgaaccatcttttatgtaccatttcccatcacatttatatcttcactactacc

SEQ ID NO: 727244 - DNA, 3281 bp, Homo sapiens
agcggggtgtgggcgccgtacgtgcgcgcgcgcggcggccagaaagcggcgctgggaccctgaggcggccgtggttaggcggctccccggcggctcctccgcggcggtgacggcgaccgcactccccgcttcccgctccccgcgctcctccgcccgggtccgccagccgaggccgctcccgagcgtcggaagatgccggccgtgtccaagggggacgggatgcggggcctggcggtcttcatctcggatatccgcaactgtaaaagtaaagaagcagaaataaaaaggataaacaaggaactggcaaatatcagatcaaaatttaaaggtgacaaggctcttgatggctatagtaaaaaaaagtacgtctgcaagttgctcttcatctttctccttggtcatgacattgactttggacacatggaggctgtgaacctgctgagttcaaacagatacacggaaaagcagatcggctaccttttcatctctgtgttggtgaactcaaacagtgagctgatccgcctgatcaacaacgccatcaagaatgacctggccagccgcaaccccaccttcatgggcctggccctgcactgcatcgccagcgtgggcagccgggagatggccgaggccttcgccggggagatccctaaggtcctcgtagccggagacactatggacagcgtgaagcagagcgcggccctgtgcttgctgcgcctgtacaggacgtcccccgatcttgtccccatgggcgactggacatcccgagtggtgcacctgctcaatgaccagcacttgggtgtggtaactgcagccacaagtctgatcaccactttagcacagaagaacccagaagagtttaaaacctccgtgtctctggctgtctctaggctaagcagaatcgtgacgtctgcatccacagatctccaggattacacttactattttgtcccggctccctggctgtctgtcaaactgctgagactgctgcagtgctacccacccccagaccctgcagtgcgaggccgcctgactgagtgcctggagaccatcctgaacaaagcccaagaaccgcccaagtcgaagaaggtccagcactccaacgcgaagaatgccgtgcttttcgaggccatcagcttaatcattcaccatgacagtgagccgaacctgctcgtccgtgcctgcaaccagttgggccagtttctgcagcaccgcgagaccaacctgcgctacctggccctggagagcatgtgcacgctggccagctctgagttctcccatgaggctgtcaagacgcacatcgagacggtcatcaacgccctgaagactgagcgggacgtgagcgtgcggcagcgggccgtggacctcctctacgccatgtgcgaccgcagcaacgccccacagatcgtggccgagatgctgagctatctggagacagctgactactccatccgagaagagattgtgctgaaggtcgccatcctggctgagaagtacgcggtggactacacctggtatgtggataccatcttgaacttgatccgaattgctggtgattacgtgagtgaagaggtgtggtaccgagtcattcagatcgtcatcaaccgggacgacgtgcagggctacgcggccaagactgtgttcgaggctcttcaggctcccgcgtgccacgagaacctggtcaaagtgggcggctacatcctgggggagtttggaaacttgatagctggagacccgagatccagcccgctgatccagttccacctgctgcactccaagttccacctgtgcagcgtccccacccgcgcgctgctcctgtccacctacatcaagttcgtgaacctcttcccggaggtgaagcccaccatccaggacgtgctgcgcagcgacagccagctcaggaacgcagacgtggagctgcagcagcgtgctgtggagtacctgcggctcagcaccgtggccagcaccgacattctggcgaccgtgctggaggagatgcccccattcccggagcgggagtcctccatcttggcaaagctcaagaagaagaagggccccagcacggtgacagacctggaggacaccaagcgggacaggagtgtggacgtgaacgggggtcctgagcctgccccagccagtaccagcgccgtgtctacgccttctccgtcggcagacctgctgggtctcggggctggcgccgtgaaggcgtggaccggctgttgtggggtggctgggtgtgtgtcagactcggctctgtggtcggcctctgtctggctccgggacatttgcagtggttgtaaacgaggtgtgttgggaaccagctgcttcaaattggacttaagtctgaatttcggcagaatttaggtcggatgtttatcttttatggtaataagacctccacgcagttcctaaactttaccccaacactaatctgttcagacgaccttcagcctaacctgaacctgcagaccaagcccgtggacccgaccgtggaggggggcgcgcaggtgcagcaggtggtcaacatagagtgcgtgtccgacttcacggaggcgccagtcctcaacattcagttcaggtatgggggcaccttccagaacgtgtctgtgcagctgcccatcactctcaacaaattcttccagccgacagaaatggcttctcaggatttctttcaacgttggaagcagttgagcaatccacagcaggaagtgcagaacatcttcaaagcaaagcacccaatggacacagaagtcaccaaagccaagatcattggatttggttctgcacttcttgaagaagttgatcctaatcctgcgaatttcgtgggagctggaatcatccacacgaaaaccacccagattggatgcctgctgcgcttggagccgaacctgcaagcccagatgtaccggctcacgctgcgcacaagtaaggaagccgtttctcagagattatgtgaattgctctcagcgcagttttagtcctgaggatggaagaccaggctcgtgtgtcttgtgttgtcttcgtctgtgccgtttgtcttcgtggctatcctgcagatgagcaccgtgtccagtgccacagcacaaggcgcctccccgccccaccgccccacacctctcccctttgggctggacgggaacacacgtgtgtggctcaggaggaaaagctcagcctggactgtggcagccacggcagaaggtggatcttgggatcaatttttataaaaatcgagacagttctgtggttaaatctacaaattaaagggaaattagaagttggcgtga

SEQ ID NO: 727245 - DNA, 102 bp, Homo sapiens
gctggctttcaagaggagtacctctgttctcacaaatttcctgggaagacccaatcagagctggtgaaatagttgttccacggtggacggacgagacattcc

SEQ ID NO: 727246 - DNA, 4839 bp, Homo sapiens
agcggggtgtgggcgccgtacgtgcgcgcgcgcggcggccagaaagcggcgctgggaccctgaggcggccgtggttaggcggctccccggcggctcctccgcggcggtgacggcgaccgcactccccgcttcccgctccccgcgctcctccgcccgggtccgccagccgaggccgctcccgagcgtcggaagatgccggccgtgtccaagggggacgggatgcggggcctggcggtcttcatctcggatatccgcaactgtaaaagtaaagaagcagaaataaaaaggataaacaaggaactggcaaatatcagatcaaaatttaaaggtgacaaggctcttgatggctatagtaaaaaaaagtacgtctgcaagttgctcttcatctttctccttggtcatgacattgactttggacacatggaggctgtgaacctgctgagttcaaacagatacacggaaaagcagatcggctaccttttcatctctgtgttggtgaactcaaacagtgagctgatccgcctgatcaacaacgccatcaagaatgacctggccagccgcaaccccaccttcatgggcctggccctgcactgcatcgccagcgtgggcagccgggagatggccgaggccttcgccggggagatccctaaggtcctcgtagccggagacactatggacagcgtgaagcagagcgcggccctgtgcttgctgcgcctgtacaggacgtcccccgatcttgtccccatgggcgactggacatcccgagtggtgcacctgctcaatgaccagcacttgggtgtggtaactgcagccacaagtctgatcaccactttagcacagaagaacccagaagagtttaaaacctccgtgtctctggctgtctctaggctaagcagaatcgtgacgtctgcatccacagatctccaggattacacttactattttgtcccggctccctggctgtctgtcaaactgctgagactgctgcagtgctacccacccccagaccctgcagtgcgaggccgcctgactgagtgcctggagaccatcctgaacaaagcccaagaaccgcccaagtcgaagaaggtccagcactccaacgcgaagaatgccgtgcttttcgaggccatcagcttaatcattcaccatgacagtgagccgaacctgctcgtccgtgcctgcaaccagttgggccagtttctgcagcaccgcgagaccaacctgcgctacctggccctggagagcatgtgcacgctggccagctctgagttctcccatgaggctgtcaagacgcacatcgagacggtcatcaacgccctgaagactgagcgggacgtgagcgtgcggcagcgggccgtggacctcctctacgccatgtgcgaccgcagcaacgccccacagatcgtggccgagatgctgagctatctggagacagctgactactccatccgagaagagattgtgctgaaggtcgccatcctggctgagaagtacgcggtggactacacctggtatgtggataccatcttgaacttgatccgaattgctggtgattacgtgagtgaagaggtgtggtaccgagtcattcagatcgtcatcaaccgggacgacgtgcagggctacgcggccaagactgtgttcgaggctcttcaggctcccgcgtgccacgagaacctggtcaaagtgggcggctacatcctgggggagtttggaaacttgatagctggagacccgagatccagcccgctgatccagttccacctgctgcactccaagttccacctgtgcagcgtccccacccgcgcgctgctcctgtccacctacatcaagttcgtgaacctcttcccggaggtgaagcccaccatccaggacgtgctgcgcagcgacagccagctcaggaacgcagacgtggagctgcagcagcgtgctgtggagtacctgcggctcagcaccgtggccagcaccgacattctggcgaccgtgctggaggagatgcccccattcccggagcgggagtcctccatcttggcaaagctcaagaagaagaagggccccagcacggtgacagacctggaggacaccaagcgggacaggagtgtggacgtgaacgggggtcctgagcctgccccagccagtaccagcgccgtgtctacgccttctccgtcggcagacctgctgggtctcggggctgccccccctgcccccgcgggccccccaccctcctccggcggcagcgggctgctcgtggacgtgttctcagactcggcctctgtggtcgcgcctctcgctcctggctccgaagacaactttgccaggtttgtttgtaaaaacaatggtgtgttgtttgaaaaccagctgcttcaaattggacttaagtctgaatttcggcagaatttaggtcggatgtttatcttttatggtaataagacctccacgcagttcctaaactttaccccaacactaatctgttcagacgaccttcagcctaacctgaacctgcagaccaagcccgtggacccgaccgtggaggggggcgcgcaggtgcagcaggtggtcaacatagagtgcgtgtccgacttcacggaggcgccagtcctcaacattcagttcaggtatgggggcaccttccagaacgtgtctgtgcagctgcccatcactctcaacaaattcttccagccgacagaaatggcttctcaggatttctttcaacgttggaagcagttgagcaatccacagcaggaagtgcagaacatcttcaaagcaaagcacccaatggacacagaagtcaccaaagccaagatcattggatttggttctgcacttcttgaagaagttgatcctaatcctgcgaatttcgtgggagctggaatcatccacacgaaaaccacccagattggatgcctgctgcgcttggagccgaacctgcaagcccagatgtaccggctcacgctgcgcacaagtaaggaagccgtttctcagagattatgtgaattgctctcagcgcagttttagtcctgaggatggaagaccaggctcgtgtgtcttgtgttgtcttcgtctgtgccgtttgtcttcgtggctatcctgcagatgagcaccgtgtccagtgccacagcacaaggcgcctccccgccccaccgccccacacctctcccctttgggctggacgggaacacacgtgtgtggctcaggaggaaaagctcagcctggactgtggcagccacggcagaaggtggatcttgggatcaatttttataaaaatcgagacagttctgtggttaaatctacaaattaaagggaaattagaagttggcgtgaacgtggcgtttgtgggagtgtcactgagatggcccgtgctgccgcccaccccgcctcggagcctctgggagcagcagtgccactgtgcatggcgtgggctgagccttggtgtgtggccgtcctggtggctgcacacctggcgtcgtcctgggcccttgggaggagcacagctgaccctggttttgctgcagtcccagctggactgttttcccaggcaggattttaatctagaatttagaaacatttgtatttgtaatgacttctggcaaaagcacgtgtcctggccggatgtaactgttctcctttcccagctcctgtttgtgaagggcgtctgttatgctcctgcagtcgccgaggccttggatgtgcagccaggggaggagcgtcctgccggccccgcagggcccccaggactccagggtaaagtgtgggccggtggcgcaagactcagaggtgtgctcgtctctttcctgtcagagtgggcgtccccaggccacggtgcaggcctgagtccttccaccggccccgtccagtcgtccctggaggggctgtggaggaaggacgcctctgtgtggtcaggaagtgaaggggccattggccgcatgccatgtgccacctgcggcttgtgtctcacctgtcatctggactcagcacccaggctgcacgtctgacacctgagaggcgagagagtggggccggcctaggagccaaggctggggccttgcgctctgtccccaggatggtggccttgtttgtcctaaacacacccagcacaggttctggcttcctgacatgctgtggaggcagggagggtgggtggccacatgtgcttgagggttttcaccctggccctcagttgcctgctgtgcgggtccctggggcagctgcaggggctcacggacccatcagggtctccacagctcccctgcagtgtgtgcaccccacaatgtctgcggctcttcttccggcgtgtcgggctttgatcacagcatagccacgtcagtggcgtgcgcctctcgcacaggccattctgggtctggtggtgccaggtgccgtgacacgccgtgctgggcttgtgctgcagctgggtggtgtggccctcattctcatgttccagctgctgggcagtgctctgcctgtgtgctgcgcctgcaggctgcgtgtgctgccgtggatctcctgcatcccttgacccctcccgccatcagaggaaaggctgctccccgaggcaccgcttccctgtgcggcgctgcagaggggccctcagtgtggcactcctcgtcaaagaaaaataaaggctagaactgcaaaaaaaaataaaacactccacacaacctccccaaacacacacacaagaagggggggcgagaactccggggcacacaagcacccgtcttaaaggccaagatgataaaaggccggcgcaccagagcagcgcagacggttctgagcactttgggtgaccacacaaggccaaagttgatctctcggtattctcttataggacgggtctgcgccata

SEQ ID NO: 727247 - DNA, 3143 bp, Homo sapiens
cgcgatctcggctcactgtaacctcttctgccgggttcaagcgattctcctgcctcagcctccagagctagctggcaactacaggtaaaagtaaagaagcagaaataaaaaggataaacaaggaactggcaaatatcagatcaaaatttaaaggtgacaaggctcttgatggctatagtaaaaaaaagtacgtctgcaagttgctcttcatctttctccttggtcatgacattgactttggacacatggaggctgtgaacctgctgagttcaaacagatacacggaaaagcagatcggctaccttttcatctctgtgttggtgaactcaaacagtgagctgatccgcctgatcaacaacgccatcaagaatgacctggccagccgcaaccccaccttcatgggcctggccctgcactgcatcgccagcgtgggcagccgggagatggccgaggccttcgccggggagatccctaaggtcctcgtagccggagacactatggacagcgtgaagcagagcgcggccctgtgcttgctgcgcctgtacaggacgtcccccgatcttgtccccatgggcgactggacatcccgagtggtgcacctgctcaatgaccagcacttgggtgtggtaactgcagccacaagtctgatcaccactttagcacagaagaacccagaagagtttaaaacctccgtgtctctggctgtctctaggctaagcagaatcgtgacgtctgcatccacagatctccaggattacacttactattttgtcccggctccctggctgtctgtcaaactgctgagactgctgcagtgctacccacccccagaccctgcagtgcgaggccgcctgactgagtgcctggagaccatcctgaacaaagcccaagaaccgcccaagtcgaagaaggtccagcactccaacgcgaagaatgccgtgcttttcgaggccatcagcttaatcattcaccatgacagtgagccgaacctgctcgtccgtgcctgcaaccagttgggccagtttctgcagcaccgcgagaccaacctgcgctacctggccctggagagcatgtgcacgctggccagctctgagttctcccatgaggctgtcaagacgcacatcgagacggtcatcaacgccctgaagactgagcgggacgtgagcgtgcggcagcgggccgtggacctcctctacgccatgtgcgaccgcagcaacgccccacagatcgtggccgagatgctgagctatctggagacagctgactactccatccgagaagagattgtgctgaaggtcgccatcctggctgagaagtacgcggtggactacacctggtatgtggataccatcttgaacttgatccgaattgctggtgattacgtgagtgaagaggtgtggtaccgagtcattcagatcgtcatcaaccgggacgacgtgcagggctacgcggccaagactgtgttcgaggctcttcaggctcccgcgtgccacgagaacctggtcaaagtgggcggctacatcctgggggagtttggaaacttgatagctggagacccgagatccagcccgctgatccagttccacctgctgcactccaagttccacctgtgcagcgtccccacccgcgcgctgctcctgtccacctacatcaagttcgtgaacctcttcccggaggtgaagcccaccatccaggacgtgctgcgcagcgacagccagctcaggaacgcagacgtggagctgcagcagcgtgctgtggagtacctgcggctcagcaccgtggccagcaccgacattctggcgaccgtgctggaggagatgcccccattcccggagcgggagtcctccatcttggcaaagctcaagaagaagaagggccccagcacggtgacagacctggaggacaccaagcgggacaggagtgtggacgtgaacgggggtcctgagcctgccccagccagtaccagcgccgtgtctacgccttctccgtcggcagacctgctgggtctcggggctgccccccctgcccccgcgggccccccaccctcctccggcggcagcgggctgctcgtggacgtgttctcagactcggcctctgtggtcgcgcctctcgctcctggctccgaagacaactttgccaggtttgtttgtaaaaacaatggtgtgttgtttgaaaaccagctgcttcaaattggacttaagtctgaatttcggcagaatttaggtcggatgtttatcttttatggtaataagacctccacgcagttcctaaactttaccccaacactaatctgttcagacgaccttcagcctaacctgaacctgcagaccaagcccgtggacccgaccgtggaggggggcgcgcaggtgcagcaggtggtcaacatagagtgcgtgtccgacttcacggaggcgccagtcctcaacattcagttcaggtatgggggcaccttccagaacgtgtctgtgcagctgcccatcactctcaacaaattcttccagccgacagaaatggcttctcaggatttctttcaacgttggaagcagttgagcaatccacagcaggaagtgcagaacatcttcaaagcaaagcacccaatggacacagaagtcaccaaagccaagatcattggatttggttctgcacttcttgaagaagttgatcctaatcctgcgaatttcgtgggagctggaatcatccacacgaaaaccacccagattggatgcctgctgcgcttggagccgaacctgcaagcccagatgtaccggctcacgctgcgcacaagtaaggaagccgtttctcagagattatgtgaattgctctcagcgcagttttagtcctgaggatggaagaccaggctcgtgtgtcttgtgttgtcttcgtctgtgccgtttgtcttcgtggctatcctgcagatgagcaccgtgtccagtgccacagcacaaggcgcctccccgccccaccgccccacacctctcccctttgggctggacgggaacacacgtgtgtggctcaggaggaaaagctcagcctggactgtggcagccacggcagaaggtggatcttgggatcaatttttataaaaatcgagacagttctgtggttaaatctacaaattaaagggaaattagaagttggcgtga

SEQ ID NO: 727248 - DNA, 369 bp, Homo sapiens
gtcattaaggcttcactattggccgggccagtgggatcacggccggcattaacgcggggatttcattccgttgttggacaaaagcgcgcatcagggtgggtgcgtgaaatgaggggagggcgccggcacggagtaatcggatgggttcgttagagtaaaggcgtttgcaaaaaggcggggcgggaataagtggtaagaggttcccccacgcgcggcgttcggtgatttgggcgtcgtatatagcgtcgtggatgcgcagtttcggcccgggtattgaaccctaccgggcgcgcgttcgtcccggaacaggggggcgggcagggcaacgggttgaagcgtacaaggagtgtgcggtatggtcgcggtgct

SEQ ID NO: 727249 - DNA, 3123 bp, Homo sapiens
cagctatgactaggtacgagagctcgctgttatggacctggagcggtgcggcctgaccagtcaggtaaatgtccagaagcagaaataaaaaggataaacaaggaactggcaaatatcagatcaaaatttaaaggtgacaaggctcttgatggctatagtaaaaaaaagtacgtctgcaagttgctcttcatctttctccttggtcatgacattgactttggacacatggaggctgtgaacctgctgagttcaaacagatacacggaaaagcagatcggctaccttttcatctctgtgttggtgaactcaaacagtgagctgatccgcctgatcaacaacgccatcaagaatgacctggccagccgcaaccccaccttcatgggcctggccctgcactgcatcgccagcgtgggcagccgggagatggccgaggccttcgccggggagatccctaaggtcctcgtagccggagacactatggacagcgtgaagcagagcgcggccctgtgcttgctgcgcctgtacaggacgtcccccgatcttgtccccatgggcgactggacatcccgagtggtgcacctgctcaatgaccagcacttgggtgtggtaactgcagccacaagtctgatcaccactttagcacagaagaacccagaagagtttaaaacctccgtgtctctggctgtctctaggctaagcagaatcgtgacgtctgcatccacagatctccaggattacacttactattttgtcccggctccctggctgtctgtcaaactgctgagactgctgcagtgctacccacccccagaccctgcagtgcgaggccgcctgactgagtgcctggagaccatcctgaacaaagcccaagaaccgcccaagtcgaagaaggtccagcactccaacgcgaagaatgccgtgcttttcgaggccatcagcttaatcattcaccatgacagtgagccgaacctgctcgtccgtgcctgcaaccagttgggccagtttctgcagcaccgcgagaccaacctgcgctacctggccctggagagcatgtgcacgctggccagctctgagttctcccatgaggctgtcaagacgcacatcgagacggtcatcaacgccctgaagactgagcgggacgtgagcgtgcggcagcgggccgtggacctcctctacgccatgtgcgaccgcagcaacgccccacagatcgtggccgagatgctgagctatctggagacagctgactactccatccgagaagagattgtgctgaaggtcgccatcctggctgagaagtacgcggtggactacacctggtatgtggataccatcttgaacttgatccgaattgctggtgattacgtgagtgaagaggtgtggtaccgagtcattcagatcgtcatcaaccgggacgacgtgcagggctacgcggccaagactgtgttcgaggctcttcaggctcccgcgtgccacgagaacctggtcaaagtgggcggctacatcctgggggagtttggaaacttgatagctggagacccgagatccagcccgctgatccagttccacctgctgcactccaagttccacctgtgcagcgtccccacccgcgcgctgctcctgtccacctacatcaagttcgtgaacctcttcccggaggtgaagcccaccatccaggacgtgctgcgcagcgacagccagctcaggaacgcagacgtggagctgcagcagcgtgctgtggagtacctgcggctcagcaccgtggccagcaccgacattctggcgaccgtgctggaggagatgcccccattcccggagcgggagtcctccatcttggcaaagctcaagaagaagaagggccccagcacggtgacagacctggaggacaccaagcgggacaggagtgtggacgtgaacgggggtcctgagcctgccccagccagtaccagcgccgtgtctacgccttctccgtcggcagacctgctgggtctcggggctgccccccctgcccccgcgggccccccaccctcctccggcggcagcgggctgctcgtggacgtgttctcagactcggcctctgtggtcgcgcctctcgctcctggctccgaagacaactttgccaggtttgtttgtaaaaacaatggtgtgttgtttgaaaaccagctgcttcaaattggacttaagtctgaatttcggcagaatttaggtcggatgtttatcttttatggtaataagacctccacgcagttcctaaactttaccccaacactaatctgttcagacgaccttcagcctaacctgaacctgcagaccaagcccgtggacccgaccgtggaggggggcgcgcaggtgcagcaggtggtcaacatagagtgcgtgtccgacttcacggaggcgccagtcctcaacattcagttcaggtatgggggcaccttccagaacgtgtctgtgcagctgcccatcactctcaacaaattcttccagccgacagaaatggcttctcaggatttctttcaacgttggaagcagttgagcaatccacagcaggaagtgcagaacatcttcaaagcaaagcacccaatggacacagaagtcaccaaagccaagatcattggatttggttctgcacttcttgaagaagttgatcctaatcctgcgaatttcgtgggagctggaatcatccacacgaaaaccacccagattggatgcctgctgcgcttggagccgaacctgcaagcccagatgtaccggctcacgctgcgcacaagtaaggaagccgtttctcagagattatgtgaattgctctcagcgcagttttagtcctgaggatggaagaccaggctcgtgtgtcttgtgttgtcttcgtctgtgccgtttgtcttcgtggctatcctgcagatgagcaccgtgtccagtgccacagcacaaggcgcctccccgccccaccgccccacacctctcccctttgggctggacgggaacacacgtgtgtggctcaggaggaaaagctcagcctggactgtggcagccacggcagaaggtggatcttgggatcaatttttataaaaatcgagacagttctgtggttaaatctacaaattaaagggaaattagaagttggcgtga

SEQ ID NO: 727250 - DNA, 212 bp, Homo sapiens
ccccctccccgggtagctgggatttgaggcatgcgccaccacacctggctaatttggtatttttagaagagacggggtttcaccatgttagccaggatggcctcgatctcctgaccccgggatccacctgctttggcctcccaaagtgctgggaggccgaggtggccagagttgatcagtctgctgtaggctttgaatacccggggaggggg

SEQ ID NO: 727251 - DNA, 1434 bp, Homo sapiens
gagccatggggcattgatgctctcctgccccggttcgcgtgtgccctggtgcaagagcagctgtgcccgctgggagcggaaacgcgcctgcacctgccgggagctgctagagacctgagctggtgctaccaagaacatgctgcgggcatggtggccactgtactttattggggcatcctgaaagccaaggtggacccttgtgcacacctgagcgccagtgccctgtttggctcctgtggagctcatctactggcagccagccagtgagctgcattcctacctggaaggaacggactgctggaggccacaggcgctgcagcgcgccttctgccgacacctttgcgcacgctctatacccacatttgcctgccaacctcaacgagacggtcccagtaccacccctgcaggaggcaggcttacaacgcaacacccgtacacggttctcccggaaggcttctggtcactgcgcctttccacgcgaacagtgcccaggcccattgaagctactggccgcggcccattccaggcctacccagaggaccctggactcctctcactgcccatcttgcgcaacaggccctccccagaagggccctgacgcaactccttcggtccgcacagccttctcggcgcctcgcagcagcaccacgacggggtgccccgaacccaaggtgcgccttgcacctcacatccatatcacgggattcaccagcagcggggccttggcctccggaacttgggactacaacggctccaggccaccttggcgccccaagtaaggaaggctccacacaatactcgttactctaggaggctcccagcggacacatacacgcaacagagaatacttggcacgcgaacgactacccctcttctcggcgaccaggactgtcataccaagaagtagtccttccctggaaattagacagtcttgtaggagtcgaccccgaaactgcgccaatcaaaagagcgccgcccgtatgaaccgtcctacatacgtcgggcacgtaggactgcaggctctttgtccacaataacagtcctccagacgaggcacactccgagtgcgttccgatcagaactgatcgcgcgtaggagcaccttcgcacaccaacttgggcgaggtcaagctacgcagtacgcgagagcaccgctctggtcacgtttgctttgtcagtttactgaagtggcgatctgagcgcattgcagatttggtcgcgtctccacgtaacaacagtaggtcaagcaacactaccatctcggggcggccccaccactaacagtgcccagcgaccgtgtacttgcgcctcggaaccatacggaagacaaccacgtacgcgtaacctatcttaaacgagggacccagctagctaccgtaccaagtagtgcacgcccagacttcggcatcacattcgtcgaaccagctagggactc

SEQ ID NO: 727252 - DNA, 892 bp, Homo sapiens
  misc_feature (5)..(5): n is a, c, g, or t
  misc_feature (24)..(24): n is a, c, g, or t
  misc_feature (41)..(41): n is a, c, g, or t
  misc_feature (58)..(60): n is a, c, g, or t
  misc_feature (64)..(66): n is a, c, g, or t
  misc_feature (75)..(75): n is a, c, g, or t
  misc_feature (94)..(95): n is a, c, g, or t
  misc_feature (108)..(108): n is a, c, g, or t
  misc_feature (114)..(114): n is a, c, g, or t
  misc_feature (117)..(117): n is a, c, g, or t
  misc_feature (119)..(119): n is a, c, g, or t
  misc_feature (122)..(122): n is a, c, g, or t
  misc_feature (124)..(124): n is a, c, g, or t
  misc_feature (126)..(126): n is a, c, g, or t
  misc_feature (167)..(167): n is a, c, g, or t
  misc_feature (171)..(172): n is a, c, g, or t
  misc_feature (227)..(227): n is a, c, g, or t
  misc_feature (232)..(232): n is a, c, g, or t
  misc_feature (239)..(239): n is a, c, g, or t
  misc_feature (259)..(259): n is a, c, g, or t
  misc_feature (273)..(273): n is a, c, g, or t
  misc_feature (280)..(280): n is a, c, g, or t
  misc_feature (282)..(283): n is a, c, g, or t
  misc_feature (321)..(322): n is a, c, g, or t
  misc_feature (332)..(332): n is a, c, g, or t
  misc_feature (335)..(335): n is a, c, g, or t
  misc_feature (337)..(339): n is a, c, g, or t
  misc_feature (341)..(341): n is a, c, g, or t
  misc_feature (353)..(353): n is a, c, g, or t
  misc_feature (362)..(363): n is a, c, g, or t
  misc_feature (367)..(367): n is a, c, g, or t
  misc_feature (371)..(372): n is a, c, g, or t
  misc_feature (376)..(377): n is a, c, g, or t
  misc_feature (403)..(403): n is a, c, g, or t
  misc_feature (436)..(437): n is a, c, g, or t
  misc_feature (440)..(440): n is a, c, g, or t
  misc_feature (494)..(494): n is a, c, g, or t
  misc_feature (519)..(519): n is a, c, g, or t
  misc_feature (522)..(522): n is a, c, g, or t
  misc_feature (525)..(525): n is a, c, g, or t
  misc_feature (531)..(531): n is a, c, g, or t
  misc_feature (571)..(571): n is a, c, g, or t
  misc_feature (661)..(661): n is a, c, g, or t
  misc_feature (753)..(753): n is a, c, g, or t
  misc_feature (775)..(775): n is a, c, g, or t
  misc_feature (838)..(838): n is a, c, g, or t
ccttnatctcgggggtctctatangctttcttccacctggnacttctgcctcctcctnnnccannncctcccgcntcaggcctgttgtgctcanncccccaggacctnccctcnccnangcntntngcctcattgtttggttaaagcaggaccccctccccctcctntatnnacctcctctctccgactgaacagatggatagagatcccgggcctcatcggggagnggaanggccagncggtgccgggaaagggaatnggtttggggaaaanaaaacananngaggagccatggagaaggtggccccaggagggaggagnngggaattcgntangnnngnctggggcctganacggaatgnnggcnggtnncggnnggggtgggggcccctgggttcccagngtgggagctggctccgatgctggctggctcctnngtncgctgacgtcgccgcccagatggcctccaggcttaccctgctgtaccctcctgntgctgctgttggctgtggatagagnctnctnaaatcnaaatgctaccagctccagctcccatgatccagagagtttncaagacagaggcgaaggtgaatgtcgcaacaacagttatctccaagatgctattcgttgaacccatcctggaggtttccagcttgccganaaccaactcaacaaccaattcagccaccaaaataacagctaataccactgatgaacccaccacacaacccaccacagagcccaccacccaanccaccatccaacccacccaacnaactacccagctcccaacagattctcctacccagcccactactgggtccttctgcccaggacntgttactctctgctctgacttggagagtcattcaacagaggccgtgttgggggg

SEQ ID NO: 727253 - DNA, 707 bp, Homo sapiens
gcgttgttctggattcccgtcgatagacttagagggaaactgtcacaagtgtccggagcccttgaatgtcctgcaaatgaaggagcgagtgatgtccttaagttccttgtcagtcaggaatcccacgttaggggtggcatgcaagtactgtagacgttcccagagtggagacaagtactatctagttagacatggaaacacgtgatcgtgccatcctactagttcatagaagtcgtcaaggagtgagccgtgggagaacgcgttctgcgtggcagctcgtgcagttgttggcattgaaaaccctgctgactcggtccagtgttatatcctccaggcaagtacgtgcgccagtaaggcgcgtgatgcttgaaggtttgctgctgccacgtgggagccatctccaaattgtctgtgcccgcttcactcctggaaccttcatcgtaaccatgatccatggcacgccttccggtgagccacggtcttggttgtggttagctggaccgccgagtgggctgaccagcacagtcctctcgcggaggcctccttgatgttcacctacctaccgttgcgctgtgtgacacagattgctcctctgcgctatgtggaccttgccatcccatgcacaacaggggagctcactcagtgggtttaatgtgggtggatgctgggctccgggaagttctgcggcctgccgtgggaccatttca

SEQ ID NO: 727254 - DNA, 126 bp, Homo sapiens
gtgactctacaggatcttaggcgagtcggtacatgtacgtcagttggcaggttgcgttcagctggccgggaagcgcaggcaggtggtgacccgctcatggtgggcgacacaggtgtttgaggtccc

SEQ ID NO: 727255 - DNA, 265 bp, Homo sapiens
gactcatagaggatccccctgggaaggctgccagatgcaagctgtcattagatctaccattctggggtctgaaggatggtggccctattctcacaggtccatggaggcagctgccccagatagggactctgtgtgtgggctccaactccacatttcttttctgcactgccctagcataggttctccatgagagccccacccctgcagcaaacttctgcctgaatatccaggcgttttcatacatcctctgaaatattgacttctg

SEQ ID NO: 727256 - DNA, 163 bp, Homo sapiens
tcagcccgtcagccgcggtctgaactcagatcacgtagactttaatcgttgaacaaacgaacctttaatagcggttgcaccaatttggggtgtccatgatccaacatccgaggtcgtaaaaccctattgtcgatagagaactctacgaatctcctctctcctg

SEQ ID NO: 727257 - DNA, 957 bp, Homo sapiens
  misc_feature (167)..(167): n is a, c, g, or t
  misc_feature (169)..(169): n is a, c, g, or t
  misc_feature (171)..(171): n is a, c, g, or t
  misc_feature (185)..(185): n is a, c, g, or t
  misc_feature (188)..(188): n is a, c, g, or t
  misc_feature (199)..(199): n is a, c, g, or t
  misc_feature (212)..(212): n is a, c, g, or t
  misc_feature (220)..(220): n is a, c, g, or t
  misc_feature (226)..(226): n is a, c, g, or t
  misc_feature (249)..(249): n is a, c, g, or t
  misc_feature (252)..(252): n is a, c, g, or t
  misc_feature (257)..(257): n is a, c, g, or t
  misc_feature (272)..(272): n is a, c, g, or t
  misc_feature (294)..(295): n is a, c, g, or t
  misc_feature (302)..(303): n is a, c, g, or t
  misc_feature (322)..(322): n is a, c, g, or t
  misc_feature (341)..(342): n is a, c, g, or t
  misc_feature (356)..(356): n is a, c, g, or t
  misc_feature (425)..(425): n is a, c, g, or t
ccagagtacagtatcagctgagctgaccttactctgaggactaactcttttgctggaagcggtttctgatttacagctcttggtttctcccagacatgttggtgggagagatttggtttttaaggggttgttagatggagtaaattttctttttttttttttttttntnanctaaaagggggtcncanaatttcagcgnttctctgattttnatattttnattccntcttcctatccaatcccgtgccnttnggagntccagggggtaagtncatttctttaacgttttcccgnngctttcnntcccaaagtgtgtcttttncttggggctacggtacccnngcgttccaggtgcntgtccccggaataggtccatctctgcaggaagccatttcaggagtaccgggaggctcaacggcagaagnttcaccacaaaagcagaaaggggcacacccaggggagaaaacgggtggtccgggatgtggcgaaacagtgggccgtggatcagggggtgtaactcatccatatctatacatagctccagggcacaaagttttgccaaacgaatccacgcaggggttgaccctcagaggagaaaacctacataggtagagaaggttttacacggcagaaattgggaggtgggagtgggtactgacctaaatggcggggactccacagccgggagggaaatattccctttcacaacctggtatcactattttacacaacttttgttccgtgaaaggcaggttaattccaattcttggcactgaacattatttcccgtcgtggctaaggtaagggaaccaccttgaatgaacccaccggtttttcttcggggcgcgttgttgtccccgaatgtacaacctgcactgtggtattcaaggcccttgatattaaattccggcgaaaagtctagtataagtaagcttgcgcagaggtgctaataagtta

SEQ ID NO: 727258 - DNA, 204 bp, Homo sapiens
gacagcgtactacttaatgtgtaatactcaactcagtacaagacaatgcatttaacatgttataaataaaaggaacatcagactcaatcattaagggctccagaggtgaacagcatcttcataacttccatgtttatcatctgttactttctggcatgtaatttaataatgatcatcaattcgcaagaagggtgatttctaaaa

SEQ ID NO: 727259 - DNA, 336 bp, Homo sapiens
aaatggagtctccttacaagtcaacctctaggttctaatctacataatgtggttttgagtaggctacatatactatttacacttgtggtccagggtgttgcaacagcaggctgcacgagcttaagaagcctaagttttcccagcagtacactgagaatataccacctggttatcaggccgatgacagcttagttgaaagcagcagcctcaggtgcctcaccttaagcaggccgcaactcaccaggttccaactcattcctgtacctggctgccaaccgggtgcctcggcaacaagaggaatcagtcccctgggcagtcctcccaccacaaacgtgg

SEQ ID NO: 727260 - DNA, 114 bp, Homo sapiens
tcctcgagctcggccccgttgtgcacgcaccgtcatgaaagcaagtgatttatgttctagtatgattataccaggtattcgaaatctctctgtgcaataaaaaaattgaagtcc

SEQ ID NO: 727261 - DNA, 1005 bp, Homo sapiens
  misc_feature (1003)..(1003): n is a, c, g, or t
tgagaacacctggcctactgcggctatttactctacctaggacctgacgccgaggcgaactctaatcagcagacgcatggattcggaacctgtgacaaagactggcctggcctagagagtgcatcttgcttaactgcaatatgcacaaaggcccttatgctaggaagaataaaacttcagttacccagataatcatgtcaatcacagtatatccatgcaacagccggcgccaaactgcatcgcaataagacatgggtaagctagcatatccatcgggacaacatcttatagactccgaaacgtatgaatcattaactcaacatcactacacacattactggtcgtcattaaatcatcgtatatggacgacatggtcaattaaagccctagcgataggagaccccctttatcctcttagagtacccagacggttgcatgaaggtttgcaatctgccagtatggcctgcattctcgcatcacatggataaagatatgggactcgaatctccaatgcaacgtagcacaaatctctccatcactttcacgttaagactattcttactcaatcttctcatctgtatccattatagctagggccgtatgatcgtcgacctgatcaaaagatgactagactaaatcaaagaggttcggcatgatgtcttatggagtacatgatgcaagactgcgggccattactgacctagacatcttagtgtcccatttattatgctactttagcgatgactagaatgatgtgaaactgagcgcttgacctataattccgactgaaacatggcgggtgctagccctaatcttcacctcttgcctgggcgcccgtacaggttttggccatggagatcgggaatcaaggaagcctcaaccgggcagcccggaacttgattcggttgcccagggcctaacaaggagggaaacacccaccagccttataaaaaaagccaatcgttcggagcgatcgtctctctgtcccaccctttttcctcgntt

SEQ ID NO: 727262 - DNA, 105 bp, Homo sapiens
tttgcaactagatgcagacgaatgatcatgatcagaatgcatcttcctggttcttgtgatcgcacctatgtgcttgcaggaactccactgctgtccctccactct

SEQ ID NO: 727263 - DNA, 614 bp, Homo sapiens
caccaaaaatttaatggcctttaaacgaatatgtgtgatttggtttaataactagaattccaagaagctgtagccacagagtaagtcttcttgatcctgcaacctttccgtagagctcacgcatgtgctcagaccgagatcaggggtgcaagctcatagaaatctaaggcattgcacaccttcatgtaaaataagcaatatgcctttcaatgaatggggtcagagtatcacagtagacagagaatagggtatagtcaatgaattcgcccttaccttgctgtaaaataagctgccagtaattctaatccaatctagaatgcattgtttctggaccaaatataagcatgcatacttacaaaaatgcttggcaatgagcacttggcctatttgtccccatagccataaaaaataatgtgatcatgtcttttgcaggaacagggatgagtatcaaatagatgaggaaagactaggatttatttttaaattctgtgactgacttccaaaaatcccttatcactagaagtactggcaaaatatcagatattagagatcaaatttaattctttgatataagcacgaaatttttactgatagctttcagggctagcataagc

SEQ ID NO: 727264 - DNA, 176 bp, Homo sapiens
ctgctccagactgtacgaaggtgatccagacgcaagatggctgtccgctctaaggcaatatggttttcgtgcttctaactggtgctgccagctttataataggtggcccaactaagccatcaatgttaccaaggacccgcaaagaaagtacaaagaaggaagtatccataatcaat

SEQ ID NO: 727265 - DNA, 362 bp, Homo sapiens
  misc_feature (301)..(301): n is a, c, g, or t
aactcctgaggagattcgtaaaaccttcaatatcaaaaatgactttactgaagaggaagaggcccaggtacgcaaagagaaccaatggtgtgaagagaagtgaactgctgtgcctgtcactgtaacactagaagggttgttccaaatgctagttgcactgctctgtttataattgttaatattagagatcagtagacaaacatcgccttgtcttcactgcatgtgtagttccagtccagatcagacctgtggctgagtttcttctgtgagcagaagtttccttttccccccattactctgnataaaaccgaactatgggttctctgcggaaagtggcattttgggctttccctttctgtaaa

SEQ ID NO: 727266 - DNA, 120 bp, Homo sapiens
aattgccaaagaaatgtttcccccccgggggggggaaacccttttagcaggaaaaaaaagggggaaactttgccaattccccttttttttttttaaaaaaaaaattggttctaaagccca

SEQ ID NO: 727267 - DNA, 424 bp, Homo sapiens
ggcctcccaaagtgctgggattacagatgtgagccaccacgcccggcctgcagtgagctttgattgtaccactgcactcggggtgagaccctgtgtccaaaaaaaaaaaagttgaggcagttcccagataaacaaaacaacaggccaggcactgtggcccacgcctgcaatcccagcactttgggaggccgaggtgggcgaattgcctaagctcagaaattcgagaccagcctaagcaacatagccaaaccccatttctacaaaaaattttaaaagtagctgcttgtggtgtcgggcgcctgtggttcagctatgtggaaggctgaggtgggaggatcgtttgagccctggcggcggaggttgctgtgagctgagatcgcgccactgcactccagcctgggccactgagtgagcttccctctca

SEQ ID NO: 727268 - DNA, 334 bp, Homo sapiens
ttcccccccccccccctggggggggggggggggccctttttttttttggggggggggggggggccccaaaaggaaaagggattgggggcccccggggtaattcccccccccgggggttttaagggaattttcaaggggggggggatttttttgggggggggtccgggtttggggccctgttccaaagggccttccccccccccccaaaaaaatattttttttaccaaaaaatcccccggggggggaattttggggcgggttttttttgggccgggggggggggggcccaagggtggggggccccccctttttaaaaaaaatttttcccttggga

SEQ ID NO: 727269 - DNA, 1395 bp, Homo sapiens
ggcgctgtctgcagtatcagcatcccagtatcctgctcaagaagctggccccttacctgcaagtcggagctgctcccggttccagtgagctgatcttctgaggacttcgccaggttcatcctggtggaaaactactgctacgaggagcgtggtagctggagaccggtcactgaaggacatcctgcaaggctgctgaccggcaggcctgctggctgcacatagtgcaagcccaatcctctacctgggacagcactggtcatgcactaacagcgagccctaatctgcactctgcataggcctgacgggcgccacgccatcagaactgggagcgagggaagtacatgccaacacgcagagcgcggcgtgccgtgcacgcccacatgaccccacgctcaacaccagcgacgctcactgccagccttcgtctgggacacacagcgacacgtgcgcctgcccgtgcgcccagtgctggactcatcttgctgcggtccccagcgcactgcagcgcatggctgtcgtgtgcgtgccccttcctggagcgcctaggccccgtgttagctcgaccctgtgccgaccccctagcgctgtaccccctggggccctccgctgctctacccccggccgtagtcccctgtctgcggcctatgccttcgcgccccgccactgggtcactcgcagtcgccattggtgtgatgcccccgctcccttgcaccatccccgcgtcctagctctactagtctcctcccagactcagcgccgatacctctccattactgacctttcgcatcgaatcacattaactgattacacacatcaaactcccttatttttctgcccattacctgtccctctactaactactccctgtcacccctcctactaccaccactcatcgaccctctataaatacagaccagctttcccccatctgcaatacacattcacatacagcattctctcagtccaactatatcattaagcattcgatgcgccaaccacacaaatctttatatcgactcccttactcccacataattccctcccccctaccaccaatatcacactcaccacccaaatagacatcactctctacttcaactacccctcatgacaaatctcatcctctcacccccccaccacacacacaccatacttcatccacaatccctctcccactcttcacatcctcatatatcatctattacatcctctctccatcctctgcagccacccccgacctctactacacacgatatcccatctcttcccatccacccctcattaccttatctaatatcactctctcccaaacaccccctcatatctaactcccacaactaatcccatagactacatccacatcattcactccatacattatttcatctacttacc

SEQ ID NO: 727270 - DNA, 114 bp, Homo sapiens
ccaactcaggtgcgagctgcactatgtcttcagtcttacttgcgaggcttctggccagaaataggtatcgcaagatactccgtgagcacaaagcagtcatcattcagcagctcg

SEQ ID NO: 727271 - DNA, 307 bp, Homo sapiens
ctggcccgtttacggaagcacatagtctaatagaaaaaacgaaacaaataatacaagcactgctatatcacacattattactagggtctctatataaccctacctacaagcctcagagatacttcgagtctatccttcaccatttccgacggcatctacagctcaacattttaagtagccacaggcttccacggaacttcaccgtcattaattgagctcaaacttatcctcactactctgcattccgagtcgacacggaggaatccatctagacgtcagaccctgcacggcaatgcaaagccattgg

SEQ ID NO: 727272 - DNA, 111 bp, Homo sapiens
  misc_feature (103)..(103): n is a, c, g, or t
cgtgctgcggcggtacgtgctgcgggacggatacttcacgctgacggtgctgggccgctctggcgaggaggagggctgcgcctccatccccctgtcccccaanccgcccgc

SEQ ID NO: 727273 - DNA, 373 bp, Homo sapiens
  misc_feature (4)..(4): n is a, c, g, or t
  misc_feature (45)..(45): n is a, c, g, or t
  misc_feature (104)..(104): n is a, c, g, or t
  misc_feature (361)..(361): n is a, c, g, or t
  misc_feature (365)..(365): n is a, c, g, or t
ggcntaaggcctggccaggccccggcaagcactgctaacttgggnggagccaacttcacctttgtattagttattaaaaaatataatttgggctgggcgcaagntgtcacgcctgtaatcccagcaactttgggagtccgaggcatgcggatcacttgaggtcaggagttcgagaccaccctggccaatatggtgaaaccccatctctactaaaaatacaacaaagttagccgggcgtggtggcaggcgtctgtaatcccagctgcttgggaggctgaggcaggagaatcacttgaaccctggaggtggcggttgcagtgagcacagatcatgccactgcactccagcctgggcaacaaanacgnttcgtctc

SEQ ID NO: 727274 - DNA, 307 bp, Homo sapiens
tgtgcagcctgctagacagctcctttatcagagacatagataccattcaaaaattccctgatatccttgaatttaacgtgttgtgttcttgctgaatcaaagccgctcacctttgaaacaagctcaatgtcatttccttcaaggattaattcatctttctgttcttgagatacttaacaagcaacacctgttttcatcctaacccttcggatatatttttcacccaagaaatttcgtatttcaacaagagacccattctcctgtataacaactttcattgttaatgttagcatacacagaccttatt

SEQ ID NO: 727275 - DNA, 152 bp, Homo sapiens
gagtctggacaacagaagactggactgaagatatctcactttgtcccctaggctggagtgcagtggtttgattcatgctcacggcagcctcaacctctggactgaagcgattctcctgcctcagcctcccttgtacgctgggacaggtgcac

SEQ ID NO: 727276 - DNA, 278 bp, Homo sapiens
ggaattttaaggccagtcctttataaaggcccaagccgggggaaacagggggcttttttaaaaaatgctggaaattaaatctttgaaaattttttttatgtgggaagaccccaaggatggggggaggccgccatccaaactaactttttgtagaaagccctttccttttttttaactggttccacgcccatatgttttttaccaaaaagaatgggtttaggcccccggggtaaacttttttttatatatatatataaaaattaacctttcgttgtgga

SEQ ID NO: 727277 - DNA, 338 bp, Homo sapiens
  misc_feature (1)..(1): n is a, c, g, or t
  misc_feature (77)..(77): n is a, c, g, or t
  misc_feature (110)..(110): n is a, c, g, or t
  misc_feature (120)..(120): n is a, c, g, or t
  misc_feature (153)..(153): n is a, c, g, or t
  misc_feature (193)..(193): n is a, c, g, or t
  misc_feature (195)..(195): n is a, c, g, or t
  misc_feature (205)..(205): n is a, c, g, or t
  misc_feature (207)..(207): n is a, c, g, or t
  misc_feature (211)..(211): n is a, c, g, or t
  misc_feature (213)..(213): n is a, c, g, or t
  misc_feature (222)..(222): n is a, c, g, or t
  misc_feature (227)..(228): n is a, c, g, or t
  misc_feature (260)..(261): n is a, c, g, or t
  misc_feature (329)..(329): n is a, c, g, or t
nggaggggccaggctccagcaggtacggacactgcaccctagaggtaggagcagtgggaatcagtatttccgctgcngagggaagagactactcccggaggatcggagtngggggttggnggggctggggtcctccgagtccaggctgaagangtccctcccggtacgaaggatttgctcctccagttttttntntttttttatntncganantaccttttncaggnnggcttcccgttttttgttccgggttgatcttnntggggtgtgtttccggttaattagggagtcctttggtgtcactggctcatcatcaaaatcaaattccntgggcatgt

SEQ ID NO: 727278 - DNA, 256 bp, Homo sapiens
ggatattgacatgcaacccggtttctcggatcagcatactgaccctgcgatatcgcagcgttttgttcctcagaatgaaatacagcttctcgcatttcttcaaggggccgcgccccatgcttcttagcgtcgcttgccaaactatcagctcatctagtctcagctgatggtactctggcaatcccgtatcatgtcactgtggtaatacccgtatcatactgcgtgtttccccgctaccgtccactccatgctaccg

SEQ ID NO: 727279 - DNA, 1000 bp, Homo sapiens
  misc_feature (161)..(161): n is a, c, g, or t
  misc_feature (193)..(193): n is a, c, g, or t
  misc_feature (195)..(195): n is a, c, g, or t
  misc_feature (205)..(205): n is a, c, g, or t
  misc_feature (212)..(212): n is a, c, g, or t
acgaagtgcgagctccggtaccctagcaacgtagggatttctcatggtgtaccccgggccttgtttctccaagtggccgtgatacacgtagtgagctatgttcagccctgcgttccacctgcagtagaatcttttcttctcagacagggacagtgcggccncaacatctcctggagtctagaagctgtttccntncccctccttnctcctcntgctctagccttaatactggccgttttccctccctgcccctagagtgaagacagggcactctgcgcccaccgacagtgcacagctgtgcaatggagacctgcaggtgcacggtgcttggaacacgtgtggttcccccctgggccagacctccgtctgctagtgcccctctccaccatgcccgtccttccccgacaggaagcgtgtgctgctcgactactaggtgtctccaggggtctgtgatggtgcccctgggggtcagcttctgtccctctgccttctcacctccttcgtccctttcttttcatgtatccattcagttgatgttgtattgagcaagctacggatgtcagcactgtgttaggtgctgggggccctgcgtggtgacgactcaatgttcctccctcaaggactccccatccagctgggagacagacaactaactacacgtgcaggcctgctggtttgcacgggaggcgtcctgcctggctcccgtgctccaaccgtcctctgtggctcaaggcttcctggatacctcaaccccatcccacccataattcttacccagagcatggggttggggcggaaacctggagagagggacatagcccctcgaccacgggtagagaatctggtggttgtccaacaatgtctgtccagcgtgttgctcagcgttgggcaggcaccaatggccctctggacctttcatagcagcagacaaggcagagcctggggcaaggcaggcctggaatgctttggggacaccgaggggacttgcccccacccaaca

SEQ ID NO: 727280 - DNA, 926 bp, Homo sapiens
cataaaatagaatgtgtatctgagactaaacactttgctatatagatgtgctgatttcctaatgaggtcattttcatattctacaaacccagaagattcagaaagactccttgtctgcttatgaggcagtgtccagaaatgcacagcacagtgttctggaacatagtcagaagcacagtaaacgattcgatcaaggagaacgtaagtgctctgattctggcctgctgcaagcatagatgccaggctcctgctggtgactctgtagcttggtcgaacagaacttgtccagaccatcagaggcaagaccagcagcagagctgatggagtttcagcccaagagatggttaactgccgttaagcaagttgggctgtacacaagtactgcgtagtggacaaccaacaatggggacaagctagaaaacccagagtttgcagcttgcacgtgtaaaaagtactacattgccagtgcgttagcaaaaagaaaggcccctcacagaataggcacaagtagtggatatttagatagcataacggacaatcgtactggcatttaatgaatttgctttgaccatcagcaaagatggcagtttcagatttcaagcacaaaacttgtgtgagtcatgtctggtctcattccatcatctgaacaaaaatgggctccgtgacaaattgatcaggcagttgtgccacaaggtatgtgaccttgggtaagtacagctataactcatctgagtcttgcatttcctcattggtaacaatgggtgtgaaaaatctataatatgtcagatgaccggactgagatgacgcatacccaccacatccagcagaacagcctggagacacagaataggaacggaaccaaaagcaaaatctgcagggacacaggcagcaaccgtggagaaagcaagagccaagccaaccgcatg

SEQ ID NO: 727281 - DNA, 217 bp, Homo sapiens
atgacgaggcttggatttgttggttatagtgtactcactttctcttctagaatattcattttctcaaagtcacaagatatacatttagtttagtagaacaaatatttacagatatcagacatgtatatgcactgggctaggtattatgtgagaaaaagagaacacagcccattccctcaagaaaagtagaccatcggtgacacttctaacatgacca

SEQ ID NO: 727282 - DNA, 162 bp, Homo sapiens
agtactactggaaagcacatcaccccaggagttacaggatgtacaacagtattaatttaagggatagtagcacacacacgatccttctatctagaaatcagtctcctagctaggagaaacctctttcacacacaaaatgaaatgtgtacagcttgccggtgg

SEQ ID NO: 727283 - DNA, 1195 bp, Homo sapiens
  misc_feature (42)..(42): n is a, c, g, or t
  misc_feature (479)..(479): n is a, c, g, or t
  misc_feature (492)..(493): n is a, c, g, or t
  misc_feature (518)..(518): n is a, c, g, or t
  misc_feature (534)..(534): n is a, c, g, or t
  misc_feature (735)..(735): n is a, c, g, or t
aaagctccccttgctttccgcggcattctttgggcgtgagtnatgcaggtttgcagccagccccaaagggggtgtgtgcgcgagcagagcgctataaatacggcgcctcccagtgcccacaacgcggcgtcgccaggaggagcgcgcgggcacagggtgccgctgaccgaggcgtgcaaagactccagaattggaggcatgatgaagactctgctgctgtttgtggggctgctgctgacctgggagagtgggcaggtcctgggggaccagacggtctcagacaatgagctccaggaaatgtccaatcagggaagtaagtacgtcaataaggaaattcaaaatgctgtcaacggggtgaaacagataaagactctcatagaaaaaacaaacgaagagcgcaagacactgctcagcaacctagaagaagccaagaagaagaaagaggatgccctaatatgtagaccagggatatcagtagnacaaaagctgtanngagctcccaggagtgtgctaatgangaccatgatggccctnctgggaagagtgtaagccctgcctgaaacagacctgcatgaagttctacgcacgcgtctgcagaagtggctcaggcctggttggccgccagcttgaggagttcctgaaccagagctcgcccttctacttctggatgaatggtgaccgcatcgactccctgctggagaacgaccggcagcagacgcacatgctggatgtcangcaggaccacttcagccgcgcgtccagcatcatagacgagctcttccaggacaggttcttcacccgggagccccaggatacctaccactacctgcccttcagcctgccccaccgggaggcctcacttcttcttttcgcagtcccgcatcgtccgcaggcttgaatgcccttcttctccgtagcgagccccctgaagcttccacggccatgttccagcccttccttgagatgatacccgaggctccagcaggccatgcactccacttccagttgcccggcctttccagagccgcagagattctcgagaagggacgatacccgactggtttcggggagatcgccaactcccgggctgcctcgataaggcccgttgcagtccgggattttcgggcgtgtccccacccccggtaaggggggcggaccccgggtgggggaggataggggcccgaggccccctggc

SEQ ID NO: 727284 - DNA, 329 bp, Homo sapiens
tttttttttttgagatagagtcttgcccagggtggagtgcagtggcgccacctcggttcactgcagcctctgcctcccgggtttaagcgattctcctgcctcagcctcctgagtagccgagattacaggcgcatgcgccacacctggctaatttttgtatttttagtaaagatggggtttcaccatgttggtcaggctggtctcgaactcctgacctcacgatctgcccacctcggcctcccaaagtgctgggattaattacagatgtgagtcaccgcacccagcccagataaagaaaatttgttaaaaactagatccccaataataac

SEQ ID NO: 727285 - DNA, 694 bp, Homo sapiens
  misc_feature (694)..(694): n is a, c, g, or t
gggccacaggcgcacccacacgcgcggctaatttcgtattttagtagagacggggtttcaccctgttagccaggatggtctcgatttcctgagctcgtgatccgccgcctcggccttccaagagtgctgggattacaggcgtgagccgtcgctgccctcctacctctacttttttctatctctgggactaaacggcggccggcggcgtgcctgcggtgccaaatgccggcatgctgaaactcagagagggaagatgtcttgcaagtacatgcagccacagctccagagtttcgctcgttgattccctgggcgtgcagatgcagctggcaccatctcggtctcacgcggaacctccggactcccaaagttcaagcgaattctcctgcctcagactccccagatatctgggattacgagtaaaattataacaggcacatatgatatcctggcatgacaagagctggaggctgtcattctaagcaatgtagtgacgactggctgtcttgtctcagtgcccacccctggaagcatgcgcaggaactcaagagcagcatagcacagaggacagtgtctggtaggtcgaaaggaaaacacaacaagcagcgaaacgcagctccgtgctcgtgagcaccccatattgaccaaggtaaccacataaggcaacagcaaagatgaccttgggactgaggtggan

SEQ ID NO: 727286 - DNA, 405 bp, Homo sapiens
cttcacgatcatgtatattctatatcttttctttgaaaataagtggattcatatactccacagtattctgtgagtggacctctagtcacgtaacagtctacatatcgctgtatttatttaatggtaccacagttcctcttgaaaatatttctgagacatcgggatcagttggtaacaggtagtttagaatcacattctcaaggaggaacctgaagtggctcagaatggagttcgtgtctctcattgctggtgctcagttgtgacagccaggaatttgatcatgtagctgcatcctcaattgtcagggtttgagtgaccattagggaccacctgtgtagttgatcacacttctcatgggagaggagtttgttcactgcgtactgcggaaccagtcagcattaacca

SEQ ID NO: 727287 - DNA, 173 bp, Homo sapiens
agtgagacgacgtgttggatgagtgtggacgtggggtgggggaaaggtaggtgttatattttactccttttgactaaagggtagtctaaagattgggtctaaacaacactgttcccttccttagacagaaaatattactttttttttttgaccgagggtaacaccacagaacg

SEQ ID NO: 727288 - DNA, 163 bp, Homo sapiens
  misc_feature (25)..(25): n is a, c, g, or t
  misc_feature (33)..(33): n is a, c, g, or t
tatttacataatgtcaaacggatgnatatagcnatatagccaactacctttaattaattccacataaagatttaaaggtagttggctatatcgtatcatttcattcttttgacattatgtaatattttactgcggaaaataagactaataaattgttccaaaa

SEQ ID NO: 727289 - DNA, 719 bp, Homo sapiens
ggcagctatccggttcaatctaagagaataacaattttgggagacacttataaaaataatgtgatgttagcttaaacattacacggacattacaaccttacaacttaggtgagagaggctttggttatgctgagttgcctatgtgctagtgataacactacccctttcttctaagtaaaatatctcaggatacaagtgaaaaataatagtactgttatcgagttctctttggtggtcaccatgatgtgtgttgaggagcagagtgaacaaaggcaacctgatccctgtctctgtagagcttagtctttattcactgccagtattttatttttgcttcatagctaattgagacacattgatacctgatgattgggaggaactgttctaatgcgatttgtaaaaggagaattcaaattggaagtaccagctaggcacggtggctcacacatataattccagcactttgagaggctgaggtaggaggatcacacttgagcccaggagtttgagaccagcctgggaaacttagggaaacccgatctctattaaaaatttaaaaattagccacgcttggtggcaggcacatatagtcccaggtaacttgagagattgaggtgggatgatcacttgagtctgggaagtcaagactgcagtgagccatgatcatgggactacactgtagcctgggtgacacagcaagactctgtctcaaaaaaaaa

SEQ ID NO: 727290 - DNA, 944 bp, Homo sapiens
  misc_feature (294)..(294): n is a, c, g, or t
ggcgcgaaggtggctggtgcgtaccgtcccgaacccggtaggagccgagatcccacccgcaggaccccaaaacccaatgatcctgcagcagcccttgcagcgaggcccccaggaggggcccagcgcctcccgcgggccgccttgggggtgacttggggcctggacgccagctcccctctccgaggagctgtgcccatgagcaccaagcggctgcctggaggaggagcaggagcctctgcgcaagcagtttctgtctgaggagaacatggccacccacttctctcaactcagccntgcacaattgaccaacccgctaactggcagcctccgcccaattgaccttttctcgccgcaggccttgcccccctattcagtgagatcctttgctcttggagcttgcttctcttggcgcttatccctgggagcttcatcctgtaggccctccgtctgctgaggctgggggacacccccagtcccacctacctgtcaaacccgcagctggggacataatggagctctgagtgctggtggacagtgccacctcccacttcattgttcccaaaagaagagacagcgtattccgccaagggacaggttcctcactctcctgcaagtaggcatctgggcccaagacttccctcagagaggacatgaggcccaacggaggtactgggaatgggaaggcggtgggagccattggcaaggaggtctcgcacccccacgcagaactgccttccgatggctggcaccacaacataatcacagataccgaccacactgaaccacacagaaccaacaaaacaccaacaaaaagtggcgcatcatatatccaggcaaccactatcgcaaaaatacaaaaggagcaggacataacaaaccacgcgccagaggcgaacagacgctatgagcaaacaggggacgcgacaaaaccgggtagaactgtc

SEQ ID NO: 727291 - DNA, 249 bp, Homo sapiens
  misc_feature (237)..(237): n is a, c, g, or t
tgatataacgaatgtcgagctcggtacccatccggttcaatgtgtctcaattagctatgaagcaaaaataatagtactgttatcgagttctctttggtggtcaccatgatgtgtgttgaggagcagagtgaacaaaggcaacctgatccctgtctctgtagagcttagtctttattcactgccagtattttatttttgcttcatagctaattgagacacattgaaccgatagctgcngggtccttagac

SEQ ID NO: 727292 - DNA, 243 bp, Homo sapiens
  misc_feature (39)..(39): n is a, c, g, or t
  misc_feature (218)..(218): n is a, c, g, or t
ccgtactcgatcacacggagagcagcttgaaatcgcctncctcaatcaaataaatagcatcgaattcctctgagtgctgggtcatcatgatttccagcaatcttgcgatatcctcttcccccagactgtcgttaatgattggattggacaaaagcagcagcaagccttgaatattgttcataaatgttttcaaataattctcgacctgcacgactgantcctgaagcaccgcctcgttgtttt

SEQ ID NO: 727293 - DNA, 277 bp, Homo sapiens
actcccccttaacccccccccccgggggttttttttagggtggggattccccggggcccccccccccaacccaggggtgggggcaaagggggattttcccgggtccccccggggggggttcactcccgggagaggcccccccagtgggagccccccctttttaaggccccccgggccggggcaaaaagggccccggcccccaaggccaaatctcgggggggggtaaaaagggaaagtgggcgggggccaaggaaaaaacccccttttaaaccgttta

SEQ ID NO: 727294 - DNA, 584 bp, Homo sapiens
tgatataacgaatgtcgagctcggtacccatccggttcaatgtgtctcaattagctatgaagcaaaaataatagtactgttatcgagttctctttggtggtcaccatgatgtgtgttgaggagcagagtgaacaaaggcaacctgatccctgtctctgtagagcttagtctttattcactgccagtattttatttttgcttcatagctaattgagacacattgatacctgatgattgggaggaactgttctaatgcgatttgtaaaaggagaattcaaattggaagtaccagctaggcacggtggctcacacatataattccagcactttgagaggctgaggtaggaggatcacacttgagcccaggagtttgagaccagcctgggaaacttagggaaacccgatctctattaaaaatttaaaaattagccacgcttggtggcaggcacatatagtcccaggtaacttgagagattgaggtgggatgatcacttgagtctgggaagtcaagactgcagtgagccatgatcatgggactacactgtagcctgggtgacacagcaagactctgtctcaaaaaaaaa

SEQ ID NO: 727295 - DNA, 81 bp, Homo sapiens
gccgaggacacgggtgtgtattactgtgcgagagcaggctgcattagcaactgccctcattgggacaactggggccaggga

SEQ ID NO: 727296 - DNA, 258 bp, Homo sapiens
ctaatcattactctcatcatgttactcccccatttacatcacttctccttgcctcaggtattaagtccaaacccttcaacagcccctgctctgccctgccttgcaaggcagcgtcattgcttgcccctctccatttcatctgctatggagtccaactgagcctcatctgccctttgaacacacactctttctcctctgggagtctctgaagtgggtgatatcctctgcttataataagcttctgactcttacctccct

SEQ ID NO: 727297 - DNA, 537 bp, Homo sapiens
gggggtcagccccccacccggccagccgcacctgtccgggagggaggtgggggtgtcagccccctgcccggctagctgcctcgtccgggaggtgaggggcgcctctccctgtgccacccctactgggaagtgaggagcccctctgcccggccagccgccctgcctgggagggaggtgggggggtcagccccccgtctggccagccgccccgtccaggagggaggtggggggtcagcccccacgcggcaagctccccgtcctgggaggaggtggaggggtcagtccccacgaaccggacagtctgaccatgtccgggagggaggtgggggcgagagtcaggacacccgagccggccagccgaccggactagggagagtggaggggtgccatatgcccctgtggcgccacctaactgggaacgtgacggagccaccattcatgtgctggccaacatgcaaggtatgggagcgtgtagccataagctcatttgagaacgtgagcatgatgaccaatgcgcgggataggtggaactagaaa

SEQ ID NO: 727298 - DNA, 750 bp, Homo sapiens
agcggagtctgctcggaggtctgtcctcggagcaggcggaggtaaagggcacttgagctgagaccagattgccggcattattctattaacccctccctctctcccgaacccgaatctctgttacacccttcgtctcacccgtcgcatcgaagtaggacaatggcggtagccgccggatgccagtcagttcccagtatcgaatctgcgctcggttagtacctgcaggatgccgatgctagttccgggacacgggccgatgttacgaggagcgaaagtgagtcattgcgctgaacctgcgaggagctgagaaaaagcgatgaagagagaacggtcccatgtggccgcgttcgcaacgaattgcttgaactatattcctcggatacggatgcgttgaccgaagaaactgggtgtttagccctttgaggtgaatccaatagtttgcagtcaattagctgggcttagaaactcttgactaccctcatcttgaaggagttgcttgcacttcgatggagacttcagttagaacgtccaatttgttagggcatacattcccttcttcatggtccaagcccaatggtaggacgtaaacaaaggtagtccttaagccacaggtccattgacccctctcccagaaggcgcttcgaattcacgaaaagggtcactgaactagaaacttgggcacattgcccacttcagcagaggagctcacatacagcgttggggacctgtaaagatcgatacagtctactg

SEQ ID NO: 727299 - DNA, 391 bp, Homo sapiens
  misc_feature (14)..(14): n is a, c, g, or t
ggccataggatgtngggtgagccggacagatactgcgatttacagacgatttctctacttgaagagctattgttcacttgcgtgtaagaaaaaagaaaaacaaaaggaaagaaaaagaagaaaagaaaaaagagaaagaaaagaaaagatgcgattccagccccttttttgggtattttttatttttgccatgagtctcctttttatcagtgaacagaaaccagttaactttcccaaggagaagaaaactatacagacacaactgctttcgcaggagatgcattccacttcattctccgagtgcccttcccatggagaaaacctctaatttccttggctctaccagaagaagggtgaaagcaaagatacccaatcaccgggaaaaacaacc

SEQ ID NO: 727300 - DNA, 700 bp, Homo sapiens
ccggacgagactcaagatgggcgctgggaatataggagagagaaagaatgtattgctgcttccaaaaatacgaccaaataatacattttttatgaaaaaagttgctagcactcaaggggaggggtacttataggataggggtcgatacccattacaatgtgtaggatttcccgtgaaaggtaaaaagaaaaaagaggacattaaaaaaaaaaaaaaaagaaaaaaatagagccgtgtggggcggttgggggaaggggattgtagagtggagaaagtttatgaaggggggggaaattggaggtaaatggggcaattggccttatagggggtggtataaaaatgaatgggcggaggttttacaaaggggggaatggggaaaaccttggggttaccaaatttaagggctttgaagaaaatggacttttggcaaggtggggaaaaggggaagaggccgggacggatgggctttcaaaataatggggaagctggaagggggaagggaaattgggaggggtaaatatttgggaaaaattggggggtaaaagttggggaaaataaggtaagttttttaaaaaaaagggggaaatgggaaaaatccttaaaaaagaaaagaaaagaccggggatagggttgggggtggttgaagttgggaaaaaagatcgaaaaattaaaaaggggggaataaaaggtaaaagggggg

SEQ ID NO: 727301 - DNA, 213 bp, Homo sapiens
aggtgatctagaggatccctgccgttcactggaggacagcaggaccaggagacctggaatccgggggagcagcaggccttgttcactctctcgccagcgggaccagcagggccaggtggtccctgagctccagcctctccatctttgccagcaggaccgggattggcgagtgatgtggggagctctagttcgcaagtcatggtcgtagttgct

SEQ ID NO: 727302 - DNA, 682 bp, Homo sapiens
  misc_feature (56)..(56): n is a, c, g, or t
  misc_feature (85)..(85): n is a, c, g, or t
  misc_feature (339)..(339): n is a, c, g, or t
  misc_feature (355)..(355): n is a, c, g, or t
  misc_feature (552)..(553): n is a, c, g, or t
cgtcggtaccgtcagccattttccaaggtatagattagaagcagccacgggtctgnctacactccaagggagaggagattacacntggcattatccaggcaagaagctaaggggtcatctcagaattctgccttccaaatagatcctcggtggagctcaaatgcctgggcgagcaccagcctttgtttaaaggcaacagagaatgctgccctgtctcagatcttcagcaagcctccagaatgatggtccagtctctgagcccagggccaaggcagcaggagctttgggcgcacatggggactggcttcccccactttgaagtgaatcatcacatccgtnttagaccctagctgtngctcaggcaaaaatgatgatttagaagaagatggagagaagaggagagttaatttaaaagcacttatatttggccgggcacagtggttcacgtctgtaatcccagcactttgggaggccgaggcaggaagactgcttgagcccaggagttcaagaccagcctgggcaacataggaagactctgtctctacatagaanntttattataaaagtagctggggatggtggacacacctgtagtcccagctactcaggaggttgaggtgggaagactgcttgacgccaggagtatgaggtagcgtgagctgatatgcactgaatctaccta

SEQ ID NO: 727303 - DNA, 1104 bp, Homo sapiens
  misc_feature (113)..(113): n is a, c, g, or t
  misc_feature (118)..(118): n is a, c, g, or t
  misc_feature (123)..(123): n is a, c, g, or t
  misc_feature (157)..(157): n is a, c, g, or t
  misc_feature (216)..(216): n is a, c, g, or t
  misc_feature (242)..(242): n is a, c, g, or t
gagcgagcgtgccgggccaggtcaagcggagggctccgacggcgcggacggagcgaagcgccgagccatggcgcaccaaacgggcatccacgccacggaagagctgaaggaantcttngccanggcacgggctggctctgtgcggctcatcaaggtngtgattgaggacgagcagctcgtgctgggtgcctcgcaggagccagtaggccgctgggntcaggactatgacagggccgtgctgncactgctggacgcccagcagcccccgcctaccctgctctaccgcctcgactcacagaatgcatcagggcctctcgcaactggcctcttcctcgccctggctcgcctgactaacctccccccgtgcgcccccgcaagcactgcctgcaccgcccggcccacgccgcccgccccaccagctgcacaacaacgcactcccggcgcgctggccccacctacccccgcccgcagcctccaccgcgcgcaactcgccgacaccgcatcgcaccctcctcctccccgcccagcgcgcctacccacgacaccccccctctcccctcccctgctgccggccaccctgccccccgcccctgcaacaccctcaccgcctgccaccaagacgcaagccctcacagccacccactcccggccactccacccccacggcagacccgaccccgcacgcactcccccccgctcgcgcccaaccccacacacaccccagaaccccctggccaagccggcccatcgacccattcacccaccctgcccgcgccccgagcgcccccacacgcggcaaccccccacccacaaccctcccacagccacaccacaacgcggcccacacctaccccctcccacgactcgcacacgcctgccccccccagcaagcccgccaccaaaccccaccctgaaacccacggggcggaccaccacgccacaagccccacaagcgcaccgccagcgcccccaggcactgacgacatacccggacaggcggcccccgcacgaacgtgccggcccacagaccaccccccccccgccccccactgaacccagccccacaacccccatccacaggcggcgacacctcccctgtcggcc

SEQ ID NO: 727304 - DNA, 638 bp, Homo sapiens
  misc_feature (113)..(113): n is a, c, g, or t
  misc_feature (118)..(118): n is a, c, g, or t
  misc_feature (123)..(123): n is a, c, g, or t
  misc_feature (157)..(157): n is a, c, g, or t
  misc_feature (216)..(216): n is a, c, g, or t
  misc_feature (242)..(242): n is a, c, g, or t
  misc_feature (497)..(498): n is a, c, g, or t
  misc_feature (518)..(518): n is a, c, g, or t
  misc_feature (525)..(525): n is a, c, g, or t
gagcgagcgtgccgggccaggtcaagcggagggctccgacggcgcggacggagcgaagcgccgagccatggcgcaccaaacgggcatccacgccacggaagagctgaaggaantcttngccanggcacgggctggctctgtgcggctcatcaaggtngtgattgaggacgagcagctcgtgctgggtgcctcgcaggagccagtaggccgctgggntcaggactatgacagggccgtgctgncactgctggacgcccagcagccctggctacttggtctaacggcttggaattcaaaagaaattggcttcaggggctttcggaaattgggttctttccttcggcctggtcggccttgattaactttcccccggttggcgggcttggaaggatggctggtacggcgggcccacgctggggccacaggtgcaaaaaggagtttgcgaggtggccacatcacaggattgagctcttcggggactgtgaagggatgacctnnctcttttgctgggtaccagnaaacacnctgttcgtcctgtgcggcacctgccccgctgacctcggctgagagagagctccagcagatccgcattaacgaggtgaagacagagatcagtgtggaaagcaagcaccagaccc

SEQ ID NO: 727305 - DNA, 671 bp, Homo sapiens
aaggttgccagagatgatgttgattgtaccacttccagaaactggttcgacaacgacgtaggtactgccattctcaagatttatctcaccgttgttgacagaacctgattcagctctacgttgcaaaccagagacggaaccaccattgagaatagcatttgagaaagagaaagcaccagagttagagtaaggagagaatgtgacttggccctttgtggactctgatagactcaaagaaatatcaccactgttatcgaaagagcctggagtgaaggagtatgcagatgcggaagaagcagcaggctcttcagcgttaaaggtaccagatacatcaaagttttcaccagaaatgtcgaattcggtacctgggtaagttggcttagacttttctacgaaaacgccaccatgtattatgaaatcagcagaaaaaacgtatttgtcaccatcaagtagggtcaacttaccacctgcagcgacttcgacagcttcagttgcaatgactgaaccggtgagtgtaatgtcaccactgatggttgtagaaggcaaataaatagtaccatcgctggaagaaagagagttggaagcagttgcagttgcactagaagccgaagaggtaatagaacttaaggtaccggaggtgatagaaccggaggcagtggaagccgatgagg

SEQ ID NO: 727306 - DNA, 260 bp, Homo sapiens
ttgcacgtaacataacaacctactcatctagaagtaggaaaacaactaggatgactgaagtagagacctgaagtgtgacggggatctagccaaatgcagttcacaggtatagcatcaggtagacagcaccaagaaatacagcccctaaaatgtcgagatagtatacggaaaacttgccgtgtactatatataagtaatacctcaatgagataaagacaccatgaggtactaagataggatagagagagactatatcaaca

SEQ ID NO: 727307 - DNA, 218 bp, Homo sapiens
  misc_feature (3)..(3): n is a, c, g, or t
tgntgacctgggagttcatgaagtttctcggttggctgagtggaacttggtgaggttgaaggagcttcatcgcatcagcacgtcctcttgtgattcatcctctccagcttctgctcactagtaattgtagctgttcccagagtccgccagtccgctctcaaggcaagctcagtctagtcagggtcgctccaggactcaggttctcagagccatgcagt

SEQ ID NO: 727308 - DNA, 679 bp, Homo sapiens
ctgaggcttgagaatggcatatacccgggaggcagagcttgcagtgagccgagatcgcgccactgcactccagcctgggtgacagagagactctgtctaaaaaaaaaaaaaaaaaagatacattcagggtgatcagggtgcaccaagcagacatgaaggaggagctctgtcatacggaagtcctcgagtgctttgcacacctatagtaatgcaccatataacatttagatcgacaacagattgcatatatgtggtggtcccataagattataatgaagttgaaaaattcctctcacctagtgatgggttaaatgtcatagcccatcgcattagctggtgcaaacatatctgcgctgaattacatacaaagtataccactacagactgcttacctgcggaataagccattttttggtcctttaacttcttaattaaactggcttcaactaaagattatcacttccattatggaccagttatactaactggttaataaacacccaaggtacctggttctggaattaacttaatttcaattataaattaagaagggacttctacttaattttttaagagaagcaccggtattatacggaatgacaggtccagcattgtactggcccctgaaacacttcttggcaagatatgggggatgggagacggattctgatcatctcct

SEQ ID NO: 727309 - DNA, 109 bp, Homo sapiens
  misc_feature (40)..(40): n is a, c, g, or t
  misc_feature (56)..(56): n is a, c, g, or t
  misc_feature (74)..(74): n is a, c, g, or t
attttctaagaaagattggtatgatgtgaaagcacctgcnatgttcaatataaganatattggaagacgctcgnaccaggacccaaggaaccaaattgcatctgatgtc

SEQ ID NO: 727310 - DNA, 116 bp, Homo sapiens
  misc_feature (48)..(48): n is a, c, g, or t
atatccaaacagtgtccctcaatgactctgtcccatcctgatgatcgngaatatacgcacttttgaaggaccccaaaatcggtctctccaatcagcacacagcatgggaagggccc

SEQ ID NO: 727311 - DNA, 156 bp, Homo sapiens
agtatcacagctctgggggacaggttcttcacttccttcagaattctatatctagcctcaaatatcgccaggaggccagggaatacaagtgcaatggccagcattcagtccagcacgactggcaccgggaccgtgtagggatgagggactcttggc

SEQ ID NO: 727312 - DNA, 173 bp, Homo sapiens
tggctccagccggccggatcagtcggtgacacggagggttggctttggcattcgatgcgccatttgacacggatcaactccggagcaaaaaacaaccacgccttcgcgtaccaagccgatactgattcgaatccgttcatgacgtatcgggtctttgccgtggtacgcagatg

SEQ ID NO: 727313 - DNA, 673 bp, Homo sapiens
ggaaaagctatcacaggaatcagctatcacccggaagcatcctttcatgaggaacacgatttaactcagaattacatctttaaataggagctagctttgctagctatctacagatatgagccactaaatctcatgtccaaaatagaaggttttaatcgactcctatgaacacaggttaaatagcatattttgttgttgttgtttacgtgtatgctttttcagaaagttacttaggtccatacatttatccccctatatttgaaacaaaattctgctttcttacaagccccttttcagttaatctcaggtggctatcatacttaaaattgtggagaattattttcatccataaggcctgtaggaagatgcccctacctcaaaacttattgggataaagtcaaaaaagggtcatcctcttaaaggtaaaacaggaaaatattaatcaatcctagatttggaacaataatacactgtgcaatagagtctggacatgtgtggctggtgggtggagattctgcaaagccatgagtccctggaaggtaaccagcagactaattttacagtgtgacatagcttatcacaatagcggacaggaacctgggtttaaagaggactcacttgggcagtaatcctggcctgtcgtctcaggaatatgaccttgggcaaacatact

SEQ ID NO: 727314 - DNA, 372 bp, Homo sapiens
atgttacttgatggagttggtcacatgagggaacatctgggttatgcctctttttaaagtagttttctttaggaactgtgcagcatgtggtggtggaagtgtgggagtgtaactctgcgtggtactatggacagtcaacaatatgtacttaaaagttgcgctatagcgaaacggggtgtgattatccaggtgactcgctacactatattttttgtgactgcgtgggtcctgtgaccagaaacattttcttttatagtggacttgcgtttttaaactttgtgtagccacttaaaatctgcgttatggcaacaatttgcctcaaaatccattccaagtggtgatatttgtgttccaactataaaaattacaact

SEQ ID NO: 727315 - DNA, 851 bp, Homo sapiens
  misc_feature (48)..(48): n is a, c, g, or t
  misc_feature (63)..(63): n is a, c, g, or t
  misc_feature (71)..(71): n is a, c, g, or t
  misc_feature (73)..(73): n is a, c, g, or t
  misc_feature (81)..(82): n is a, c, g, or t
  misc_feature (96)..(96): n is a, c, g, or t
  misc_feature (111)..(111): n is a, c, g, or t
  misc_feature (113)..(113): n is a, c, g, or t
  misc_feature (118)..(118): n is a, c, g, or t
  misc_feature (121)..(122): n is a, c, g, or t
  misc_feature (126)..(127): n is a, c, g, or t
  misc_feature (135)..(135): n is a, c, g, or t
  misc_feature (139)..(139): n is a, c, g, or t
  misc_feature (141)..(141): n is a, c, g, or t
  misc_feature (152)..(152): n is a, c, g, or t
  misc_feature (163)..(163): n is a, c, g, or t
  misc_feature (166)..(166): n is a, c, g, or t
  misc_feature (180)..(180): n is a, c, g, or t
  misc_feature (187)..(187): n is a, c, g, or t
  misc_feature (195)..(195): n is a, c, g, or t
  misc_feature (199)..(199): n is a, c, g, or t
  misc_feature (207)..(207): n is a, c, g, or t
  misc_feature (219)..(219): n is a, c, g, or t
  misc_feature (224)..(224): n is a, c, g, or t
  misc_feature (226)..(227): n is a, c, g, or t
  misc_feature (238)..(238): n is a, c, g, or t
  misc_feature (248)..(248): n is a, c, g, or t
  misc_feature (267)..(267): n is a, c, g, or t
  misc_feature (273)..(273): n is a, c, g, or t
  misc_feature (279)..(279): n is a, c, g, or t
  misc_feature (281)..(281): n is a, c, g, or t
  misc_feature (285)..(285): n is a, c, g, or t
  misc_feature (289)..(289): n is a, c, g, or t
  misc_feature (296)..(296): n is a, c, g, or t
  misc_feature (307)..(307): n is a, c, g, or t
  misc_feature (309)..(309): n is a, c, g, or t
  misc_feature (313)..(313): n is a, c, g, or t
  misc_feature (324)..(324): n is a, c, g, or t
  misc_feature (327)..(327): n is a, c, g, or t
  misc_feature (329)..(329): n is a, c, g, or t
  misc_feature (331)..(332): n is a, c, g, or t
  misc_feature (334)..(334): n is a, c, g, or t
  misc_feature (344)..(345): n is a, c, g, or t
  misc_feature (349)..(349): n is a, c, g, or t
  misc_feature (351)..(351): n is a, c, g, or t
  misc_feature (354)..(354): n is a, c, g, or t
  misc_feature (368)..(368): n is a, c, g, or t
  misc_feature (375)..(375): n is a, c, g, or t
  misc_feature (382)..(382): n is a, c, g, or t
  misc_feature (386)..(386): n is a, c, g, or t
  misc_feature (396)..(397): n is a, c, g, or t
  misc_feature (408)..(408): n is a, c, g, or t
  misc_feature (420)..(420): n is a, c, g, or t
  misc_feature (422)..(422): n is a, c, g, or t
  misc_feature (430)..(430): n is a, c, g, or t
  misc_feature (436)..(436): n is a, c, g, or t
  misc_feature (454)..(454): n is a, c, g, or t
  misc_feature (466)..(466): n is a, c, g, or t
  misc_feature (479)..(479): n is a, c, g, or t
  misc_feature (483)..(483): n is a, c, g, or t
  misc_feature (506)..(506): n is a, c, g, or t
  misc_feature (527)..(527): n is a, c, g, or t
  misc_feature (536)..(536): n is a, c, g, or t
  misc_feature (539)..(539): n is a, c, g, or t
  misc_feature (543)..(543): n is a, c, g, or t
  misc_feature (614)..(614): n is a, c, g, or t
  misc_feature (622)..(623): n is a, c, g, or t
  misc_feature (626)..(627): n is a, c, g, or t
  misc_feature (631)..(631): n is a, c, g, or t
  misc_feature (634)..(634): n is a, c, g, or t
  misc_feature (641)..(641): n is a, c, g, or t
  misc_feature (645)..(645): n is a, c, g, or t
  misc_feature (647)..(647): n is a, c, g, or t
  misc_feature (662)..(662): n is a, c, g, or t
  misc_feature (664)..(664): n is a, c, g, or t
  misc_feature (690)..(690): n is a, c, g, or t
  misc_feature (791)..(791): n is a, c, g, or t
  misc_feature (818)..(818): n is a, c, g, or t
ttatatttctttacgaattccatttaaaaaagagaaatctctaaaatnatcaatacgcgggtntttaatcnanttttaagnntttccccaccagcnttgcagtcacgggangnatgcntgnnttgnnctcttggnaggntnggacagcttgntcatggggttngtncggggcggcggganccttgantaggggcngggnggccttcnttcttccttgtncggtngnngtctttggggncaggggggtngggtgctcccacttgggtngggtgnggggcngnggcngtcngggtggngtttgggggtngngggnggggttggggnggngngnntntggggttggnnttgngngcnccagtggggggggngccctcnggggggngtgngcgggggggnnattcaattggngggggggggggncnttcggggntgtggnattggatgggtttgaatnatcttctttggnggtggtccatctntggnttaggggaatacaggcgtttgtnggggtgatataataattgggntttatgggnggnagtncaggagagtagagccaggcattccaatcaacttgattgagaacatcaaccttatctttaaaataggaatanaggaaatnnttnnagtnatnagtagtnatgntnttataggaaaaattntnaaaataagcttttaagaatcctaggnaaatctctggtcctccaagcagttgttcaaggtaaaaaagtaaagcaaagcccttctcatagggaactgaagaataagctacatcagggtctatatctgtnagatcaaccacaagtttggtgaaaggntgtgtctccccaaatgtctttaccgaattctgt

SEQ ID NO: 727316 - DNA, 394 bp, Homo sapiens
ggcgatcgcagctgcggcgggtcacggatgacgcccctccccctgcaacaatttttgcatccaggttttaccgaacgcctgtgtaagatggccgtcacatcactcatattcaggcaaccagactatgaccgtggccttgacctccatcaagatcagcaccgacttcgacagcggcaacattcaggtcctggatgccagcgacgcttatcagttgttgctggcaatcaaacccgacacccgcagcgatcactaccaatggttccacttcaaggccgaaggcatgcacgtggggcacacccatacctttcgcttgagcaacgcagggcgctcgtcctacaagcatgcctggagcggctacaacgccgtggcgtcctacgaccttatggggcgctga

SEQ ID NO: 727317 - DNA, 364 bp, Homo sapiens
attgtatgttgcgtgtctatttgtaattgacgacttgctcgggggacatacggttactgtgacttacggacgtacgggttaggactgacgtgggacgacgaccagcgacggaagtaagtataattatgccttatatgggttagcggtgctgatggaggtggagatttggtgctgtgaaattgtttataagagtaatagcttttctagtcaggttaaggtctaggaggagtaggggccacccagaacttcccaaaaaaagccagaggaggctccatcagcacccccatgacccccaggactgatataatcgttcaaataaaatcaaaacctttgccttgcaaattgagactccacgtacggggta

SEQ ID NO: 727318 - DNA, 102 bp, Homo sapiens
atgttcttggatgcttcctctacgttagtggaatccaaggctgaggtctcgatgaaggacaagttgttcttttctgcgaaggcgcgggcctcatcagtgggg

SEQ ID NO: 727319 - DNA, 351 bp, Homo sapiens
atgcttctcatgcctagagagcaacgtagaccaaaccatgcatccgaaggctgtgcaactgacacaggagacttggcagcgcacatatacttcatgagcgtggctagacgaatagggagcatggaccatactgtcgttggtaccacactgtactgcatcatatatactgtacatcgaggaatctctgctgggagagccagacctgagtaccgattgcccagctgtgggaactactcacaggatatgacccctatacggataggtctctggggaatgctccaggatgtaagtaaccagactttgctgaaggctgagacttaagtcttacacttgtagacaagctctgtgagc

SEQ ID NO: 727320 - DNA, 805 bp, Homo sapiens
ggccctattccggcaggcgctgctcttctgtggtatccgcgatccacttaagtgatccaggcagacttgagtgacaagactggatttgagcagcgcttctcgagagccagaactgagcccagtgagagcgcacacctggggcagtctggattcctggggtgtccccggcagcctacacacagccatgcgactacccatctgacactcctctttcctcatcctggccaatggggcccaggccctttcagcagtctgcgcccttcacagtgcccagcggctgagcactggccaaggtggccagggatgcagcgtgcatggacggccttagttcggatactggctcgctgtgacatcatggctgctgcaggacggtggtggcactcttccggcagcgtccatcccgctcctgcttcgacgaatctcaatctgatttcgactggctctgggcacctactaggacccctgagacaggccccagctggggctgcagcacctacatggagacgtatgtgtacttctatcggtcaccacaaaacacaggtcctgatgttcctacgtagtacaacgattgaggatgagcgtctttgcccgggagccatttgtgggccagttctctttggccaggaatgtacttcccagcctggtgtaggtcccgatggacatcaatcgcttaaggccagaacagaaggatgctgaaacgcccctcttacgatgctagttctggagtgtctccccaggcgactggcgagagcaaggacgtgaatcctgcttggggacttcaatgcttgcttgcgcttcactgacc

SEQ ID NO: 727321 - DNA, 263 bp, Homo sapiens
accgacataatcaccgaccaacaatgactaatcaaactaaacgtcaaaacagatgatagacatacacaacactaaaaggacgaaccatgatctctatatactagtatccttactcatttttatcgccgacaactaacctcctcggactccgtgcctcactcatttacaccaaccagccaactatctataaacctagccatggccatccccttatgagcgggcgcagtgattataggctttcgctctaagattaaaaatgccct

SEQ ID NO: 727322 - DNA, 412 bp, Homo sapiens
  misc_feature (156)..(156): n is a, c, g, or t
tgatgtggagtcttggttgtgctctgtgtgagttctgtcaggctctgatctggcatcttcttcttagaagcaggcttattactggagccttagaaggcagtttagccctaggactagtaacggccctgtgaacaatggtctgctgcatctgatggncttcagggccccttcagtttccatttcctcccttctgttcctgcaggcttctttctgttcccgtccgtctttcccctcctgcttccagtctctagagagtcaaggcacagtgatgactttcctgggggttgtttctgggacctcctgttgaggtggcaacctaagactcctccagcaaagtcaccaggggaacttcctcacagacagagtcaccccggggagcttcctcacagacagagtcacccaggggagcttc

SEQ ID NO: 727323 - DNA, 193 bp, Homo sapiens
  misc_feature (53)..(53): n is a, c, g, or t
  misc_feature (164)..(165): n is a, c, g, or t
ctccttacgctggtcatttacatgtacactacatagcaagtgatactcatgtngcatgttctttaaattagtgatttgtgtcttaagtctttaacttccaataattcatcatgtatgtaaccttccatgtctgcttctgataaatgggagatgtaggttcactnngccacttcaggagatatactctgctcac

SEQ ID NO: 727324 - DNA, 127 bp, Homo sapiens
attaaaaaataggaatataatctgtccacatcaaagaatgggaagtcgaagtgtacacaaaaatgtggtcctgacattaatatttctacctgataactattaagagtagacaaacttttaaagtgca

SEQ ID NO: 727325 - DNA, 1359 bp, Homo sapiens
  misc_feature (1078)..(1078): n is a, c, g, or t
tctcaatgttaccatatacccgtggtgtttccctacatcaccccttcgttttttttaccacgttcctccgcacgctttttctgtggtcttgtttttttttgtgtctcaaagttttgatacctctttgttggtataaaaacagttttgcacccacccatttgttatttgctttttaaataagttgtgtttctctaagagtgtctccagggtctcctttttttaagtgggggtgatactccgtctccctcctctggtttattattatataattgtggtgtttcacacgggggaataataattgtatttcatggatagttcctcccacaggctgttgtgttcccggtgtaaatggaattgggagtaaatataaatcggggcccgtgtcgtttgcctcccccctgtgttttctcctctttatgttggaagggtggatataatttgtgaacattgtcaaacatttttgtgtgcgcccacagcggcctctcttgtgtgactttgtcttgtagtgtcctcctcacacaggtgtctcccaaaggtgataccccccctttttctgtctttcacaccctggtctccccatcggggtgtatcccctcttttgtttttttgtgcaatgtttattttattaagggcgcccgcacgttatgttctcccacttggatggtagcaccccaccactctcttctcttgtggggcacacgcgtgcccactaagtgtgtttctgttgggagcgcacctctttaaataaaaggacccggcttggggtgtccccccgttggtgaactctcacagatatttttccgctcttcccctctataagaatctcccatctctcaggagcctctctcatatgagagtctcgcccaatattttcactccacactggagaatgtgtttccacgccgcaccttgtgaccacacacctgagtaggataagaatatgtccttctgctcccagctgtgtcaatcccctttttgggagaacccaccacaacatatgccacgcgctccacttttctgtgagattcttgtggtttttccgaaggccacgcgagatctttcctctttcccctgagtnccacgaattggcccgcgtgtgacctatacgagttcaataacaccctggtccgagaaactggagattcctctgcactccgacggaggacacccacgaccctggtttcgaagagtacttttcctcgggagagggggccttccacgcaatgtgggccaaagccttccactcccgggccaagatctttccacacagtgaaacatcttcttgccactcaccctaagctgcctgcacctgccccttcagggagattggggtcatttaaggacaactgaacattgata

SEQ ID NO: 727326 - DNA, 938 bp, Homo sapiens
atacgattgttcccgctcaccgtacgtgcggcgggtggagactcttggaccagcggtcacctgttgtacccgtttccaggcctttgggggctgcgccccggggacggtttcatactacaagtgcgcgtgcgccccccctttctcccgggaaggtctgccagacttcagcgactcccccctttttggaagatgggcgccccccgttttacatgacggccagggcaagcaccatcttctccaaaggggcacacaacttctgggcccccacttttaaatgccggcgcctttgcgagcagcacgcgcagcgcctcgtctatctgctgcgccgcaaccacggtgtgcaggcacccagaaagggggcccgtccccctctaaagaaaccagattgggctgccgccacccggggcagccgtacaaaaggggcagaaagctccgtgccaacctgagccaaacccccggtgtgagtcccccgcgaagaacaaatacctgttccgccgggggacacgcctcaagaaataactcggggtggcctcgccactgatgccccccaactgagtaacaatagcacaagggaaaaaggacggccccccccgcataagcctgggggaggcagggacccacgcacacaaacggacacatcgcgcgcaaaaaaaacgagtagtcctgcagattcagcagcacaagaagggagcccctcgcccagcagacaatgcacacgggtgtccttgttctagaaaggcgcatacagaggaacggcgcggtccccatagtgcgcgcccacgcatacaccacgccacctctgggggagacggagggccccgaggagccaccttgcaaccccgggaggccaaaggtatcgcccacgagacgctcggagcggggctgcgcaacgagcacccgccgggggccccaaaggcgaaaccccgttctaaaaaaca

SEQ ID NO: 727327 - DNA, 378 bp, Homo sapiens
tcaggtcaggcgcacatacacgcaggcactgccacactcacacacacacactacatcacacagactccagcaacatccttgtaacattctggaagtcaagaaaaggcacagcgtcgtagtctgccccgatagaaggaattacagataaacagccacgaggttgggccagagaatttccaaagagagctatctacaaactgggggttgatttcccagttcctggatctcagcagtcaacacacgagaaggatttttttctgaagctgccacctccaattctgaaataatccatgtttcagactggggccgggacggtggcaaacctgcagaccctggcagcaagatgagggcaaggaagggaaaggtcagctgggcaca

SEQ ID NO: 727328 - DNA, 281 bp, Homo sapiens
  misc_feature (59)..(59): n is a, c, g, or t
  misc_feature (66)..(66): n is a, c, g, or t
aatctaaacaacgcggagcagctgtgcagataccaggtcctgtactgctgatccggagnaccaagnatgagatcatcaccaccacggttcctgaggacatcatgtccaacctgaggcaatgacctccttgctgaagctcctgcagcatcggtaatccccgggtgattggcagaggaggggtcttcggaggtgggtgagcggcaggtggttgggaggcctccttcaacagctgggaggaaagcctcaattttattagccgaatgggagggttgaaaaaggac

SEQ ID NO: 727329 - DNA, 203 bp, Homo sapiens
atcccccctctgtatgccttgtcggacctttcagtatgctcatatgtgctcacgagggaattcaagttctccatgggatgcagtaggcataatgttgtacatgatgctaattcttttctatctacacattccatatccaactgctttgtctgggcctggagtctgtttgatgaatgaggaaatcttgccatgacctgactgag

SEQ ID NO: 727330 - DNA, 218 bp, Homo sapiens
  misc_feature (130)..(130): n is a, c, g, or t
  misc_feature (218)..(218): n is a, c, g, or t
gatagactcgagctgagtaccctcgataaggccaactcatacacctcctatgaaaaaacttcctacccattctcctagtttcttgttgtcatcacaccttaatataggttgatttgtgtgttcagcacanaagggcctccaccaagcttgacatacatatggctcatcacacgttggatgcacagcacacaacagatgggcttggcccgttatcgagn

SEQ ID NO: 727331 - DNA, 139 bp, Homo sapiens
tattgtaaatttccttaagtatatctaggatactaacctatattgtaattctattctagtagtcactgtccccaaaacaatgttcataactttgttcttataaagatgagaaataaaaaacattgaattttaaaaaaaa

SEQ ID NO: 727332 - DNA, 214 bp, Homo sapiens
tcaagtcaaccaaatacatcctcttaaggaggttttaattagtaaaatggcttaacagacaagtctttatatatgttcttacggctactgtgcacagatggtgactttaaaagaacatggaatgaatggcaaacgtattgccagctgttacgttctgaaaattactgctgttataaaagaggtgggctgttttgttttgctatgttttgcttga

SEQ ID NO: 727333 - DNA, 224 bp, Homo sapiens
  misc_feature (37)..(37): n is a, c, g, or t
  misc_feature (42)..(42): n is a, c, g, or t
tcagctggtaccatttcagatctatctctgccttcangatantggtgatattccttagatggtccttcggcgtgtgcatgcacacgccgaggcaccaaacggtgacacatatcgcgatggacgaagttgtgcaggtcttgatggcgaagttgttgcaagtcccagtggacgaagttgttgcgcaacaacttcgtccatcgtgatttgcggcgtatggatgttcg

SEQ ID NO: 727334 - DNA, 131 bp, Homo sapiens
gctcgcagctgctgagcaacaccccctgcttcagaagttctacctggtttcctgtaggctgaaatgtcatagctctaaatatcccattttcatagttcaacaagtcagcagttggtaaatgaaaaaaatcc

SEQ ID NO: 727335 - DNA, 1381 bp, Homo sapiens
  misc_feature (766)..(766): n is a, c, g, or t
gcacaggcatccaggagatgcgagagggtctgcggagcgaaggcagaacagcaagagcacttgaagtcacaacaagtgcagaggagaagaggttccgggcctaaggatgggctagctagttgaggatcgacatatccacgaagacgtgccatgaatgccgttcttctagatctggtcgatgagcaaagtccaaagagcgtgacctatccactggaggaaccttggtagttgactgacgcgcgtgtacacggacgttcggtcgtagcacctgatctgacacgcgacgacggataggcgcgcggcatggactcgtggtctgggagtgacgcctactatggacttgtcctttgggcgcgtagttgcccccgctatgtgagccaagagttgcctcaccttgaggtggtgcctcgtacgccccactagtcgggactggaaatgtcgtccctagtgaacaagtccgcattgagttgggaaagcgcaaactcaacaccaactgcgggtactgctcacgaacacgcctagacataacctcacgcgtgggggcgttgtagaacttgcgaggcacactgctcgctttccacgaaggcttgggtatccccatttgagggttatccacgtggagcattgggatgggccgctgggtgtgcacagaggaccccacccccatggtttgtgcatgttgaccgtagcacctgcgtgcaacaagcggccggggatacctagctgcgcgtggaacacgggtaggttcatgggaataccccaggantgggcttgggaatgaataactgtgtcacctacccacaaaccgcacactggaatgcggacaccgagacagggtcggcaatttgggcactcctcggtgaacgacccccctttgtggggggggggaggaaaagcgtgtagtggaacaacgcaaattcctttgggaagttggaaaggggcaaaagttaccgctttaacagagagagcgcacatgccacgaggccaaaggacgggatcccgacaaaacggtcggagttggccaaggagtcggggaccaggcgacagaatttcgcaccaagcgcatggcggttggtaatataaagaacggcacattggcactaggaacaaccgtatggagaccactttaaatacacaatccttccccatttgtggcacagagcgccgttcttaggcactaccagagagcaggcccatttgagcttggggcaacttgtggcgaagaaaaccccccacttgaaagcatcaaattaggcagagccctcggacagaggaaaacgaaacagacaacgcaacttatcgcagcgcacaagtgcgtcgaactgggagcaccgacggagaccagcgttgaagaacacaacacgttcgagcggctccagta

SEQ ID NO: 727336 - DNA, 584 bp, Homo sapiens
  misc_feature (217)..(217): n is a, c, g, or t
  misc_feature (275)..(275): n is a, c, g, or t
  misc_feature (376)..(376): n is a, c, g, or t
  misc_feature (428)..(428): n is a, c, g, or t
  misc_feature (459)..(459): n is a, c, g, or t
gatctgtagggaactctagaaagaaattcttattttccctctttcccgcctatcttatgcccgtttctaatacaggtgcacaatgcctgcagtgtctttgcatagtaagagtgactttattccatttcccaacaaattcctcatctccctctgagaccacctccgcctggaccttgttgtccatatcactattaacattttggtcaaagccattcancaagtctctaggaagttccaaactttcccacattttcctatcctcttctgagccttcnaaaccgctccagcctctccctgttacccatttccgaagttgcttccacattttcgggtatctctacagcagcaccccactctactggtatcaacttattgnattagtctgttctcacaccgcaaataaagacatacctgagactgggtaattnataaaggaaagaggttgaattgactcacagntctgcatggctggggaggcctcacaatcgtggtggacggcaaggaggtgcaaaagcatgtctcacatagtggcaggcaggagagagcatgtgcaggggagctcccatttataaaaccatcagatc

SEQ ID NO: 727337 - DNA, 673 bp, Homo sapiens
  misc_feature (21)..(21): n is a, c, g, or t
  misc_feature (23)..(23): n is a, c, g, or t
  misc_feature (30)..(30): n is a, c, g, or t
  misc_feature (48)..(48): n is a, c, g, or t
caacgaggtgcctacaatgcntntgtcaanaacacaccacgtgttatnttaaatactgaacggcagacttacgtctagtcagctgtgcaatcgacagattctgggtctcagagtgggacaacctatgccactttcttttttgaatgattctctgtcaccggctgagtgatgtgcatcttggtcatgaactcacttctggttcagcgatctgctcgactctcaagtactggattacaacaccaccaccatgcctggctaattgtattagaagacgggttcccatgtggccaggtgtctcaatgttgacctcaggtgatcccccgccttggcctcccaaagtgctgggattacaggcgcgagccaccgcgcccagcctacaccacttttagtaccaacactcttgggtgatttcatggaccctaaagcagacctgacactgatccagatttgcagtccatttttaaggacacctgtctttatttcctcaaagtcaagcagctttctctggaaaatgaatgctaattagtgtgaaccaaaagagtaagtacgagtctgaagtttttaaaggagaaagcttattatggaaagtcctgttcctcccctccgcaaggaaaggtcccatataatgaaccaaataagtccctccctccagcaagaagtaaactctgggata

SEQ ID NO: 727338 - DNA, 624 bp, Homo sapiens
  misc_feature (6)..(6): n is a, c, g, or t
  misc_feature (91)..(91): n is a, c, g, or t
  misc_feature (299)..(299): n is a, c, g, or t
  misc_feature (538)..(538): n is a, c, g, or t
  misc_feature (559)..(560): n is a, c, g, or t
  misc_feature (620)..(620): n is a, c, g, or t
ggggtngaacccctgaccctgtgatctccccaccctggcctcccaaaaattagccgagtgtggtggtccgcacctataatcccaggtattngggaggccgaggtgggagaattgaccgagcccaggcatttgaggctgcagtgagctgtgatcgcaccactacactccagcctgagcaacagagtgagatcctgtctcaaaaataaataaataaaataaaataggcctggcacagtggctcatgcctgtaatcccagcactttgggaggcccaggcaggcagatcacttaaggtcaggngttcaagaccagcctggcaaacacggcgaagtcctgtctctgccaaaaatagaaaaactacccatgaatggtggcacaggcccataatcccagccactcgggaggctgaggcataagaatcgcttgagcctgggagtcggaggttgcagtgaaccgagattgcaccactgcactgcgcctgggtgacagagcaaagactctgtctcaaaaaataaataaatgaataaatgaataaatanataaaaacaggttcatggatnnatggatggaaaaacagatggtttagcacatcagtagatagaaggatagatggatggatantggg

SEQ ID NO: 727339 - DNA, 163 bp, Homo sapiens
gtgaggacgcagtccctgtaggaagagtggcgatgaggacgatggagagacctgtacaaggcgcatctcggatctgctcctctaacaaacgacattgcctgtgagggaagagttctccgagttctagaagaggcagggagagagggcggccgcaaggaaactc

SEQ ID NO: 727340 - DNA, 107 bp, Homo sapiens
gacaaatcaggctcccccacaactggggtgctggtgctggtctgcttcagcccatgaggactcaaatgatcaaaagcagtttgtggaaggccagaaccgtcaaggga

SEQ ID NO: 727341 - DNA, 519 bp, Homo sapiens
cgaatagctgtctgccttgggaacttggtgccaggtgagccgtgatgttcagtgccagtgcctgcacatgcgagcacagcgtcctagagatctatcttggaacacactccgcttgcgcagactccacaccgcagagccaggaggggagggacgagtatgtaacgctgaaggtagcaagtccaggggtccatatacacactgccccgcctcatccaaggcactaactagtgtgtgtgtgtgtgtgtgtgtgtgtgtgtgtgtgtgtgtgtgtgagagagagagagagagagagagagtgtgtgtgtataggtgtgtgtacagatgggaaggggaatattagacgtgtgtggattgacttggccaaagccaacattaaacagatgagaaagctgagggtcacacaaggaagggtcttacccaggctcacacaacagctgagtgagagccagggctagaactcaagcttgcgtccctaacccatccacaaccccagagctcttctctgctgaacactcatct

SEQ ID NO: 727342 - DNA, 207 bp, Homo sapiens
cccgacggaaacattgattgtctggacaggcatggcaccaacgagaaggcaaaacgaacttttacaacattggggtgagcaaggttataaagtcatctttcatgccccctaatttcacctttatcccgccccttagacagaatgttataatctgaacccacaacagcgtttgtaccggagctggtccgttgcaaaatgctcaccggg

SEQ ID NO: 727343 - DNA, 243 bp, Homo sapiens
cacatgtttgcaaacggctgcccgtccgtgctggtatacccgttggctcccccccctgtgcagtgtgcattctcttttcaccacatcctggaccctacggggtctctcgttaggttcagtgctatcctggaatgttgactttatatcctacagacaggtcaagaatatttgctttaagatgaggccacagatctagagtaattatatatcgagccggtatggctacatgatcgggtacccgag

SEQ ID NO: 727344 - DNA, 130 bp, Homo sapiens
  misc_feature (112)..(112): n is a, c, g, or t
cggtggaacgcagacagtgaggctccgattacgtggttcagacttggtactctggctacacagaggagagagggcccagcagtgttgtggacactgggcgtgcaggggatcnctctagtagtcgcacctg

SEQ ID NO: 727345 - DNA, 446 bp, Homo sapiens
aacagcctttgctcttgatacgtttgcttgcgacatgacccagttctaatgtccttaacttcccacacccggtctcatcaacctcctcttcttcactctcctcttggacggttggagtctgagtgttttcctgaatgtttgaaacagcttcaccttgaactttgaatttctcagcagctgctaactgtgcttgctgagacaaatcttcaatcttggcttccccaaacactatgtaggtgtctgaagctgggctcttgtagacatcgggttttgtgatgacaaagaggatatttttagattttcggatagtgactctcgtaacccctgtaacctgtcgaagacccagtttggacatagccttccttgccttcttctcacttcgactctgcttggctttactaacaggttcttcatcgatctctgctgcggctgccagctgggcttgc

SEQ ID NO: 727346 - DNA, 209 bp, Homo sapiens
tttatctattaggaggtgtttgtagaaccagcagattcctgagactatctccaagcagttcagcttgaaaagtaggtctagatgtccaaaagccaactgttctgtgtctcatgggagaaacgcttccattacagctgggaggacagaagtgagctgtaaggaactgctccaagcggggtgaggtgccaggcggcacctccttaatataa

SEQ ID NO: 727347 - DNA, 112 bp, Homo sapiens
tggtcggatccagtgtttcaaaattgacaccaaagaatttgtgcgcgagattaagcacccatcgtttggaagaaatgtgtttgcaatttcatacataccaggtttgctcttt

SEQ ID NO: 727348 - DNA, 362 bp, Homo sapiens
agatccctgtttagcacgctggagtaggcatgaccactgcggtagggccatcaccccaagaactgctaatccattcacctctcccagcgtccccacggccacctatgaagatattatccctgttttacacatgtataaactgaagctgagagatggggagtaacttgatcacaaagcttgtaagtgtccactgccttatgttgaaagagtaaacctcagagcctggggcagcccctggatccggtaaactctgtgcaaggaacagaggccggcatcccagtcagccctcatccatgggaccctgaggccttagacacggagctctccagggacttggggtgtgtgtgtccacatccaccctc

SEQ ID NO: 727349 - DNA, 819 bp, Homo sapiens
  misc_feature (512)..(512): n is a, c, g, or t
  misc_feature (519)..(519): n is a, c, g, or t
  misc_feature (526)..(527): n is a, c, g, or t
gtctccacgaggctgccggcttaggaccccagctccgacgagtgcccgccggcccttgcagctgctggaagacccatttatctcatgcttcttgtttctttggggacctgcaggggaaggaagcaggtgacgggttggtgatatcccacactataagactctcccctttcctccctgaggtccagccgtcagcccctggcaggggggtcttggaagccagaggtttggctcagggcaaggggaaagggctgccaaggatccccgggggctgccggaaggtcggtctcactgacatcatggcttgagcccagcatcgcctggtcccacagatgtcgccctcgtggtcgcctgtgtcttctcaccatcgtgtggcctgattctccccacccagaggacagacgtggcaaagataccacgtccagttcttcagcagactcaactatcatggacattcaggtcccgacacgagccccagatgcagtctacacagaactccagcccacctctccaancccaacntgcctgnngatgaaacaccacaagcccagacccagaacccagcaacttgaaagggaaccggattgggccctcctagttgacaggattccaagagacaacacaaagagcaccaaaagcaagttcatcccactgatggcaccagaggtctctgagagaccaatcccaagcacaagacgtcagacaagaaccccagacttaagcatctggttttccatgaggatggccttcttctttggtggaacaccctccggaaggggtgtggcgagcgggtgtataaaggtttagtccccaggggagggg

SEQ ID NO: 727350 - DNA, 113 bp, Homo sapiens
ttgtgtattttctttcagttcctctgatccacatagttattaggaggtggagatatgtttggctacatttttcaagggtttgatgacagggtttgatgacagggtttcgatga

SEQ ID NO: 727351 - DNA, 789 bp, Homo sapiens
ggggctaaatgatgatcttgaaaagggccctcactcgtgagccttcgccatgtgccagtcactatgctgagcaccttgcaggagcttcaggtccaggccttgggggtcagcagggcaagcctgagccctgtggtgctgtgggaagacttggttcaagtgacactgagcctgggacaaagtgcggttgatggctcttgttttccctggcccttcagattgcctttgggaaaccacccaacctcactcccctccacccacgtgcattgcatggggctaattctaccccaggccctgactccaagtatgatcacctgatccagacctggcaatcagcctgttctgtcccccaggccacagtgattgtttagggatgatcatgtgacctacagaaagcttcaggatagtggcttccttgggtaggggaggctgatggtcagacagggaagaagcccacagacagatgcaagtgctggttaatgttctgattcttgtgctggatgaccaggtcttgggtgtttatttatataaataaacagaggagaaccgttttatgaacctatggcaagaggatggcgtgaataaagggatccatgattaatagaattcagagacaaagggagagaaaaacaaagaaaaaaaaccttctggaaacttgttggagctcttggaaaagaaaagctgtgagtggatgttcagagggttacctagggctcatgcatgggggattcaaaggtttcgaactggatcaaagagagaatggagcctgcgtgcagagaaaccttgtgcatt

SEQ ID NO: 727352 - DNA, 485 bp, Homo sapiens
  misc_feature (63)..(63): n is a, c, g, or t
cgcggctcttgagccggctgccacaagggggcgcgccagcggtgtccgggagcctagcggcgngtgtgcagcggccagtgcacctgctccggccctcgccgcggtctctgccaggaccccgacgcccagcctgaccctgccattcagcggggctgcggctccaaggcctgcgacagcagccccacctggcattcagcgcgctcccgggggcagaggtcgcggtgtcctcacgctgtggtgccggcctacaacccccacgccgggctcgggcccggcggaggagggcgatgctccccgggtaggacaaaccggtcacctgggctgcgagggcggcttaggggcagaagcggcggtccagggccgcctggcgcagcagcctgtcccagccgcggtccctgcagtccctccctggcggctgcgcagccgtcccacgacaggggccataaactctccagagcggaaagccgcaccctggtggcccggcc

SEQ ID NO: 727353 - DNA, 172 bp, Homo sapiens
agaaagtcacgtgtcaggaaattgtatcagatgcatcacatcttacaagagactctcaaatcatacgatctcatttagtctcttatattaaatttcctctactgacatactagctaaattgcattttttcctataacaattttttctcttatttttgtttatattttttgag

SEQ ID NO: 727354 - DNA, 338 bp, Homo sapiens
gatgcgtccgataataactaatatggcggataaagggtgtaagtgtgccttgtggtacgaagtgggctaaggcatttctcaatcttagagcgataagcctataatcactgcacccgctcataagtgggatgatcatggctaggtatatatatccttgggtggctagtgtaacatgagtaaggcaggcagtccgcaggcaggttcagttgtggccaataaaaaatgattcaaggatactagatataagcagcatcaggttcgtccgtttagtgtctgtgtcatggttaatcatttgtatttatgggtccgagacgagaccgggataccggaagctcgaa

SEQ ID NO: 727355 - DNA, 743 bp, Homo sapiens
  misc_feature (102)..(102): n is a, c, g, or t
  misc_feature (104)..(104): n is a, c, g, or t
  misc_feature (106)..(107): n is a, c, g, or t
  misc_feature (113)..(113): n is a, c, g, or t
  misc_feature (117)..(117): n is a, c, g, or t
  misc_feature (125)..(125): n is a, c, g, or t
  misc_feature (127)..(127): n is a, c, g, or t
  misc_feature (204)..(204): n is a, c, g, or t
  misc_feature (212)..(212): n is a, c, g, or t
gggacatcaacgtcacggatcaggccattgcggggctgaacggcatgcagctgggggataagaagctgctggtccagagggcgagtgtggagcaagaatgcncncnntgagcnccancaatcatnancgcctgtaccctgcaagtgcgggcttgatgagctcccaggtgcagatggcggcacccgactgaggtcctgtgcctcntgaacatngtgctgcctgaggagctgctggacgacgaggagtatgaggagatcgtggaggatgtgcgggacgagtgcggcagtccgggcttgtcacgtccatcagagatcccccggacttgtgtgacggcagtcgatgtgcccggttgcggaaagatcttggtggacgttcacctctgtgtaatgacgtgcagaaagccatgcaggggctgatcgggccgaaagttcgcaagagagtggttgtcactgaagtactgtgaccccgagctcttatcaccgccgggacttctggtagacggcggctggcgggacgggtgggggccgaggttggctggtgggcttctccccagtcccggggctcccggtatatccctcatctgaaggacagatgcgtccaggggaagtgagaagcacgagagacccgacgacgggcggtgaataaagtgccatgggccagcagttaaggctgaggggcgggagagggcgggtggggggtttgaggcgtggacaggacatggcgaagtggacccaggcccacag

SEQ ID NO: 727356 - DNA, 126 bp, Homo sapiens
cctacatctcgcgagggtcagtgcgccattcgcgtcgctggcgcgggaggcgctttcggacatgttgtgtgatagcgatcacatgaacgatggaagccaaacgaaacggaatgatgtcgacaggca

SEQ ID NO: 727357 - DNA, 1046 bp, Homo sapiens
gcaacagcgagcgtgccggtcgctagtcgcgggctccctgagtgcagcactgccagtggcagcatgtgagacctaaactgactgtgtgtggtctgtgagtcagatgtcgcagtgggatgtccctgtgacctggagcactgatgcctgagctgggagagcgcctgtctgcacgcccgtcgccaccctgctgtacccggcgcagccagagccaccagcgcagcgctgccatggatgcccatgcagacaagacagctgacgggtcgcctcatgctggccgtgggacggcgcagtgcttggctccctgcagttttggctacaacactggagtcatcaatgccccccagaaggtgatcgacggagttctacaaccagacatgggtccaccgctatggggagagcatcctgcccaccactgctcacacacgctctggtccctctcagtggccatcttttctgttgggggcatgattggctccttctctgtgggccttttcgttaaccgctttggccggcggaattcaatgctgctgctgaacctgctggccttcgtgtccgccgtgctcatgggcttctcgaaactgggcaagtcctttgagatgctgatcctgggccgcttcatcatcggtgtgtactgcggcctgaccacaggcttcgtgcccatgtatgtgggtgaacgtgtacccacagccctacgtgggagccatgggaaccatgcacagcatggcatagcacgtcggatcatcatcgccaggatgtcggctggatcataatgggcaacatggactggtggccctgatggtgacatcatttccatccggcccgctgcagtgatgtgatgccctctgccgaagagtccgatctgatcatcacctggaagagggtgaaccgggccacatgttgataaaacatggcagtacatgcgctacctcctagcaataagacaccgccaaaaagcaaacgcataggagccgcccgacgaccactcccagcatcaacacacctctacgaaaccaccaacaggacctcccccgcaaacacaacaacgt

SEQ ID NO: 727358 - DNA, 331 bp, Homo sapiens
ctgcggaagatccatctcaaatcaaacaaacatacaaaacaaagagcccactacgtattcacattatggaagactccagagaggatcaaaagaatggattcgatctccttgtagcaaaaagatctgcttgtagcaaaaagaacagatgtcaaaactaaaatctggagtgaaaagagcaagcaacattatgtctgaatacatttctatacagtgtattgagaaagcctgacaggaaaaataattcatttcttccctgagacatttattcactgtctttttcttttcttgttttaaggcaaatcattgactacactgttgttaatttcagctg

SEQ ID NO: 727359 - DNA, 198 bp, Homo sapiens
aagctccaacaagatagctgcagccccccagagagagctctgcacgtcaccaagtaccaggcccagcctcaggcctcaactccgccagctctcccggtctggatctgcactctaacactcgactctgctgctcatgggaagaacagaattgctcctgcatgcaacttatttcaataaaactgtcttgttcgggagctt

SEQ ID NO: 727360 - DNA, 1386 bp, Homo sapiens
gctgctgctggctggccttcatcatggagccctcaggatcgccgttcccacccgcccatgaccgagggacccatgaacacaccagatcatgacacagagcctggagctcctacacaggacagcgggttgcttcacccacagccgatcatgatactacggccacatacagtaacgccacgctgcaaccagccgtgatggcagccccctggatggcagccagtgcacacccagggtggcgctggcctgccctacaacatgcccctggacctacctctccacatgtgaggcgtgagacttcatttatcacactgcatcacccatagagatgtacagcatggctacactcatttcaggggagagctaccggagatgggcacgccacctctggcatccacgaccatcaccgtcttctgctccatgggactacaaggtgacgcagaacgcggagactcccgactccagccaggacaatattcgcacccggctgaaggaagctagaatggaccagagatggacacgcatgacgagaacagcacacaaggagcgtgatgcagcggacggacatgcgagcagcgcggcatagatgacataggaggctagatagctagcgcatccatagaagctacatggggaacccgccacatgcggacttgcacatgccctggatgagaccgcacacaaggatccatttcctacggcacgcatcaaaatgaaaaccaaacaagataccaggaaggaattgatagaaacaacgcggaaggagacatgcatgcctgtcctagagatcccatgtcaccacactcagctgacgattgaggaacagcatacattcaaaacactagtcgcggagacacagcctaaccaattggtgtcaccggagaataccaagaggacagacccactgaagaagaccccgcacatgacgtcaccaaggaataaataggaagggataataacagagagatgaacaaatcattcaagcgataaacagaataattcctaaagcaaggacaatacatgaggagaacatgaggcaaaccgacgtgatgcgcagcaacagagacaagcacatctatacaggaccagtactacacagcactcaacacgaacaaaacgcgcaaaccgacaccagaatacagaatacacactccatatgccagaacacacaccactcagaacccagctcacacactcctccaaaaaaacaccaaccaagcacacccccaaccacacccacaacagagccaacaccaccacactcacaaccacactcatacactcccaccccgcacaactctcaacttatctaacccctccccaccaccatacaacaaacaaacaacctctccacctacaccagacgtaaatccaacaccaccaacacag

SEQ ID NO: 727361 - DNA, 1212 bp, Homo sapiens
  misc_feature (649)..(649): n is a, c, g, or t
  misc_feature (830)..(830): n is a, c, g, or t
  misc_feature (871)..(871): n is a, c, g, or t
caagttttcaccgcgagagttatctttttgccgggtgtcccctgtgatctttggattaaccttcgttcctgggggaaaaaaatggggctgtcaaaatttccaaggaaagtcttgtctgttccaaggggtgtttttcgttctgcgggcataacatgtctctgggggcccacgcccacttaattggcccccctcctcatttgggaatcctctcctggtggttcaaacattgcttcacgggggcgatttttctccgggggaacgccatccctactggcgcctctaatttttaggccccccctcggcgttttggccccccgctggtaaatttggtgattttcccccacaacaggcgttctccccaatggcccatgccgccaagtgttttgtcttggaggccttgtatagagggacacaagtagttggatttccccccgtttctcgcgttaaaaaaagccttgggtatagatcggggcccctcctagatgttctctggatagttcctcggtgcgatattctctccccactgtgcgtgtggcataaatagggtttgttcctcgggtcacagactcccactagtgtgtttttcgggaggagtctttcctcccccgagcgctaatcccacacctcttttggggttctccctctttgncttgcttttcgctgagatatatgaggagcacgcagccacgctttgtacgcgctggggtgctacacatccaaaagctcactctggacacacacgagaaggtctgtgctgtgagacactgtgccccaagagattcacacacaagagttctgggctccacgacacaaggctccacgagaagcgnctataaaatggagactattgtagtgcccccttatgtatacnctcgcgcacacccacacctctctctaaatccacactggtgggagacagaaccggtgtcttcacgagaactcgtttgttcttcacactatggccactcttaagttcttatagtatgttaaaagaactggttataatgagttaccgacatgcactcgtgaaacctctcacgaaaggaaataggagaaatgttttcgtggagccacctcttgcgtttttttttttgccctgtggcaccttttaaagttatattagttttttaaacccgtactttttaatgggaaccacttgaccccaaatttgtcccccgaattttgagaccccctttaaaaagtttaatgaga

SEQ ID NO: 727362 - DNA, 269 bp, Homo sapiens
aaataagggtagagtagagaggagccagtaaatgagggcgtgggggtgctggctagggaggggcagctgggaagtgcaggtggaggtcatgcccccaggacctcactgtcacctgcctcactcccctcctgcccgcagccccgatacttttgggaggacgggagcccacagccagtgggggccagcgagggtcctgagggggggtcagacacgcaggctgaccccagatccttcacttgacccgggatttcagcatactcagctagctc

SEQ ID NO: 727363 - DNA, 123 bp, Homo sapiens
ctcatctattaactggaagattggcactgaagcatataatctactgtcatcgcccatcctccctttctgtgcattatgcggtacaaggccggccgcctggctggggcctggatacgctaggag

SEQ ID NO: 727364 - DNA, 1472 bp, Homo sapiens
  misc_feature (1366)..(1366): n is a, c, g, or t
  misc_feature (1472)..(1472): n is a, c, g, or t
agagagagagagagagagagagagagagagaaagatggaggagaagaacttggatctcccctggggtagatggaaactgcaaaaacccaaagcctccaaaactaaacgagggtccactcataacacccctctcctctccctataagaagatgggagtgtctctcaaagatgagaagggaacaaactctctccttgggaatccactatttttgtggggggaagtggaaagagctcgtgtctcctctaatctacaatgctggctgttggcggaggggagaaatcaacgtgctggagagcaactcttcttctgctggcaccacgctggtaggtggtgagggttgatcaagacaccaaagcagagcacgcagccggggagtacactcaaggtggaaagaaacgttgtgttgctgttgaagaagatcatctcaagaacacacgagagggcactctcagaggagtcttcttgttggggtgctgctcgtcacaatcatatattggtccgctgggtggtggatgtgttgatgatgcgaccactactatctctcacactattagtagtcagtcagtagtcgtgctcgttttactcacacgtcgaatatttatacaacagtctcgagatgttgctcccgttgctcccctgatggtgtgttggtagacactaactatgctactagctgtccaagcaggtattaggggtatgggtgtggtgggacagtgccagccagggggaggggacaacacaacaccaacgctcatgtggtgacgagagtgctctactcgtgggtgtcgtggcaccgttgcactctgagtgaccctggggtgccggacagaccccttctcttctacaagagaccccagcagggagtgggcagggtctgcaaggggcattcggcccctggtcctggacttgtgccagaaaggcctggagccttggggtaagagggcaggtaagagaatatgctggtctccacatcatggcgaaggacacatctgcacaaacaccggaccaggtgtcatcgacctccgtggtgctcttcccccaagggttgtgtgtacaagaacaacagggccagctgtaccccgagggaggcgaccggagaccacttacaattagaccccacacttaacgcgtcattgagggggaatacagctcaggataccagcaattctacaaaaaccgggagacactgatataacgcatgtgtggagagcaggggaagaaagctggcatggacgacacgcaagcagaacctaggagccaccgagaggagtccgcgtgacgcacactctaagatgctagcgagcagagacgatccatcaggagagagtatggacgtagacagacgcgtcgtgaagcagaagacgnagctttcgtcacttcccacgtctcttgtactctctctgctctcttcgcctaagacgatgctacagtgaggagacagagcaacagacaagaacagcaaacagaaggn

SEQ ID NO: 727365 - DNA, 253 bp, Homo sapiens
tcggaacgaggtaggactataagcaggctcttggtgcattacatggaagggctgaaggtggccgactacgctgcctctgaccgatgtgtggccctgccccggggagctgctgtgcaagcttgaatgtcaagtagggccgccttgtatacttcacgcagtgggcttgtattgagaatggcgcgtggagtgacagcagagaatggctgcttgggccgtggacatgtgaaactgtatccggggctgttgtaccggc

SEQ ID NO: 727366 - DNA, 150 bp, Homo sapiens
cagaatattggtgcactgtttgaagtaaagaaactggagggttgccaatactatgtagcaacgttgaaccctgagcaactagttctttctagggtaggcattattcttagcaacagcatagggcaaggggccacagacagacacccacca

SEQ ID NO: 727367 - DNA, 991 bp, Homo sapiens
  misc_feature (257)..(257): n is a, c, g, or t
gcgggaagggcctgcagtcccgggtggtgcagtgcatgcacaaggtcacagtgcgcctacggagagcgagtgccccgccctctcgaagcctgccccctacagacagtgctaccaggaggtctgcaacgacaaggatcaacgccaactaccatctacctccccccgaccgttgctgctctgcacctatcaatatgcgacacgagtaccatgtggacgcgtatattgtccgggtctattccgagaagatagaacctctngccaggcacatgcgcgtggctagccagcagctgcttggcatgaccctgacagggtagcattcatactgtgcaaacagagagtgtcgccagtcgcatccgccgaagctcgctgacacagcagctcccagagggctcagctcataagtctcagtacttcgaggttcttgaatagccgacccgatgcgcgctaatgcactcaccaggcgcttgtggaccatcgccccacagcccggtcggtgcccacaaggaatccaactgccatagagacatgaggcgtggacttggcgttcgccattagtgcgttccgtagccttaatatattgttcaacagccacgtggctcactttcgtagcagatggaggagaagagtgaggcagtgacgtcacgaagtaacttcaattctctaggattgcggggtacctcgaagggaagcacctctggcagagaacgcgtcaagagagagacatcatttagtgttcctgtcgttgacgtcgcttttcgacatttgaatttccagtgcttggtatatcatgggaggaaacatgcccaaaacgagacatgctagaaaccggcttcattctaaaggcttaattctgaaagccggcgacaccctggagggacgggcaggtgtggtgagcctctgcccgggttctctgggtgagggccaggctgcttagcccacgttgctcttcatctaccttcttgaccaccttgaaaccaggactttgctccag

SEQ ID NO: 727368 - DNA, 640 bp, Homo sapiens
  misc_feature (118)..(118): n is a, c, g, or t
  misc_feature (131)..(131): n is a, c, g, or t
  misc_feature (143)..(143): n is a, c, g, or t
  misc_feature (157)..(157): n is a, c, g, or t
  misc_feature (173)..(173): n is a, c, g, or t
  misc_feature (176)..(176): n is a, c, g, or t
  misc_feature (186)..(186): n is a, c, g, or t
  misc_feature (211)..(211): n is a, c, g, or t
  misc_feature (217)..(218): n is a, c, g, or t
  misc_feature (225)..(226): n is a, c, g, or t
  misc_feature (228)..(228): n is a, c, g, or t
  misc_feature (234)..(234): n is a, c, g, or t
  misc_feature (240)..(240): n is a, c, g, or t
  misc_feature (248)..(248): n is a, c, g, or t
  misc_feature (252)..(252): n is a, c, g, or t
  misc_feature (263)..(263): n is a, c, g, or t
  misc_feature (265)..(265): n is a, c, g, or t
  misc_feature (271)..(271): n is a, c, g, or t
  misc_feature (274)..(274): n is a, c, g, or t
  misc_feature (279)..(279): n is a, c, g, or t
  misc_feature (281)..(281): n is a, c, g, or t
  misc_feature (284)..(284): n is a, c, g, or t
  misc_feature (290)..(290): n is a, c, g, or t
  misc_feature (295)..(296): n is a, c, g, or t
  misc_feature (298)..(298): n is a, c, g, or t
  misc_feature (315)..(315): n is a, c, g, or t
  misc_feature (318)..(318): n is a, c, g, or t
  misc_feature (334)..(334): n is a, c, g, or t
  misc_feature (340)..(340): n is a, c, g, or t
  misc_feature (350)..(350): n is a, c, g, or t
  misc_feature (354)..(354): n is a, c, g, or t
  misc_feature (521)..(521): n is a, c, g, or t
  misc_feature (564)..(564): n is a, c, g, or t
  misc_feature (573)..(573): n is a, c, g, or t
  misc_feature (604)..(604): n is a, c, g, or t
  misc_feature (618)..(618): n is a, c, g, or t
ctgaagggctattccgcttccgtgtctgtcccgtctcttttgggccctcgtcgatcgtcatgtaccacatgtttaagaaggggtcctatcccgttacacccgagggaggctggtccgntctctcgctgagnacatccgccccnacgacatgcccatntacgaagctgccgacnaangccctgaaanccttccaggaggagtttcaagccangtgganncctttcnnanagttcnctcgantgtggccnggtnttttaatcagnantcaccngantccananagnttcctnaaggnncntgttgaactcagtcccntgnccacccccacagcagntgcggnggcgaagagnaagntggcttgccttccaccctctgttctccctccttgtgcattaagttccctccgcgggatgctgcattgttaccccgccctcccctctctcatttttcttggtgtggcttggggtttttaggcttcctgttttatctcgtgtgtgtggtgcaccagctatgaggttgtntgtaacccaagccatcaaagggcctgtacatacctaggagccntgagttgtnccggccagcttcatacttgagtgtgcacatnttgagaaataaacnagtgacttaacacaccattgga

SEQ ID NO: 727369 - DNA, 380 bp, Homo sapiens
ctctagaggaccccagtcccacacctgctcggatcggctgacgaaagtgttgtgggacgaaagttagatttacgccgataaatatgctcgtgacctggattcttggcgtaggtatggtctagggtgtagcctgagaatcggggacatcagtgaatgaagcctcctctgatggcaaatacagctcctattgctaggaccatagtggacgtgagctacacacgtattacgtgtcgtgtagtaggatgtctagtgcatgcgttggctaatacaatgccagtcaggccacctacggtgaaaagaaagatgaatcctagggctcagagccctgcagcagatcatagcatatagctaccgtgcagtgtggcgagtcagctaaatac

SEQ ID NO: 727370 - DNA, 995 bp, Homo sapiens
caccctggtcgctcctggctggctcaacccgagtgcctcgaccccctcctcaggcctcccccaccacaggcccagctcctcggtctcctgttcgttgtgttctgctgtgctgtgggggagagaggcgagcaggctctgtgccttttgtgccccccaggttctattccccgtacacccgaggctagtaggagggagcggagcagccatatctccaggccccgtggtatgcccctggacgtgtgccgtctgctgctccggggtggagcctgggctgtgggatgcacggcatcgctggagggccaggagcgtacatcacaaaaccagatgattcacaagaaacagaccacacatatgtcgacatgatccagacccgatctaaccatgatgccttaacatgtggagatgtaccgagaaggctcactagctctaactcccaagagtcttgcatgagcaatgatggcctccccagtcccattccccggatggcgaacacaggagaacccaagggacacgtagagtagtgaagctggtgattccgcacagaaccaccaagtgacctggacaggcagtagaccccatatcccatggacagggctgatggagatgggcttcagagaggacaggcgggaaaagcaaagagacaacaaatcacaataaccaaaggaacaagcactgaaggcttggactagaacagccattgcataaatgaccaggggaagtgccaaagcaaacccagaaggcaagaaagaacagacgcacaaacgcagaaggacagacagaacacgacggccaaaagagaacccagacaaccgagaggagcgcagagagaaaacaaaggacgaaaacaccaaggaagccaacaacgcaaacaagacgagaccaacagagagacagaagcgaacgagccacgcgtagtaaaacaccgaacagagaaccacaaaaacacaaaccgacgcgacggcacgacacaccacaggcgtgccacattctaactg

SEQ ID NO: 727371 - DNA, 221 bp, Homo sapiens
gcatgaaggacaaataggtgttagccaaggaaggatgctcttccagacacagaggagaaatgtcctggccaaagtgtgtggataccatttgctgatgcataacctgcaaggtgaggctgaggtcacatagggatcttataggccctactaaggagcttggatgttatcccaatggcactggggggtcatttacagttttcatttttcatcagggatggatt

SEQ ID NO: 727372 - DNA, 493 bp, Homo sapiens
  misc_feature (43)..(43): n is a, c, g, or t
  misc_feature (91)..(91): n is a, c, g, or t
  misc_feature (126)..(126): n is a, c, g, or t
attcaagcagaacattcagaatcaggtcagcttgtgggtgtgnacctgaacacaggtgagccaatggtggcagcagaagtaggcgtatggnataactattgtgtaaagaaacagcttcttcactcntgcactgtgattgccaccaacattctcttggttgatgagatcatgcgagctggaatgtcttctctgaaaggttgaattgaagcttcctctgtatctgaatcttgaagactgcaaagtgatcctgaggattacagctgtggaatttttgtccaagcttcaaataattttgaaagaatttttcccataatgaaaaaaagcagagaacagctggcctcctgttgaaatttggaaagttctgaaattaatagtatttttaaaaaattgcccctgaagtggtatacacaataaaagcaggctctttttatccaagtgaacaaggaatgttttggcttttagccagcaagggaacaataaaaatttcccaatg

SEQ ID NO: 727373 - DNA, 413 bp, Homo sapiens
atctgtgcatttcttctactgcagccaatattctactactatactgtctatgaatgccacataagctactgacatcttgttttgtagtcacactggatattacaataagagaaaacaatcctgaaagccacacagtgtgcagtaactattacttttctgaaaaacacacagctctatttaatgctcagtgctcagctgcatctatatggtaatccattatagtacactcgaaatcgaaattaggtattactactgatcagcacatcagggaatctgtcattctttaaactgattatccatagttcttttttcttcagaacctactgcatgaccaggaataatgtgaaatgtaagctggagtctacacaagatgctatagtctactttataactgctggtcttctgatttgtgt

SEQ ID NO: 727374 - DNA, 1045 bp, Homo sapiens
  misc_feature (606)..(606): n is a, c, g, or t
  misc_feature (608)..(608): n is a, c, g, or t
gctttttgaagagattagacaaagttcctcagttccttcagccatggaggcagaaaccagcaatagagatgggattatctggaaaagatctgtggaggagccacttccctaatggggtgaatcactgagacatacatgagagaaccactagtttcttgagaatgttttatcagcagaaatactgccatcttgtactggacagagagaggaaaatatagaagaaggctgttggactccccaaattctacaggcaggaaacaggtggttaaatctacttagctacaaacatgtgttacccttcttgtaaaagaagagatgatttagggcagagttgttagtcaagaatgtggaattgggagcccagagggtggagctgagcaactagaaagcaaagccacaatcacagatgattaagggctttgaaacctaatagagttttctcagttggattcagagttgcttgggattggtgactcattgttttccttttattttaattcattgtttgaatggatatgtctctgactattatggtatccctacttcatcattgtattttaagagcagataacttaatactcaatactcgagtaaggagcaataaanantgaagttaagaaatgatttcatttactaatagcgtcaaaagaacgaaattcattattcctaaattttaacccaagaagtatcacgggtgtacctggcaaacattgaccaacacatttactgacattaaactggaactgcgactgtcaacccaattgacattacgcccaagggtcaatgggctttaaaaggaattacttctttggtgcagattgagaaaatgtcccccaaattgtagctgtcacattttaatgcgcaacttgtgtcaaaatccctagggaaacgtggttcaccggaaaattaacccacccgtgattcatgacattccgttgctgaaatgtctatgtgtccccacggagaccaaacacggctgtaacaaatacagcaagacacaaataaacaatattctcacccaacaccgtccaaacaagattaaaca

SEQ ID NO: 727375 - DNA, 304 bp, Homo sapiens
agagatccgagattgcaccactgcactcctgcgtggtgacagagcaagactccatctcaaaaaaaaaaaaaaaaagagtacacacctacacacacagcacacacagagatgtttatttctaaccacaatgtctattacattactatcaacccattttccagatgagaaatgagtcagagtttaagtaactcgccccaggctgtcctgtctagagttgcaggcaggctggagctacacaaagcctgtgttctttctcctgagcacatgccttctgtatggactccatggagcacagacctatgga

SEQ ID NO: 727376 - DNA, 321 bp, Homo sapiens
  misc_feature (86)..(86): n is a, c, g, or t
  misc_feature (300)..(300): n is a, c, g, or t
  misc_feature (302)..(302): n is a, c, g, or t
cctctccagctgctccttcaaaagatacatcaacagatagaaactctgggctgggcacagtggctcacacactttgggaggccaanagggggtgcagatcacctgaggtcaggagtttgagaccagcctggccaatgtggtgaaaccccatctctactaaaaatacaaaaattagctgggcgtggtggtgcatgcctgtaatcccagctactcgggaggctgaggcaggagaatcgcttgaacccaggaggcggaggttgcagtgagccaagatggcgccattgcactccagcctgggcnanaagagcaaaactccgtctc

SEQ ID NO: 727377 - DNA, 163 bp, Homo sapiens
acaactaagtgacatctgtgaaattttccaattcagaattgagaaaatttcttgagtgtgcgtggtagacatttatctctatgggagagaggagtatctaaggatgtgtagcaattgctagccactatggaaaatagctcaattttcccctgaagaatttcta

SEQ ID NO: 727378 - DNA, 371 bp, Homo sapiens
attcgcggtatcataaacccaaccccgtatccttcctcaaaatagccaccatacctacctattatggtatttccatagccattccgagatatatttccatgcaactttccaccgttccgtttattatgacacgctccatcattgcaatattgctttgcatgatcatgtagttgacatcgtatttgtggcaaagccaccgttcatcattttctatacatgtcgctcttgattcattgcacatcctgctacaacgccggaggcattcacatagagtcatatttttgttctagtattatgataccgcgaaaccgtgcattttctaaaagtatgttctctacagagaatcttatcagctatacaacaatctgtac

SEQ ID NO: 727379 - DNA, 524 bp, Homo sapiens
  misc_feature (347)..(347): n is a, c, g, or t
  misc_feature (428)..(428): n is a, c, g, or t
ggagaggcggggctgatgcatcgcagctagtcctggaccctgacttcggacttggagtaagaaacgccgaggcaggaacgggagtaagggggttagcagcttggcgcgctgggagccggtccacccctggtctccggacttcacttcccaggaggcctctgcgctgcgacatggaagtgctgctgagcctatcagaaggcgaggctggcaccctgccgcgtctgctctggtggcggcattgctcagccaggctgtaggcattcagggcagtgtcttctgcatctcctaggaacctcgggagcgtgcagctccgtgcgcctggtagacgagacggcggtgttccggangatcccaggtcatcactatcgtacccacttgtggttcaggggtgacgtcctgcaagatgttcaatgtgatttgcatcaagngtgcccatgttcgcaggcaattggagcccagtgccagttctcgtgagcctatcattatgggctaaaggagtgcgtgatcagcaatggtgtctggga

SEQ ID NO: 727380 - DNA, 256 bp, Homo sapiens
ctgctccctcttcatctataaaatggtggcctgcacaagatcatctttcagttctcttttgctctaacgttctgtacttgtatagggaggttcctttttcttcctttttttttttttggttggcagccaattttgggtaccccaattaaaatttcccaaaggtggttgtcaaaagttaagtgccttgtaaaccccaggtcgcccaaaagttcccatgagctattccctgaaaaggaaggcagcagggatcccgagc

SEQ ID NO: 727381 - DNA, 191 bp, Homo sapiens
caaaaacccaattttcccccccccctggggcttttattctagccaggggagatggatatgatagatttccccgttttttggggggccataaaagttttggccaaaagccaaaggaaccccgggttaaggggataggggccctttggtggtgagaatgctggcttaaaaataaaatgggccattttatttta

SEQ ID NO: 727382 - DNA, 204 bp, Homo sapiens
ggacctgcgagttagggggaggcgcttgtgagtaggcttatttctcttgtcctccgtacagggaggcatttgaagtagatagaaaccggactggattactccggtctgaactcagatccacggtaggactttaattcgttgaacaaacgaacctttaaatagcggctggaccattgggcatgtcttggatccaaacatcggagg

SEQ ID NO: 727383 - DNA, 167 bp, Homo sapiens
  misc_feature (151)..(151): n is a, c, g, or t
gagccggggtatacgtgtcaggttcacaagagttgatcctcctcctcatctttggcctcttcttcaggaggcagtggagacttggagcggctgtggtaagcctcctctcggaattcatgagtaagctccggccatgttcagtccttctcantcccgcgtgtctcttt

SEQ ID NO: 727384 - DNA, 91 bp, Homo sapiens
cggcttagcgcgcgcggcacctggtccgaggaggagcagtcccggggcccgccggaggtggggtggctcagccatggctcctcggggcgca

SEQ ID NO: 727385 - DNA, 297 bp, Homo sapiens
gctcaaacaaggtaatgaccacacagtattttttggaggttaatagtttaggatggcaatgagtatatagtaaggtgcaatatatggtagctatttttagttgcgtggctagtcccaataaatttcatcagcatggtagtaaaaattagctgggcacagtggggcacacctgtagtcccagctacctgggaggctgaggtgggaggacctcttgagcccaggagtttgaggttgcaatgagccggtattacgttactccactctagcctggataacaaaaccagacctcttctgaaa

SEQ ID NO: 727386 - DNA, 1397 bp, Homo sapiens
gagattgtgtgctggcggtctacacactgatccagaatgccgtttatacacagtggtaatgtctgtactagagctgacttttatcgcttggtactccgtgattcgactcgattggttccgttctgatttgccaggtgtacagaatttgtgcgaaagtcgtgactcgtcgtcagggcttttagaagctgattgctcaagtcctcgcgatacagttagagtctagtcaccagaattcccggactatgtcacgcctgcgcaaaaaggaaagcatatggcatcttgtgactcccttgtgcagttatggatttctctgaaagaaaaactgttaggaaagacttggacaccatagtacaaaggatagccaagggtgccccagtctaaatgcgtaaattgtcctcttgatgttccattgctggagcgtagaagaagaagctgtagaagcaacagtcaaacgaagaagtgccgtctcaaacctggccaattttagttaataggaaaccaagatttgattcaaggttaattacttgggagctaacgaagaaaaaggttggcagcgcatcattcaattgggaaaggtctaaagtcaaaggaccattaccgtactataagtcccgaaacttcgcccttgtttcgacagggggccgaaagcgggtatagaccaggagttagggaacagggcacttaacggactggcgattagcagagaagatgttgcccgaagcacagggaaatcgatggggaacatttgcgcaaagcgaacttgccttgccctttaacagaaagatccttcatgtttcatgcccaactttaacctttgggtaatggtgtgaacaatttcgtggacacatatttgcttcccctactttgtggcacctaccttttcgcggtaaaacattagttctacaaaagtttaaactttgcttaactcttggcgccccaaggcctgtttatcaacatggtccaactttttagacatctttcgaccatcaccgttgggacctctaaacatacgtggatccaatggcataatggcgctcatagggtcgatttatgggccaccgttcgcttaattcagttgagaagcagatttccccagcaagtaattttcccagcgagcactctggttaaacaggaaattgttggcagacttctatcacaagggggggcttctaacacatctgcgtgtcgacgccatcgcacttggaaatacggtcggctctgtacaacgcctacactatcttccagccccgaacaaccagttgcttagcgcgtacgttaaccacctaaataggaaaagcgctccaacatttatggaccagcccatctctccaccagagctggtggtccatacgcctttccctagcggcccactcaatcagcggcggcacatactgggg

SEQ ID NO: 727387 - DNA, 279 bp, Homo sapiens
  misc_feature (46)..(46): n is a, c, g, or t
  misc_feature (203)..(203): n is a, c, g, or t
  misc_feature (209)..(209): n is a, c, g, or t
  misc_feature (211)..(211): n is a, c, g, or t
  misc_feature (229)..(229): n is a, c, g, or t
tctgggtgtagcacctgaagatgtccggaatgatgagcagtctggnttcatctgcaatccagcacaccacggccgcagaaatgtatgctccgaccaggcctttcctatctccctcattagaccctgggttctgcaggtgatatttgtgtcttcaccatccctggtctacatgggccatgcattgcaccgcctgagagttcttnagcaananacgcaaagcactgaaagntcagttaagagtagaactggagcaggtagagtctgaaatgcctagggatc

SEQ ID NO: 727388 - DNA, 437 bp, Homo sapiens
  misc_feature (278)..(278): n is a, c, g, or t
gacctgtgagggagtggaaagcatttccgaccccatgggaaaggtgctctcatcctaacagctgccaacaccctatcttctcacccgctccccataacttgcctggtgagtggacctgcttagaccttactgaaccgtgagagctgtgaccttcctggggccatttccagaccagggaagccaatctgagcacgcgggttggttgccagcctggggaagccgcccgctgagagggaattctaaacataactgcgagcgcacagccaggtagcagagtncgccgcccgttggcgggagaagaaagcctggggaaggagaacatcccttaggccacccaccccaggacgagggggctcggacgagacacagtctgtgccccaaagcgcgggggtccccctggcacctccaagcccatcccattgacgaagtaaccgccc

SEQ ID NO: 727389 - DNA, 178 bp, Homo sapiens
ctggcacggctgactgactgactcattcccagatttcctcagcatagcggttgaagactgacgctgcccgatcacctcgcgaagaccccctagaccatcacggacgccgcagcttcgcgctaacatctcacagctggcaaggtaagccctgtccccattcttaactcaactacgtgag

SEQ ID NO: 727390 - DNA, 324 bp, Homo sapiens
ggtttttttttgagtgaactgaggaaggggcttagatggtgaggggtttaaaaaccaagccccatgagcaacagtggaagacctcgggccattcggcctggggaggacttggtggcgatccccaacctggaccccagttaaaggcggtggggtgactgggaaggaaagggcccccacctcctcaggatttggacgtgtgaaataggctgcctgtggggggccccttagggttggagagcccccgattggagggagacagactgcccccccccttccccccctggatttcaagaataaaacaaactgcctttggacttggtttga

SEQ ID NO: 727391 - DNA, 1477 bp, Homo sapiens
gccggcgcatcacggaaatggcaaacggcataggcggctcgggaagatgcagccgtgtaagcacaagtgcagagtagactggccttgtggtattaaagatatatcaagacattaatcaacgcaacgaatggacgaacgggaacctgaaggtatgtacaagggaggtgcgtcatggggatctgagtagtagaaagatcggtgttgaagattaccaagctgggtttcctattccctacagtcatcgacaggaggatgatggctgagcttggaatgaagatccagagtatccagatggagaactgatgcggaagccttacgtgcatgtagaacattgatgcatcttcacgtgggtctggtatcgagtccacaatacgatgggctcattcgtgcacccgggtcgagttcctgcgaattgctcagctattagttacgcagctatgccagttgaaagaactctagtcgatgtctcgattgtatgatccgcattggacactggagccaaaggatctcgtctcactcacatggccatacaggacagagtcctaagaggtgagtgcggaaggttttcgtcaaggaaccctggagtgcctccccttgaagctattgaacaagagctgaattatcacccttgggagttacagttgtgtgaacgacatgtagccgatttgttgttgtcactaggatcccaggatcctggactccaaggggtccctgaatggtggggacacgtgggacagacacgagagttcctgtctcgtttgccatgattaacatggattggaagtttggcctatcaagccatttgtgcgcagctagggcatagtacatttctggggggagaggcgactccgtaacacacccatggcttgacttggggacccatgaaggtgcggttttgcaaaagcgcaatgggcagaggaccacccccgtggacatctccccgaagaggcaataccaatggagcgagactaacccgaggagaagcaccaccagagggaggacagcaagataataacagggcataacacacaagggtcctggccacgcccggaggaacatgtgggggagcacagcatggcgcaggaagcaaccctcggtggtccggttgggaagagacccggttcacactccctcacagaccacgaggggagggagccccggaaggagtacacacgagtggaggccacctaatcctgttgtcaccactcttgagtaaggtgtccaccacagaggctattaagacgaggctaaaaaagacaaaagggttgctcgaagaagatcatacgatcacgcggtgctgtaatattgtttatacagcagatctagccagcgggcagatgccatctcaaacaaaaagaactggaggagtagcagttcctcacgtgtatgtctatctcgtgtgccgatccacagcttctccttccctcctgttagagtacggagcagagaagcgaaggagaagcagagaggggggtca

SEQ ID NO: 727392 - DNA, 561 bp, Homo sapiens
cgtgtgggtcatccggtaatcccagcactctggaaggccgaggtgtgctgattacttaaggtcaggagatcgagaccagcccggccaacatggtgaaacgctgtctccaccaaatacacaaaaagtagccgggcctggtaagtgtctgcaatctctgctattcaggagaccgaggcaggagaattgcctgaacccgggaggtggaggtcgcagtgagccgagatggcgccactacactccagtcttggtgacagacagactcaaaaataatataaaatggaagttaaaatacaaaattagctaggagtggtagtgcatgcctctaatcccaggtacttgggaggctaaggaaggagaatcacttgaacccgggagacggaggttgcagtgagccgagatcgtgccactgcactcaagcctgggggacaagagcgaaactccgtctccaaaaaaacaaaagaacagaacaaaaagcaacaaacttctttggaaaggttctgaggccttgactcctgacagactgtactaccttacaagacattcaccagtaacattaataca

SEQ ID NO: 727393 - DNA, 91 bp, Homo sapiens
  misc_feature (9)..(9): n is a, c, g, or t
agcgttttnaaattcattccaactgtagctgatgactgaaggtggaagactgccgaagtccaaagcttcagcattccttagtgtcaggatc

SEQ ID NO: 727394 - DNA, 1024 bp, Homo sapiens
agccctagaagtatagatgtagtatgcgatagaacattcgaaatctggggcgatagatatagtaccggagagggagagatgacgaatcacttaatgcagaagcttaatatacgtcacaagggactaagtcgctataccttctgcttaatgaataaactagaaataactttggaacgaagagcggagagacgtaagcaccccgcgaaaacgcaggaagcaaactaccttatgttagaacaaacgtaaccgcagacatacccgtgtgctattgtacacaggaatagctgggaaggattggttatgggtagcagtggcggaactatgatctactcgcgtccgtggctgtatacaccatgcgattccgctgcatacgcatgaggaagtcttactttgataggtttctaatcttgtgcctgcaactaaaaaggcactgcataagaaatctgcgctgcctaaagttgaacgttgtgataatgctatgtgaagagataaacggtacgtatggggaacagtgacgtgaaaaaatacatttggtaatgacgaagatggtatatcgatttccacgaacacgattagtaaggtggcttaagaaggcaagacctcgaaactatgatatgaatagcgtggagggtctacaaaaagcaagctgactttaaaacaaaatccctagacatgattaatttggactttctttatacacgaagatatggacactatatctgagggcgccctatgtgcatagaactaagtgttaagttataaaagtacaccattgaaaacgatttctcctcccgcataaagccttgcgtcagaattaaaaccacttgaacttgacaattaaacaagcccaaatatctacaatcgagccaacaaagtcaattattaccctcggtgtgcaacccaacacaggccatggctcattagagaaggtgccacaccacgttacaggaactcgggaatttaccggcctgtggtgcaaaaaatccctctaagatcaccagttttaaggccgcgtgccaggaaa

SEQ ID NO: 727395 - DNA, 507 bp, Homo sapiens
gcgtctgtggggcaggaaaggagtgggcatgagggtgttccccgtgcatggcgagcagctgggctgagactgctcccgggtgtgatggggctgctgtgtccagatatgggtttctgagtctctgggaagggacctcaccccacagccccgagccccaacttgagggtcacagagctcggcaggcaggcttttcccaccccctgactctcagccccatggggcctggggcagccgtcaactgcgccttctcccctcctccgcccccaaccttagagccccccaccccactgcttcctgctctagcggcccccggggaagagggagcagggagctggcagccgccccagcccactccttacaaggcctgagcccggccccaggcccgcccccggcccgcccgcaggaggccccaggccctccccctgtcaagagctgccgccagcccggggccggaccagtccgggggcatcgcgatgctgctgcgcctgttgctggcctgggcggccg

SEQ ID NO: 727396 - DNA, 484 bp, Homo sapiens
cttcccagcaaagacaataatataagtggtgaaaaagcataagaaaagatgctccacgtcatatgtcatcagggaagtgcaaattaaaacaacaatcagaaaccactacacaactattagaatggccaaaattcagaatactgacgacaacaaatgttaggatgtggaagggcaagaacttttattcattgctggtgggaatgcaaaatgatacagctactttgaaggacagtttgtcttacaaaattaaacatactcttaccatatgatctagcagttttctccttgattaacccaagttaattgaaaactaatgtctacacagaaacctgcatatggatgattatagcagctttattcataattgccaaaacatgggagcaaccaagatatccttcagtaggagagtagatcacagtggcatatcctgacaatggaaaatcattcagttctaaaaagaaatatgctgtcatgtcaccgaaga

SEQ ID NO: 727397 - DNA, 112 bp, Homo sapiens
cagccattggactggagtgctaccaggacaacttctccaagattgccctctgtcccttcagtgatgtggctcagctcagtctagtaagacctgcctgccctgggtttcaccc

SEQ ID NO: 727398 - DNA, 415 bp, Homo sapiens
ggagcgtcatcagggagaggcagacccgagggatcaaagatgacggtctcggctcccattagggtcaggatgcgcgcggcctcttgggtcagcagcctgctgaaagagcgctcacgggttgagccatacagcaacaagatgcgtggtttgtgagtcggttgctcgttgccttgcaggcgatccagtgtgacgaagtcgattagcgactgatccagattaggtagatccaggctgctttccgagaaaaattcgtccattacagttcacctatttgatctagctcgcgcttcagttcctgcggtgtgtgcgccgaatgatccaagctgaagaatgcctcgaaacgctttttaatctggacgacggtcgcgtcaaatgcggcttggatgtcgctgtctgtgccttctacatcggaaga

SEQ ID NO: 727399 - DNA, 274 bp, Homo sapiens
atggtcctgctctcaggttttctgagtcacgaacacaacctacacctatctcatgtcccctgcaagaaataaaaaggatgctggcactgtgcaaatccagcagagtagaagtgggtctgcacccacatggtctcaagagccaccgtgccactgctctcatttctccacactgtcccctgcacttgcccccgtcccaccttctcaccaaccgtccagaaggtgtgagaccagtctccgtcctccttgccctttcaagtaagccaggaacatggga

SEQ ID NO: 727400 - DNA, 116 bp, Homo sapiens
gtctgaacaatattcacaggtataacttgtatcatacagcaaagcagctattacaaagagcgaatactcatgaattcaagtagaatctgacataaattattgttgaaaatgttata

SEQ ID NO: 727401 - DNA, 286 bp, Homo sapiens
gctgggaaagaggcagctagacttgcgccaggaggtccaccatggtctcagtgagggctgtaaggagacagagaagtttggccagggggtccaccatactgctggtcagcctggtaaggagacagataactatgtccaggtggcccaccatgctgcagctcaggcctgtgatgagtcaggatgatttgcccaggaggcccaccatgtgcggggcaggccggaaatgaggctggtaggcttgcccaggtggtccaccatggtcttagtgaggactgtaaggagacag

SEQ ID NO: 727402 - DNA, 110 bp, Homo sapiens
atccccatctatatgacttcctggagactcacatcctagatgaggaagtgaagcttatcaaggagatggctgaccacctgaccaacctccacagactggatgtgccggag

SEQ ID NO: 727403 - DNA, 920 bp, Homo sapiens
tgagcggagtgggatccgtgcgggcccccgcctgccggagcgctgagccgcgggagcggagccggggttagcggcgctgctggaagatggcgagccggccggtgacgagctggccgccttgtgtgtgctagggcggctcctgtttgctcatgtgcctgctgctgctggggagctcggcccgggcggctcacatcaagaaggcggagggcgactaccacaactacgagcgcggtgcgccgaggccgggctgagggccagttcagaccggctactaccacgagcgcaggcgtcgggagtcggcgctgagggagtgctggcggccgcggggcccttcccccgggcgcttggcccgcctctttagcatcggccgctcggtgcgaaggcggggcgcttgtgggtgcttcgcctcaccggcgggctgggggtcgctaatccctgaggggctgagcgggggcctgaaccgctgcctgtgtccccgacgcctgcgggggccggttgttgccccgtgccgggccccagcgtgaaccgctggttgggcaacattgcattgggacagagaccgtgtcgacgccaaggtgtagatctacacttgagcccggcgaagcttgggcgtgccaggctaacctgtccgcggggggaccccggcgccttgggacccgcactggcttcaaacacaaccgaaaccggtagttaccccatttgcttggccaaagaccttcaaaaccccccgaagtgggctttccgaagcctgttggccctgctgaacggggcacaacctgtgtggcctatccggcgagaacgttggcagcccaccgtcgggagcccccagcgcgcgcttggaaacaacacgacgcgcaggcacacagacgctgagtagcggacggctctccagaccacagcttaacacccgggggaagccc

SEQ ID NO: 727404 - DNA, 170 bp, Homo sapiens
ctgtaccacaacaaggtccagctcacccctactgggggccttggtctgaacttggccctgaatccgttcgagtattacatattgttctttgccttgagcctcatcactcagaagccacttcctagcggcctgcacgtccgtactggagactgtgcctactgcatcctggc

SEQ ID NO: 727405 - DNA, 93 bp, Homo sapiens
tcagtcctgcgataactattgcctacgggcagtcaggccccttaatgattgactatttggtttttgccgttacccggaggacttttaacctga

SEQ ID NO: 727406 - DNA, 1682 bp, Homo sapiens
atctgacagtcaggcgcatcttcttttgcgtcgccagccgaggccacatcgctgagacatcatggggaaggtgaaggtcggagtcaactggatttggtcgatattgggcgcctggtcaccagggctgcttttaactcatggtaacagtgagatattgtaagccatccaatgcacgccctatcatatgcaccgtcgaacatcacaatggtatacttattgtccaatcatgatatccaccctatgagcaaatccccatggcaaccgtccacaggctagagaacagggcaagcttgtccatcaaatggtcaaatccacatccacacatcttcccaggcagcgcagatcccgtccacacaatcctaagtgggtgccgatcgctggcggccatgacgttaactgtatcgcatgcagaccgatcacaaccatggagcacgcatcatatccacacccaacacccatagggaataaacacgatgaccatatgacagtgaccatccactatatcggcaacaatcatgtacaaatactcaagaaactcgaataccatccccactcaatcatggaacaccaccaatcctttgcctcgtaccagcaccatcaccaacttgattatcaagaaatccacctgtggtatagatcttcaaacacaacactgtaaagcaatacacgtgatcacttgcacaatcaaacaatgtaacacttcaacgaagacactccaacttcatatcaacaataatacgagaccactatccatcagtggcatctacaaatctacacctatcacattatcacaatttcaaacataacatacaacaaccaaaattaataatcctcactataattattttatacacaccaaaagtgactatatcaacaccatactacaaatatagaaaatacactaaacaccactaacaagcaacacatctacataataacaatccacacaaatcaaattactactatttatccctcctatccataaataatgacaatacctatatttctctcattataactacaaaccatcgtctcaactccactcatatagctaccacctcctatctcttatatgaaccaaatcaacatacctatcctactaatatctcaatattctacatatataccatctccaatcaatcattacatagacaatacaatccaactcaaaatacaaacataaaaactaacactctatatcacatcatagacacatctaatcatatcaactattataatacactattactaacaacctcactccaacatcaaacatataaacatataactaacccactcaagtattaacaccacattcacacaactcatatcatatattatatacactattatagataattaagataatacagaccatacagaacgatgttgatacactaagactagcaccatgagagttattcagacataccatgataggattgaagcatacgagtcggtgatacagaacaacagagaaacacataaggtccgtcatgatataactaacactagatagacaatattcattataatgaccatcacagtaaatacataacatgtgtcgcggtaatcaacaaagtgtcgtcataacagatcagatactacccacaggcgatacaagacaacgacaactaagtagtaattcaactaacggccgtagtcttgtttaatcagtaaga

SEQ ID NO: 727407 - DNA, 1182 bp, Homo sapiens
  misc_feature (59)..(60): n is a, c, g, or t
  misc_feature (75)..(75): n is a, c, g, or t
  misc_feature (101)..(101): n is a, c, g, or t
  misc_feature (104)..(104): n is a, c, g, or t
  misc_feature (119)..(120): n is a, c, g, or t
  misc_feature (137)..(137): n is a, c, g, or t
  misc_feature (142)..(143): n is a, c, g, or t
  misc_feature (212)..(212): n is a, c, g, or t
  misc_feature (246)..(246): n is a, c, g, or t
  misc_feature (271)..(271): n is a, c, g, or t
  misc_feature (273)..(273): n is a, c, g, or t
  misc_feature (295)..(295): n is a, c, g, or t
  misc_feature (321)..(322): n is a, c, g, or t
  misc_feature (341)..(341): n is a, c, g, or t
  misc_feature (348)..(348): n is a, c, g, or t
  misc_feature (368)..(369): n is a, c, g, or t
  misc_feature (372)..(373): n is a, c, g, or t
  misc_feature (378)..(379): n is a, c, g, or t
  misc_feature (389)..(389): n is a, c, g, or t
  misc_feature (399)..(400): n is a, c, g, or t
  misc_feature (405)..(405): n is a, c, g, or t
  misc_feature (422)..(423): n is a, c, g, or t
  misc_feature (428)..(428): n is a, c, g, or t
  misc_feature (430)..(430): n is a, c, g, or t
  misc_feature (455)..(455): n is a, c, g, or t
  misc_feature (629)..(629): n is a, c, g, or t
  misc_feature (644)..(644): n is a, c, g, or t
  misc_feature (673)..(674): n is a, c, g, or t
  misc_feature (681)..(681): n is a, c, g, or t
tgggctgagggggccgtacggaggtggcagctggtgggaggaggcggcgtggaaggccnnaggagctcaagcccnggaccaatccccacgttccgggccgngancctgaccctgcagcnntaccgggaagcgaaacnggctnngatgggccgctgagcccgaatcgggcactgtgtggagccccctggagctgagatcaggatgttccgctncatgagggactgtggagcctgaggatcccatgtncctgatggatccctttgctattcancngtcagcatatgagccgtatgtngtcaggtggctttggatatagcaccnntcctcagcatcacagatgngcaacantgccagggaccagggcctgnncannccgcnnggatgcagcnaggctggagnntgtcntccccactttgggatgnntgggnantgtcgggtggtttcatggacatgtntgggatgatgaatgacatgattggaaacatggaacacatgacagctggaggcaattgccagaccttctcatcttccactgtcatctcctactccaatacgggtgatggtgcccccaaggtctaccaagagacatcagagatgcgctcggaccaggcgggatccgggagaccggnggactgttcgggatncagacagtggactggagcagatgtccatnnggcatcncatccgggacagggctcacatcttccagcgctcccgaaaccatcgcaccgggggaaccaggaggagcggcaggactaattatcaagctggatgagagtgaggccgcagcgtagatgacgagtggcggcggaaggggcctcaccgccgggccatccagggacctgaggactcctcttcccgaacagtcccgccgctaatgactggtgaggggccgggccttaagctctctggtaccaggctgagaggctgagaaatcaatccctgagataatttttacctctcgaattcccaatcccccaatttacgtattacaacttaaccagcgcaagcgggccccatctctcccctggggatctcagagaagaaacctttccagggcaccctttcctaaacatatcctttctttaatctcctgttacccatggatgaatttcggctctgcatcttatggacttgattttcattctggccatcattttaaacccctcactatccatctaa

SEQ ID NO: 727408 - DNA, 156 bp, Homo sapiens
tgctcgatcactagcgatctcatacattctggttttgctgtactactttccataagtctgcaataatttttaaaacagccaataaattggtagggcttaccagcatgatatttttatcgtaagcatacttccacaggttcgtgtctttctttactg

SEQ ID NO: 727409 - DNA, 183 bp, Homo sapiens
tggaaaaaaaaaaaaaaaaaaagggggggttttccccctctaaaaaaaaaaaaaaaaaaaaccccccggggggggccgaaaaaaacgggggggcgggggggggcccccccccccccccccccccccccgggggggggggcaaagggaaaaaaaaaaccccccccccgggaattttttaagagg

SEQ ID NO: 727410 - DNA, 316 bp, Homo sapiens
tttttggcaaatgtttatctctgcaccattgtccaaggtcaagtggctccaccctcaaggttaagatataatgtaatatctcatgacagtatacagatttcatggaaggctccaagagggaaatttggtggttgcaaacttcttgtgactccaacttcaggtggaaaaactaaccagctgaatctgcagaacactgcaactaaagcaattattcaaggccttatgccagaccaaaaattcccaggttcaattattggcttccattaagataaagaaagccagccagctcaagggccattcagaatttaaggtttag

SEQ ID NO: 727411 - DNA, 244 bp, Homo sapiens
tcgcagtacctcgatggtacaggcaccagttcagacttccatgtgtatgtagaatgagtaatgccaccaaatgatcaccactgctgccacatctggtcatctgtgctgctgatgtgtagacatgatgaagaggtcctgagaaaccatgtgccctggttccatgatgtttgtcaaatgacgggtgtggccccgtgagggaggaaatgctggggtaggccccagatgtggagatgaggggtgatcc

SEQ ID NO: 727412 - DNA, 209 bp, Homo sapiens
  misc_feature (92)..(92): n is a, c, g, or t
  misc_feature (94)..(94): n is a, c, g, or t
  misc_feature (151)..(151): n is a, c, g, or t
  misc_feature (202)..(202): n is a, c, g, or t
tctagagtgatccccccgcggtccatgtctgagcatagtggcttatagcaataggaactaggaatagccccctttcacttctgagctcccanangttaccctagcacccctctgacatccggcctgcttcttctcacattacacacactancccccatctcaatcatataccatatctctccctcactaaacgtcagacatnaccgcgg

SEQ ID NO: 727413 - DNA, 133 bp, Homo sapiens
tcccactactgatcagacacgggggtatggaccaagctctgtttcctgaccatgggccggttcaccgcctcctaaaggcaacctggtggtccccctgctccctgggaggtcaccgatatatgatgcctgaact

SEQ ID NO: 727414 - DNA, 114 bp, Homo sapiens
ctgccgaacctgtcttatctcagctcaggtaccgctcctccaggaccctatatgtcccctgccctcctcctccttccacagacaccagctctggttacaaggggaaaactagaa

SEQ ID NO: 727415 - DNA, 171 bp, Homo sapiens
cggtcccaagttatgtttatattgggttaaaatagaggagaagggagttcccctatggctcagtgggttaaatgatctgatgtcactgctgtggctctggtcactcctgtggcatgggttcaatccctggccggagaacttccacgtgccatgggtgaccacggccacccc

SEQ ID NO: 727416 - DNA, 335 bp, Homo sapiens
  misc_feature (101)..(101): n is a, c, g, or t
  misc_feature (310)..(310): n is a, c, g, or t
agatcttctatattccgactactgattcaaatgctaatcctggacgggcatggtggctcacacctgtaatcccagcactttgggaggctgaggctggtggntcgcctgaggtccggagtttgagatcagcctggccaacatggtgaaaccctgtctctactaaaaatacaaaaatttgctgggcgtggtgacatgcgcctgtaatcccagctactcgggaggctgaggcaggacaatcacttgaacccgggaggcagaggttgcagtgagttattgcaccattacactccagcctgggtgacaagagcgnaattccatccccccaccaaaaagcg

SEQ ID NO: 727417 - DNA, 338 bp, Homo sapiens
cctcctaccgacgcatcaggcataatctttcctacatatcatttattcatagaagatctctcttatggagaattaactgaagcttagaggaagagacttttttttgagacggagtttcactcttgttgcccaagctggagtgcaatggcgcgatctcggctcactgcaacctctgcctcccgggttcaagtgattctcctgcctcagcctcccgagtagttgggattacaggcgcgcgccccccacgcccagctaatttttcgtatttttagtagagacggggtttcaccatgttggtcaggctggtcttgaactcctgacctcaggtgatccgccca

SEQ ID NO: 727418 - DNA, 1175 bp, Homo sapiens
ggaagacgcatgtacctcgtgcctggggaggaggatgatctacttctcagggggcgtcgtgtgctgatccgtggccctgtggccggactgggctggacgctggcggacgggagctggcgtgtgggcgctgctacgttcgccggctgtgcctgtgtggcgtgctggctgtggcatccagtggtctgctgatctcgagtgagctgatgaacgtgctcggaccgtgcatgcgggttccctctatactgtataccaggcggaaggcgtgtgcgtgcttgcgagctccgatggagcttctgtgaggatacagggtggggagctacatggtgcgtggcaggtcaataggctccctccgaagagtccctcggctagcccctttggcccctccttcgagaagtcgtcgtggcatgggcacgggcgccggccgggtgcacgtcgtgtctgtgaacgcagcgttggtgacgagtagggtagggcattgtgggagcggtgggctgggcgatgggggaccgttggcgtcgcggaaaggcctcgatgggtggatcctgcgtgcatacgggcgctgcgctgggctgcagggcaaacgacctgccgcgggcaagggaggatggtagcgggcggacgcgcggtgcatgtgacgcgacgagcccctggacggtgcctgaagcagggcccttgcgtgggcactacgtttgtagtccagatgggtggacagctgggtggggcgtggatctgaccatgggaaagggaaatgattgcctggcaaaagaattagggttcgagtcaggatagacacgcaataagctagactagcggaaacctacacaaatccgtcttccctaactagtggacgcccggggaggccaagtgagcgaatggcgggcccacccaccaacgcgtggaaccgtccacgggaaggagtggtataagaggaagatggcaaggagccctgggacaggtgctgggtcccaccgtcccgggggccaaattggaccaaggtggggaccttaaccactggggaccataacgagcccgccgtggaaggatccccccagaaccagggcgttggcgagtggagcacaacgacgggagagcccaacgcacgccatttcgggaccgcccgcgataacccctataggggaagaagcggagaaaaagggggcaaggatacgggagga

SEQ ID NO: 727419 - DNA, 1343 bp, Homo sapiens
  misc_feature (243)..(243): n is a, c, g, or t
  misc_feature (393)..(393): n is a, c, g, or t
gccgctctgcgttctgtacctgtgcgctgacgtggggccaccatggatggcattgtgatgctggtggattcttggcgcgctgggaacagcggtcatagggttcaggagagtcctcacgtgctgtgatcccacgccatagggcattgacgctgcttgccagatcagtgctacacctcgtctgtagttgcgtgaaagcagtttcaaggctacgcaccatgatagattcgatctgtggccttctangtcgatctgggactggtaccatatttggcgatttacccatgagaaacccgacatacgttgcttgaagactgtcatcgacggtgcgaccgaaacgagaacgaaccatgagctagcgtctgggtctttgctcatatgacgtgagcatctacnacacattcccaacaatctctacgtatccagagctcgtgtggtaacgaacgactaacgacatacattatacttgcttgacacttggaagtcgtccaagtcatctagcataaagtaagtggacacgctaatagtgtactcgatggaacgtagtacttccggcgatctgtttgtgtgagcttgtggcttacctggaaggtacagagaccagtgactggagaacagtgtggactcatggctgtgagaactaactcgagtgaatgaaggagagattcgactgcattcctgagtcctgaagaggctccatggagtgaatttcgtcgaaaccaggccgactcgtcggtaacgctccaggagacaaacggagatgatttcgtgtctgcaacggaggatcgcgaacattgcgtgcctagaggtcgcgcctttgtcatggaaacgctgagaagggattcgcgcgatagatagggcgaggccccagataggaatttgggacaagaatgtcctagggttcctaggaacctgtgaatgataatcgttcaaatggtttccccgttcgcggttccccattcataacttatcacccttgatattggcacaccaacagaacgtcttgggtcatttaaaaccaccgtaaaaatcctcgtttaagttgtgttttacccatagaagcctacctaagggggacgtgggacctagccttttacttacgacgttcaaactagaaacacgttgatggcagtttatggcaatatttgtacaaaaacaagaggcgccctatttgtaaaaatatattttacccacaaagaaggtgcttatagacagtgtgtccacaattgccccatagggagatttacacaccttttgtaagtgggggccatagcacatatttcaggcagttcgtccggttaaagggagttaaagcacgatgtgttgtgcaccgataagggaacgta

SEQ ID NO: 727420 - DNA, 525 bp, Homo sapiens
cgctgatagggtatttaaaaatgcccataacacacaactagactccttaaggtgataatatatattactgcaatatattataggctacttatgataagtatatccgtggattcaatatctacaaacaaaggaggactcaagggaagcagacgacccaatatctatcaataccattccatcatattagaatacatcaaggcgcgatatatcatgggcccattggtttatgggtgaggcttggcaacggccttagctacttgcttttggaaggtgaatagagcaccacgattccccctcaggagaggttgccgttaccaagagacactggaacctcaggtgtataacagatttgcgcacggaagaggttgctgcgagggctcataggctacattaaatatgttacaccttttcgtgccccgacccctaggacactctatgcgacagcatattgaatactgtgctcgcacacattgggacctgtcctagagtgtggcttgtggagaggggtaatgctctggatggggg

SEQ ID NO: 727421 - DNA, 819 bp, Homo sapiens
tgggtttggagaagtagatcggtgagcagtgggagcagcgtattgatcccccctgcctatcagcttcttactgtggagcctgttcctacactgtgaaacttggcgccgtctagtgttgttagtgtagtagtagtagtagtagtagtagtagtagtgtataatgtacaatgtacacctatgcgctagtccaacgctcctgcatgctgcccatgccctatcctacacacacacacggaccgaccactctacctcactacccaccactcacccccccgcactccgacagacaagcccagacccccccaccctaagccgcacccccgcttcacccccaaccccccacccaccacacacccgcaccgcgagcacaccacaccacaccacacgcccacccatcgacacgcgcgcccgcgcatgccggcccctcttcttcttcatactatcatcacatctccccactctcagaatcattccactccactaactactatccaacagacactctacaccacaaatacataacactaacactctaacaccacacccatcaactcacccccctcctttatctctcacccccaagaacaccccccgataacaacctcccacacaaccactagtcacaagactcacacaaaatacaccacctcaccactccccacacacacaacaccaccacccagcaccatacgccccctccggacacctcagtcgtagcggccccaccacccctagccacgggtacaacaacaaccacctcacacgcccaacagccgcagcactcacacacacacacaccgacaccccacacagccgcgc

SEQ ID NO: 727422 - DNA, 113 bp, Homo sapiens
gggctagttctagatcgcgagcggcgccttttttttttttccctgagtaaaagcaagaaatttcttcctttggaaaaatttttatttattaaaaaaccacttttagatggttt

SEQ ID NO: 727423 - DNA, 305 bp, Homo sapiens
  misc_feature (22)..(22): n is a, c, g, or t
  misc_feature (46)..(46): n is a, c, g, or t
  misc_feature (139)..(139): n is a, c, g, or t
  misc_feature (247)..(247): n is a, c, g, or t
  misc_feature (282)..(282): n is a, c, g, or t
tctgtcgcccaggttggagtgnagtggcgcaatctcggttcactgnaacctctgcctcccaggttcaagcaattctcctgcctcagtctcccaagtagctgggattataggcatccaccaaaacactcagttaatttgngtttttttagtaaagaggggggtttcaccatgttggccaggctggcctcaaactcctgacctcaagtgattcacccacctcgggctacaaagtgttgggattacaggnatgagccactacgctcagcctaatttttttatttncagtatagacctgatttcaccat

SEQ ID NO: 727424 - DNA, 383 bp, Homo sapiens
  misc_feature (38)..(38): n is a, c, g, or t
  misc_feature (62)..(62): n is a, c, g, or t
  misc_feature (146)..(147): n is a, c, g, or t
  misc_feature (150)..(150): n is a, c, g, or t
  misc_feature (230)..(230): n is a, c, g, or t
  misc_feature (241)..(241): n is a, c, g, or t
  misc_feature (251)..(251): n is a, c, g, or t
  misc_feature (365)..(365): n is a, c, g, or t
aggaccatcctccaggacaggtgacctctatgaggcanaaccggctgtggccgacaggctgncttccagcccagagtggcccagtagagcaaggcagacagtgacctccacccccgcagccctcttaaaaggccagtactcttggnnttngggggagggtttagaaagcatttgcccatctgcctttctttcccccagcccccacccgctttgaatgtagagacccgtgnggacttttaanttttgtggtngggggtgcggaggaggtacccccacccctgggcacagccgcctgggaatgcaggactgtcactgctgttcgggtgatgacctcgttgccaagctcctcctgttcccttgttctngggggcaggcgctgtgtt

SEQ ID NO: 727425 - DNA, 486 bp, Homo sapiens
  misc_feature (3)..(3): n is a, c, g, or t
  misc_feature (95)..(95): n is a, c, g, or t
  misc_feature (118)..(119): n is a, c, g, or t
  misc_feature (478)..(478): n is a, c, g, or t
  misc_feature (483)..(483): n is a, c, g, or t
tcngaccgggagaatcaggcagggaggctgcagtgagccgagatggcagcagtacagtccagcttcggctcggcatcagagggagaccgtggaangagagagagaggaagaccgtggnntgagggagaagagagggagagggagagggctatttttaaaattttttaaaattgctgaacaggggtacctctgggcagtgtgtcagaataccactttttaaatattttatgatttatttatttttctatttgaggttttaactgatgtgtatctgtatgtctatttgtgtatattttgtcatgatcatgtaacagagtctgaaaagtgtccgaagagacagttttcaggaacaacaagcaattattcctactttccaagttatttttgatgccatggtggctcatacctataatctgagctacttgggaaggctgaggcaggagatcccccttgaacccaggaaggcggaaggtttccnaaaanccg

SEQ ID NO: 727426 - DNA, 230 bp, Homo sapiens
acgtcatatccggacctcgagtttgtaacttcttactgctcattatatattacggttcgaaatgggatcacacataggtatgcttatgaccttaactgtaacagcgatgaaatacataaagtggttgagctcgtaatactaatgcggtaagagtgtcagtaccagtagcttcatgtgcagttctacaagcccaataataattatgctgaaccgtgtaaacaggctccctc

SEQ ID NO: 727427 - DNA, 729 bp, Homo sapiens
cctatcatatagtaaaacccagcaccatgacccctaaaagggagccctctcagccctcctaatgacctccggcctagccatgtgatgtacagttccactcctagtaagcgctgcctcgatactgagggcctcacgtaaactcaatgacactaaaccataataccaaatgcatggcgcgaatgatagcacgagcaaagctacgattaccgataggccaccagaaccaccacctgttcgcaaataaggcctgcgagacgggataatcctatatattgacctcagaagtcttcctgcttcgctaggatgtgtcctggagcctgtatggccattccattcgtagctcgccattacccgcccaggggaccgatggcgtggttccttaccctcagttagccctgtctaatcctgtagcaagtcccggtcgcgtgaagcaggagtcagcattatctcgagattctaggagtaatccctgctgggcgtgagcatcaccaatagtacttaataggatagacttcgcgaaaccaaataaattcaagcactgcttattaccaattttgagcctggtctctcatttaaacctcctacaaggcctcagagtagctttcgagctctcccttcacatttccgacggatctacggctcaacattgagtagccgcaggccttacaaggacttccacgtcactcatggatcaacctccctccaaatctgctttctccgcactatatt

SEQ ID NO: 727428 - DNA, 153 bp, Homo sapiens
agtagagacggggtttcaccgtgttagccaggatggtctcgatctcctgacctcatgatccgtccgccttagcctccaaaactgctgggattacaggcgtgaacttgcgcctagccgagaaaagctatttctgacggaggcatgtcaaccaat

SEQ ID NO: 727429 - DNA, 376 bp, Homo sapiens
ttaaaattcggataaaaatctcataaataggcagtattgttatccaactgtgggataacagattatctatgggatatcagataacaaaggggatatgtcacacgaagacttatagcaaaaagtacaaatggcaatcaggatcaggctgtgagaatgtatccacataaatgggtacattaaaaagaatgataaatagggcaggcacagtcaatattttaggaaaaatatttgtttaatgcaaacagaaattaccccaagaaaaacatgccccatccataatcattagcttcaccatgacacagaaccccttcatagaatatagacgcatgccttatacacaaaccaaatcaggaggctctatgtatcccagaaccaa

SEQ ID NO: 727430 - DNA, 331 bp, Homo sapiens
cgactggcgtgttggtggagtgtcatcctgaggaaaatgggctacgacgaattacctggaactggtccagagaggccctctgagtgctgggaaggacactggggaaaatgagggggcgaatgagtgagagaagggccctgtcccggtggtggtctgaaccccactggggcagagatggcttaccttgccggtgtgtaggcacacacagcaggcttcccagcacctggcacaccctgtgggcagcaaagaagcaggtggcaattgcaggcagaagggtcagcaaatcacccatcaatacttgtccaacgccatcagtgcccctggtccccag

SEQ ID NO: 727431 - DNA, 304 bp, Homo sapiens
ccctgggggctttgaaaattaaaggcctgggccaaaggggccctattttttttcccccccttttggggcggaatccctccggggggttaaaaggccacccccccccttcctttaattttccccttgggtattttttttcccccgggtaattttggcctgggggggttccccccttttttccttttccccctggggttttatttggggttttgggggccttttggttttttccgggccccccatttttttttggggtttttttttttgggggggccccaccctatttaaaatttccccccttgga

SEQ ID NO: 727432 - DNA, 500 bp, Homo sapiens
  misc_feature (241)..(241): n is a, c, g, or t
  misc_feature (267)..(267): n is a, c, g, or t
  misc_feature (269)..(269): n is a, c, g, or t
  misc_feature (279)..(279): n is a, c, g, or t
  misc_feature (285)..(285): n is a, c, g, or t
  misc_feature (300)..(300): n is a, c, g, or t
  misc_feature (306)..(306): n is a, c, g, or t
  misc_feature (343)..(343): n is a, c, g, or t
  misc_feature (368)..(369): n is a, c, g, or t
  misc_feature (411)..(412): n is a, c, g, or t
ctgggttgtcgagaactgcgcgaggttacgcagggacggggttcgcaatgccccagactcggcctgggctgttgttttggagcctcagcaggtgggggtgcgtccctgtcagccattccctgcctctatccctggccacctgcagagcctccctccgggtgtgtgttttgagaccagcctgccaggccctccagcaggaggacagagtgccctggggcatccaccttcctgcccaggggangtggcgctgtcggtgtttggaggttncngccccctggntttggngccccatgggccctnagggtntccccatgttgggctcaatacatgggccagcccttgntttacctggccggtaggctgctggnncctaggttgtgttaaaagggggatgcccctggccctgcctcnntgtgacctgttcctgcccacgtgcagcccctgtccccttttttaaaaataaaatccccctgactgtggggggcatcggtttccggaga

SEQ ID NO: 727433 - DNA, 318 bp, Homo sapiens
atgatttttaccctggtagctagaaataaacatgctagcttttattccagtctaaccaaaaaaataacctcgtttccacaagaagctgccatcaagtatttcctcacgcaagcaaccgcattcataatccttctaatagctatcctctttcaaaccaaattatacctcctcccgggaccaatggaacccataatccaaattactacccaaatccaaaaaattttaactcatcattaataatcataatggctatagcaataaaactaggaatagccccctttcacttctgagtcccagaggttacccaaggcacccctc

SEQ ID NO: 727434 - DNA, 131 bp, Homo sapiens
acgcaacgccacacagcaggcctgagcagctcagcaacgagctggcacagagcgcagacggccagaagactgagagtgcccggagcagttcgagtggcagaacaaggagctcgggagcaagctccaggaga

SEQ ID NO: 727435 - DNA, 159 bp, Homo sapiens
gtcccagtttattagaaaaaaaagggccacactttaaaaataatctctttcttatatatgagaagacagctataggaaataggtgttatccaaaaaagacggaactgtgtatttttgtgttgttttttatttgtttttctttttttatctaataacttg

SEQ ID NO: 727436 - DNA, 1524 bp, Homo sapiens
ggtggaaacaatggagagggggcgtgttgagctggaggtctccaactgcctcgtgggtcgagagggagctcacgtacccaccagcaggcagttgctgtgatgactacgtggcgcagagcatcggccgccaggtggagtgtgcgcggagctgcagactggttggggtccttctacgcttgtgtggtcgagcggcccggtgtctgcgacatgggctcaaacagcaatgggagcaactggatagccaacgatccgtggggcctgacgacgggacgtgccctacaagcatgcgtcgggtcccccaagtacggagcatcgcgtgccgcatgtgtggcatccaagccggtgccgcccagggggaaaacgatgtaaggcgtgacgtacgtttagctattagccgaccgaagattcactaacggatcgtacgggctgtcctgcccattccgcgttgaccacatgaaacccgaggggtgattccatatcggcgaacaccacatggacgtctagtggaatccaccccgagggcacaggggaacgtatcgtggtcgccccctagtcacacactcggtgaacccgattcgtcagaggtttcgacaacaactgcgctacaaggcaaacccattcgcgcacccgtatgtacgtgttgtgcccttgcaacgtctgtacccaggcgtaacgcaaggatccccgtggaaggggcgcgttgtggtcaaccggggccctctgctgtgtgatcgaccgtatataccacgaacctaaactagccggtggttgtggggcacacagcgtgggtgcctgtctgttggcggcagaaatttcaaggcccctggagcccattgacaatccccaatggggagtccagggtactttcctccgatggggtcccaatttactggttcccaaaggatactgctaggccagaagctggacaaacggccgcgtgaacaatggtgttgtcgctaggccacacgcgatatgggacgggtgcggacttggccccatgggaaaagcaaaccgtacggcaccggcaaagaaattggaacgggggcggacacccaggggattaccaaaggactggggccccatgggaatgggagggatcttggcggggaacggggcagccgataagcaaggaagtacggaatgccacaaggcccggcgggcagtggaaccaatgtgcgacccgccgggaaaattcctacgataacaaagctcacgcgtgtagaaccacacctccggagttgtacatccctgtgggacaaccggtccagttggtggagggcccacgatagggttcgtcacgtaccaagaaattcgaagattacccccgttggaggacgtttcgacaggggaattcgccccactgggaattggagcgcgaccgggtgcattaagaatcttgggcataagtcgatgagtcgtgacaggcatcgtacagacagcagagggatatcggaggtttgcgcatctgtaaccacatgtcatagtcacaggtcgagccaacgtccagtttttaggaaacgagcg

SEQ ID NO: 727437 - DNA, 598 bp, Homo sapiens
tagcgcacgaggcgccttgagaagtaggtggggttgtggaaggtgcggaagatgctggctgatgctgcgcattggagacagggccttgtgtgattgcacctcagcgtcctgctcggctctttcatccaggcagccagtcacctgcctcgactccgcgtgctgataggtctgcatgcgctccagcagccccgatgagcgcctgttgccacgtcagcgagctgcatgtactgctccgtgttgaatatgcggatctcacgctccagctcggggatgatggcgcctgtgcgcgagccgtgccgcagcatgagatccgccagatcactatagaggtggtccccgaagtagagcacgcgggggccacgccattccgtcaagcgtaagaagtcaaacaggtttccctgccgatagatcttgcccttttccaagcgggtgatccggtcccactgaagtgagcccttctcatcgagttttctgaaaggcttgcgccggtcagtgaagaagctgggcttgtctgcctggacaatgaccacatcgaagagctgcgccaatcgggaccaccatgtgccgatcccttgttacgaagctaaggacgtggtga

SEQ ID NO: 727438 - DNA, 159 bp, Homo sapiens
acgtgcgatgagtaggggaagggagctactagggtgtagaataggaagtatgtgcctgcgtcaggcgtctggctggttgctcatcgggtgatgatagcggggggagggggggtttggtggaaaatttttttgttatgatgttctgtgtgaacagcggct

SEQ ID NO: 727439 - DNA, 134 bp, Homo sapiens
actctaccaggatccccggtgggcgttgaatggcccggaggcgcatgtccacttgtgtattaacacaccatccacatcagtacatggctagagtgcagctggcaagatcatagctcactacagcctttaactcc

SEQ ID NO: 727440 - DNA, 486 bp, Homo sapiens
gcactgttttccaagaagcacttagtgttacctataagtaaatgttgagcatttattttttagatatcgctttaaaaaatgccaaattagtactctgcctagggacccacatatttaaccctggagttatattccccagattcatatctgctatgggcagtaatctttccaacatacttctgaacttttgattgttttattttgttcatttatttatttaattagaaaaaatacaactctccttactatgcttgatgctgtgggaatatagaaacatggaaaaaacatggtctctgtctttaaataatttacaatcacttttcttatgtgacatcataataggagagacaggtctgaagaaaggctacttccactgtgcaagaaccagaaatgcagctgtacggagctccgttactcactatacaaagtaacattttatcacacaataaaaggaactcaaaagtttctcagtggttctgaaataaa

SEQ ID NO: 727441 - DNA, 797 bp, Homo sapiens
  misc_feature (797)..(797): n is a, c, g, or t
tggcttgtaacagtgttaattggatgatgagctccagtgctcctgctgaacccctgtgtggggaggtggcacagagcgaaatggggcgtaagggaatgcttgaaggtgcttgctcctgtgattcgtcgggctcagagagcttccagactatgtgcagatggtgcatgggtgatgtgccttctggtgcacacatgcctggccgcccatgtcaccctgtgcccatgatttgtgatgtgtgctgtgcctgtggccccttgcgcatgtgcactttgccaggttgtgtgctctcacacctcacgcgcacacttccgcaccagaggactctcaagggcgcggtcctccacaaactctccaacccatggtgcaaattttgacttatatggtgcaaatttaaatttcaagaaagggggactgggggtgaggaaccaagattggtcggggagagtgtgctttttgagaatctctctctctcaaagaaaaacacagtgggaaaacagacctgtgagaaaaaatcgccctccatagaaaaaccacaatagagatagaaccaagaaaagtggggttggagaacacaaatcgaacatagaaaaagaatggggagaaggtgtgtgcggggtgggggggggacgtgggcgtggctcaaatcccccctcgcttttgggagggagagcgtcctcaaaagctctcttgtgggggaaattagcaaattgtttgtgtgtgggccgtgtggggggggtgtccacaccgcgtggttcccgtggccctgcaatggtgtggtgtgttgggccctggatgan

SEQ ID NO: 727442 - DNA, 904 bp, Homo sapiens
ttggacggctgttaacagcaggtggggaggaacagacttgggtgagagttggagggggataatgggggagacaacacatagaagaagggttgtgtctgtagtgttcgcaaggaaagggggtgggtgcacaacggcccagcagtatgatagagcagaagactggtgctaaataaatgtcctatgtgttccctacaaatagtgtgtgtgtcgccccagcacgcgccccacatatatttataagccgttaccgcaaataacatagagctcttatataagaggtgcttcacaacaaatatttttggccctctgttaactgatagagaaaaaggggtgaagtctggctgtctgcctattggtcacacttgtggaggagaaggggcggctctagttccagcccttatatgttatttagttggcgcagagatttccacattgttttgtttcccccctgtggtagcatataaagggctataaagacatgctgtagaggactttagaaaagttatacatctttgggcccgctctgtcagataagaggttttcttgctctgtctttgtagaaaagaggagagtaataatatgagggccacgagtgtggtgtgcgtctacgctctgtgagtcctcaagcagctttgggagggccacatgacgggcgggagttactgaggtcacagaggactcacatgagtcatcctggcgccacaatggtggaaccctgtttttatctctaaaaaatacccaaatgaggctgggcattggtggggccggtgccctgtagtcccatgtacttgggaggctgaggcagggaaatttttgttaacccacggagacggaagattccaatgagctgagatcgacacccctgcactccagcctggtgacagggcaaaaatccgggttttta

SEQ ID NO: 727443 - DNA, 1162 bp, Homo sapiens
cctctctgctttctgttatttgttctgtatctcggtcgtcttgttctttcttcgtgctctcctgctttgtgggatctgtcgccttgttctctctctttccccgaggggcgcctggttatagtccctttggtggtgtcttcatacagtagctgtgctgcttctgtgagctgacatccacattctctttgcttcgctctctatgtgtttctctcgttcttcttttatgtttcgcatatgtggtagactcgtgaccttctttcctattcgctatggtgttgtctgtataccttctctttgtctggtttcgcttcgggtcttgcccgtcattgtggttctgggaccccttgcctctggtacagtttgatccgtgacatggtaagtgccccaggtccttgttttccgcgccgtacgttgtatcaccgtgtaacggccttggctgcactgcggcaccctggtatatttcggcttgagctgcacggctacatgcacagggcaattgctcaaggacatcagtccaacgacgtgggtccgcggcgcgcccctcgcacaaggtggtcttccgggatccgtactcggtttaagaatctggatcggatgcatgttcattgccagccgagggcattcacacgggccagtttgtgtattgcggcaatgaaggcccagctcaacattgtgctaatgtgctccctgtgggcaccatgcctgtagggtacaatcgtgtgctgcctggtaggagctagcctggtagacacgtggcaagctggactccgggcatcagggaatctatgtcctaccgttatctcccatcaagccctgtagacacaagaagacccgtgtgaatgctgccctccggctccaagaaggttatctcctcagaccatacagagcctgtggattggatgctggctggtctggaggtgcgccgaatttgacagaacccatccttgatagagctggccgggcgtagccaccataatataagagcaaagaggaacctgctggccacgagtacggggtgtggccatgaatcctgtggagcattccttttggacggtggcaaccacccagcatcatcgggcatagcccagtcacaccactctcgcagagatgacccctgctggcacagcaaagtgggtctcatttgctgcccgccaggactgaa

SEQ ID NO: 727444 - DNA, 217 bp, Homo sapiens
tcgccagcatccggaccctcgaattacaacaacgttgctcctgcctgggtcggcagctccacaaccctcaagctaaaacaagacctctcctccctgtgatcaccagcttcctgaccctcgaattacaacaaaattgctcctccctgggtcggcagctccacgaacgtcaacactagaacgagatctcgtccgccgcttctcgacagtttccggtgcc

SEQ ID NO: 727445 - DNA, 167 bp, Homo sapiens
agccagagacattcagaaagcttttagctctatattcgcttggtgctgtgtgagcgaaggacccctctgaatcctgaaacccctcttgcctctcttccacgtaagagggcctgtgccccgtggagcctcagtgcccgtttggcctgctgctctcgctgacaataaag

SEQ ID NO: 727446 - DNA, 487 bp, Homo sapiens
actctgtctctacaaagaataaatttaaaaaaattagctgggcatggtagcatgcccctgtagtcccagctacttgggaggctgagatggaaggagcacttgaactcaggaggtcaaggctgcagtgagctctgtttgcatcactccactccatcctgggcaatacagtgagaccctatctcaaaaaaaacaaaaggaagtatagttcctatagtttctattgactgcatatggcttttgcaccatcataaagttgaaaaattttatgctgaaccattgtaagttggggaccatctgtacattatgtaaatattaattctaaaaatgagtttggagtttattcatttgccttttttgttacccttttaattatctatccaaatattacctgtgtacatataatttctgtgccagatcagggcaaggatgtgaagagcatttattgttctagaagctataaatttttaataaactttttttcactgga

SEQ ID NO: 727447 - DNA, 282 bp, Homo sapiens
  misc_feature (24)..(24): n is a, c, g, or t
  misc_feature (34)..(34): n is a, c, g, or t
  misc_feature (37)..(39): n is a, c, g, or t
  misc_feature (64)..(64): n is a, c, g, or t
  misc_feature (72)..(72): n is a, c, g, or t
  misc_feature (100)..(100): n is a, c, g, or t
  misc_feature (105)..(105): n is a, c, g, or t
  misc_feature (139)..(139): n is a, c, g, or t
  misc_feature (144)..(144): n is a, c, g, or t
  misc_feature (163)..(163): n is a, c, g, or t
  misc_feature (189)..(189): n is a, c, g, or t
  misc_feature (192)..(192): n is a, c, g, or t
  misc_feature (196)..(196): n is a, c, g, or t
  misc_feature (201)..(201): n is a, c, g, or t
  misc_feature (204)..(204): n is a, c, g, or t
  misc_feature (207)..(207): n is a, c, g, or t
  misc_feature (271)..(271): n is a, c, g, or t
taaaatgcaaacaaaaaaaaaaanaaataaaaanaannntttcatggattattcaaggaaattntaaaattngcttctgcctagtacttatacatctggnttgtntgtcttgatcttcagataaatacattctcaaggnatgcnagcgaaactgagcattttnctcatgcttaagacatatggtccaangcnaaanacttnccngcntaaccatttccctcaattttcacagataacaacaacacaaaaacccacattcaaagtacgggtntttgacagtca

SEQ ID NO: 727448 - DNA, 211 bp, Homo sapiens
gtctctcccatgccatggggggctggttgaggtgatatctattatacttgctactctgttctggggttcttggcttggggcctcctggtctgttctggtccccttgctttcccccttcttccctgtctgctgctcgtactgtttgggctcattgtcatccctctcggcctggtttctcgtgcctgcctccggggccctgtgctcattcttt

SEQ ID NO: 727449 - DNA, 189 bp, Homo sapiens
aggcaaagctcctacggagctcaggtgtatttatggggttgcagagcaagctgttaagggcgaatttggtatgactgagctcagagacctggtgggagggcaaggactgccgggcacagcaggaggagattagaggagggtccacccgtgaatctttgcagcaggcacagagctttctggcttgcatct

SEQ ID NO: 727450 - DNA, 500 bp, Homo sapiens
  misc_feature (32)..(32): n is a, c, g, or t
  misc_feature (146)..(146): n is a, c, g, or t
  misc_feature (331)..(332): n is a, c, g, or t
  misc_feature (407)..(407): n is a, c, g, or t
  misc_feature (412)..(412): n is a, c, g, or t
  misc_feature (435)..(435): n is a, c, g, or t
gggatggttaatgggtacaaaaaaaacaaaangaattaaaaagacctactatttgatcacacaacagattgactatagttaataattacttaactgtacctttcaaaataacttaaaaaagcgtaattggccaggcacagtgcctnacacctgtaatcccaacactttgggaggtgaaggcaggaggatcacttgaggccaagagttcaagaccaggctgggcaacatagcaagaccttgtctttacaaaacaaaggtcaggcgtggtgactcatgcctgtaatcccagcatttgggaggctgaggtgagtggatcacctgccaacacggnnaaaccccatctctactgaaatacattagccgggcatcaagggtgcatgcctataagccactcgggaggctgaggnagganaattgcttgaacctggcaagcanaggttgaagtgagcccgagatcgtgccattgcactccagcttttggtaacagagcgacgccatct

SEQ ID NO: 727451 - DNA, 961 bp, Homo sapiens
acagatactgctgtgtgtcttgcttgtcttatttaggtacacatcagcatgttcctgttcatatttatacctggatattgttattcttttttttattttttattggggaagctcagagaggcttcacaccgggcacccgaggcgggagggcaagggcaaaatccgggaatcacgcggatcccgcgggtcaagccggcctcaccggccaccaggagcaagcggggattccgggccattgtggtccaccagcgccggggcaaatagagggaataataagagtagcagaacggggtaatcacaaagtcggagggcacccaaaacccgcgaacatcgagggtgaccccaacacaccacgggcactcccaaaagggcgcgggaactcacacagcggtggtggagacacaccgggccccgaaaccacgaaacctatatacactaccgcgcaaacactctacacactgagctcactcacacactgggcaaacccgggaggaaataatgggcgtgacctaaccactaaaaccccaacgcaggagacactgtgaacaaataaaaccacaggatgaagggaggtccaagagaatagagccataccaacgatacgtgaaaacacaaaaaatacatagcacagaaacaaaaggacacacacgggggatcacacaaactgtacacttacccataagggcgcaaatggtgaaaaccaattatagcccaagggctaagaatacagcatcatcgatagcaccgtcaagacgaaagaggggcaaaaaactccacgcgaacaacgcgtacaacaacccacaacaagtgagggaaccaccacccagtgggagcagatataaaatcacacatcccaagcgcacccaagacatacaagagagagcaagacgaccggggataaccacggagggcaacattgcgggcaacgcccgtacgacggacggacaactaacacaaaagg

SEQ ID NO: 727452 - DNA, 1197 bp, Homo sapiens
  misc_feature (32)..(32): n is a, c, g, or t
  misc_feature (161)..(161): n is a, c, g, or t
  misc_feature (167)..(167): n is a, c, g, or t
  misc_feature (974)..(974): n is a, c, g, or t
  misc_feature (981)..(981): n is a, c, g, or t
  misc_feature (1018)..(1018): n is a, c, g, or t
  misc_feature (1060)..(1060): n is a, c, g, or t
  misc_feature (1083)..(1083): n is a, c, g, or t
  misc_feature (1197)..(1197): n is a, c, g, or t
atctttgtgtttgggtgtagatgtccacagcncccgagagccgctgctcgagagaacacaacacacaaccaagacaaaccgctcctccttctccaatgggcggacgcgatgtgcgggcacgcggaccgagcgtggacatccgaacacacagctgcgtcctntcgtcnatctacacctgtcttatgtagttatttgcgagtgatggcactctctgaacattcttgaccactactatatatgtagcgcacgcttcacttgtgacacacccacgcatctccactccttactctagacatgaagtatacactgcaagagaaggcaccacgactgtgtcctcccacactcccaccccacactccctctctccgccccccaccccgcggtaaccgcgcgccgacgagcctacgcaaaataagaaagataacaagcttttgtttatcagttttgagggagcagactgacgattgagcgggcgcgacgcgggatatcgaggactctgccaccactctccccgcccgccaccacaacccgacgaaacgagtggggtgacgacagactcgccaacccgtatccgttcactataataatcagactcgtgtatattgtgagaaggaaggggggtgtagatgatccgtgcagtcacctcagactcaactaattcacccaatttatatattgcgcagacatttgcgcgtagacacgatgtccctgtgccatgtgtacataattctcataactaagacagaccacacatctgcctaattcccaaacaccgcacatgacgactgcactatgtccgccgcgccaggacgtagtacacatgtatgtcacgtgtgttcgcgtagaccgtcgccacgtgatagagacgagcggaatgcaagacgaacagcaaagagagaattaaatacgaataacgacagagtgataatagatgactatgaacaaacagcactatagagaaacgatataacagnagaatanataggagtaatcgtcgagcgagtgttgagagtagcgncgtagatatctacttcgtagcgtattatactatacaatgccntgtgaagtgaatacaaagtctanattatgtactacattcactatacctatgtacactcagctatattaacacacgtgacagagagccgcacggcagggcgcggaggtcgtaagacgcgatagtcgcagcacagcagn

SEQ ID NO: 727453 - DNA, 713 bp, Homo sapiens
ccttgcggtctcaactcttgtatagccaacggttaaaaatggtcgacataaaaaaaaagacattttgattaattaatactgctctttgggctgtaataaataaaacagtatattaactaaggaatgcacgtttaccacgccacaatgtatcttcaaagaattaatcgaagaaaacattatatactggccactagttcacagtgtacgcagaccaataagctaggtccaagttacagaccttgtaaacaacatgtggagctgccgtccctgtctccgctccccgttcacggaagatatagtatcacagttccaagagtcctcttggctgaacatgctctcaaccagagaggaatttaacgaatcaatgcaccgtttctgcaaagattgtctagaaaaaccttttaaaacaggtatctcaaggaaaactgcattctggttcactcttggattgtccagagtcaagaactgtatgccttagcctgttctggttccaccccagtccagcaggccacaggggaattgtttgcgtaccaccacatgtccatctgcttcaacatactctagatcattcttttggcttccctgtagatctcacagtggacaagaggagcccatagggtcattcgaaaagtcttcagtaacatcttgaagagcatgtcaggctatccattcgattttgatctgatgacgcagaatagagagtgtagctgaat

SEQ ID NO: 727454 - DNA, 123 bp, Homo sapiens
taccattgcacgctcggtatgtgcaaataaaaaaaagtagtggtgtacttcagaagctggatacatgctatatgatgaccttggcatttctggccatttcaccatcatttacaaccaaggctt

SEQ ID NO: 727455 - DNA, 356 bp, Homo sapiens
aatagcggggattactgggagtgtagcagcatacctggctaatcagaaccgtattgcgggaagagagggggttgcagcatgtgggccaggcgtggtcttgaactcctggactcaggtgatcttgcttgctcaagctcccaaagttgcttggcatcatagtgtgtgagccactgtgcttggcctccctcacccatttttcatacctccaagcttggtgtagacttgtccccataaccggtggctgtcgggagtgaattctgccccccggttctgatgttggagagccagtgattcctgccagggcttcaccttgatgctgagtctctcaggctgtgccataagttggcacggggatc

SEQ ID NO: 727456 - DNA, 162 bp, Homo sapiens
  misc_feature (20)..(20): n is a, c, g, or t
catttcattttttaatcttngaagcttatttaggctttgaacaaagttattcttaaaaattcaagatcatattttcaatgtaatgacatctgtttattggcattgaaaaaatagcatttttttaaacttttattttaagttcaggggtacatgggcaggatc

SEQ ID NO: 727457 - DNA, 396 bp, Homo sapiens
tcggtagaattctaattgggggcgcctgggccactatgaagaagttcctcatcacaggcgctggggtgtggataatttcagaggcccttcttgggatgtcacccttcaggtcctcttgagccattcttgtgtttctcctccactttctgaaatgtctctaaaaacctctccggcatcttgacataaagtccactctgttttatgcggttgatgagttcccgagctttgtcctacagtgtgttaccaacctctttcagcttatccaagacactgaattcgtctgggtgtcccgtggcctggggctggacctttcaaccgtatcgacaataccccccacaggagcgagatctacagagagagcctcatggagagaccggaggggcactttgactctct

SEQ ID NO: 727458 - DNA, 415 bp, Homo sapiens
  misc_feature (392)..(392): n is a, c, g, or t
  misc_feature (399)..(401): n is a, c, g, or t
taattattttgcttatgagagcaaatgaatgcccaaatagggaaaatgttggctagacaacagagtggtaaattaaagagaaaaccatgttttaaattatctttcaaattttattaattttctaattgttattttctttaagtggtctacccattatctttctttttttttcagcataaatgtgagcctccctttctgcaaatttgttaggattggaaatgggggtggggcgtgaggggggaagttgtactttggtggcaaggactgcttagcacttttttaggaccaaagcccacagtcaggcttcacatttctcagtttccaggtgtgtgaatttctaatactgtgttgtcaaatgagcactaatttgtatgcatttctaaaaataaaanaaaattnnntttaaaaaattaaa

SEQ ID NO: 727459 - DNA, 414 bp, Homo sapiens
  misc_feature (13)..(13): n is a, c, g, or t
  misc_feature (26)..(26): n is a, c, g, or t
  misc_feature (101)..(101): n is a, c, g, or t
  misc_feature (403)..(404): n is a, c, g, or t
  misc_feature (407)..(408): n is a, c, g, or t
aagcaatatacgnccctcccttcctnctcctaaagtgctgtggcctggtggcccttaaaaatatagattttctttcttttcccaataaagaaaaattaagncccaggcgcagtggctcacacctgtaatccccagcactttgggagatcaaggtgggtggatcacaaggtcaggagttcgagaccagcctggccaaaatggtgaaaccccgtctctactaaaatacgaaaattagctggacatggtggtgtgcgcctataatcccagctactcaggaggctgaggcaggagaattgcttgaacccaggaggtggaggttgcagtgagctgagatcacgccactgcactccagcctgggtgacagagtgagactctgtctcaaaaaaaagaaaaagtaaaattnngtnntttaaa

SEQ ID NO: 727460 - DNA, 102 bp, Homo sapiens
gaagatggtgcttaaccattggtgaatgagccaccccacaacacacctccaccacctattgtttccagacagaagcctgctgcatgatagagaggtgttggg

SEQ ID NO: 727461 - DNA, 132 bp, Homo sapiens
tgataaagcacaagatgctcttcaccgactaccaaaaatccgagcagcagaggcaaccccagagtactgactgatgacaaactaattccgtgatcggattcctttgctttaagtatattgacggcgagagca

SEQ ID NO: 727462 - DNA, 80 bp, Homo sapiens
tgtgtgctctcctggccctgaatggtgcactccagtgcccaccagccttgtcctaaataaaattaatgttgtatcatttg

SEQ ID NO: 727463 - DNA, 108 bp, Homo sapiens
caaaaaaaccccccccctgttttttcaaaaaaaaaggggggggatatgggtttccaaaaaggctgattccggggtcgaggggggggataataaaaaatttccttttta

SEQ ID NO: 727464 - DNA, 177 bp, Homo sapiens
caacggttttgtccacatatcagaggctaacgggcactgagggctactgttctctctttcattacctaagaccctcagttaagaagggacaggcaggcttggagttcccattgcagcccagtgtaaatgaatccaactagaatccatgaggatgctggttctatccatgatgagagt

SEQ ID NO: 727465 - DNA, 1171 bp, Homo sapiens
caggaccgggtctggacttgtgtcttcccccgtaaggaaatggccggggagctccagtggacccagtgcgccgtcgcttcgtgctgtgagcctggtgctgaccagccaggacagctggtggtaaaccctgaacaattctgctgctgagtgtatgggagtgccatgtgctgtcctgtgcagtcaactgtgcatctcctggggtgaatgtctgtgcttggtgatggcctacgtggagcctggtgtttgtacttgctatttatttattgtgaagatggcaaatcatgcgctttgcaatgaaatctcgaaggggacctcatgtccctgtgggacacaattgcccccaaggacttgaaagaggagattgatattcgactctccagggttcaggatatcaagtatgagccccagcatccttgcagatgatgatgctagactactacaactggaaagccagggaaatcaaagttgctacaactatctgtataggatgaaagctctggatgccattcgtaacctcatgagatcccatttcattctgaaggccggatccccgtaccttaatgggcaagaatatactgctcctaccttgctggatctgcgaaacactagtacgccttacaagggtgtacgcaaagcacctcattgatacccttttggatggatctgaaaccagccgctatgggacaggcgtccaagggaccacaatgaagtacctaacgcaatcaggcaggccatgagtgagcatggcaaagcgggtaacagcagaaatagggagacaaacagaaatcacagaacagaagccaaagacaagcaaaacccctgaggacccacaagagacgacaggtacatacatctccctcacacagaaagcagttaaggtgcaggccaatcttgaattgaaagcacaggtcattataacatatgaaagaaagtgagagtaatgaatgaaattgaagtaaataaaacacaaagataaagtgtgaaagaatggtatgagacgacaaggaattgtgagggtgtcaaggatgaataaggagttagtagcaatagatgatatgaacatcagcataagagtagaggaaataaggcaaataaaaaagaaataggtaaagtcagtgtatctgtgataagtaggttagcttgttggtgtttcttgaataagagtgagtga

SEQ ID NO: 727466 - DNA, 439 bp, Homo sapiens
gataaaaggacagcgacagtaagacagagcgtagggtacaacaaagggcaaataatcgtaggcacgagcccctaaagagaccgataggagacacaagtggtgatcagtgacagcattagcgacgtaacagagacaatgtatgcggcagcatagctcacagcggagaagatagctatggggccacagggggcgcatgtacatgtagatcgaatcgaccatcgggaggcggcacgcacacaggtaggagaacaggcgaacggagacaaaagaacacagctccagagaacaaccgcgcaggacggaatctctgtatctctctctctctctctctctctctctctctctctctctctctctctctctctctctctctctctctctctctctctctctctctctctctctctctctctctctctctctctctctctctctctct

SEQ ID NO: 727467 - DNA, 862 bp, Homo sapiens
gaaattggtgcacagaagaatgtgggcgcgaccacggtggcatgggggggccaattagagcgggcgtccgacagataagtgtgcccacacccccaaagaggggcgggaattgccaggaaaggtgtgccaccgagaggagttacaaaaggtcatggggcgaaccataaaaccaacaaggaagggttggcgcaccaacaggtcaaaccccgatagggcctgcaccccacggggcggataaagggcagccaagatggagccgcgtgcacctgataagtggtagggcgcccactccgggtgccgctgcttgacggccccagcgcgtttcaaggaccccgccgtttttttttccggagagatgtaaggccctgccccggagacgagttacacagatgtgggagggcgcggaagagacatgggttgtaatgtatgctcaaaataggaagcccccccggcgagatcttctgcgcgcggtggaaatagaacgaggcgacgatgagctcccgtgcgcggttggcaactcacggggtccacactctaacatcgcccccgagtaattggagggtgctggctaattctttttgcgcgccctctgtgtttaatcggcgaaaacaggcggggcccgagccctctgggctcgcagccctcgtcttatgagtactacaggtccccttcacaggcggaactaaggggcagggcaggtcgtattgatctcccccccttctatgccatgagtggatatttcttctaggcggatagagcccccgatcagttcgagaaccccgcaacatctttggtgtcccccacattgtctcgtcaaagcgacagaggggccccaaacaaagttgaatttctggcacaacag

SEQ ID NO: 727468 - DNA, 631 bp, Homo sapiens
  misc_feature (519)..(519): n is a, c, g, or t
gaaacttcgttgtgatgtgtgcattcaactcccagagttgaacctctcttttgatagagcagttctgaaacaatcattttgtggtatctggaagtggacgtttggagcgattcggggccgatggtgaaaaaggcaatatcttcacctaaaaactagacagaagaattctcagaaactgctttttgatatgtgtagtcaactcacggagttgaaactttgttttgatgcagcagttttgaaacactctttttgttagaatcttcaagtggatatttggatagctttgaggctttcattggaaacgggaatatctacacataagaactagacagaagcattctcagaaagttctttatgaagttcgcattcaactcacagagttgtaccttccttttcacactgtagttttgaggcattctttttgaagaatctgcaagtggacatttggagtgatttgagacatagggtgaaaaaggaatatcttccgatagtagacagaagcattctcagatacgactntctgatttggtactcaactcacagagttaaacctttcctttgatacagcagttaggcactcttcttgtagaatttacaagcggatattaggacagcagtgaggatttctcgg

SEQ ID NO: 727469 - DNA, 279 bp, Homo sapiens
  misc_feature (271)..(271): n is a, c, g, or t
ttctcgtacatgttagattattggatcaatttgacgtatagtagttcgctttgactggatcgaagtcttaacaatgatactcgctctgtgagagttgggttctgctccgaggtcgccccaaccgaaattcttaatgcacgtttggtcacttaaggacctgtgggtttgttatggtactcgtctgcattaactaaattaaagctccatacggtcttctcgtctagctgtgtcttgcccgcctcttcacgtggccggtcaattccactggttnacacgttt

SEQ ID NO: 727470 - DNA, 1012 bp, Homo sapiens
gtgaaaccccggtctctactaaaatacaaaaatttagccgggcgtagtggcatgcacctgtagtcccagctacttgggaagctgaggaaggagaattgcttgaacccggcgggcagaggttgcagtaagcagagatcgtgccactgcactccagcttgggcaacaaagtgagactccatcacagaataaaaaaaagaaacatgttataccttaacctatagcctggaaatcccgtgctctgagtgtgctccatctttctgaaccaaaccaatgttatttcttacacgtatttcacttgatgtctcatgcctccctaaaatgtataaaaccaagctgtgccccgaacaccttgggcacatgtactcaggacctcctgagggccagagtcacagggtcaataatcactcactatccggctcagaataaatctcttcaaacacattttacagagttgactcttagtcaaccatgtccatacctgatgagatgcttcatcacaaattctagtggactggctagttccagaacaatggacacagccaggtttgcttaaattgacacccctgacacaaggtatctcactcctgcattggaggccggataggatcaggagaccctgtcccataaactaatgtactccatgtcataaacgcctctcaacgcacaagttcacgatatagacataagacaacacgtctcaagacctgacaaccacagaggcaggagatgcaaaaggcgggaaaccatgggcacagacgaaaaacgaccgacatccccagcggcaaacgaacgatgcacgggcccacagcagaccacaaagacccagtgcggaacaacacaggagagcagaacccacaagatgcccctggcaaagatagagcgggcgcacaaggtcaaagacgcaggcacccaccgcgaatagcgccaacacaggacccaaaaccgcgaaacccacccgagccaaagcaagcccaccgcacagagcgagaatacacggacaggaaaaaccaca

SEQ ID NO: 727471 - DNA, 407 bp, Homo sapiens
tccataatgtgtgcccagactggagggcagtggcgtggtctcggctcactgcaacctccacctcccaggctcaagcgattttcctgcctcagcctcccaagtagctaggattacaggcatgtgccaccacacccagccaatttttgtatttttagtagagagagggtttcactatgttggcctgacctcgaactcctgacctcgtgatccgcccgcctcggcctcccaaagtgctgggattacaggcgtgagccactgcacccaggctttttttttttttttttacaaatgggtttcaccagtgtagtcaggctggtctcaccctcctgacctttggtgatcagcctgcctccgtttcccatagtgctgggattggggcacactttatggaggggtcaccgagctcg

SEQ ID NO: 727472 - DNA, 242 bp, Homo sapiens
atgctgaggtgatctagaggatccgcagggtggtgaatataggatctataatttacatagtaggaaagtgttactttagccccgcttttttaaaaaaaagcaagattacaatttctgtatatatttcaagatgaatcattgtaatgtgacgtgaggctcagattagtgtgttaccgataatgtattaactagaagacaaaagaggacagcacataacattttccactctaccagcaaaaggg

SEQ ID NO: 727473 - DNA, 134 bp, Homo sapiens
tgggcatatgcagggcttctggaacaattaggggcagctgaaaccatttgggagtctcaggcattggcttgctcttcccatgatggctcgtactctccactaggaacagattcttgcgtgggtatggctcagca

SEQ ID NO: 727474 - DNA, 634 bp, Homo sapiens
agagtgacaacctgtctttaaaaaaaaagaaaagaaaaaaaagttattgtgtaagaatagccaaaaggggaaaaaatagatgttagtgaaaaaggtactagatattaaagcacattttgaagcttcaataatttgttctacagaagaagcaaatcagtagataaaatacagaatccaaaaatagacctaagcatgggaatttagctgtagtagcattgcacatcacaaagggaaagcatgtttgggaagatatcacttagatctctgcctagcaaaaaacatttagattgatgaagaattgttaaaaaaaaaaaaacccagaaccctaaaaacaaaagaaaacgtcaataagaaagcatgaattaatttatgtttttgttgtgatactttctttttaaacagataaaaaatccagatgccatagaggaaaaaagtgggtacatatatttaaaattctgagtggaaaaatgttattgtaatcaaagtcaaaagacagatgacaaaccgaggacaaaatatttttaccacaaatggaaaattttcttgattgacaaagacctttgtaattgagaatgaaacctactaatagtctaattctaacaagacaaaggatttgaataggcattttgcaaaa

SEQ ID NO: 727475 - DNA, 312 bp, Homo sapiens
acagggagactttcacaatgtccggagcccttgatgtcctgcgacaataaggaggaggatgtccttaagttccgttgctgtaggaacccacttaggtgcaccaatcttgacttccagatggaacagtacatctataaaaggaaaagtgatggcatctatatcataaatctcaagaggacctgggagaagcttctggtggcagctcgtgcaattgttgccattgaaaaccctgtctgatgtcagtgttatatcctccaggaatactggccagagggctgtgctgaagtttgctgctgccactggagccactcc

SEQ ID NO: 727476 - DNA, 112 bp, Homo sapiens
ctgacttcgaaaggctgctgttgtgatggccgatccctattgtgtggctttgtcgagttattgcagatgcccagaatctacgtgaactgaccctactggagtaggaataggt

SEQ ID NO: 727477 - DNA, 1197 bp, Homo sapiens
ttcaacatcttgataaaaggagtttgcctgagaatggagactataatcccagatccctgagggctaggagagctgggtgggggcgctgacacttctgtgtgccctggtagagtagccaccctgagaaaaaactgataataaagtgacgagctgtaaatgatggctatggggaaaacaactatttcagagatttttctcattgctttgcaaagcgacctaccctgagcagtatgggactcctccggatcatttttgacatttgaatgttctttcctgacccttggaaaggatatatgtatgtctttcaaatttatagtatcgaacatacaatttgggggctggtaccaagggttagatattaagtttattaagtgcttgatgcaaaagtcaaaggatggcatgggaggtacctggttggctgtgataagtaaactcgtggattttgaagggggagcagtttctggtttgggtcgcagtggccaagtaagacccaccctcctcagacactatcaagaccaagtccactggcttttcatccgtgttttcatccagtaaccaaataaccctgtccttgctgacccccacccagctccattcccactcacccactcccaagggccctctggtgaaccttccaggctagctctctgctccctccttgccttcatggaaaaccagctatcctctgagagccacttctgcagcccctccaagtggtggcttttcttctcaaacctcaacctcacatatctcatcttccccaggctggggagtcggggtcctcgtaccactgccagactgttcacccagttcaaagaaaaccctgcccgttgcaggctcatgccattctactacatccctttcatccaattctttgtgttctactgacttccccagcgcttcctttgggagaaggtgccattcttcaatagttgattcctctctagaaatacaatgttcctgccaggtgcggtggttcatgcctgtgattccagcactttgggaggccaaggctggtagatcacctgagtttgagaccagcctggccaacatggtgaaccccgtctcttactaggttccagattgtgggtggggggttgcctttccccgtttcggggctggggaaaatcttacccgggggggtttagccgtacgcctgtagcggggttgccaaaaagggggcaatatcgggggtga

SEQ ID NO: 727478 - DNA, 462 bp, Homo sapiens
cagttgattcatctgttgatgacacagcacacaggagccaggagtgagtcacatcatagacttcacctacatctcattggaatgttcatatgtatagctggcaggacagactagacaggaaggccagtccatggttagcctcatataatcaggatcgggtacagcgaccgcaccctccaagggatggccacggggactgttatgcgcgagctgagcatctgtactggttagcggtaagcatggttaaccacatctctgaccgttcagcaggtgtgagtgggcacttatataagcatcccaggtacagcagcactgtttagtagtcgactctagtcgacgggaggtataaaatagtacaagggcaggcagcactttctcctccaccccgcagcaatcagctacaagatgtctgccttgtcgcaataaaggatttgcactagccctgcatctcgggcctcctag

SEQ ID NO: 727479 - DNA, 204 bp, Homo sapiens
ataataccatttttcaaaattaacaatagagctcaatatgtaaaatgactcgttactcatgttagggtaaaaagacagaccagtggaaatgagtagaaagtccaaaatcagacctatacgtatacattcaccagatttgtgacaagcgtgccactatagtgcagcaaagaataaatggcctaatagccttatgaaaaaaaaaaa

SEQ ID NO: 727480 - DNA, 834 bp, Homo sapiens
gcgcagacgcagagcttcgctcgtactcggtgcgccgtcgcttggcttgttcctccgcaaccatgtctggacaaacccgatatggctgagatcgagaagattcgagtaagatcgaaactgaagataggacagagacgcaagagaaaaatccactgccttccaacagaaacgagtggaggcaggagaagcagagacaggcgaagtcgtaatgaggcgtgcgcgcgtcaagtagtgcactgtgacatgtccacaagcagttgccttctgtattttacttctgttagctgtttaacttggtaggatgcaaagaggttggatgaagtttaaatgacttgtgctgccgcttgcacgatcaagagaacttactgacaaacgaaggccgtgcctgactttcccatctgtctatcgtatctggctggcgagggaaggaaagaacttgcatgttggtgaaggaagaagtggggtggaagaaggggggtgggacgagagtgaaatctagagtaaaatgaagctggaccaaggtgttcatgcaggctgttattgcagttttaatcagaggtgccatttctatgttatgattgttcaaagtgatgataagttactggaatggcccaattttttttactatggctacagtgggaagatattcacagacataggtagaaatattgtggggccacgcattgggtcagaaaaagtattggaaaacagatttggttagggggcgggcgcccagaggatagggataaaggggaattggcggcacctgagagaacctgggcttgaaaaggggggggtttgcacaaaaaaaaacagcggggggtaaagagggta

SEQ ID NO: 727481 - DNA, 669 bp, Homo sapiens
ggcagaaagccgcggcgggggggcaaaaagcagcggaggcaaaaaacccgcggcggcgggccagcaaaaagttggcatccgcgggaagcccaaaatagtggaactggggtagaagaccagcacatgtctgtgggcattccctgtggagtgtgattgtcggccaccgggacaccccgttgcaggcgggcaaggaccaaacccacaagattgagcatacattttagggggcaaaccccgaaagaaggctttaaaacccaaaaggttacgaactactcctaactcgtaggaattcggacttagaattacaattctccatttatcatttggaccggggattacccttttcgtggccaaatgttgtgtgagttaccaacccttagtgggttgttggttgggcagaagacacctttgttggtccccaccttgaaatgggcaggattcacaggaattattcccttttctcaattttgctggcaaaagtggcctcaaagttgtgggttcacacggcgaacagggacgcggaagcacaggcaagggaacttggcattccattccaggttcattacgaggaccagaagtggagtgctttgttgggcccaggcccttcttacctttgacatataaacccaaggttcaattgtcttcaagtggataccttctactacttaa

SEQ ID NO: 727482 - DNA, 387 bp, Homo sapiens
caggaattcggcacgaggcaagacagaggcttcagaacccaaaaagtggacgggaacccagtttggccagtgggatactgccggctttgaaaatgaagaacagaagctaaaattcctgaagcttatgggtggctttaagcatctgtccccgtcattcagccgccctcccagcatgactatcaggtccaacatggccctggacaaaaagtcttcagaaatgctccagcagagtctgcagcaggactatgaccgggccatgagctggaagtacagccacggggctggcctgggctttaactctgaggcccgaaaggtcttctacattgaccggaatgcctccaagtctatcaagttgcaagattaaatattattgtcttgttcttcaaa

SEQ ID NO: 727483 - DNA, 319 bp, Homo sapiens
ttggagtggttctggtcagagggctctaagctggtgcagccttgtggttgggctggtgtcctggaggctggccctggccatgcccagagggttgtaccagggccacggagagccagtattcacagccctctacctagtaggccacctgggggatcccatctcactgccaggagcagcacccttgggcctctcagagtgggcttcgccctagccagatgcccctcctcgatatctgccagacaaagggggctgggccacttgctgagaaagggagctgggagagccactggtcctcggccacctgaggggcttggccaga

SEQ ID NO: 727484 - DNA, 134 bp, Homo sapiens
ctactggtggtgatagcatagcttcgtgtaattatgtagatgcaagatttttttaatcttcgccttaatacttttttatgttgttttattttgaatgatgagccttcgtgcccccccttccatcaccaccaggt

SEQ ID NO: 727485 - DNA, 147 bp, Homo sapiens
tattaatctgagcgaggagctgtggtagttggtgatcccaagaacgaaccaacagaccagtgcatcagcacaacagaccggggttttccacgagcccgctacctgcgcccggaccaccaactacaacagctcctcgctcgatcttac

SEQ ID NO: 727486 - DNA, 988 bp, Homo sapiens
ggagaggcccggtcgcggtgcgggggatggtgcgatcccgggcccgagggcatcagacggcggctgattagctccggtttgcatcacccggaccgggggattagctccggtttgcatcacccggaccgggggattagctccggtttgcatcacccggaccgggggattagctccggtttgcatcacccggaccgggggattagctccggtttgcatcacccggaccgggggccgggcgcgcacagagactcgcagcggaagtggaggcggctccggcgcgtcgctgctaggacccgggcagggctggagctgggctgggatcccgagctcggcagcagccgcagcgggccggcccacctgctggtgccctggaggctctgagccccggggcgcccgggcccacgcggaacgacggggcgagatgcgagccacccctcatggctgctcctgcgggttccctgtccaggaagaagcggttggagttggatgacaacttagataccgagcgtcccgtccagaaacgagctcgaagtgggcccagcccagagtgaccccctgctgttgccctgagcccacctatgctccagatcgtgcaactgctgtggcactgctcccgtcttgggcctatgtctcctggagccgaaggagggcgggtgggctaccaggcctggactgccttaaaagggactggagtataccttgcaaggtgtaccccgtccagggaagcctgacacggctggaagcatattggcggggtggccccgacaagcatgttggtcggccaattgaagtctggtgggaccagtcctctaaggcttatcatcggccctggggaattggcagcttgtgggagcgaccgatacctgagcagaggtggagggctcgatagccgctgacagctaaaacagtccggctcgagcacacgatgttcacacaaagtgggcacagactacagcgccggcgagggaggaacacaaaggaggagccc

SEQ ID NO: 727487 - DNA, 278 bp, Homo sapiens
aatcgagctcggacccctcataatgtgtgcccatggataccactaaccggatcaatgtttatcttaatacacgtattgtcccttgcgccatacagcatgtaatgccacagggctgccgcaaggcactcacaccagctgtctacccatgcacccaggtaaggcgagctgcaatgcctccgtcctctagacggcaggaatgaagccgatctgcatgtaacacagtctgtttaagcatgcacccaggtacggatatctgtggtgcaatagctaagaagcca

SEQ ID NO: 727488 - DNA, 456 bp, Homo sapiens
tgcggggctgagtgcgacagcaccaaaaagccagtgggcgcatgttgtgctggccaagtcagaggctgatgcacacagtgccctcttctccccagtgaccagtgctcctgtaccaacctggtgcactgcccatgagtgatggcattggtcctggatgctgttcttgtctactgcttgtgacaaccttcgcaacagatttctttcagtgacagtctcacaaggctagctcaacatatggtagagtccagggctgaggtctccaggaagagcagtccattgtaatcagcagaacattcgggcctcctcagtgggcacttccctgggcctggctgaggtcacttttgttacccacgagcatgacgacgatcgtggcttcagcatggtcatagagctccttcagccatcgctccaccacagcataggtctggtgcttggttaggtcaaacaccaggaggg

SEQ ID NO: 727489 - DNA, 427 bp, Homo sapiens
acctacgcatgatataccatggactaacccctataccttctgcataatgaattaacctagaaatactttgcaaggagagccaacagcagagatccccgataaccacgactgagctacctatgaacagctataatagcacacccgtctatttcgcataatagtgcgaagatttataggtagagtgcgacaaacctaccgagcctggttagttcctggcttctctctatataatcttagttcaactttaaatttgcccacagaaccctctaaatccccttgtaaatttaactgttagtccaaagaggaacagctctttggacactaggaaaaaaccttgtagagagagtaaaaaatttaacacccatagtaggcctaaaagcagccaccaattaagaaagcgttcaagctcaacacccactacctaaag

SEQ ID NO: 727490 - DNA, 801 bp, Homo sapiens
ggttctccgccgtttatgtggccccgacaggccggggttactgtggcgaccacgagagcagtttggcgctatggaggagcccgggctacccctcaaccgtatttggggctgctcctggaggagctacgcagggttgtggcagcaactgcctgaaggtatgagaccagattctaatctttatggttttccatgggaattggtgatatgtgcagctgtagtggatttttgctgtctcttttttttgtggagaagtatagatcggttaggagtcggcttatgtgggaccgagagaaaaacgcttgcttctaagtgctttctggactaattgacgacacaagacgtaaactacttgacaaatttagcctgttccaaaaagagtatgacaggctatgaacgtagagtcatctttacaaggatgccagcttgtgagaaggaggcaacagaagcacaaagtttggaggcacctgtgaaaagctgaacaggtccattctgaaccttgagggatgaaattactctgtctagaacacagagtgcaccagacagagaaatccaaacatttctgaacaagaatgaacttggatggggattatttccaacagaggatacggtctcttagaagaatgagtcaaaatccctccaatttaccagtagctgaagccaaaatgaccttcaagattttccacattgattgaaggcagcggattcctaattcttaaagtggtatcctttaaaatataccccggaaatggaccattcccagtataccattcgaatcccattatacacaaaggggagccgaac

SEQ ID NO: 727491 - DNA, 946 bp, Homo sapiens
  misc_feature (31)..(31): n is a, c, g, or t
  misc_feature (96)..(96): n is a, c, g, or t
  misc_feature (194)..(194): n is a, c, g, or t
  misc_feature (197)..(197): n is a, c, g, or t
  misc_feature (226)..(226): n is a, c, g, or t
  misc_feature (266)..(267): n is a, c, g, or t
  misc_feature (311)..(311): n is a, c, g, or t
  misc_feature (313)..(313): n is a, c, g, or t
  misc_feature (323)..(323): n is a, c, g, or t
  misc_feature (343)..(343): n is a, c, g, or t
  misc_feature (352)..(352): n is a, c, g, or t
  misc_feature (361)..(362): n is a, c, g, or t
  misc_feature (366)..(366): n is a, c, g, or t
  misc_feature (372)..(372): n is a, c, g, or t
  misc_feature (379)..(379): n is a, c, g, or t
  misc_feature (386)..(386): n is a, c, g, or t
  misc_feature (426)..(426): n is a, c, g, or t
  misc_feature (451)..(451): n is a, c, g, or t
  misc_feature (545)..(545): n is a, c, g, or t
  misc_feature (564)..(564): n is a, c, g, or t
  misc_feature (595)..(595): n is a, c, g, or t
  misc_feature (676)..(676): n is a, c, g, or t
  misc_feature (684)..(684): n is a, c, g, or t
  misc_feature (754)..(754): n is a, c, g, or t
  misc_feature (760)..(760): n is a, c, g, or t
  misc_feature (853)..(853): n is a, c, g, or t
  misc_feature (861)..(861): n is a, c, g, or t
aaagggtgaaaaaccaataacccccaaatanaaccacatgacatacaaacaaaacaaatacaaaaaggtttgaaaaaaaagtgtgctgaggaatgntcccgaaaagacaagggaatgaggagtcaaagctacgtactctatccagttgttgctgttctttccaagtgcaaaagacggtggtgaggtagcgaccngcngcctccaccaccgtgttctggctctgggncgcaaatactacttttgtatcagattattcatcagggggnnatgaaaatgtcctttatgcgtgtgcgcttttggggcattttggngngtcttcaganggtttaagtttagtgtctcngcagtttcngctacttannctcnttttangcatctntcatttnaatttggtttggctcagttatttgcctgctgatgtttaantcaagctgtcctcttagggaaaagngagagccaagtttaccttcccctccttgcccttccccacagtgttagagatgtctgcgcccagagctgaaccttgttatgtcattacgtttctnaataaatgtaataaatgtnctaaccactcccaaccccaacccccagtgtngagtgccctaagagtaaaagaactgtgatgaggacaatctggtatccaaattcattcaagtgtgttactgagctgtttagnaacaacanatgttgcaatcaccctcaaaacgcaagctgcacctctggggaggaagccctggtacagcaacatcaagtnggcaangatcaggagctgacctgtggcgacatcattaacccttccctaagctatgccaatgcagaaccctcttgctctttttaattgctcctgtcagtnaaagccanaagttgttagcaccccaaaccccagggtgtttcattatttccattagttatcttacaagaagaaaatgactggaaagcaattttt

SEQ ID NO: 727492 - DNA, 889 bp, Homo sapiens
  misc_feature (329)..(330): n is a, c, g, or t
  misc_feature (372)..(372): n is a, c, g, or t
  misc_feature (388)..(388): n is a, c, g, or t
cttaccaacaaaacactcctgaggagaaagaaagagagggagggagagaaaaagagagagagagaaacaaaaaaccaaagagagagaaaaaatgaattcatctaaatcatctgaaacacaatgcacagagagaggatgcttctcttcccaaatgttcttatggactgttgctgggatccccatcctatttctcagtgcctgtttcatcaccagatgtgttgtgacatttcgcatctttcaaacctgtgatgagaaaaagtttcagctacctgagaatttcacagagctctcctgctacaattatggatcaggttcagtcaagaattgtnntccattgaactgggaatattttcaatccagctgctacttctnttctactgacaccatntcctgggcgttaagtttaaagaactgctcagccatgggggctcacctggtggttatcaactcacaggaggagcaggaattcctttcctacaagaaacctaaaatgagagagttttttattggactgtcagaccaggttgtcgagggtcagtggcaatgggtggacggcacacctttgacaaagtctctgagcttctgggatgtaggggagcccaacaacatagctacctggaggactgtgccaccatgagagactcttcaaaccaaggcaaaatgggaatgatgtaacctgtgtcctcaattatttcggattcgtgacatggttgcgataaatccttggaaccaagggaaatctctctagaaacagacgcgcactccaatggtgtaggcaggcaaagccagaaatgggcacaaccccggcccaagagaaattgggcgcgaatcaaggattcaaagattggactcgattacttaaacaacgtgtttcacgacaaaaaagggg

SEQ ID NO: 727493 - DNA, 869 bp, Homo sapiens
  misc_feature (45)..(45): n is a, c, g, or t
  misc_feature (108)..(108): n is a, c, g, or t
  misc_feature (118)..(118): n is a, c, g, or t
  misc_feature (141)..(141): n is a, c, g, or t
  misc_feature (148)..(148): n is a, c, g, or t
  misc_feature (241)..(241): n is a, c, g, or t
  misc_feature (254)..(254): n is a, c, g, or t
  misc_feature (262)..(262): n is a, c, g, or t
  misc_feature (325)..(325): n is a, c, g, or t
  misc_feature (350)..(350): n is a, c, g, or t
  misc_feature (390)..(390): n is a, c, g, or t
  misc_feature (429)..(429): n is a, c, g, or t
  misc_feature (475)..(475): n is a, c, g, or t
  misc_feature (481)..(481): n is a, c, g, or t
  misc_feature (556)..(556): n is a, c, g, or t
  misc_feature (618)..(618): n is a, c, g, or t
  misc_feature (624)..(624): n is a, c, g, or t
  misc_feature (725)..(725): n is a, c, g, or t
  misc_feature (738)..(739): n is a, c, g, or t
  misc_feature (748)..(748): n is a, c, g, or t
  misc_feature (756)..(756): n is a, c, g, or t
  misc_feature (760)..(760): n is a, c, g, or t
  misc_feature (770)..(770): n is a, c, g, or t
  misc_feature (786)..(786): n is a, c, g, or t
  misc_feature (792)..(792): n is a, c, g, or t
  misc_feature (833)..(833): n is a, c, g, or t
tgaaaagggtttcagtcatatgggcaccaaccatcaaggaagccntggtccccacctggagcttccctcggctgccctggcccttgagcccgtcctgaggatttgtgntttgactctnacagggagcaacaggaagctgcnagcccantgcctccatgcgggtcattggagggcagacggtggagcggcgcttcctcagctcccgcggtcaggccccatcagggatggtcacagtccagcnacaggggcgactntgcccatnagtccccctggggcagcgaacagatcatagctggggcagaaccgggacaggccctctatatangcataaggtcaatgcaggtgggggntcgctgggcccaggccaatgaacccacccgtagagccctnactgggcagcagggccaggagggcacaagggactggcangcagagtccactcggaggcagagagtctgtggatataggaacatgncctcgnaaaggcactagggggttaaggaacagatccactcagacggccttgggccagaagctccctggagagctgggcacntcgaggagcgtctgggagcctcaccctgtcccagtggctcctggcacccctgggagcgtcanacccancccaaagctgggtgcctgtgtcgccactaaacagaagggaaaccgaggcaggggggccggctggcagtggagcattctggcagcgcggggagaccaagtcncgactggcaaagnntggagtttngttttcanaaangaaggctggngttggcacacaggganggctanaccgataaagtgcctcgactgtgttacatttactggaaggngagcgggctcctgggcacgccactcaggcacggtga

SEQ ID NO: 727494 - DNA, 193 bp, Homo sapiens
cgcctgatcatccagccatcggcctcgattttagccagaagctggtgcgtcgacgccttctccttcttccagcatctcctccaggtacatgatacaagaggctttccaccggggctgctttactgttacggggccgtggtgtacacgggaaaggaacccttcagacagggctggtgtttcagccctggggctg

SEQ ID NO: 727495 - DNA, 841 bp, Homo sapiens
gccatctacctttctttccaaaagtactaaagtatgaagtaggctacccaagtaacttgttagaaagtacggaggtgtatcgacgtgtctggcagtgcttctgtcacattagccgcagccggaaccgtgctcaagcactctacggaggaggagtccatggtactcacaggctatcggggcagtcaccacctggttgagagagctgggacaggcttctgaatgctggaaactggcatcactagtgaagtggcctcccaacacggcgccgggtgggtaagcgttgactcttatcctagcctgcaacactcatatctccgtgtgtcttaattcacaagtaacattactttctcagatggagacaattgggctaagatagcaaataacatcgatattgttccttattaaacgtcttcaccagcgtatgaaattctaatgctcgcgctggaggtggctcacacccgacgtaatcccagcacgttggcgaggcacgaggctggtctctgactcctgactaaaagtgatctgcccacctcggcctcccaaagttctgggattacgggcgtgagccacagtcacccggcccggagcggtgtattattgattagctggtgtctttaactatattgaccaaggtgtatagtaacctatttatcacattgttacgaagcaacttttaatcattaaacacatccagcaaatggtgtccctgctgaaacattttaactggaaaccatcacacctggcaggcagcactctctgcagctatgcccttgtggagtcagcaggagctggtgtttttcagccagacagaggcattaccacgtggctgatgttagcacga

SEQ ID NO: 727496 - DNA, 1019 bp, Homo sapiens
  misc_feature (372)..(372): n is a, c, g, or t
  misc_feature (378)..(378): n is a, c, g, or t
  misc_feature (394)..(394): n is a, c, g, or t
  misc_feature (438)..(438): n is a, c, g, or t
  misc_feature (451)..(451): n is a, c, g, or t
  misc_feature (512)..(512): n is a, c, g, or t
  misc_feature (520)..(520): n is a, c, g, or t
  misc_feature (523)..(523): n is a, c, g, or t
  misc_feature (545)..(545): n is a, c, g, or t
  misc_feature (595)..(595): n is a, c, g, or t
  misc_feature (604)..(604): n is a, c, g, or t
  misc_feature (622)..(622): n is a, c, g, or t
  misc_feature (680)..(680): n is a, c, g, or t
  misc_feature (744)..(744): n is a, c, g, or t
gataaagctcacttgggccgagaccgagggagtgagctgtatgagtgagggtgtccgaactccttgactatggcccgtacaccatcctggacagaggcctgaggcaggccatctagtagtcggcaactcaatgttcgccggtaccaaggcactgtggaccggaacctggcgggtgcaaatacaccaaggccagggatgcacagatcattgttctcatcgatacttgtcgtagattactgctatcgaagggcatggctcacctttccatggacgagcactcgagggggacgtcgtagcaagcgaactgacgtccacgagacaggggggttccatgagagcatgcgaatcaaggcctcggcgatcaatggagtngtgtcngcgccgtatgcaaganaggcgcgtccctctagaacacgcaaatcctcgaaaggcgcacanagcgatcgagtgncgagcagtgtgctcggtaagcgaatgtggggcattcgagtacttgagcgtgagagcacaanggtggccncanagtcctgctttagtcgtcccantgcgacgagtatcaccgagtgagagtgggagcctagagcgcgaatgcatntgtcatacntactcccatcgtgctccngaaagaaggcaacgcgcaatgcggtactcctttgctcctactccaggctgggggcccnccctagattcggcggggtgttgtggccacatgagggtcgtaaccccctcgatcgtcccctgcgntagttcccctaggcgtgtttcgcgtgagccatcctcggaggggcgcaacccgctttagccgagcatgggtccgatggacatcttggaccctattggtgcggccccccaatacccgcgaaagttgggcacttagctttgggtactacttggctcgtaaaaaagttggccctcggggctttttggttggtggcgacctcacccgtaggggtaggacccagtgctaggagtccttgctgagggagggtccgtgtatgagacctgtgatatttgatacc

SEQ ID NO: 727497 - DNA, 282 bp, Homo sapiens
gttttttttttttcccccggggaaataggccccaccccccccccagtttgggcccggggtttttgtcttccttgggaatcccagaaaatccgcggtcagaaaatctttaaaaatttatggcccgcccccctctgaaattatgggaaaaattagaccccccccccaggttttggaatttttaaaatgttaaaaaaaaagccccttttttttggggccgattttaatgtttaaaaatttggtttcaaagaaattgcctttcaaaaaaattgggttcctttgcca

SEQ ID NO: 727498 - DNA, 101 bp, Homo sapiens
ccgtggcttgtacgttgaccgatgcgctgtgggttgaccgtggctagtggttgaccgtggcttgtagggttgaccgtggcttgtgggttgaggcgtggcta

SEQ ID NO: 727499 - DNA, 204 bp, Homo sapiens
gtaggatcgtgccatcctccctaaattctttcaaaaggttcaagacgaaggaatactcccaaagacattctataatgccaccatctaccctcattccaaaaccaggcagagataccaccaaaaaagaaaactatcggccaatatcattgatgaatatagatgctaaaattctcaaggtaggtatgatgaaggacgcgtccttca

SEQ ID NO: 727500 - DNA, 371 bp, Homo sapiens
accaggagctgacacagagctggagtcagtgtgctgagccaggagcactgagggctactcaggctcagataattaagctcgtctgcagtgcaagcagccatgcggcccgtgaggaagatctttgatgcacttgcaacatcgccagtcagaaagcagcgacttacccaggatccagtaggatatagtaaccactgccggcttactggatgtgctaacacataccaagccctcagacaaagaatcaggctcagagatactcagacgggcaacgagagttcgcgtctgtctgaaaccacattcaacctgacctggccagaaaggacaccacaaagacctcctagtaaatcaacatgtccgtgagcgtaggaggt

SEQ ID NO: 727501 - DNA, 651 bp, Homo sapiens
  misc_feature (380)..(380): n is a, c, g, or t
ggggcccggggcccacaaggaggtgggcggggccgcacccttcctcggggttgacttctccagcctggacatgagtctctgtgtcgtgctgtacgtggcttcatccctgttcctcatggtgatgtacttcttcttccgggtgaggtccaggcggtggaaggtcaagcaccaccacccggccgtgtgagtgcccgggtgctgccagccacggcggaagctcccttggaggcagccctgccccgtgccacctgcagctttaatatttatgatcagggattttataaacatgcgggcctggtttcacatcggatggcacctttggcttcaaagtcctggttttacaaacgctcttctaacaagggaagaacacggggtaattngtggggatattgcattcctggcgtactcaagtctgttcatgctcctttgcaggtcttacagcaaaaagacttctgtatttttactcttctagatgtgaaaagagggtgcagagtccaggccagatagtcttccccacacactttcatctcgtttcctccactccgccccatcctgcagggccttgttttgtatttggagaacctcgcccatcccccgggtctgttctagaccatataggacaggggacagaaagggcgtaggtagctggca

SEQ ID NO: 727502 - DNA, 215 bp, Homo sapiens
atgcccctatgatgggcgagagcaccggcccggcgcgccgcccatgtacgggaggagacggggtgtaggggaatactgtgatattgacctccacctggcctgagcgtgtaccgatagggtaggatgcctcacagatgtaggtccctgccaggctgtaggttgattgggtcccttgaaagaagagggttctgttctgggcctccacacccttgggg

SEQ ID NO: 727503 - DNA, 440 bp, Homo sapiens
ggccatttactccaggccaggatggtctcgatcttctgacctcgtgatccacctgcctcggcctcccaagagtgctgggattacaggcgtgagccaccgtgcctggccttgacattctttttatacagggattcttggggctatgtcttcccttccgcctgcccactcagcagtgccgtggagcagaggtggttttcatttgtttgcaagtttctggtgcaacttacttctgggccatttatgccagccattaagaggatggtctagctgcaaaattgggaagaagaggactaagataggtctctgggcgatttgctcagtgccattcaatcaagatagagtgagtctcttgatctctgtagctggaaatgtagattgcccctcattcctttgtagtcaggagaccacatccagaattagaagccatggagtaaatggca

SEQ ID NO: 727504 - DNA, 765 bp, Homo sapiens
ggcagcttcccagcagggtccatcaccacctgcacagtaattcagtgcggccatgcagcttctcagcggggtccatcaccacctgggcagtaattcagtgcggcccatgcagcttctcagcggggtccatcaccacctgcgacagtaattcagttgcagcccatgcagcttcccagcggggatccatcaccacctgcgcagtaattcagtgcaggcccgggcgagttctccaaggggggtactcatgcaccacggtggcgcgcataatcgcaggcgttagcgcgggtgcaggtccccgaggcggggtccatgaccaccggcgcggaaaattcagtgaggcccagtgcaggttcccaggggggtccagtcaccagcagttgcgcgagtaagtgcagatgcaggccagtgcagctgtcccaggggggctccatcacgcacagtgcgcggaaaaatacagtggaggacgttgcagctgccgagcggggtccatcaccgacatgcgcagaaaattgaggtgcacgcacatgcaagtacccacgggggatccatcgaccacactgcgcaaggagattcaagatgcggcccatgcaggcttccacagtgggggtccattcagccatatgcggcggataattcaggtgcgcgccgatgcaggtcacacaggggggtccatcaccagctgcgcaggaatcaggggcagcacgtgcaagtgcccaggggggtccaatcaccagatgttgcggagtcacgcgcggccatgagatc

SEQ ID NO: 727505 - DNA, 902 bp, Homo sapiens
agaattaacattaggggcctgataggggaaatggtgaagcaatggaaaatgaacagacaacgtaaggagtagcttctatgtacagaatattgtacctttaaccaaaatgtcagttggcaccataaataaggactgtgagagacgtgtttaaaagctgtgaaagtctgaaacctataagccaaggatgtaccctgcctaaacttatgctgttcccacggaaaggactaagcctgttcataagttaccgaagagttgccattttggagatggaaattgacgaggagggaaggtcgttttgattgggagagtatacaagtacaagcgagatcattctgccttagaggtgctaagttgcccgaaatttagaagaccctttcttttccagtaatgaagtgataaatatcagcttgttcatcctaatgccagctggctgaggtggttaggaagaggaagagggtgtgtacgaggaggtgaagacagtagggaaagacaagggtcgccatgctgctttagtggggaaaagctcttggagcgcgtttagcttatggagctttgagacactgaataccattgttggcagggttcagtgcactgagcagcacaagtttcagtgaattgatccaagaggtttagtgatttcaaaagcctgtggtctcaggagaaagattaaaactttcaatatggggcaggtggttcactttgaaaagacagagattagacaggagcaaaaagaatttcttaagaaatcctaattaagtaagataaccaaaatgtctgtctgaagcaggagaacgaccagttcgtgatattgttagacttgctctaaaggtagttgtaaatctttaggctgtgtagattctgtgtattggtaaggtgatcgactatgcgtttgttgataactg

SEQ ID NO: 727506 - DNA, 903 bp, Homo sapiens
ggtggttgaggcaggaggatgtttgagtgagggacgttgaggctgcaatgtgaactatgattttaccactgcactccagcttgggcataacaaaattgagaccctgtctcaaacaaaaaataccatggttgtactatgacagtaagcgcggaattgaatgcgattaacaattggagggactgtgaacgaaggaatagctagacgtgcatttgaacaattgccttctgatcgtgcacttgtgaaccgattgttgatctgggcactcatcgtgcatatatctccaccaagtgagtttgggtccggcgtatcccaatacgaggatgatctgtactgctgctccctctgagacggtgcgttgccatacaattgggagcagaggttagttctggatctacagttgcgatccgatgccttttgtattttgccatataggccgcttcggtgctgggcagcctcgtggggtatgtcgtcatcccgtacttggggcaaaaggcgcctttaggacaatgtggattaaaacgcttcggggcagacacatgtggcggtgtttgcggcgcaaagaatatctatcgctaattgtcgaaggctttcaaagaaggctatacgccatcttttgttaccttcaactgttaacccctttttcctcaacaagggacgtaataaaagacacagttttatttctccctctttttgttagccaaaaacaaactggggggccctgggctccgtaagtttgttctcctgttgctaagcctattaacgcgaagacgacgattaatgtcgccttgtgcaatgagcagcattaggtatacactctcttcgttcataataatgtacaacaatcacaccttggggccgaccaaccaggggtaaaaattcccacacttggccccaaaaagcctt

SEQ ID NO: 727507 - DNA, 458 bp, Homo sapiens
acccctgcaatctagtcaactcccatctatactgtactttttctacgtgctgctttgtgctgagcgaactttttagttccctgcacttgacctgtcataagcctgattctttgtaatttaacgggatcctttcggtggttactttatagacgaaatttccatgttgcctttacatcacattaaaatataacttctttcagaaggatcatagaagcactgattcatagtataaatcttgtaatgaagctttgacttttaatgtggctattatcttcaaaattgtaaattactagtaacatgtcatttctataggatgtcttacattatgtaccttccattggttcgttcacatttatttcactttctctaagccactttgagtggaatagatccaaagcatacagttgtctccccacataaggaagcgtcgctgcgccttccaacctttcaagccgtca

SEQ ID NO: 727508 - DNA, 904 bp, Homo sapiens
  misc_feature (18)..(19): n is a, c, g, or t
aatatcaatctaaataannaaaaaaaaaaaaccggccgcatcggggctcttgacggataaaggctgaggactgactgcgccgagacatcgttgaatatgactacaaaatatatttacgagcgtcttttaagcacgggattccaacgacactcataaacgtgctcgctgccagcttttacaaacgaaaataaggtttttctccatcaaaaacaacccagttacaccagtaaatcttcccagttctgaaaatctgaagcaactgatactccattaaatgtggaaacactgtctactcaaaatatttgtaatattatacagtgacaaaaatttcccacacctatatagggttaaccatagttttcagcaaagaacaagtgctttacttattttgtctttttcagctcatacagagctccaatttcatgaaaccatactgtgccaaaccaggaaataaacagcatcactctagcgaagccacgccaaccaaacggatactatctcctgttctttataccagctttactcttcccaaacagcaagtgcttgtgcttcatatcaaaaacgtggtctatcccgtctctctcgcttgcccaaccgattgatatttttctgaccattcttcatcataggcctggcgttctaaccatcttgacatccctaaaccccaaactttacggggagcttagagcattccccatctcggccacataggaccgtttagcccaagtcttcccgtttttatttccaatgaaactacggaaatttcttagccaggacgcattatagtgtatccactttataccccaagtaatactgagacggctcttttcgttctccaatcgggctccgatcttatcagcaatttggagatccggctccagggaatcatagtttgaaggatgat

SEQ ID NO: 727509 - DNA, 546 bp, Homo sapiens
  misc_feature (291)..(291): n is a, c, g, or t
  misc_feature (347)..(347): n is a, c, g, or t
  misc_feature (392)..(392): n is a, c, g, or t
  misc_feature (467)..(467): n is a, c, g, or t
  misc_feature (494)..(494): n is a, c, g, or t
  misc_feature (539)..(539): n is a, c, g, or t
ggccatgttgttccctccgcgctggacgggagcagctggagcgggagcctggctgcgctaccgcgggctgcctcctgctgtgcagttccccgaccctctctctgtcctcattgcgcccagacgggccggcccagagctcccgggtcgtctttcgtgtggccgcgaggttcttgaagcttttgagataacaatggcaggtcatcactttttaaagtaattctccttggagatggtggattgggaagagtcacttatgaacagatagtaactaataagttgatacccagctcntccatacaatagtgtggaattttaaataaagattggagtggatggacatttgttancagcagattgggacacggcagtcaggagcgattccgaagcctgangacaccatttacagaggttctgactgctgctgcttacttagtgtcgagatcacaaagcttccagaacttagtaanggaggaatcatatataagcgagtgaanagccgagagcttcctttgggaatcgggtacaagatgacatagcgngcggtct

SEQ ID NO: 727510 - DNA, 863 bp, Homo sapiens
gttttttgagctggagtctcgcttgttgcccaggtggagtgcagtggcacgatctcggtcactacaagctctgcctcccaggttcacgcattctcccgcctcagccccggagtacctgggactataggcgccaccactacgcccggctaattttgtcttgtattttagtggagacgggatttcgccgtgttggccgggatggtctccatctcctgaccttgtgatccacccgcctgggcctcccagagtgctgggattacagatgtgagccactgtgcccagccacctatatgatttttataaagggcatatctaaatcaaaataatccaggaagtgacaataaacttcaaaaggtggaaaagtttatctgtggaccaaatgtgacaaaatgaaagtaccatagccatattagtgtgggataaatagattcatattgatgaaagatgtaatctctaaaagaaataacagttatagcttgtgggcaaggtggtcatgttaataatcccagcatttggaaggcgaggcaggtggatcacgaggtcaggagtccgagaccagctggcgggttattgaaccccgtctttataaaatacaaaaaaattagcgggtgggtggcacggctgtattccaactattgggaggtgagccaggagattgttgaactggagtggagttgctagtgagatattgcatgattagctggggaaggttgggtcgtttaaaacaaaaggtttatgggggatcattaatttaaggacaaggaaatgtgtacattttgaccatggggagattttgtgggtcaaaaaaaaatggggggattaataggcggatgttgtagctgtaagccgtatgtctctttcgg

SEQ ID NO: 727511 - DNA, 500 bp, Homo sapiens
agttcgacggagaacatctcccaatcaagaaaacaaaagtctaggaaccaatggaattctaacaaacatttaaagaagaactaataccaattcttttcaagctcttccagaaaatagaagagagaattttttgaaactcattctacaaggccagcgttaccctgataccaaaaccagacaaggatacaagaaacaaaaacaaaaaaaaaggaggaaaagaaaagaaaagaaaactataggccaatatccttgatgaacacagatgcaaaaatcctcaatgaaatacaagcaaatcaaattcagcaacacattaaaaagatccaaaggttgcaaggatggttcaacatatacaaatcaatgaacataacgaagtatatcaacagaatgatgggctaaaccatatgatcttctcaatagatgcggaaaaaatatttaataaaatccaacatcacttcataagaaaaactctcaacaagttaggcgcagaaggaatgtgcccc

SEQ ID NO: 727512 - DNA, 114 bp, Homo sapiens
  misc_feature (34)..(34): n is a, c, g, or t
  misc_feature (82)..(82): n is a, c, g, or t
  misc_feature (91)..(91): n is a, c, g, or t
gactgaacccggacttggtcctgaccccaagganaccatcattgatgtggtgggggcacccctcacgcccaattcgagaaancgacgggantcggcctccagctcatcttccgt

SEQ ID NO: 727513 - DNA, 108 bp, Homo sapiens
gactgcatccacgccggctgactgcatccaacgcctgcctgactgcatccaccgccgcctgactgcatccaacgccgcctgactgcgtccaatagccgctagactgca

SEQ ID NO: 727514 - DNA, 862 bp, Homo sapiens
  misc_feature (1)..(1): n is a, c, g, or t
  misc_feature (3)..(4): n is a, c, g, or t
ncnngtctgtatgtctggtaggtagagtcaaggaaaggtagcactgggtactataggacatagtgattgggtgatgccgatcacatttggtgacttggtccgcagcgacgttgtccggtaggtctaaattggcatcccttaattggcttgccccagtagacctgggttggcgctgtcacagcctgtgttgcccaccccgctctggtacttcgggccggtttgccctgcctttgcaagcctttcaaactgcaggataccttgtgcctcccacgggtgtcgccccgccctgatggactataccccttcccctgcgcagtggtgattccgagtcacttgatggagcccacacgaatgccgcattgtgtccagccggtatcaggattgccgtcatcttcccggggctcggctggtttcaaatggtagtgcacccccccccgtggtttttatgaagcactggcgtggtctcccctcgccttcactgcgggtttctacaggcctcccggggacccagaattgggtatcattctggtgttcaagttgcaaacccccattaacactcccaagagtcgcaaacccccgtcaatgcctccaccactcaggacatgctgtgccgtcaccaattcatcctgtacaacaccgcgcagcacaaggtccgccatggcccagggtacatccccatccctcctccctttcttcagcaggaaacaaccaataacaatgccggttttcctcaaagaaacacaagaaaagagtgaggttctcccacccccgggcacacaataatttctccccaaaggactctgttcaattcaaaacaaataattggtggaaaaacaaagggttatctggccacaaacataac

SEQ ID NO: 727515 - DNA, 277 bp, Homo sapiens
gattcccgatccagagacaatggacccgatgggattggagcccgaagcgttcatcgagagtaacttgaatgagattattgacagctttgatgacatgaacctctcggagtcctccacgtggcatctacggctatggaatgtcagaagcacctagcattcagcagcaagcagtactacctgtatcaaggtttactgatgtgattgctcaagccaatgctggggttggaagcggtcaacattagcatgatcggtgtctcacgaggtcgacgtcatcgct

SEQ ID NO: 727516 - DNA, 124 bp, Homo sapiens
cacattcaccacaacatttagcctcataactacaaaatgaatcacctgctactcttatctcctttagagacagatgaagaagaaacatctataaagtggatgaagtgacattagatacacagag

SEQ ID NO: 727517 - DNA, 294 bp, Homo sapiens
atatttctagtggaccataaacttgctgcagtttatttgtgcttcagaattttttttgagacagaatttccctcttgttgcccaggccggagcgcaatggcatgaccttggctcactgcaacctctttctcctgggttcaagcaattctcctgcctcagtctcctgagtagctgggattacaggcatgcaccaccatgcctggctaattttgtatttctagtagagacagggtttctcccgtgctggtcaggctgggtctcgaacttccaaaccttaagggtgattccacctgg

SEQ ID NO: 727518 - DNA, 399 bp, Homo sapiens
agtcagatgagtgcagctgttgcgaacatcgatttatcactgtcggtcgaattcacagacaatacttcatgtagcatctgggtggatgagttatattcgtgcatgaaggccaggttgaggtggatttcactgaacgagcgcgtgctgttagcgcgcggtgatgctctggatttgaactggcagaaacccctgcgaatttactcagtgcgataagtgcctgttcctgtgctgttgatggtgcacaggactaacagagtgttactgaacactacttgcgatgcattctatgtgggagattgatgagctaaagaccctggttgagcccggcaaagtgctgaccgacgccgactccctggaggcttacggcaaggattggaccaagcacttcgctcccgcacc

SEQ ID NO: 727519 - DNA, 226 bp, Homo sapiens
tgcatgcttggcttggtgtcacgaggggatggctgggattggctggctgagcccccctgttttaccctgtgttggccgagtttggactccagctgggggtttccagatggggacatcactgtagggggacggaccatcacctcctgctttgacttagggctactctgtgtgtttcctgatggagagatcctcactttagggttactggaatgcattgattgaaatc

SEQ ID NO: 727520 - DNA, 266 bp, Homo sapiens
ttcccttcctgttcagtgtctcatgtcaatcccacctatgagtagaacatgcagtatttggtttttgtccttgtgatagtttactgagaatgatgatttccaatttcatccatgtcttaggataccccattggcttcttcattcagtcctacacataccccagtggctccttcattcagtcctacacataccccagtggcttcttcattcagtcctacacataccccagtggctccttcattcagtcctacacgggtaccgagctc

SEQ ID NO: 727521 - DNA, 525 bp, Homo sapiens
  misc_feature (429)..(429): n is a, c, g, or t
cacacagctctatgacattggggcccttcttttgctgaaactggcttacgtcttggtttaactccttcaccgtagatttgacgtgagtccagtttccttccaatgtcgctgtcctgccctgtttcggcctgactgtgttgtatgctgtggtgatcttgctgggaatgattataattgtgtgtgtggtgggggagtgggtatttcatgcgttgcgtgaagagtcctcctggttttccctcattcctcccaccttcccgtggtcattttaattacggggcagtgtcaccgcaaagggaggaaactcaaagccgaaagccaaattccaggcctgattctggcttttgagtctggttcttgaagccaggcctgtaccgactctcagattggggtcagtcccgtcgctttgcagactgaccctggaaatctacnaaatgcagattttcctgatttcctcttctcttggccaggttttttttttttttttttttttttaaaaccctggttgttaccccattttttttttcc

SEQ ID NO: 727522 - DNA, 370 bp, Homo sapiens
ggagcatatacatctacagttcaggaatacaagtcaattcggcaaccagtgtagaccagtgaggacgagctactctcttctaaacaaaggcagtgcgaaagactcggcaattttatcaatttattacaatgcaaagggtaacacagaaaaccttattctgctttcaataaatactctgtccagtgtcgcagaattttgtaaactaatatctgagtcaagcggtcgcagtgtaaaaccaccctccggggcccaggtcctaagagttagacacaagcatcgtcctgtggatggaccgctggtccccatcttaatgcctctggcctgtcagtaccttgggaacaagtttccctttaataccatataaaatatg

SEQ ID NO: 727523 - DNA, 319 bp, Homo sapiens
acagaatgcatcagtaaaatgaacatatctctacatgcgccgaaatctctggcttgacactaccctactggtgtccagttggcgacagactaacatgcactgaaggactattaggattgctgcctcctaagttatcacagcctcgctctgttgatgtgaatgaggaactgcttggttgttaaaggagattttgctccctgctgccccaaacaggtccttatctaggtttgctccccactgccccaaacaggtctggcaggattggttacaatgatctccagaggctcaaccattccccttccctatccttgcaggtggg

SEQ ID NO: 727524 - DNA, 226 bp, Homo sapiens
  misc_feature (184)..(184): n is a, c, g, or t
  misc_feature (218)..(218): n is a, c, g, or t
tgactgaaatggtatctttcagtcctaccttgtagggccttgtagtaaaagctatatcccatgactaccttccccttaaagagtatggaacatttttagattatatcagaaatccaaagatgcctgtttcactggctgtgcagcggtggagagactgtcctcaggtcagcagcagcaagtgtcngataacacctgcctcctgcaagcaatgtgttgtngtgtgcct

SEQ ID NO: 727525 - DNA, 1494 bp, Homo sapiens
gccttctctctccttcgttctttccgtcctgcctcctgtccctctccttggccgtcgtctgccgctccgcgtccggtgcctgtcgctcctcgtcctggtcgttcgtctgttctccgcctcgccctcgccgtgcgcctgctgctgtgcactgtggtgcggctgtgcgcgcgcgtttgggtgttcgccgctctcttcggtgccgtggcacttctctggcgcgtcggcgtcgtcctgtcgcgcagttcgcggctgttcccgttggtgtgtgtcgcgttgcgcgttcgtggtgtctgttcttttggtgtttggccggcttttttgtgtatgagtgttgtgaggttgttggtttgttgtgtgttgttttcgtgtgtgttgtgtagtatgggttgtatggatatggttgtggtgttgttgtgtgcgttgttgtgttgagtgtttgtttatatgggtgttttgttcggggggtgtgttacgtcgtgcgaaccaatgttagtagtactgttaatcgttgttattgggtagtgcaggagcaacacggtagcggatgtgtatgcgtgatcagctaggtaggtaacctccgatatctgattccccacaatgttgttgtatcattattaatattcatgtgcgttggtaatagatccgtatcgtccccacgtgtacctattgtgtccgcggtcgctaaacggtaatgctgagtgacctttgggtgtggccagaagtctcgggtcattcgactgtggtctagttgtccccgtgcgtctgccgtcgcgtgtctcggtggatagggttctagcgtccgttaattgtgcgtgtcttttgtgcgttcctgggaccccttgatctttgacccacattcagtctgaatgggtctttgtcggctgtctattaatgctggggctgtcttacgccagctgttcgattcctgttgtgttggcgtccatgatgatgatcaaagtatccgatttatcttttgcttgggtttgactgagatgccctggttgtgaatgatatcactatagatatgctatatagtgactactggtcgaatggccaacccagcgtgtcgtgtataggaggcctcgaggtaagaagtgtctgggtaccggtcagcagtccatcagccagtacagtcgtgtccctgacgtctcctgggggcaccgtccgtatgagagagtatcgatttgtctacatagtgtcctcagaatggtgcttagattgatctggcatccttctgagaaggcaatgtatcctgattatctttgtccaagagagaacagtggaagatatatctgtcggagtggaaagtctgggaatcgagatggttaagtcagtctgcaggaggaaatctgccacctggtggtcctttaactgaagctttgcctccctgcccgaataggaatggtgatttgcccccatctgtgtgtggtatattgtgaccatgaccaccgggagcggcccatgtagaaagagagagacctcatgctttcatgc

SEQ ID NO: 727526 - DNA, 311 bp, Homo sapiens
  misc_feature (301)..(301): n is a, c, g, or t
aagtgtaagtgtatacgcatatcaatattaaacagcaagcgagcagaatttggaattcatccaatccactatgcggcctcttcgaacctccatgatgctgcttacatatctcgatcccacttaactatcttgggctgtgacaaagtcacttggttcacacgcgcaggcattctcatctctttccagtggggagtgaattcagtgtaagtacaagaagagtagaaagaccaggtccttgctggagacgacacagtctgaattgctccagctttttcaagttctcatctcctattctttcagntacgatcaac

SEQ ID NO: 727527 - DNA, 242 bp, Homo sapiens
ccccccgggggtggggccccccctccccttgccccttagggaagcccggggtttttccctcccccccttgaccttgaaaccggtccctcccccctcccgcccttccatttggcctcccctgggggggcccccttttttttgccctttttgaaatcccttttcgggggacccccttttactggggtcccaaacctttttccttggaacttttgggttattaattcggggtgggttttttttta

SEQ ID NO: 727528 - DNA, 290 bp, Homo sapiens
attatataagatgttagctttgaggcacaggagataggtaatagcttacagctctaatctatgtcgtgatatgagaaagagcgtctagaatagcctggtgtatctactagttgacctaccatgattttgccttgcaagcatttcattccttctgtattacacagtagtagcttcgactggactggctagtcaatataggcatgttcactcaatgtcaaactaacttagcagcactttcacggctaacaccaccagctacggcgctaccagagcctcgacatccgctacct

SEQ ID NO: 727529 - DNA, 116 bp, Homo sapiens
ggctagacatgatagctagtcaggaagcatgtaaagctaagggagcaaagccaggcctatgcacaatgattgtcagtgcgtaaaggaaattcttgatattcgtgaatattaatgcg

SEQ ID NO: 727530 - DNA, 358 bp, Homo sapiens
cgcccagtgtaactggtgtgtcccccaattatcccatacataagaaatcaaaacattaaactaacccccttccccccccacaacaaccctcttaaaactaatgggctttttagaaacaccccacaaaagctcagaaatgggctttaaaaaaaacaaccaccaaaaaaaaccaatgggctaaaaaaaaaaagtattaaaaacgaatgggcggagaaacaatgggcaaaataaaggaattgggcactccccacccccctctttctcttctccctgggactttggagtcaaatgggccgggactggagtcccggaaccagcaaagagaaaagagggaccccagagcacacagggggggcgg

SEQ ID NO: 727531 - DNA, 156 bp, Homo sapiens
gacagtgacctcaaactctttcccactctgcctcgtgtgtagtgatcgcacaacggatgagtgcagttgacttccctgttccctgtcgatggatggataggtttgtttccaattttagttattgtgaactaaaaaacaccttagccatctacaaac

SEQ ID NO: 727532 - DNA, 328 bp, Homo sapiens
gaggatcccctaccgtctcgtagaagaaactacatcagttaatggcagcaaaacaaccagctagcatcataatgacaggatcaaattcacatatacaatattagccttaaatgtaatgggctaaatgccccagttaaaagacacagactggcaaattggataaagagtcaagacccatcagtgtgctgtacccaggagacccatctcatgtacaaagacacacataggctcaaaataaagggatggagcaagatctaccaagcaaatggaaagtaaaaaaaagcaggggttgcaatcctggtctctgataaaacatactttaaactaa

SEQ ID NO: 727533 - DNA, 425 bp, Homo sapiens
cggcacgagggaaaagaaggaagttcagtgatctattgggcgtcatggtgacagcagttaacaacagcctattgtgttcttgaaaatcgctgagagtagattttagttctcaccacacacaaaagaaatgctaagtatgtgaggccgtgcctgtgttgaatagtttgaccgagccactccacagtgtacacacacatatcaaatcctcatgctgtgtaccgtaaatacatacaatttttacttgtcaattaaacagcagcacacacaaaaacaagatgaaacaaaacaacaggtggacagacaatggctaggttaacaccactggttggtttagtggaccagaggttttgaaaaatgggacctggcacgtggctggctgccttaaaggctgtctgtatccctgtgtatttgaaatgttcctttta

SEQ ID NO: 727534 - DNA, 138 bp, Homo sapiens
ggtaagatgcatcttcattggtgctggagctgttcctgagggagcaggccatgggaccctcatcgggaccgttgccgtcagctacttccgcgtacgggggatactgtgtcccaagggtaccccttctgtcgtcttctc

SEQ ID NO: 727535 - DNA, 135 bp, Homo sapiens
  misc_feature (129)..(129): n is a, c, g, or t
ctccctggggccgggttcactgtttttttttccttgtgtttcccccgggccttggcccgtgcttggcaccttgggggtggccattaatggttgttgaatttattaacaaggtgaggggggggcttttgnaatgga

SEQ ID NO: 727536 - DNA, 693 bp, Homo sapiens
ccctgagcatggcttctgtgaacagcccggtgagtgtcgatgcctagagggctggactgtaccccctctgcacggatgccctgtcgtccagcagcagaatgactcaggcccaggagcccgtcctctgataccaccggatgccttgtcgctgggcctgggcccgtgtgacgggaagccgtgtgccaatggaggcagcttgtagtgagatacccaggtcctttgaatgcacctgccacgcgtgggttctacgggctgcggtgtgaggtgagcggggtgacatgtgcagatggaccctgcttcaacggcggcttgatgtgtcgggggtgcagacccgtgactctgcctacaatctgccacatgccacccgtatatccaaggctccaacttgtgaggaatgagggttggaccggtgcagcctgcaggacatgcacgcaatggcggcaactctggccctgtgaccctggagccaagcccatggcgctctgccagatgacacgacgaccaggattacggggagtccctcggctgcgacgcaacgaccatgtaacagaactgcacggagcccgaacacttgaggctcacaaaagccggacacgatgatgatgaaggcgacagcggcgacaccaacagacagacacctgcggaccatgggaatcgagcaggccgacaaacaactaaccatcgaaggaggac

SEQ ID NO: 727537 - DNA, 1295 bp, Homo sapiens
ggccggcgccagttggccgagcgaggccgcctcggacctgccccggtgcgcccggtgcgctcaactaggcctcggtgcccatgaatccttgttcgggcactcgtgggcaggtggcacggctccatggctccgagcgtgctgatgcgcctaggtgttgtgcatgccgtgacgtcgtgataggaagcttgcgtggtctttcatagggacgtctgggaggagagggacgtcgtgactctcgcggtgggtgactcagcatgttcgaatgcactgcactgggacgtctcaaaacgagatcctgtgcggatcccactgacgagttgatgctagcaccctccaagtaggaacaatggtggcagaccagagccttgggcccatgcaccgcgttcgtccattgtccaggttatccctcgatctgtccttgaagagcaggggcagatgggcgaaacgagagcattccaggattcgagtgcatagctgatggcgagataaaagcaggcataacgcaatgtcaaaccagtagacctcattcacatgtgggtcgtaacaagtgaccggcgtgggacccgggctgagtgacatcccactcgaggacagttgggctctcgcaggggtgtagtgtcaaagcgacccccggatcgtggaaaaggaggtgagacctaagagtagcctggaaggacacactcattgcaaggcatgtcatttcacacaggaagggacacacgcctagtcatagagggaggcgccctgatgaagtcatagggattctgcgccgttcacacgttgatccaaggtcgcaagagactcaagtatagaacacaaacggaaaatggaacatgtcacgtcacgtttgccaaggggagctcgttggcacacccaagaagggtgtagtaaagtgattccacagacgaggaatgtatagcctgaacttcccgtaggtgaagggaatcgctaattgaaaggaaggcgctatcgttccggtccctagaaatgccaccgggcagggggcacgcaaagttggaaacggtgaaaccggcaccagattggtccagaggtgggagaccagcgtggacacttttggcgggaacccggactggggaacacagaaccatttttatgacaactggattgggcggagaaaaagacccaggcaaacgaacaaagcacaaacggacggcgacacgaattccgggatatcacaactctaagagaaagacagtcaacacaacggcgcaacgaaacacagcgtgacgtagagatctgactctaggcacttggacgaggagacaggcttccca

SEQ ID NO: 727538 - DNA, 315 bp, Homo sapiens
tttactccctggggtgtttatagagatacatcactgcttcgtccaatcccactatgcttcagggtctcctggctctcactacgcagctcttgcaggatcttcagcagctcctcccggatcttgagtgcaagccaactcctatctggtagaggtgagagcctttctttgatggcagacatcacaccaccgtcaatgattgtttctgtaaggagatggggtttcaccgtgttggccaagctgatctagaactcctgacctcaggtgatctgcccacctcggtctcccaaatgctgggattacagacacttgccacta

SEQ ID NO: 727539 - DNA, 1032 bp, Homo sapiens
tgcgcgtcgggtgtggtggtgtgtctgttcgatgcggcgtgtgctagtggttcttctcggcgtgcgttttctgcaggcacgtgttttcgggtgagtgtgttttgtcgggctggtgtcggtagtgtggtgcgtgtggtgtgggtgcggtcgcgtgtgcggttgtcgcgttcatggtgtcggttgtttcggttcggcgttaatagtctgcgtttgcgtggtggggtgctgtagtgtctgggtggcctttgtttttcgcggcctattcgttttgcgcagtgtttgtgcgtcgcgctgttggtcgacgctcgttttcttagctctgtgaccagtgttcgccgagctggtggtgttgtgtggtcgcctgtgctgttgtctggacccgcgcgagtgtaaggtgggcgtgtcgttgtgtagatgaacacctggcttcgtcccctgtggtgccgccgttatgtcgctggggtggtggttcattgtcctcgtggcggggcggcgatggagtctggcagtcgcatgcgtatctgctttcctcgacctggtgggtgtggtggtgaagttcgggccgctgtagttgtgtgtgccgcacctgttgggaacaacccccgtgggttgaatagccctcttgtaggtgatgtatgccccctctttgtgtagtggtacattcccgccgctgttctacgagggctcctcccacttggagagaatcgaactccctgcactccccacccgctggtgggagcacccaactcacagtgtagatcttcttctaaaatcaccgctttcctcaaactagtgttccatattctttttaaaagcactcgtaatctgtcacaccaaagaagataataataattgcttctccatatgcacccatcagtctcgttcctaaacttccactatttctctgaatctaattacaagccctcactaagacccccctgtttagaatcccagcgcctttcgttttgggggtgggaatctttttggaccagcgatcccaaaaaccccttttttttccaaagaccaacataa

SEQ ID NO: 727540 - DNA, 213 bp, Homo sapiens
gcagtgtatggctgttatggttacagtgacatataaagaaacaagtttaatagcgagtggaacctgctttagtgttggtattcaggcaaagaaatatttaaagcactgttatgctggagccagctgccaattcagaagaacagatatttccacaattgtgtgagctgtctgacatgccattggcggtattaaacgcattgcaacacggtctct

SEQ ID NO: 727541 - DNA, 240 bp, Homo sapiens
acaagcaggcgtacagcacccctctcagccaggacggactcacgcctccagtgtggatcagacaacaccacaccacaacagaggtccacggtgacccctctccatccggggacaaccacactgcacagtgttgacagcaccaccacaactgtgggcacttgttcctatgggaacagccttctctagcacacagaccagtggtactcccccatcagtgagcatcacaaatggtacgtggat

SEQ ID NO: 727542 - DNA, 486 bp, Homo sapiens
gtcttctgaatccccccccagctctcttctgctgcagttctgctcacacctggatttccccatgcattcccacaaaaagtaattaaatggcatgcgtgcaggctggacacgccaacaacaggtttcccacaatgccccacatggggccaagacctgtgtgcattactcattgcatttttttgcttattctctgctgtgtggtataaatatattgttgaaaacgtcaaaaagacctaaagatacccctgtgaatatcagtgataagaaaaagaggaagcttttatgtttatctatagcacagaaagtcaagttgttggagaaactggacagtggtgtaagtgtgaaacatcttacagaagagtatggtgttggaatgaccaccatatatgacctgaagaaacagaaggataaactgttgaagttttatgctgaaagtgatgagcagatattaatgaaaaatagaaaaacacttcataaagctaaaaa

SEQ ID NO: 727543 - DNA, 633 bp, Homo sapiens
  misc_feature (23)..(23): n is a, c, g, or t
  misc_feature (508)..(509): n is a, c, g, or t
  misc_feature (512)..(512): n is a, c, g, or t
  misc_feature (516)..(516): n is a, c, g, or t
  misc_feature (533)..(533): n is a, c, g, or t
  misc_feature (554)..(554): n is a, c, g, or t
  misc_feature (562)..(562): n is a, c, g, or t
  misc_feature (564)..(564): n is a, c, g, or t
  misc_feature (569)..(569): n is a, c, g, or t
  misc_feature (573)..(573): n is a, c, g, or t
ggtctagaggatccctggcatgnagtgaggatactcgaaggctggcagcgagctgctgggccccggcagccgtgaacttgttgtactgggacgtccatcacccggagggacaccatgtccggaagcacacgagccaagctctcggctcccacgtcgcagatgcagttattgtacaagcttagcctgagcagggatgcagcgagcggaggcagggcctcggcgagtttgtaggcacccaggtcagtgatgttgtcctgggacagactataatcccagcactttgggaagcggaggtgaggagattccttgaggccaggagctcaaggctgcagaggtatgatcatagcactatattctagcctgggtgacacagcgagcccttgtttgagggtttccaaggacttcagctgggggaaggtggctgagagctgcgagacaccctcgtccccgatcttgtcctcactcagtgcatcgggttccgaatgctgctgggtggtcatggccgtannttncgcnaccagtttggggaaagnctggacactgaatgggatggngggcgtcnanatcgncagngtctccaatgaggacacctccgaaggctggcagcgagctgtgggcccgtgagcgtgactt

SEQ ID NO: 727544 - DNA, 334 bp, Homo sapiens
tgcgaagtgtcaccagagaaaatattcgctggttttatgcatgcgttgccagtccattttgaacactgcgatgtctcgttgtagcaaaagactatagcgagtaacacgtattctcgtactcttaataaacatttcgagagttcttccttagtcgcccaggcaccttctccatgctttgcaagatgcacaggcacacctatccccatctttccccaatgccttctcctgccagctccgtagggtcccagtcaagtgctggcagtgtggggagcagtggggtggctgccactatcagcaccccagtctccatccagaggacactttgcatccagag

SEQ ID NO: 727545 - DNA, 235 bp, Homo sapiens
  misc_feature (80)..(80): n is a, c, g, or t
  misc_feature (196)..(196): n is a, c, g, or t
acctttctcaacctacgcgcatcactagagatgggcatctcggctggcagagcatactaacagctaatgtgcgatctctntggtatgaactttatttattaagcatacaaaaatacagctagatgtaggctctgcattctaaaagcatattaatcaacttaaactatgttcttggaaacccaccacctggactgtncagtctgcccatctccctgtggaatctagtatcagtgtt

SEQ ID NO: 727546 - DNA, 436 bp, Homo sapiens
ttatgtaaatcattgtaagaccaatgtgaatttaaaccacagtgttggtgccagatattagccagggtcacaggctcttttttaaaatgaagtcaaattagttactgatataagttttatattttgtgattttgccatcatactggttatctgtgctcttgaagtctgctggttctcacaccagcagcaagaggcaaggcatgagacattttaaatatatttccagacatctaaacatctagacaggcctgagtcatgattggctctggtgtgcttccaggtaacatcttgttattgctgtttggggaaaaccaccaatagaattgcagctagacttttggggactgtgcctcgcaggctgtatcacttgctgtaggccaagcaacgagcacttccctcatggtagcaacagtccttaagcccaaagccaaaaaaa

SEQ ID NO: 727547 - DNA, 402 bp, Homo sapiens
  misc_feature (383)..(383): n is a, c, g, or t
ggctccactgggtgcaggctggagaataggggcgtgatcattgggtctctacagcctcaacctcccaggctcaagcagtctacctacatctgcctcccaagtagctgggactacaggcgtgaaccaccacgatcagttacttttctttttttaaatttttggtagagacgggggtctcccttatgtggcctaggcgtgatctcaaaggtccgggagctcaaacaattcctccggatctcagcactcccaaaggtgctaggagttacagggcatgagcccaccagtgccgcggctggcagtttgtatttttttacaagccctttctgactgattccaagtgctgtgggaaagctttaccttggctctcagcagtggtaactggntaagaggcgtgatttctaa

SEQ ID NO: 727548 - DNA, 360 bp, Homo sapiens
tagtatagatggggtttcaccatgttggttagaatggtcttgatctcctgacctcatgatcctcccacttcagcttcccaaagtgctaggattacaggcttgagccactgtgactgcctggctattacacattgtgctcttcttatgcaaatttctccagtaggcttaagttcctccccagaaaatgtttttttcttttctaccacatggtcaggctgcaaattttctaaacttatatgctctgctttccttttaaatataagttccaatttcagatactcactttgtgcacacatatatagtgcatgctgttaaaagcaggcaagtcacatattgcacactgtgctgcttaaaaatttc

SEQ ID NO: 727549 - DNA, 420 bp, Homo sapiens
gcggacgctactactactaaatttgcggcctagcggccagtgatgccatctccgctcactgcagtctccacctcccgagttcaagcgattctcctgtctcagcctcccgagtagatgggactacaggcatgtatcaccacgcccagctaatttttgtatttttagtagagatggggtttcaccatgttggacaggatggtctctatctcttgacctcgtgatctgcctgcctcggcctctcaaagtgctgggattacaggcatgagcaccgcgcccggcctaattattgtactttttatagagatggagtatcgtcatgttgcccaggctggtctcaaacttcagagctacagcagtctgcacaccttggcctcacaaagtgctgagattacaggggtaaagcactgcgtctggcctcaa

SEQ ID NO: 727550 - DNA, 772 bp, Homo sapiens
agggtgattcgtgctgactgaagatgaatggtggaggaggaagcagagtgaggaggacgcgtgagctggctgccagacagagtcagaagaggagagctccgagatggatgatgaggactatgagcgacgccgcagcagagtgtgtcaggtgagatgctggacctggagtaagcagttctcgtgagtctaacaggagaacgttgttcatgggaacgactgaagtcagctgcggcttgcggctggagcgaacgtggtggcgctgagagagcccctgaatacactgggagccccttgtggggtgctgtagcgtgacgcctcaaagattcgcattcagggtggcaacgggatctacaagggcttctgtctggatgtgatcaggaataacgtacgaatgtgagctgcagggagccaaacagcacctggagagtgagaagctgctgcttctattacacgctgcagggggagctgcaggaagcggatccagaggctggaggaggaccgcagagccgtggacctcagctctgaatggtgggacgacacaactgcagcgaccagagtgcgagctccagagtcttgggactccctgccgccagcgaggagtgaagagggcaccctctggtttctggcccataacatcgttgtccttgcttcaagagatcgagatcctgggaggactggccagcatcaaagaggtatgtcacttgtgtcccctcagagagaaattgtttggccttgacctgctgtaccagccaggggacctcaaagacactga

SEQ ID NO: 727551 - DNA, 278 bp, Homo sapiens
aacatagtgagaccctgtctccacaaaaaacaaaatagctgggtgtggtggcacctgcttgtagtcccagctacttttgaggctgaggtgagaggatcactctgagcccaggagttagaagcttcagtgagctatgatgatgccactatactcaagcctcgggcaacagtgagcccctgtctctgaaagttcactggaatgctttaacagcagcttaggcacaactgaggagagaactagaaaactagggggttagacataactgacagtagatatgt

SEQ ID NO: 727552 - DNA, 900 bp, Homo sapiens
tgtgtgctgtgaacctgagctgactgtgtgctgtgctggcctgctgctgcctgcaaactctgtgtgtggactgcacctgctccatgcctgccctgctgtgtgccatgctgcacctgtgtcccccatgctgtgcatgcctgagccctgccctgctgctgcactgttctgttgcaccatctgtgatgtgcttgtgcattgcatgtgatgtgcatgtgacatgccctgtgccatcatgcaccacatgtgagtgtgatgttcacaacaacgctcatgcacatcaccactgtgtgtgccttgttgcatccctccttgacccgacatgatgtgcgatccacaagcactgcttgtactatttctggcttgctcgcatgtgctgtgactatccatgactctgacaacatgcaaggatacgtgctctgatgtgaccatgtatcatgctgatgtgttgtacaatggaccactcttgccttgcttgtgacaggtgaatgacatgttgtgctcgtgaatgaatgtgttgcatgatcttcttgacccacttgactttgtgacctgccagaagtgcagcatgagccagggaccttgcttgtcccactgtgagcactctgtgggcatcttttgcaaggcagaactcgaaacaccacactcaatatagtcgactcacaggtactcctgagacctacgtatactctgacaggcacacactgcgagcacttgcagaccacttctgtagcgtagcgcagggtttgggcattgacccgccccctggtgcatcctcgatcggcaactacttgacttcaactccttcctctttacctcactcgcatcgacagccagtgattacattagccacggacccatccgacccatgtacttggacaacgtacctatctggcgcgcagg

SEQ ID NO: 727553 - DNA, 491 bp, Homo sapiens
accctagaggattaataagcggatagggtcggagtattgtgaccggaacacacagatcttcaagaccaacacacagacttaccgagagagctgcgaatctgcgcggtactacaaccagagcgaggcgggtctcacatcatccagaggatgtacggctgcgacctggggcccgacgggcgcctcctccgcaggcatgaccagtccgcctacgacggcaaggattacattcgccctgaacgaggaccttgagctccttggaccggggtgtacaccgcgggtcagatcacccagcgcaagtgggaggcgcgcccgtgtggcggagcagcggagaagcctaccctggagggcctgtgcgtggagttggctcccggagatacctggagaacgggaaggagacgctgcagcgcggggaaccccccaaagactaacgtgaccccaccagccggtcttcttggaccaattgagtgccaccctgaggtgctgggccctgg

SEQ ID NO: 727554 - DNA, 100 bp, Homo sapiens
ttacaaccccacgatcacgtattgaattcaacacacctacaatactatgtccatgcatacttaagtattagtacttgaatacaatacgtgatctgtggcg

SEQ ID NO: 727555 - DNA, 396 bp, Homo sapiens
acagatgtgattctgtggcggggagggtatgtgtgtgattgtgtgtctgtgtgtgtgtctgtgtatgtctgtgtgtgtgtgtatgtctgtgtatgtaacggtgtgtctctgtggcggggggtgtgtgtgtgattgtgtgtgtgtgtgtgtctgtgtatgtaatggtgtgtctctgtggcggggaggatgtgtatgtgattctgtgtctgtgtctatctgtgtgtgtctgtgctatgtaatggtgtgtctctgtggcagggaggccctgtgtgtgttttcctgtcagaatgagcagcgagctgctcttagaaggtgcacctacgagagaggccgccaccctgaatatacatggacatatctcggcgtgcagcatgaatgacatctgaggccaggcac

SEQ ID NO: 727556 - DNA, 162 bp, Homo sapiens
  misc_feature (69)..(69): n is a, c, g, or t
  misc_feature (72)..(72): n is a, c, g, or t
  misc_feature (106)..(106): n is a, c, g, or t
  misc_feature (114)..(114): n is a, c, g, or t
  misc_feature (139)..(139): n is a, c, g, or t
  misc_feature (159)..(159): n is a, c, g, or t
acggcaacatggccctgaacggagctgaagtcgacgacttctcctgggagcccccgactgaggcggagncanagcgtcgctgcaggcgcgacgggagcggcaagcntcgcatcnttattcattattgtttgttttcacnttttacaacctgcagggcangta

SEQ ID NO: 727557 - DNA, 623 bp, Homo sapiens
ccgcggaatcctttgttaagacccgctcttcgtctacgacaagagaccgacggttcttcattcacatacttctattgtcgcccactcgcctaaagatcgacccttttttgatggatggactttttttttgtacaccaaacctcgctcgcgtatatactctccgctcctgtactccgccccccccactttttatactcctcctcggtggagcaacctacttctgatgacgtctgattataaccaacggtttttcacctaggcaccatagatatccaactgtgttcgcgtactcgtccacgtagtagtcttacaacatatacatgttttcgccatcgcccctctttatattctctcctgtcctacaacatattttccccctccaccacccactatggtggtccttactctccctcacctccccgcccccctttttactcacaccactatctataacccctctctctgttctcaccctcgcgagtattacacacctctctcacgctgctgttgttatcaatacacctcgtattctccccctctttttgactctctcctaatttcccctcactcaccccgctacttcctcttccccggtgttttcctctcttacaaaattaaacaaa

SEQ ID NO: 727558 - DNA, 478 bp, Homo sapiens
gcagtgagccgagatcgtccactgcactccagcctggcaacagagcgagactccgtctcaagaaaaaaaaaaaaaaaaagtaaaggacaactaatgaatcaaggaagactttatgggaaaaagtaagatttaacatgctctaaatagaaaaatggtttgctttttttttttaaggtttaacgtgtttatcatggttggcagctaagtagaggaagagccaagtccagaatctaacatttggacttcccctcatttaaacagtggcgttttgccacgttgcccagactggtctcaaactcctcagctcaaacaatctgcccacctcgtcctcccaagatgctgggattacagtcatgagccactacagccagcctacatttttaaatggttggaaaatcaaaagattatttgatgacatgtgaaaatggtataaaactgtgaaatctattgtccataagtaaagttttctttgaacaca

SEQ ID NO: 727559 - DNA, 557 bp, Homo sapiens
gttagacatcgcggacgtggtgacgtgagctgaatgctgcgggagaggcgggcgcctggcctgcagtgttggtgtcagctgtctgctcgctatggctcgtagatcgttgctcctaggcattggcgggtagcctgccgtgccgcctgtcacgtgactgtgtgtccctcaggggtgtcttctatgggtacgtcctggaggtggagcgatgggtttgcaatgaccgccggcatccagcgtgtcgtccgagtcctccgggcccctcacctcacatctggaagcccgataagagccccaagcatgggtcaatgcactggaagtggtgactccactaggcgcgcatggttcctcgctcaagatgagaagcgctagacgtcttgccgcacgttcaatacccctatggacatgcgatccctcatgcggttgagccaccgttgcacgtggagtcccacgggtagtccgctatgccgatcgactcgtcgatccgcgccttggagctgtcaccaccgcgtgggcctagtccttacgccgatccggcgagctcacttgcacgcgttcac

SEQ ID NO: 727560 - DNA, 269 bp, Homo sapiens
atcttatagtgaaagagcacatacgctattctttcatagagccgttcagagatcatatgctaaacaaatatcattagttggcatcaatggcacagatcacttaagaggcattttaagagattatttacaagatgcaaatgcctctgagtgaagtgtatgtcctatcccatcactgaagcccacaggaacaagtcctacaattaacaaaggctcgatggacacatttctcaatcctgaactcccctagggaaggggtcaggagacagtgc

SEQ ID NO: 727561 - DNA, 373 bp, Homo sapiens
  misc_feature (207)..(208): n is a, c, g, or t
cagtggcatgatcttggctcactgcaacctccacctcctgggttcaagcaattctcctgcctcagcctcctgaatagctgggactactagtgcccgccaccagtagtgcgtattaaccgtgttggccaggctggtctcaaacttctgtcctcaagtgatcagcccgccttggcctcccaaagtgctgggattacaggcgtgacatcnntcactagagaggtatttattttgtttgagacagagtctcacactgtcacccgggcttaagtgcagcggcacgattctcggctcaccgcaacctccacctccggggttcctcccaggttcacgtggctctcccgcctcagccccccaagcagccggggaccacagg

SEQ ID NO: 727562 - DNA, 103 bp, Homo sapiens
gaccgttcatattaggaggtggctctaaaacattttaagtctcttatatttatattgtatcatgctatgttatgacctcagaaaacagcaagtgcagaataaa

SEQ ID NO: 727563 - DNA, 1066 bp, Homo sapiens
acacgcccgcgctggttctgccgcgctctaacgtggatcgccgccctcgtcgtctcgcgcttcccactgtcgggcttttccccggtcgctctactccatcgtgggaaggcccttttcggtccccactctacctgctgtggttggtgctcgtccctcactcgagcggaatcatatccgggcgggcgctgcctgctgtttgcacgtcttctcgggcgtcctctctcctttccccgcttcgtttctcgttttccccgttctggcgcggcggtcttcccccgtgtgggaccctccgtgcgtcttgttcccgtttggccgatagccctctcgtgtaaacctcctgttggcctccaacccccttcctggtatatcgtccattacctacgattccgccccctgcctggcgtgtaacaacgtgggtgctgtggctgcgcctgcaacaggtgctgtctccctcttttctcgtcaactgtcggtgggtcacctacatcaactggggcgttcttgcgccagtaacaggaaatccccctccatgaaaagccccccttcttctactcaaataggtttctctacaacacagcccttttgccttccttctggattaacacaatggtctttccacaggggtggaacctcgggtccctatggcgctgggaactgaacttgcgcgggtagggtgacagactactatggggatgctgaggtcaactcctggcgtctcagtaagatggacctagcttatgcgtcgtcatcctagggcttgctctagtctaggtctatctgccgcaatcacgcgctcgactttccactcaagggagccatactaggcggacaagcgttcagctcactacgcccgtgtcccaactccacagtcatgctgcgcgccgtagcagagcacacgcgagaagtgctcttggactgacccctctggtgtgcggtgaggggctttctcttccaccttgcactgctttcagactccgcctcacatttacgccagcacatggatgtggggggcctgggggaggtcacaagcagagtgttttattatatccgccttaggttttaggta

SEQ ID NO: 727564 - DNA, 85 bp, Homo sapiens
cttcccccctcctccctccttgggctttaaataatgttattgtggaggaaaaatgataaattaaagtgatttttgccccttgtga

SEQ ID NO: 727565 - DNA, 279 bp, Homo sapiens
tcgggcgaatactcctcctccttgcgctcagagaagagagagcatgggtttctttaggcctcattcctaattgaaaactcagagatcagaaacgagagacaagccaaggtctacttccccagcaggacagcatcatactcctatatcttctagacatcactcatcttcctcacaatcaggatcatctatgcaaagacagtctccttctcctcggagaaaaagaactccttcaccaactaatcagaggacaataagatccaccataacgacgctctgacg

SEQ ID NO: 727566 - DNA, 379 bp, Homo sapiens
  misc_feature (139)..(139): n is a, c, g, or t
  misc_feature (378)..(379): n is a, c, g, or t
ttccagtgaaataatagaaaacttttattagcagcatccttaaaaagtagggaaacaaacaccccagtctcttgataaaaatgagtctcttgggcccggcgtggtggctcatgcttgtaatccccagcactttcagagncccaggtgggcagatcacaaggtcaggagttcaagaccagcctggccaaatggtgagaccacgcccccccccccccatctctactaaaaatacaaaaattagccgggtgtctgttgtcccagctacttgggaggctgaggcaggagaattgcttgaacctgggaggcggaggttgtagtgagccaagatccaagatcgtgccactgcatcccagcctgggcgacagagcgagactcttnn

SEQ ID NO: 727567 - DNA, 261 bp, Homo sapiens
gctcaatgttacacactccaaactcacgactcaccaatacaccaagacctgtgctccatcgattctaacaaccagctctttgcacctgtgagtgtgcgacttgagctgggtgcaaaggtgcacgcagcgtgacgtgctcagtgagccaatgcccttcagcacgcaagcatacagaaagcttgctgcgccccagctaactagatacttttgaatctgctatctcacgccctatcacacaatactgtgtacccaccagaaatg

SEQ ID NO: 727568 - DNA, 207 bp, Homo sapiens
catcttatcatctgtcggctcattcattgcgctagagcagcagtggaatattaataatcatcatgatacgagagcctctcgtatcgatagcgaaaagtccgtaatagtccaggcaccctccatagagcctggagtgaatatatggatgccccccaccctaccacacattcgaagaaaccgtatacataaaatctacacaaaaaagga

SEQ ID NO: 727569 - DNA, 122 bp, Homo sapiens
ccggtaccaaagttgtcctgtgaagccaagaacgtggctagataagatgaagaagaggatgatgaggacgaggatgacgacgacgacgaagatatgaagacgatgatgatgaagatgatgac

SEQ ID NO: 727570 - DNA, 949 bp, Homo sapiens
gcacgagttggacccgcctgtggtcctgcctgtgagaaaggtccagtggtgacaacgggtgtggtctatagccgctcggcgcggccaaaagggtgttacacccgaaccggtgttgtaaaagtcgcaaccgtctggccatgggccccccgtcatgccgcccttgtaccctccggccaaaaagtccgctgcgttcccccccgaccgccgtttctgggtgtgtaaaaaacacgggcaaccccaacgagtctccagaattgttcccagcaaggacccctaaaaaggaggggtcagaaattaaacctcccactggtgctcaccctcagagctctttagagaactggtaacaccgaaactagacgcgcacaagcgaggaaatcaacgcgggtgcttaaaacacaccgcatcattcttgccaaaagggtccgtataaaagagattaactgtgtgccaggcaccacagggttatacgagacaggcttctctccgggagtctattgctcgaccatttctacatattttatccccccctgtagaaaagattataattcgccctagtatccccccctcttaacaggcgctcatttgggctctagactcccccggtggcgtctccgccctgttttaactcctcgcccctttgagggagctgagtcccgggtcgggaccgcctcgcggttccaggaatttttctgacccaccgctggccccaaatacggcgccaaacactccaatatatgtggaccttgaaataatacctaaaatatattgagccccgagtgctctgcgtgcgcgtgctacctatgactcgcgccgcagttattcgcggcagacgttgcatatctcggaggcacaacgtttcgaccccgtgggggtcgagcggatccctagcagccccagagtggggtacgcaccccccccgcgggcaccaacaaaaccctcttgcaccaca

SEQ ID NO: 727571 - DNA, 236 bp, Homo sapiens
catgactgagatgtccctgataatcattgtagaatgataaagtctctgtgtccttggggcatcactgatagtcacatagtacttgactggtctcaaatttccacaatggagatatcaattgtgtgataccactgttcacgctacagctttcagtttatccaagacccagtgcatacttgaagtgagccctttcccatctcagcagcctccttctcaaatttttcaattgtgttctt

SEQ ID NO: 727572 - DNA, 358 bp, Homo sapiens
ccgatcttatggtcgatcactgtactatacgcctgtgtatcaatctactgagcaattgtggtatttatcaaatctacttttttatttaagaggagagggtcagaatatatagctcaggctgacatcaaactcctggactcaagcactctttctgcctcagcctcctcagtagctgggtataatggtatgtgtacatatatacttatagagacaaggtctcgtactgtagtccaggctggactacagtggtataatcatggctcattgcagcctccaacacctgggctcaagcaatcctcccacctcagcctcctgagtagctagggactacaggcgtgtgaccaccaatgcctatctt

SEQ ID NO: 727573 - DNA, 334 bp, Homo sapiens
  misc_feature (238)..(238): n is a, c, g, or t
catttgaaaactactaatcagaccgggttcagtggctcgcggctataatcccagtactttgggaggccaaggtggaaggatcgcttgagtccaggagtttaagaccagcctaggtaacatagtgagtccctgtatctaaaaaataaaaaaaataaaataatgccagggtgtgatgggcatgtacctatagttccagctacttcagggaagctgaggtgggcaggatcactttgagccnggggagatttgagggcttgaagttgagccgttgatccattcattgcttacttgcacttccagccttgcgttgacagagtaaggaccctgtttttca

SEQ ID NO: 727574 - DNA, 121 bp, Homo sapiens
ctgcggcctgcactgtggcctggcactttctgcgggcccgcggcggcctgccggctgggacctgtgacgactgtctgacgacctgggcgggacctgtgacgacgtgtctgacggaccgacg

SEQ ID NO: 727575 - DNA, 798 bp, Homo sapiens
tccaggtccgctcggtaaccgtttcccgcgcgcccggccccgactccggggtaaagagccccggagcggagcagcgctggccgcgtgccgcctccggagccggcagcgtgagtggccccgcgtccccgcttctcccgtgtccccggcgtgggccgctgtcatccggcacctcggtcctcgtgcctgcctgagccggcgccggacgcgggggataagcgggggatgagcagccgctgtgtcctcggctcaccgagcggctgccctgaggactccgagtcactgtagcccggtcccggcgcgaagaccccgtcggcgggtcgcagtgcatgcgtgcgtagttagcccgggttccggacagcgcagcacggtgtccaggtatgcagcgtgcccaatctgccggggcctggctcggggcgctcgtgccgcgcacggcgtagacgcgcttgaacttcaacgccgcagttccatgacgtgtgcgcgccggtgatacaacggtccccttagtaggccctcgatgcgccccctgggcgactccgcgggcattgccttacccttgaggcaagcagcgacttgtacaagtatcatacgtccacatgacgatccccaagctttagagcctatctccgtatcacaggcgacaagagaaagccaaccgcgtcttcagaccacgaggaacatcaaggcgcggaccaagaagaagcattgggacaacgcacgatttccgacaagccccccaaatggaacatatgaggcccgcgatatacattagagaaagatttgacttcgggaggtagaccc

SEQ ID NO: 727576 - DNA, 302 bp, Homo sapiens
  misc_feature (288)..(288): n is a, c, g, or t
cgatcagaggactccgtcatcgctcttggtgctggaataagtctttccggtcgtctgattagcaggctgtctaacttttggtactttgagtttgtccagatgagtggttcttaaagcaggggcattatttcccaggagaattggtatctctggacatagttgatgtcacaatgggggcagggaggtgctgccggtacctagtgggtagaggccggggacgcctctgagcatcctacgttgcacaggacagccccccacgctgaagaattctctggcccaaaaatgtcnagcagtgttgaggc

SEQ ID NO: 727577 - DNA, 708 bp, Homo sapiens
cgtaggcaacatggcgccagccggaatggcatggtcttgaagccccacttccatagaggactggctagctggggcgtggcacgtggttcaaccagcggccgtaatgatccgtagactgtaaggaccggcaagccaatggagcgccgcatcgccctggcgtcccgcgattgaggtcccattcctggggccatcagtgcgctaggtccccacggtacggtaccacacgaagtgtgcgcgctgagtcgcgaggccttcaagtctggaggatgctcacgtggttgtgacgcgtcatatcacaaagaaagagtggcccggatcatcgagccatttcttgtgagataccgtgaggaagtggctggaacaaagtccacggattccctgaaggccagacgtgtagaggatgaaggagtacgttccaaaatcattctctttcccaggaagccctcggccccatgacgggagacagttctgctgaagaactgaaactggccacccagctgacggaccggtcatgcccgtcggaacgtctataagaaggagaaagctcgagtcatcacttgaggaagagacagaatttcaaagccttcgctagtctccgtatggccgtggcacgcccggtcttcggcatacgggcaaaaagagcccaggaagccgcagaaccaggatgttgacaccagaaaaaataagcctcctggtgacttggaatca

SEQ ID NO: 727578 - DNA, 181 bp, Homo sapiens
tgggaagaagacccacacccaccagggacccaaggaagtcgtctactgtgctgaccgatgacaacacctacagccggggagcctgcttgagggagatgcgctgggacccgtggtgtctacagtgtggcctgtggggcctggatggagcggcatgcgattcgagggcccctcaggatacagg

SEQ ID NO: 727579 - DNA, 253 bp, Homo sapiens
  misc_feature (61)..(61): n is a, c, g, or t
  misc_feature (107)..(107): n is a, c, g, or t
ctcgaggatctccgactagccgaaggtccgttagcttcaccttccagagagggcaggctgnagccctgtgcgtcgcgcctctaagcagtcaccttgtcccttcaggnactggcatctgacgccatccaggtcccagggggcggagtcgcaaaccctaactctggggtgtattctgctcgagctcctctacccctccccagatagctctcccagcctggggcacggacagcacagactgtcgggctagtcgggg

SEQ ID NO: 727580 - DNA, 380 bp, Homo sapiens
  misc_feature (14)..(14): n is a, c, g, or t
  misc_feature (120)..(120): n is a, c, g, or t
cgtcgacagcgcgnacagggttggggcgaagtgcttgagtggaacagagaaagagcgcgatgcacaaacacttgagcgcagcagaagaccaggaggagctgaggggcaggaggatgacangacttcggggatcacattatcagaatcatgaagccaaggatacgctatgggcatgcctccgggatggtgaggaagggccaccgagcgccgagcactcgtgcacgtgcgctgggattacagccgacactgtaaggatacaaagagatggctctgcggctcggagacagctgcaatccccatgacgccagattacaagcatgggtggcagatcgacgtgacttgatgagggcgctatggtgtctatgaggatgaaactagga

SEQ ID NO: 727581 - DNA, 112 bp, Homo sapiens
gtactggatagacgtcctgatagacgtcctgatagccgtcctgatagaacgtcctggatagacgtcctggatggacgtccttgataagacgtcctggatagacgcctacgga

SEQ ID NO: 727582 - DNA, 185 bp, Homo sapiens
tcatatctgcatcttgatatactccaaagctctcagacatgtcctatctctttactaggctccagaatcacattcacctagaaccagaagatctattagcaagatggctactgagttctaaagaacacaaggcttaggtatagactcgagtttctggcgagcacggacttgttaagatctcattg

SEQ ID NO: 727583 - DNA, 129 bp, Homo sapiens
cgcggaccgggaagagatgcgttgcgtgcacatcaatcccgcgagccacaagtcagtagtgatcagaagcacgacttgaccgctgaccggaattccctcatgataacatctctctccctcgggccttgt

SEQ ID NO: 727584 - DNA, 421 bp, Homo sapiens
tttgataagagaggtagtacgtgaggtcacggacagcaagtccaggcgcatgatggcatggacgcaggacaatagccttcatagatagggacattgtgggtgacgccatcacctgaatccaggacgatgcctgtcgtgcggacagaggcatagagggagagcacagcttgaatggcgacgtacatggcagggacattgaaggtttcaaacatgatctgggtcatcttctccctgttggccttgggatttaggggagcctctgtgagcagggtggggtgctcttcaggtgctacacgcagctcattgtagaaggagtggtgccagatcttctccatgtcatcccagttggtgatgatgccgtgttcaatggggtatttgagagttaggatccctcgcttgctctgagcctcatcctaccaaa

SEQ ID NO: 727585 - DNA, 131 bp, Homo sapiens
tacattacccaaagctgcattcattcctgcaggtcgatcgtgtttcaccactgcggtgcatgcctccctgtacaagttccgtcgagacgtgagcaccgtgctgccctccaaatatcgttcagctggagcct

SEQ ID NO: 727586 - DNA, 141 bp, Homo sapiens
cacacgaagtaagtagccagtgctgacttctctagcatgctctctgaggagcgaaaaggaagagttaaaagcagagttcagttcagctagaagacgaaattacacacactacgacacgttttgtcatgcgaaagaaaggca

SEQ ID NO: 727587 - DNA, 124 bp, Homo sapiens
agaggaccgcccggtggccaatggattgaggttgatggactgctctcctcactctgtgctccagacaggaaggtgactccagtgacagctggtggtggactgtgctggcgcagcgctgtgactg

SEQ ID NO: 727588 - DNA, 1204 bp, Homo sapiens
ggacaccaggactccaaaatggcgtcagttgtaccagtgcaaggtacaagaaacttctggaggtcaaactggcgggagctgcctaggctggatcttgatgcgggacttcagtcctagtggcattttcggagctgtttcaaagaggttactaccggtactactacaagtacatcaatgtgacatgaaggggcagcatctcgagggtattaccatgcgtgctggcatgctacgtgctctttaactactccttttcctacaagcatctcaagcacgagcggcttcgctaagataccacttgaagaggactagcgctctgcaccctcgcccaggcccacgatccttgtgcccgaggcccctccgtgaggaacatcaattctcaattcgttgtctgaatcctttcgatcatgccttacataggcagatttaatccttcctagagattaaagacattgtacttgggtgagtgaacactacacgaaagaaatggcttgagaggacaattcttacattgtggcgatgccgggacaaagagaggtaacggagcatagcgcggtacaatgtggtttgcagtaatggtaggtcattcagtgaacacactagcgtttgccttgtgtttcccagacttggtcgcgtgcacatcgatgccggtcataccccattcaatctgggtggttcagctagtgaaaattgcggaggacatacctcaggaggttaaagctggggccaactgcatcgagacttgtacggaccaatacagatggagctcatataccaccaccatgagtggtgaacggtatagaagcgcacgaaacagcatagacaacaactggcgggacatcaacctggaacaggacacacaagcggcgcccagaggtgaactataaaaattaactccatacaaaccccctcgtaacactgtcacacagtcgcccaaactaaattccccagacatctaaaaaacactttatacaacacgaccctcacctcgggtgacaattacgaagctgacagcgtagcaagcaaatgagaaaaggggacaacaaatagcacaatcagacaaatcatgacgcacaccgaagcggcataagagtcagagaagacgaacgaccagcatctaaacacatagaccaaacaaaagatgccgccgcagccaaagggcagaacagtcagataatatcaggagacataacttcacaccagcaaa

SEQ ID NO: 727589 - DNA, 564 bp, Homo sapiens
aagaggaagccctcccgggtgctgtctctctttgatggaatcgctacaggactcctggtgccacaggacttgggcattcaggtagaccgctacattgcctcggaggtgtgtgaggactccatcacggtaggcatagtgcggcaccagggggaagatcatttacgtcggggacttccgcagcgtccactgaggcatatccaggagtggtgcccattcgatctggtgattgggggcagtccctgcgatgacctctccttcttcaaccctgctcgcaagggcctctacgtgggcactggccgtctcttctaagagttctaccgcctcctgcatgatacgcttcccaaggagggagataatcgccccttcttctggctcttagagaatgtggtgaccatgggcattagtgacaagagggacatctcgcgatttctcgagtccaaccctatgatgattgatggccaagaagtgtcgctgcaaacgggaccgcaacttctggggtaccttcccggtatgaacaggccgttgaatccactgtgattgatagttgagctgagaagtgttgga

SEQ ID NO: 727590 - DNA, 725 bp, Homo sapiens
cgtccagctgtcatgagcgagcgcctccagtcccaggaaaaggagaaggaatggcaacgaaaaagcacatccattttccccccagacaagaagtagaacaaagccctgtctttcaggattcctgggacacagagtcttcaggcagtgacagtggtgggagcagcagcagcagcagcagcagtgatcaacagcccggacagggtcagcgggccggaaggcagtcttgagccagaccatgggcggatccagccctaacacgcctcagcccgtgcccgagcagtcctgctgcatgtgccaaggcccgtctacttccacatcaaccagatccctgagggaggcccatttccacagcctacagtaccgagggcggctctgacatagatgtgccggcagtatacttgccttctggtgaagggacagcgctgtgcagatctgatatatcaacttacaactgtgtttgaacagaaaaaatggcaccacgaacaaatggcccctggctatagggccttcttctccaacgctcctacttaattttgaacctaacaaggtttaaccaggccagtcgtttcaccttgatgggtattagctgccactaattgcaattttcaacaggcggctttagacagcacatatttcttactaggattctttcgcacggagggctatcacaatctatgtcacgcgcagctggtatcgaggaacacctcattctagtgtgttgaatc

SEQ ID NO: 727591 - DNA, 497 bp, Homo sapiens
  misc_feature (217)..(217): n is a, c, g, or t
tggcaggtctcttgttcaaactcagttccaagtcccaggaagaaagcagaaagttcccttccacaagggttagggctctccccccaatgtcttaggtccggggttgtgtttagggtggaaaaaccaaaaaatattcccttttcctttccctgtggttgaaaaccccagtcagtggaaaaatgtttggaaacccccgccagtggagcctgggggggcncccggcttttgccttattggatgtccaaacccttgtttttttcaaggaaccgttttaaaaaatttggccccgggggttttcaccttttaaaagtccctccccctggccccaaggaccctgggtcctgttttttaaaatttttatgtttttgtgaaatttccaaagggttttattggcccccatgggttccttcccattttttgtaaaaaaaaaaattacttttttttcctaggtttccccccccggccgaataataaattttgggccccagccctggtta

SEQ ID NO: 727592 - DNA, 341 bp, Homo sapiens
gataagtatttgacccccaaaaaaggaaaaaaattgtgaggtaaaagtttgagcagatggtggtgtaaaaagatgcccaacgctgaatcccagcactttgggaggctgaggctggtggatcacctgaggtcaggagttcgaaaccagcctgcccaacatggcgaaaccctgtctttactaaaaatacaaaaaattagctgggtgtgatggtgggggcctgtaattccagctacttgggaggctgaggcaggtgaatcgcttgaacccaggaagcggaggttgcattgagccaagattgtacccctgcactccagcctgagcgatgagtgatactgcatgtc

SEQ ID NO: 727593 - DNA, 1977 bp, Homo sapiens
catactgtccccaaggtccatccattctcttccttttgaaggctgagttgtgccccactgtgtgcctagaccgcatctggttgacccatccatccgtcgatggacacattatgaatggtgctcctgtgaacactgtgtaccaataagtgctttttgagcatgatcacgtgcctggcattgtgctgggctgcagtgggaaatgaacttggttcccatgctctgggggtaatgttaagaagcaaacaccaatagatgtttactaagagactgcaatatgtcccgtgatgggaaagagcagtgttcggggagagaattatggcaggggtggaggtgggtggctgggacaatggtcaggtctcaggaagtggcctgaagaatggggaggagaggtgggcaggggtggggagggtccaggcagaagtaacaacatgtgtgaagccactggattgcgacagagttgcccgttggagggattgatgcttagatttctgcttcagtgtcttctccagcaagcatcctatcagcctccaggcccacctctccccaccatcttctcctctctgctcttattctagttcattcaaactgcctctttgctcagctatttctcccactgtccagtgagcggcttgagtgcaggaactgttttattttatgtttgcgccttcttttcatatcttagtaggtgtcagtgactctcaaacagatactctcctgaaggagggtagtgctttcactggcaatgacccaagaccatcatctggggcctgccagagtcaggcacagccccggcattagaactttgggctgtaagcctgtcctctgtgcttatgtgggtggtgcacaaagcacttgcaaacatctgtgtgcagtgctgctccattcggcctgctgaagctttcctgccctgttgccgctgaagcagggagtgtgggaagcgcccagctcagagctgggccagatgtggccatacctcccagcagtgcaagcagcatcactgcgccaggccagctgactcggctggccctggtgcacagtgcttaggggcttgtggccacgagccatgccccaccacctctcctgttagccttggtagcttcccagcttcctctcacatgactgtttctgtttacttctccctctggccttcctgcctgcggcgtccctgtgccacctagagtctcatctaccgcactagacatagcctctgcaatggccccgcaccagggcctccttccagggcatatcccgtctctgtctcacccttctagtctgcgcttgcccttctcactccccagctctctctgttactgtcagtggagggtctgtgcactttgtcgttttgatcctatgacgttgtatctgtggctcttccttcaagtgcccaggagaggcccagctcctggggccagaaaggggttagtcttgaagtcttgggttggacatttcaccatggccagcccagagctcggctggaaacagatgagagacaacatgtgaggaggcagacaggagctggggatccaggctctgagcacctgagaggtttgggggaaggtattggtaatggattggattgtgtcccccaacaaaagattttcaagtcctaacccctgtacaggtgaatgtgaccttatttggaaatagcgtctttacagaggtaatcaagttaaaatgaggtcatttgggcaggtgcagtggttcatgcctgtaatcccagcactttaggaggctgaggtgggtagatcacttgagtccaggagttcaagaccagcctgggaaacatggtaagaccctgtctctacaaaaaatacaaaaaaattagccattagctgggcatggtggcatgtgcctgtagtcccagttactcaggaggccgaagtgggaggactgcttgagcccaggaggtggaggttgcagtgagtggagactgcaccactgcattccagcctaggcaacagagcgagaccctgtctc

SEQ ID NO: 727594 - DNA, 154 bp, Homo sapiens
gtgtggcctcgtaaagtgctgcgattactgacgtgagccatcacgcctggctgaagcacagaatttcttaaacctgggaggtggaggttgcagtgagccgagatcgtgccactgcactccagcctgggcaacattgcaacacggtctctcaggc

SEQ ID NO: 727595 - DNA, 1007 bp, Homo sapiens
gatatattgctggatccttgttcatagtgcatctgctttacagaattaacgagaagcagtgtcaagacagtaaggattcatagaccatttgccaaaaatgggtctaagtgcattatactctcttacctggcatagattggtggtacgcagatgaccattcactatgattctgattttcccctatcaagttctatgggcaatcgatcaccaaactgtgcacccgagaaagtaagctgaccctgaaagctacccgaagttgccatgtactgtgatgaagctgaaattgaaatgtgtacccttggtgcctcctggcaatcaaatatcttaccttagtgaataaccgagattgaccatagtttgattgagaacaggcctgttgacgaatgtattcgtgactcttgtgagttgggcctcaatgcatagatcacgagaaccgttctagaaaaaactccagcgtatataaaagggaggagtttcctctctagaattgagaatgaaactgaatgaagacgtgcagtatataaccaagaaactaaacctgacacgagtctgtgggcgccacttcccaaaatctcgtggagggatctgcagctttaatccataacaacggatcaccaaaggctggcgctctttttgcaaggatttggtgaaaccttgatcttaatccagtctccagcacaacaggtgaaagcaggctgctggtctcccgctgctttcaagagggtctttagcgttcgtcgaacatactttgaacctgtggcagtatgtttgagatgcaagaaagtgctttgggaccccccaaatcatctgtctaagcctttctttgaaaaagtttaggctcgaatcctttggagatttaaaggggctaacgatggtggaactcgcgttattcacacacagcgtggtgcgatgacactcggatcgtataacgggtgacaacagaggagcaccagaaacaaaaatgagagaacgcagcatcagtggtgcacacaatcagaggaagtgcc

SEQ ID NO: 727596 - DNA, 353 bp, Homo sapiens
accaactttagtggccttaaagaacatagcggcttaggcctggtacaagtggctctcacctgtaatcccaacactttgggaggccgaggcgggcggatcatgaggtcagggagttcgagaccagcctggccaacatggtgaaaccccgtctctactaaaaatacaaaaattagccgggtgtggtggtacacgcctgtggtcccagctacttgggaggctgaggcgggagcaggagaatcgcttgaacccgggaggcagaggttgcagtgagccgagaccacgtcattgcactccagcctaggtgtcagagtgagactatctccaaaaaataaagaataaataaaataaaacca

SEQ ID NO: 727597 - DNA, 266 bp, Homo sapiens
aggaaaccagatgacaagaatgcaacgactgtagacacagtcttatcatagacagatagcaagacatgcgaattaaaaagcgaatgggtcccggagcaacagctggtggatgcatgagaagtccaatgttaaaattcagagcactccagtcaaagcagtcaggatggaggttgctgctaaaatttgcctccatccttttctcacagcaatgaattagcaatctgaaaccaagtgaacaaacaaaattgcctgaattgtactgtatg

SEQ ID NO: 727598 - DNA, 242 bp, Homo sapiens
tcgagctcggtccttgcttgtctttcactgaacaaaagacactgaatatatacttttcaacatttaagattaaacaaacacataacaaagaaacaattatgtcccatacctcctcaagtattttgatgatttcaacataattttacagtaaggaatttaggagtccatattgtacccgctcccgctcctaggtaggtattcaccaatctccccaatgaggtaagtggtaagaaaaggatttg

SEQ ID NO: 727599 - DNA, 421 bp, Homo sapiens
acacagaggctcgtaaaacaggtatctagcactgtgtacacacatcatgtatgatatagtacgtcatggtttcagacagctatctctatcaggtttgtcaacctgtatatgtatacctttccatcttctcatcagcagaagtaatagaggtaggtaacgtacagtgtgtacatgttaggtgtcacttcaaataggtacactgggtgtcaggtgacgacctccttcaagtaataactcagacttcgtagacgtgccctgtggctgggtgtctatcctgctacatgtctcgacagagactgggtctggctttgcgtatcacagttcatcgttcacagctgtatagtcatagtcatcctccatgtcaggatcctatgcatcttacaggtccttcagatcatcatcgtcctctgccccatcctgg

SEQ ID NO: 727600 - DNA, 258 bp, Homo sapiens
cctgcacttcagcctgagcgacagagcaagactccctctcaaaaaaaaaaaaaaaggtctttcttattttgaatccacaaaagtatgggtttttgtaagaagggcccatgatctggagctatgggatataagtttaatgacagctcttcatatatttgaagatagcaggcatggctccacaatggtggctttcttgaatgaacaaccctggtttcttccttatgaacaggtgggattttggggggcccctatccctct

SEQ ID NO: 727601 - DNA, 770 bp, Homo sapiens
cgtggtggctcacgcctgtaatcccagcactttgggaggctgaggcgggcgaatcacgaggtcaggagatcaagaccttcctggctaacatggtgaaaccccgtctctactaaaaatacaaaaagttagctgggcgtggtggcgggtgcctgtagtcccagctactcgggaggctgaggcaggagaatggcatgaaccgggggggcggagcttgcagtgagccgagattgagtcactgcactccagcctgggaaacacagcgagactctgtctcacaaaaaaaaaaaacacaatttaacctatagaatttgtccattgtggatcccagccaattctgacttcctggatttggaaagcggggactcctattgagatttttgggtttccccttggtatccccgcgcagcttttttccacattaagccaaaaacagaaacaactcgggtccattggatcgactggacctgggggaacgcaaacatacaggtatacacaaaaagaaaatattattcagctggaaacaaattcgtgggcccaggaagggtggggcctccccggctggttaacaccagccacttggggaaggccagggggggtgcatcacttgagggccaaggaattacaaaaacacgctgggcaacatagaaaaacccgatctttcaaaaatttaaaatgagggccggccaaggggtccaaactgtaatccacgcactgggaagccgaggacagggacaccgggccagagtaagacagcggcaactgtggacctg

SEQ ID NO: 727602 - DNA, 112 bp, Homo sapiens
gggggtgtccctactctgtagaatctgggactgggcaaatggtgtggcctccaaactagctgttatgttatgaattctttgtgagttaattagaataaagtcattttcttac

SEQ ID NO: 727603 - DNA, 149 bp, Homo sapiens
tacacggatcccgcgcatcaacgccgcccggaaacacagtctttgtggttcctggggtggagtatggttgcataagctgaatactaaaccggtaatcgacgcgaagaggcaccaccaggagtgtgagcctgcggccttggatgcagtcc

SEQ ID NO: 727604 - DNA, 367 bp, Homo sapiens
ttgacgcactcgcattggtccgcgcctgtacgcagcaggaagtgaacctgaatgtgtccctccagctgcccagccgcagctccaagatcatccaccgtatccattggtattctgccagcctcctgcgactccgacgagaccacggaacatgagggtttcacatgtcgacaagatgaccagaaaaggccaaggcaccttgtacggtggtagacaatagtaaccatgctacaggccacagatcaattcacctgtaataagttcgccctcaaggtcaccataaataccagcaccggaaacagacaagaggtctcatgatgcctcgaacactatgatccttgacgatctgtaccatgtaccggggcgacca

SEQ ID NO: 727605 - DNA, 130 bp, Homo sapiens
agactctagagcacccccctattatagaagtttcaatagcaggtcattttgaacctcaaataagagatcacaatatatagtattaattaaaaaggaaaaaaacattgctgcctcggggcgtctatttact

SEQ ID NO: 727606 - DNA, 1599 bp, Homo sapiens
tcctggcagccgctgggcgggccaggccaggtcgaggccgaggaccgagccagggcacatggacctgggcctgcgaggctctaattgcaggcgcttatgttgatgattattttattataaatcacagacagacccccagattatagcggactgattatacctcccgtgtattggtaaatatgatcacagtgggccgcagcgaccaatggtggaggctgcagactgacgaacatagtcggtggctacgggcgacacggcagggagagactagcatcgagaggaagagacacgttgtaatgtatggagtgggagatgcgggacgcacatacaaaatgtacttaccagatggcaacccatcagaacaaactcactacgatggcactccgactttattaggcccaatggcagggacgacacagaagagatgtaactgacgcgagacgactatcgaggacacgaacggggggcacatggacgagcgcaggggacacagagccatgaacaggatggtgagcctgaatgggaccgagaacgaacaacaaggaaccgaaccagagagttcaagcacaacaggtgataaaggattagaggacacccacccaggaagatcgggaccagactgataccatcgtggacccgccgactgagagtcaccgcaagagatgcaccagaatcagacacaagacagcgcaccggaggcagacaagcgcaagagaagacaagagacgccagagaaagaaaagaaaaccaaagacccgggaagacagataatccacacaccgaagcagagcacagatagggaacaagagacaaacaagggaaccaacaccgaaagaaagacagagcaacgaggagccaggatgacagaacatgcaccatgagacactcggaaacacaggccagggcagccaaggacgagccaccggcgagaagggagaggtcggggacgagaaggaggagaacaaggagaagagcaggcaacgagacaagcgagaacacacaggaatacagcagagagacaccaagagcggaaaggaagcgcaaagggaacaagaggaacaacgagaggaagcaccgagacaacggacagcaaaccacacaacagcagcggaggaaaacgggagacgacacgagagtcgagagcaacaaaacaagtggaagaacaggaaagcagaagaagcgagacagacagcagcagcaacgcagagaaggcagaagaaaccgagacaacgcagagagcagacaagcagcacccagggagctcagagacagacgccggggaccagagaagagagaagcgagacaaggaacaagacagacgccagacgaagagacaagggaagggagaacaagacggacgaaccgaccgacgcgcagggcagccgacacaggcaaagcgcgaaccagcggccgacgcgagactacgagaacgagaaacggaaggataagagaagcaggcagacaggcgcggcacagcaggcaaagacaggcagaagaacgcacgagcgtggaagcacacagagaagggaaacgaggagagcagaagaagaagcaagagaacacggaacacggagcaagcaacaaagaggcaaaccaaga

SEQ ID NO: 727607 - DNA, 1121 bp, Homo sapiens
ggcctgatcctctgggtttgtgctccgttcgtcgcgtggcttgcgttttggctgttgtcctatccgtttggggcggttgcttggtagggctctctattgtctgttggttattggttatttgcgcctgtgcatactgtggccagttgttttgtctttgtgtgttttgtgtttgtaagctgtgttggtgttggtttttgtgtgctgttgtgtgcgagggttgtcggctgccgtggtggttgtagggtgctgggtcgagggtcttgtgtcctggggcttacgtgcgttgcgttggtgtattgtttgtgtagtgtgtgggtccctcttgactagtttgttgtttgcgtgtgcctgtatacgcgggttgttcccgctgtggtgtagttgttagtcatggccgctagttgactgtttctccacgctcgttttcttttaatatgtgggttgtattgtgtttttattgcggtatctgttccagtatatctttcttggtgctgtgatgctgtttgtactggtttctttcatgttggcttctgatggtctccttggcgggattgtcttcacccgatgctcagcgtggtcactgatcgctgcctggcctttgtatgctgcctttgtcctcttgcgattgattttggctttggttaagcatataagtctgacgtgatagacatacctatctacgctgaatgtaaacgtatatacaggtcaattgaacgaagcccatacgttgctgttaacacggtgtgtcttgcttaagagaagttaatgtttgactctttttgtggaatatatatagcagcataggttttcaagaatgatttatccaagagtctatgctcttgtcaaatggagaactggggatattgttgtatttgagaccactgttgttgcctgttgtcctgcgccaacatggttaggtgcacatgatatagattagccctgtgaagttgggtcactgatctatctgactctgtcaagtaatttaggattaaagtttgaagtgtaattacatgttgacttttacaggcatctcagggtggacttcttatgaatagcactgaacctatacaaatgaatcttagaaaacgtttaagatcagagattcttgacctggttcgcaa

SEQ ID NO: 727608 - DNA, 513 bp, Homo sapiens
  misc_feature (351)..(351): n is a, c, g, or t
  misc_feature (474)..(474): n is a, c, g, or t
  misc_feature (476)..(476): n is a, c, g, or t
  misc_feature (508)..(508): n is a, c, g, or t
cagcagtgttctcaccagacagtatagcctcctccaaaatggtagcaatcccaaagattcacaataaaacaaaacctttaagactatgataaatggtttttatttcttttttaaaaacagttcttcctttattctttaatctttaaacactgagttgaaatggatgattgaaaatattatttggggtatattgttgtacacataagagagtaaattttaagagctgaattaaatttctcactctaccttttctttcagtttatttttaaatatatatatttgtagaagcagttatctgccatccggaaattaattctcattttcttggattattttatggtgactactttntaagtattttatcctttagtgaacaaatggtctttctttccagttagaaggtgatcctcaataattatgttcttttctttaaccaaaaccttgtttcaattatgacattttgttgatatgtananattctgaagaaataaaagcaaaaaatattgantaata

SEQ ID NO: 727609 - DNA, 407 bp, Homo sapiens
  misc_feature (13)..(13): n is a, c, g, or t
  misc_feature (124)..(124): n is a, c, g, or t
  misc_feature (134)..(134): n is a, c, g, or t
  misc_feature (241)..(241): n is a, c, g, or t
  misc_feature (245)..(245): n is a, c, g, or t
  misc_feature (251)..(251): n is a, c, g, or t
  misc_feature (267)..(267): n is a, c, g, or t
  misc_feature (273)..(273): n is a, c, g, or t
  misc_feature (275)..(275): n is a, c, g, or t
  misc_feature (298)..(298): n is a, c, g, or t
  misc_feature (302)..(302): n is a, c, g, or t
cccccaaattttnccccaagtcccccaagaatacagaaaatgcttttcccgggggcacggaatcagacctcatcctacacagcagtatgaatgatgttttagaatgattcccctcttgctattnggaatgtggnccagacgtcaacccaggaacatgtaacttggagagggacgaagaaagggtctgataaacacagaggttttaaacagtccctaccattggcctgcatcatgacaaagnttcnaaatcnagggggtataaaatcnaggtcnantaaatcctaataggctttaacgnttantgcttaatccctctctcccccttcttttttgtctcaagattatattataataatgttctctgggtaggtgttgaaaatgagcctgtaatcctcagctgacacata

SEQ ID NO: 727610 - DNA, 136 bp, Homo sapiens
gctgtctgggtcgatctagaggaccccatgagttttacagtgaaatatctgaggttgcggaaggaaagggcacgatggtgttttacagaagcagcaaagaactatcagtgttaaactcatttgcaaaatctgcgtg

SEQ ID NO: 727611 - DNA, 1227 bp, Homo sapiens
  misc_feature (1195)..(1195): n is a, c, g, or t
gaggacttggagaacttggtggtctgagctgtcccaagtcctccggttcttcctcgggattggcgggtccacttgccagggctctgggggcagatttgtggggacctcagcctgcaccctcttctcctctggcttccctctctgaataccgactccaggctgggctgagccaagccagagtgccacggcccaggagggtgagctggtgcctgctttgacgggccaggccctggagggcagagacaatcacgggcgtcctgcacagattcccaggccagggctgggtcacaggaaggaaacaacatttcttgaaagggaaacgtctcccagatcgctcccttggctttgaggccgaagctgctgtgactgtgtccccttactgagcgcaagccacagcctgtcttgtcaggtggaccctgtaaatacatcctttttctgctaacccttcaaccccctcgcctcctactctgagacaaaagaaaaaatattaaaaaaatgcataggcttaactcgctgatgagttaattgttttatttttaaactctttttgggtccagttgattgtacgtagccacaggagccctgctatgaaaggaataaaacctacacacaaggttggagctttgcaattctttttggaaaagagctgggatcccacagccctagtatgaaagctgggggtggggaggggcctttgctgcccttggtttctgggggctggttggcatttgctggcctggcagggggtgaaggcaggagttgggggcaggtcaggaccaggacccagggagaggctgtgtccctgctggggtctcaggtccagctttactgtggctgtctggatccttcccaaggtacagctgtatataaacgtgtcccgagcttagattctgtatgcggtgacggcggggtgtggtggcctgtgaggggcccctggcccaggaggaggattgtgctgatgtagtgaccaagtgcaatatgggcgggcagtcgctgcagggagcaccacggccagaagtaacttattttgtactagtgtccgcataagaaaaagaatcggcagtattttctgtttttatgttttatttggcttgttttattttggattagtgaactaagttattgttaattatgtacaacatttatatattgtctgtaaaaaatgtatgctatcctcttattcctttaaagtgantactgttaagaataataaaatactttttgtga

SEQ ID NO: 727612 - DNA, 282 bp, Homo sapiens
aggctttgtgggttcagtgagattctcaggcctaagcttcaatagtagaaacggggtttcaccatgttggacagccgggtcttgacttcttgacttaaggtatccacataccttggcttcacaaagttctggattctcaggcgtaatccaccacacacagctgattaagtgtttaaatacaccttttatatgtctaactcgaggtaaaagtctagttatatgaaactctccctctttctcactctcctctcgtgccatattcgtacagcccggggtatccac

SEQ ID NO: 727613 - DNA, 543 bp, Homo sapiens
  misc_feature (17)..(17): n is a, c, g, or t
caacgatggtcctcagnctggtctgacgccagtacatggcatttggaggtattcaaactgcacacaaaggttaaacagggaaagaggttggacaaaaacactcagtatttatacaaatgctctgttcaaagacattacccataaagttatgcatctacacagtccaatgtcaggagaccatgatagtgaatagtgcaagcctctttcaagactttcttctacatccaagaaaaaagctgaaggacatacttaaaatactttttgagacggagtctcgctctgtcacccagactggagtgcagtggcacaatcatggctcactgcaacctctgcctcccaggttcaagtgattctccagcctcagcctcccaagtaggtggaactacgggcacatgccaccacgtgtggctaagtttcgtattggtagagctgaggaccatcgttgggtcctcagctctgtgagcgtcgtctcagcagatccaacctcagcagactgtgtggggaccactgtggtgctctgctcaatctgctgagaccagtaca

SEQ ID NO: 727614 - DNA, 654 bp, Homo sapiens
actgtattcatttgctaaattttaaaaggattttgaaaaaaataaagaggatttgtgtctagatcaaaaaaaaaaaaaaaaaaaaaaaaaaaaaaaaaaaaaaaaaaaaaaaaaaaaaaaaaaaaaaaaaaaaaaaaaaaaaaaaaaaaaaaaaaaaaaaaaaaaaaaaaagaaaaagaataaaaaaaagaaaaaagaaagataaaggaagaggaagagggaagttggtggtagtgagagtggtgtgtgtattgttttgtgtggtgaggactgtatgtggtagtagtgaaaagtgtcgttgtgagtgagtgtgtaatgatgtttcagtgatagtagtttgtgtcgaaaattctttttagtttaagagaggcaggaggaggcggagaccgaccaccaagcaaaagcaagacgccaccgaaggaagcaagaggaaagagaggcaggcaacaggagagagcaagtgcggaagacgacaagagaggcaaatcaagagggaaccgacatcgacacaaacacaagcgaaaaagagaaagacagaccagacaagctcattaggacgtcgagaggagatacgagcaaaagccaaagacagcaatacgaaaccaactacatagaaagaacaaacaccagaccgcacaagagacacgcgagcgg

SEQ ID NO: 727615 - DNA, 83 bp, Homo sapiens
acatccgtgcctaggtgcccaagtgtggtccggtcaatgtccgacgttaactggtttccatgaatccgtcaacagtcaacgat

SEQ ID NO: 727616 - DNA, 373 bp, Homo sapiens
gacttgagatcacttgtcactttttattgtattttatcttttgtagataaatgtagaaatacacggttctggggagctctgttcccttccatctgaaagggtacaaggagtgttgtagcttctgaaggggcagaaaacaatttctaaaaatgcttttattcctgggctaatcctgtccctccctaagacgcagcgaggtgtctgtcccagggctggagatgcttcccaaggaggagtctgttttgttgagagtggacgagggcttcttcacataagcctggggaaggaagaaaaaacggctttcattaccaaataatgtaaaacctcaaaagcaagggcttcaacagccttaaccaaatattattcgggtacc

SEQ ID NO: 727617 - DNA, 322 bp, Homo sapiens
ttgagaagttccatagcaaggcatgcactatcacaactgtgtaaataccggtgttccaggtacataccaataccaaattttgtcgtaataaagattgaactttgtacgcagtctgtgtacctccttccctaagcaagttcacgcaagctccccatgttagtccagttgctttatagtgttcggtaggtctatgggtttccttctcattaaaacttattcctggccgggcagcagtgggtcacacctgtaatcccagcagttggggaggctgaggcaggaggatcgcttgagtgcaggagttcgagagcagtctgggcaagat

SEQ ID NO: 727618 - DNA, 436 bp, Homo sapiens
tatcccccacaggggttcgagatgcttaattactcctgctaacttcagtctccctgttctgctgtcgtcactgcacaacatgattttgatcatagcaatcatagattaactgcatacaggagccgtcactatcgctgctttgtaaacaagtgctgtatcgtcaggcagtatgtttggaaaaagtcatccccatcctccattcttgattaaccagggacacagtgcactgcagaaagccgcaggacctctgcccaggaaagcctgggattgtccaaggtttccccccactgagacagccggagatatggcctcgtgcgaaaggaaagatctaccatcccccagcccgacaccagtaaggggtctgtgctgaggaggagtagtgaaggagggaggcctctttgcagttgagataagaggaaggcatctgtctcctgct

SEQ ID NO: 727619 - DNA, 416 bp, Homo sapiens
ggtctgtgtgcggaacttagaaaggaggattgagagtgagatcaggctgagaagaagttgccaagatgctcgaaaggcaggaggagcttatctatgaaaaagcaagccatcacaaggatataggccgtgtcagaactgaattcgaatgggaggatggcagaaaagctggaacttctatgtacctgcagaacccaaattggcgtttgtcatcagaatcagaggtatcactggagtgagcccaaaggttcgaaaggtgttgcagcttcttcgccttcgtcaaatcttcaatggaacctttgtgaagctcaacaaggcttcgattaacatgctgaggattgtagagccatatatagcatgggggtacccccatctgaagtcagtaaatgaactaatctacaagcgtggttatggccaaa

SEQ ID NO: 727620 - DNA, 290 bp, Homo sapiens
gaaagaacagttctctgcgcgtaaataaagttcaacataactgtgccattcttccaagtagtgtacggtacatattgagcagacggagatgtacttccctcacacagtgcattgaaactcctattgaaccaaacaacgaagaaatcagaaactcactgatatcttgattgctacaaccatttgctctctgaacaatcttatcctcttcagacacaattaaagccaaatcactaagttaagccgagcactgggaatcaaaaatgttactaaacctcaggaaatgtccgctg

SEQ ID NO: 727621 - DNA, 521 bp, Homo sapiens
ggcgggcgcggtggtcacgcctgtaatcccagctctcagggaggctaagaggcgggaggatagcttgagcccaggagttcgagacctgcctgggcaatatagcgagaccccgttctccagaaaaggaacacacaaaaacaccaaacaaaaaaacacccaagggcccaaaaaaaaacacaaaaaaaaaaaaaaaaattttggggggccccgcggccacaaaaaaaatttttaaaacacactctgcttgggcgggcgcgacgggaccccgaagagtgtatgagcagacaaggtgtggcacgaacggggctggccacagagaagaaaccccttgtgccaaagaagacaagtgggcgtgtggtgttctcccacccagaaaaaaagaagcgggcggggggggaacaacagcgggtgttgtcgagaacaccccagcagaggggaggcaggagacgacaagagggggactacaaacaaagggggcccccacgcagggccagagaaaaaactccccgcgcggcggtggg

SEQ ID NO: 727622 - DNA, 132 bp, Homo sapiens
acgacctggatgacccatgacattgtatataggtaatagcttatctagtcaggttaggtctaggaggagtaggggcaggtttgggctcgtaaggaaggcctagatcggggattgtgcggtgtgtgactgcta

SEQ ID NO: 727623 - DNA, 1078 bp, Homo sapiens
  misc_feature (364)..(364): n is a, c, g, or t
  misc_feature (373)..(373): n is a, c, g, or t
  misc_feature (457)..(457): n is a, c, g, or t
ctcaacgctttatacttctgtagttgctttaatgcccagctcaaacgtcatctttttgtgaacttttccccaaccttctgaaatagttaagtcttctgcatttccatgccaccatgacacccttctatcggaacatttatcatattacattctaattatttgcatttaagagtacacttctatcttgagtttaaggttacaggagagctcactttattacactttgaattctaaataccttaacagttttatggtacaaaaaaagcaccaatgacttcatttagacaaatgaaatgtttcgtgtatatctaaggaaataagttcatagcaagcagaatctattctttattcttctgtaagtatngcctctatnacacctatagcactgtaccatgattccagtctggaagaggatctgaggatgtagattagattatacctggtctgactggatcantggaatatttggggcgctaaagcataaatcatgggtaatgaattagtttctttaaatagctttagcgagcttggaaaattagaaagtgcagccaaaagagtaagtatttgctgagtgtcaagtcagtgatgcaaaaataatttattacagaagctcagagcagggcacagttacagaacaccatcatgctgtggaaggttaagaatggagtgagggtccgggtatgggactgaaggaccggcacttaatgctgttgctgggaacgtggaaggtaggtagagcttaaacaaatgaaggacagcaggaaaagcacttgtggcaaagagaacgcaaaagcttggtctgagaaaagacaagcaatgttcagaagatatgaatttaagtttctgtaaaatgctataccgtcaaagatagataaaggagagaaaatgtgtgtctgtatgcattggggtggtccaggcctgatgtgaatggcaactaacagctgtacctaatgtgtgccagcatagtcagaagtttttaatttagctctcacaaagactaagtctaaagtagctcctgacagaacagattttaggtaatctgccccaagtcacatggcaaatgttttgtgaggtctgt

SEQ ID NO: 727624 - DNA, 158 bp, Homo sapiens
  misc_feature (63)..(63): n is a, c, g, or t
  misc_feature (68)..(68): n is a, c, g, or t
  misc_feature (76)..(76): n is a, c, g, or t
  misc_feature (98)..(98): n is a, c, g, or t
  misc_feature (103)..(103): n is a, c, g, or t
  misc_feature (144)..(144): n is a, c, g, or t
atcgatatgcatggagtgaagaaccaatcaaaagcagatgcagatccaactatatcaatcgtnacatnagatgtgnatggagtcaacaacccaatcanaagcngacacagacccaactatatcaatcgtactattagatgtgantggagtgaacaacc

SEQ ID NO: 727625 - DNA, 225 bp, Homo sapiens
acgcatcatacacaaatagctacagccagcctattatcttcgatggacggcgtgtcctggatgaactccagaatgaactacacaccattggcttccagatagaaacaattggcaaaaaggtgtcttcaaagagaataccatatgctccttctggtgaaattccgaagttatagtcttcaagatccaactaacaagaaacctaaagtgtatagattgctcagcgct

SEQ ID NO: 727626 - DNA, 1173 bp, Homo sapiens
tggacaatgggaatttagttttaatttcataatcataaacttaactctgcaactccagcataggcatgtgggagggaacagggaaaacatgtggaacccaaggggaacgtgcagcgagagcacaaagattcataggaatacgtgcgagcaaagtgggggtggagggggtgctcttccgtgagctacagaaaggaagtgatcgtgggtggtttaagataaaacacaagttcaaacttatctcgagttgtgtccacagttcagcaatggggtgactctctctgggcgtggctcgtggcccattctccgtggcacccaagaggcgcctccagtggccttccaacaaatactctcagtgccttctctttctacatttgtggccaaacaccacatgtgctgtgcacatccaaaccacttcgagtcgtggcgcagtgtgcacgatgtgaacaaaccgtgcggaaccatttgggtgttggggtctccgagcatttgtgccatgtggcacaaaaagtgccaggaacccgatagtgcttaaggagtgaaggttcctcatctttccaaattttctccccaatagaatgtggactgtggccaccagtggcccatcaagtgggcggggtgaagctcaccaccgctgacacaataaacccgggaaataactcgggtgaacagccgggaacccttataaccaaaatcctggaagacatcacccaagagggcgtatggggacgacattcctaccaagagagcctccacatattgactgggggaacaccccctgggaacatcagagcacttatctgggccaatgggccagagggacaccacgggcaccaggcagaaaaacacaacggagggcccctatggagccctctggggggacaccacgaaggagagcgcagcgacaccaatgaaagcacaaaggcccgcggggggtgtcaccaccaggagggccagccgtgctgtgatgtgatccagccagacgagtacaaacaacccgggggggggagggaagccaccgaaaaggctgccacacgagactggacaagagttcgtggagcaaaaagaggcaagaactgaccaaattttcccccacagaggcaacacctggaacacaagacaactaactaacgtgtctcagctaacacatcaggccacagcgtacgcggatcacat

SEQ ID NO: 727627 - DNA, 468 bp, Homo sapiens
gtgtttcaataggagagaagagactgtgggtggggttttttttattttattattattttttttgagatggagtttcgctcctgttgcccaagctggcatgaaatggcacgattttggctcaccgcaacctccacctcccggggtcaagcgactcccctgcctcagcctcctgagtagctaggaccacaggcatgcaccaccatgcccagataattttttttttttttggtattttaagtagagacggggcttctccatgtgggtcaggcgggtctcaaactcctgacctcgggcgatccacaggcctgggcctcccaaagtgcgggaataataggggtgagccaccgcaccaggggggtagagtctaaatcccttaggagataagtgggcggggaagcaatgaataacaccggtattacacagatgtccaacgggcagtttagggataggttaagtaagaaaggtggc

SEQ ID NO: 727628 - DNA, 153 bp, Homo sapiens
agtccaggtctcattctaggagcctacaggactgttctggtagggtccaagggtagcacactataatctgcatccaagacgtaccgcgccatgagtagggcagtccattaggacacccaagaccagcaggctgacatccatcagatagaagtc

SEQ ID NO: 727629 - DNA, 162 bp, Homo sapiens
ttctatttcgagagtttaaaatcgtcttttttagtttattgattccacaatttccttcccaaaggaaatcaggcagctgagaagatatgacatgtggttgatacacataatcaacctcactgacaacattctaaagctccttacaattttttttattttttt

SEQ ID NO: 727630 - DNA, 642 bp, Homo sapiens
gatccttgctgaggctggggcaaccagcggagtgtcgagacagcgaggcgcgatcaagtggacagtcgcgggatgtgcagagcgtgcggcgctggatggagctggtgataacttcagggatgagtctgcgtgcgaggcctcgaagcagcagaaggccagcgccgagctgatcgaggaggaggtggcgaaacttcctgtaaactgaaggcacgagcatgggtccgtgagtgaatggcagaacagagagatttgtgcgtcaagagccccaagggcacaggagacttatagtccccggatggtatggcaggtcgtcgagagggtgtttgacgtatgtcatccgttgcttcatgcgccagcgggtgcatgaagctcgattgattacacctgtatttgagactagaaggaaacgactgtatgggaagagtatggggggaagagtcctcagcttatctattagctgaaggaacaaggaggagagctgcctgtcccttcgctatgacctcagctgtctccttgttgcgtcggatattttgtcccatgaaatatgactgacctaacaattaacacgactgacgatatagtcaacaggtactaggtcggtgggatgaagccagcgcatgagccgggacgaataccgggaat

SEQ ID NO: 727631 - DNA, 390 bp, Homo sapiens
  misc_feature (22)..(22): n is a, c, g, or t
  misc_feature (387)..(387): n is a, c, g, or t
tgcttttgcttttctcctaatnccttgccctgactgggatgtactgtggcgggctctttactcgacgagggctttaaggtttatcttgggccttgcgagctctccgctgacttcccttacgctaaccaacctcggcccgccgcaaacgggaaggtaagccgccggaaggcggaaagcttgctcaaggggaaacggaatggaccaagcagaggctagatcatgaacctcgctaccaacgagcttggggcctaatagatgataactcgggccctgaactattattatacgctttgctttgtttggatgcttttaatgaccctagcacgcttaagcctctctctggcggcgatcacttgatctagcgaggctttccccaacaaaagaagnctt

SEQ ID NO: 727632 - DNA, 1173 bp, Homo sapiens
  misc_feature (304)..(304): n is a, c, g, or t
agcaagactccgtttttaaaaaaaaaaaaaaaacacaaaaaatctgagtcggcttattcttatttccactcccttaatggctaacaaatggcttttatcattccctcactttcattggcccagccttaggccaagcttctgtaaaggtttcttttacatctcaaagctctgaaaatacctggtttccacctggctttcggcattaagatatccgtgaggtaactagtatcttcactctagacttgtctatatttcatttagatttctacttgtttagagaccggggagttctcgcctttgttcngccacaggctgggcagttgcagtgggcgacaaaatctcttcgggttcacccgggaaaggctctccagccactcctgttggggttgacgcgccatttcttcactgtgccttcaggctcttctccaaggttacgctggggaacataccgggtgcaacccagctcaaacacaattggcctgtggctgtaaatttttctggggacatctcttgtcaacgttaagaaaaaccgccaatatcttcaataactctcaaagaattcctacaataaattttaacccccaggcggcatttgtgtttgtgcaccctggccgacgctttatttagggcccacaaagggccatacccgttgtgggactagcaccatcttgagaacggggccacgagcacaagaaacatttccgggtttgttgaaacaccccctggaggtggatcgcgccaccacaaaggggttttacggccggagtttggacacgctcgtgagcacactcattcttgggcccccatctggggcgcaacccttaaaaccagcgtcctctggggggtgccagaacccaaatcgtgggcgtttcggaagagaacttccccggggttgctttccaaaaggacataaacacacattcaacaagacatgttcttctccacaagaggtgtgagagggcccaaaaaagtttttttataccccccctcatcaaaagggggggcgttactatggtactgtgcacacaattatatcgacccccgggtttgtagcacataatatacgagtggatccactccgattgtagatgtcggcacagtagaaagaatgcggtttcatttagacgtaaacccggagttgtgatacatccacacaatgtcgggtgcgcagac

SEQ ID NO: 727633 - DNA, 412 bp, Homo sapiens
caagctaagtcgagaccgaggctgagagacagctttgttagaattggagctgttctccaactaccccctcctttctctgcctctccaaaaggggcagagctaggcttggggtatggtcaaatgtctctttccaggaattttcatcctgtcatctatgcccagagtgttgaattagggtactggagtgttagaccttggtgacattttctgacttgggctgttttcttagagtagccgcctgcccaggctgtggagttgaccattctggtgggcgtgtcagctgtggctgcaactcctttggaaaatgcctgctcctgtttagaaggctgtgcctgtgttcattaaagagtcactggtgtcctgttgtgttggacacagtcaaggcacaaaatcaaatcctatccagtatctg

SEQ ID NO: 727634 - DNA, 467 bp, Homo sapiens
  misc_feature (9)..(9): n is a, c, g, or t
  misc_feature (11)..(11): n is a, c, g, or t
  misc_feature (17)..(17): n is a, c, g, or t
  misc_feature (52)..(52): n is a, c, g, or t
  misc_feature (56)..(56): n is a, c, g, or t
  misc_feature (62)..(62): n is a, c, g, or t
  misc_feature (88)..(88): n is a, c, g, or t
  misc_feature (141)..(141): n is a, c, g, or t
  misc_feature (174)..(174): n is a, c, g, or t
  misc_feature (224)..(224): n is a, c, g, or t
  misc_feature (234)..(235): n is a, c, g, or t
  misc_feature (237)..(238): n is a, c, g, or t
  misc_feature (302)..(302): n is a, c, g, or t
  misc_feature (317)..(317): n is a, c, g, or t
  misc_feature (349)..(349): n is a, c, g, or t
  misc_feature (366)..(366): n is a, c, g, or t
  misc_feature (380)..(380): n is a, c, g, or t
  misc_feature (385)..(385): n is a, c, g, or t
  misc_feature (433)..(433): n is a, c, g, or t
taaggtgtntntttttntttaattggttttaagttagtttaaaggtaagctntggntgcttncacccattcccagggagaccaaaagnttttatatattttaagttgggggataaaaagggggaaggggggggacgaaggnttattatttaaaataaaaaaaaataaaaaagtnttaaggggaagattaaaaaaattttggattatataatttaaacgaaaggnatgttattanntnncctgtgtggatttgggagaggattgggccattttttttagagagaagtggggtgggttttaggntgggaagggattttntgttaaaacgcattttatatttggaatgattnttaaaaaaacaacaatntgcaattaaagttnttggncacattgtgaactttgggggatgctcgctccaaccgattgctgttacntttaccgtttcagtttttaaattttgagttaagc

SEQ ID NO: 727635 - DNA, 270 bp, Homo sapiens
cgaacgggagcgccagtccaccaaccacttggacctctagcaaaacatatgacaaccatgtgggcacttcgaaggcagcagcccagagccagaacctgagtcctctacaatggctttagacgtaactcgtcagactacaggactgggtccttcagcagtttttgcggagccgcggaggcagtgccacacggacccccaacatgactgccagttccaaatccaaatcccagcacctcgcttcgcagacccagcaggaagggcaggccccac

SEQ ID NO: 727636 - DNA, 1353 bp, Homo sapiens
tgcagtgcctgctgctgaggagtgccacctgaagctcgtgtggacgcgagtgagcctggctgtggccctggaaaggactgcccctgatcctggactgctggtgcagcgcatccaccatgctgcagtgctgatgctgctgctgcagggcttccgccgactggagtgagtggtttggcgcctggtgcatgggccttgagagcctgtgtgtggctgcgtgcctcaggggtccccacgatgcctgcagatggccacacgacatgtaccatgctgcaggctggcccttgactcacgacttctgcgctgctacctggcagcacagttgcactggtggtgacgccaggggccctttcgcctggcctgcccatcgccgcgttgagggttgcttggccgtgttggacatgccagggagcttgcgtgctgtggcccttcgcacaggtgccgagcccggctttgcttctgacccgggacaaactgttggcggccaggcgctgcagcgaggcttgtgacggcacgcaacatcctgggcgttggtgacaacgggttggggccccttgcctgtccagttctgaatggtgaggaaacggcccaggaaggcttgggacgtggtgcccagggcagcgaaccgacttggctccggcacttgccagccaagcctgacgacctattgcacggtgtctaatttacacaccccatttgtggcagggcgcgaatacaaggctgaaggggttaccgtcggaaggtgaacgccttaagcggatctgtgatatgcgggcacattcttggccctgacgtttcgcaatgagccggctcccccccacgtgtcaatgcctggcacggagcgtcacccactggggcaccaccgtgtggccgtgcaatgccagcccaaggcacagaccctaagcgcgcggcgcgggtcgggcatggcggaccgaggcccccaatgctgggtgagtgaccgtctcctgcagacaccgagaaaacgacccaagacgcaacggctgaccgcctcgggggagacacacgcaccacccacgcgcaggcacacacgaacgacggacgcaacacaagcacagggggaaagtgacagccagaggagggacgaacagcacggcacgaccctgagagagaggggcgaccagacgcgcgcgaagacgacggccgcgcatcacaccccaggaggccacggggccgccgggctgaggcgaaccactagcggggcagaccgagcccccaaaggggccggtgggcagcacacgacagcaacgccgaccggcgccgcggccaacaccgagccagacgcacacagcggcgtcagagcggagaggggacgagacagggcgcgcgcggagacgg

SEQ ID NO: 727637 - DNA, 279 bp, Homo sapiens
tgtgtcgagtaagcactaaacgttctactaactcactctcactggccaagaactatcaaaatcctgagccaacaaacttaatatgactagtttacgataatacgcttttatagtccagatatctcttcatggactccatttataactccctaaagcccatgtcgaagcccccgtcgctgggtccataatacttgccggcattactctttaatactcacgtcgagactaggttataatacgcctcacactcattctcaaccccctgtataaaacacatag

SEQ ID NO: 727638 - DNA, 403 bp, Homo sapiens
atagctctttcactgtagaaaacattatcattatatactatgtaacagcgtgcaaataatacaaaataataatataaactataggctattagattactagtcctttgaaaaatatttctggaaggccgggcacggtcgtcacgcctgtaatcccagcactttgggaggccgaggtgggtggatcacaaggtcaggagatcgagaccatcctggctaacacggtgaaactccatctctactaaaaatacaaaaaattagctgggcgcagtggtgggcgcttgtagtcccagctacttggggggctgagacaggagaatggtgtgaacccgggaggcagagcttgcagtgagccaagatcacgccactgcactccagcctgggcgacagagcaaaactctgtccc

SEQ ID NO: 727639 - DNA, 694 bp, Homo sapiens
  misc_feature (168)..(168): n is a, c, g, or t
aataataaatgaataaataaataacctttaaagttgcataagggaaaataagccaagtgcccctgccagagattattatcaacagtcatttgctccgactggcagtcctttaaaaaaaaatacgaagaactgagatatgaaagactttaataccaaagtagtctgaanaagattcgagcttgaggctccataaggaaacacgtcatggagcaagagatttgtctatggtagagcctgatagaaatgttgtacgtggtggtaggagtctgtggacatggtgtatttgcaggtgatatgggtgaatgagaaatgaccctgtaatgacgaaggacaggaagcaggttggcatagccagtatcgatgcgacatgctagtacttaacaaatgctacttgtctgtgctatagtagcaaattgatgcagtgatgtgaaaatatgtctggagactttggctggagtggagaagggcagcttgggaagtagatgctctcttaaatcttgcacaaacatgtagatctgggcactaattgctttctccaggtctgtgcactttaactgttgacatttcctaagtgttcttatttaatataagagtaccatattcttcaatagacaagatatattacaagtctcaaatctgtataatagctatgaaaaggaggacaggtaaaagaagggaatgaggatgaatatac

SEQ ID NO: 727640 - DNA, 1101 bp, Homo sapiens
gactaccgactgcagcactgttattactgggatcaaaatgcagtgaggcctgggttaccccaagctcatccccatgcactgtctgcgtggctatcagaggcgcccacatcgattgctcgtgctacacccggctatccaacctgctcaaggtcgacagacgctaaccctctgtcaacgtgtatgctcatgtacatggtgcgcttttatgatcgtgagtggtcctgttaccctgagtatagacctcgaataaaatctctgtacagggcatgtactactaagcaatcccggatcaacagtctttcatgccacgccattgaggaacatcacgcgtgcccgatacgtcttactcgtgagcacgtagcacaacgaggctcctaccttcatccgatggcggtaatactagttacctggtgatatcctcgagattgcccagtgcgcaggaccccatgtcgagcagtcgacctgtaaatacggctggcgacgcgctaatcagctgtgtttttgtacacacttttgcctactgtctgcggacaggggaaaaacctgacgatggcatatgtcttcggagccgttcatccttactgaggagcaagacatcgtcgtgctggtttccagatgaacgtgccaagtcccagtataaagcccggcgaccgtggcacagcgtgggtgaccagtgcctaacggtaggactcctcgcacatggggtttgggcccgttctctacatctcatggtcagtgttaccacccccgatccgctacttaggactaaggatagtcgaaaccgtttgaggagcaattcgagaaacggagaaaggcaagcgcagtccacgagcgagggccaaaatccctgtggaccgcacaacgagaatgtcctcaacggagaccatacctgggccagtgatgccttgtcccttgttacctcccagatgtgtataacctcactttttgatgccctcaattctgattgcttacgtgttggagtgtgtttgatgctgcccacctgttaaccccatccagaggtcccactatgttctcctggacgacagtactaaccgggtcaatcttccgcacatggggagtggaccctgtggacaatccata

SEQ ID NO: 727641 - DNA, 198 bp, Homo sapiens
tgcggtgcactctcgcggctccccgcggggcacccatccacttcagtcagtgcattgttccacgtgcattgttccaagtgcattgttccacgtgcatggttccaagtgcattgttccaagttgcatggttccggcgcgtgggtcccgcagctcgcatttcgtcaatctatggtctatcagctgtttcccagtgcttgt

SEQ ID NO: 727642 - DNA, 241 bp, Homo sapiens
aagcagttaatacagactcatttccatccagaaagacctgatcatcatgtggctcaagtttgaattttttcttagttcccttcttttaaggagtcctggagttcctccttttgggatttttccttttcaccatctttttttttctctttttcttttttggtcttctcatcctttatattttctttctggctctttttatcttcttcttttccactgagtctgtattaactgcttggggtca

SEQ ID NO: 727643 - DNA, 277 bp, Homo sapiens
ggctgtccacagggagctccagcccttctcacactcgacccgcagaaaccacccaccttcaccatgtctgacgaggaagttgaacaggtggaggagcagtacgaagaagaagaggaagcccaggaggaagctgcagaagtccatgaggaagttcatgaaccagaggaagttcaagaagaggagaaaccgagacccaaactcactgctcctaagatcccagaaggggagaaagtggacttcgatgacatccataagaagcgttagaacaaagacctaa

SEQ ID NO: 727644 - DNA, 146 bp, Homo sapiens
cctccatcattcccacccgttgttgctgcctcatcgtggtgccgctcaggttcaggggctctccgccatctctagacctctgccctcgctgctcttggacattgcagcccccaagatgctctctcccttctccaatgcaaggagcc

SEQ ID NO: 727645 - DNA, 804 bp, Homo sapiens
  misc_feature (435)..(435): n is a, c, g, or t
  misc_feature (477)..(477): n is a, c, g, or t
  misc_feature (515)..(515): n is a, c, g, or t
  misc_feature (535)..(535): n is a, c, g, or t
  misc_feature (610)..(610): n is a, c, g, or t
  misc_feature (612)..(612): n is a, c, g, or t
  misc_feature (643)..(643): n is a, c, g, or t
  misc_feature (649)..(649): n is a, c, g, or t
  misc_feature (666)..(666): n is a, c, g, or t
  misc_feature (682)..(682): n is a, c, g, or t
  misc_feature (685)..(685): n is a, c, g, or t
  misc_feature (689)..(689): n is a, c, g, or t
  misc_feature (692)..(692): n is a, c, g, or t
  misc_feature (717)..(717): n is a, c, g, or t
  misc_feature (731)..(731): n is a, c, g, or t
  misc_feature (768)..(768): n is a, c, g, or t
  misc_feature (770)..(770): n is a, c, g, or t
  misc_feature (779)..(779): n is a, c, g, or t
  misc_feature (786)..(786): n is a, c, g, or t
ggctgtccacagggagctccagcccttctcacactcgacccgcagaaaccacccaccttcaccatgtctgacgaggaagttgaacaggtggaggagcagtacgaagaagaagaggaagcccaggaggaaagctgcaggaaccccaaaaaaaaaaaaaaaaaaaaaaaaaaaaaaaaagaaaaaaaaaaaaaaaaaaaataaaaaaacaaaaaaacaaaacaacaaaaacaaaaagaggtggggggcggcggcggcgcgcgcgcggcgaagaagaagatgaattctcttacaccacacacaacgagcgggggggggggcgcgggcgcgcgcgcacataagatgagtgagaagagagatggatctggtggactatgttcttacggtctagtctcactcagacacaggagaaggtgcactagccctggatgacgatgnaagaacgaggtggtcgggtgcggtcgtacttcaccaccaacnacataaagatagagacagagcagacgccgcggcgcggnagaaggcgaatagctggatntgcgctatagtttcacatagctaaacaccactaccaacacaactaaggtgactgtatgtcggggcgtctggtagncntcgaaaacaaggccggcagtatcaggaggtngagcgnagtctgatctaacacanacataagcaagcgaancgncggnagnacgccaagcccgaggccagagcagnggcagcttagaccntatatataaattaatatttcaaaaatcccgcacgcgncnccgcgcctncgcgcgnccgctgccggcgggtgct

SEQ ID NO: 727646 - DNA, 284 bp, Homo sapiens
  misc_feature (124)..(124): n is a, c, g, or t
gtttgggggccgttttaaaggaagcccccaaaagtatttgggggaatcccttgagaacagatgtagtgttcccccccaacttatttaaagtcgacctgtggccgccttctttgaaacacaattnactcccttaacttccatgggccttgatggaattatgcctttttaaaagttcccgaaatagaataaattactattccctaatatgaatttccgctatagataggattattttttctttcaggggggaatgggcccagaatagctagaaacgaagccttcca

SEQ ID NO: 727647 - DNA, 314 bp, Homo sapiens
ggctgtccacagggagctccagcccttctcacactcgacccgcagaaaccacccaccttcaccatgtctgacgaggaagttgaacaggtggaggagcagtacgaagaagaagaggaagcccaggaggaagctgcagaagtccatgaggaagttcatgaaccagaggaagttcaagaagacaccgcagaggaggacgcgagaggaagttcaagaagaggagaaaccgagacccaaactcactgctcctaagatcccagaaggggagaaagtggacttcgatgacatccataagaagcgttagaacaaagacctaa

SEQ ID NO: 727648 - DNA, 547 bp, Homo sapiens
  misc_feature (430)..(430): n is a, c, g, or t
  misc_feature (500)..(500): n is a, c, g, or t
  misc_feature (511)..(511): n is a, c, g, or t
  misc_feature (535)..(535): n is a, c, g, or t
aaacaagacaaataaaattctcgttcagtactaagattcccagaaaagttttagttttataatgggagaatatgaatataaactttttactcttttgtgcaaaacaaagcaaatataatcaaaattataaaattaacagttcagcacagaaatgctgctatgtcacagtctgaccgtgtccaatctaccacaaattttcagtgtttatgttagaatcatgagttcttccttgacaagccgcctttcctgtcaccttgaatgaacattaaaagtccagggtgtttttccattttaagtgatcaaagagcaaactaacacaattccggggctaaggaccaatcattgtccaaaagccaaacctatctagaaagggtcaccatagagctgaagacaggttcctccgccatgggaatccgctgcacagatccanactcgtctttgatctcatttccttgggaagacagtaagccttttcccctgaagcagcacagtgccttggngcttagttacncgagggtgatgccaccgtccattngtaattcctgtt

SEQ ID NO: 727649 - DNA, 244 bp, Homo sapiens
ggctgtccacagggagctccagcccttctcacactcgacccgcagaaaccacccaccttcaccatgtctgacgaggaagttgaacaggtggaggagcagtacgaagaagaagaggaagcccaggaggaagaggaagttcaagaagaggagaaaccgagacccaaactcactgctcctaagatcccagaaggggagaaagtggacttcgatgacatccataagaagcgttagaacaaagacctaa

SEQ ID NO: 727650 - DNA, 863 bp, Homo sapiens
aaagtctgacacggctgctgcatgctgtgcgccaaatgaatccacatatccgggtgacaagccaccagaaccgtgtgggtcctgacgactgtacgcggtctagtgcatgacgattttttccaaaaagctagcatggcgtggccacatgctccgtggacaaacgttgggagtgccccggcatgtaacaatggaccgcctgggtgtgtcttacttacacgggaaggccactgcttggagtccaggcacacatggggcaccgagaggggcaattgtgccagtgtggtgatccccttcctgaccaagagttcgtacagattccagccaggacccacctgagaagtccatccccatctgtaccctgaagaactttccctaatgccatcgatgcacaacctgcatgtggggctcggggagtgacgtttgaacggcctcttcaagcagccagcagaaaatgtcaaccagtacctcacagaccccaagtttgtggagcgaacactgcggctggcaggcactcagcccttggagggtgctggaggactgtgcatggcgcaagcctggtgctggcgggaccacagcaccttgtgctgagctgcgttgacctggggccctgacaccattggcgaccacccagtactcggaacaatatccggtgaggctgcttgcacaaagttcccttcctgtacccaggttcaccaagctcagggagcgccggtcgtggtcgtggggcccagaaggcttgtccaaacccgtctccacctttggctgtccagcaatcccctgcctctggcactatgtgtatggctgcgtgccaccctgtttttgtccagacctaggggctgcagtgggcctcagagccgggctgg

SEQ ID NO: 727651 - DNA, 135 bp, Homo sapiens
gatccccgtcatcatagcgaaagtctttattgaggtctgggttaaaattaagcacttggccagagcacgcagtcttatatctagtgcaagcagtcaggtgttagccattcctggggctgggttggggtcattagg

SEQ ID NO: 727652 - DNA, 306 bp, Homo sapiens
taaggaagggtccaccaggtggggagagccccaagtgagaacaataatgaacaattatcgtatgaacaactgttagagacagctaatcacaaacaacctgcgggcacaatgacctcattccacacgtagcacccttcagcaggaccctataaaactttcctccagcccttgcctctttgcaggtagccccttctctgctgagctgcccactgcaacatattttcacaatttctctaataaatctgcccttctttacctacaactatcttggtaaatggctttaccacctgcaaaactgaccctagg

SEQ ID NO: 727653 - DNA, 100 bp, Homo sapiens
ttagctctgatcccagtgattgatgctggatcccagtgttgtgctgtgtccctggattgtgcttgcctcacccaagacccccagtgctgtgcttgtgtgt

SEQ ID NO: 727654 - DNA, 479 bp, Homo sapiens
  misc_feature (302)..(302): n is a, c, g, or t
  misc_feature (365)..(365): n is a, c, g, or t
  misc_feature (450)..(450): n is a, c, g, or t
attcggaacgaggtgcataataatcacatcgcgcccggcctaatttttgtattttttgtagagatggggtttcaccatgttggccaggctggtctcgaactcctggcctcaggtgatccgcccgcctcggtctcccagggtgccgggattacaggcgtgacagctgacacccggcctcttttagctgtttttaaatgtacaataaattattgttgactgtagttaccctgttgtactatcaaatgctagatcttatccattctatccaagtatattgttatactcattaaccccactacccnccccactatccttctaaccttctcataccatgggttctaattctctagcttccatggagttgnttcaaattgttttttaatttttttaggcttccccaaaatggaggaacatggcaaagtatggtggttttttggtgcccggggtttntaaaaggggatttttaaggcaaggaccct

SEQ ID NO: 727655 - DNA, 141 bp, Homo sapiens
taaagagataaaaaaaattttttttaattttcaatagttggaatatacctatgtataggttttttttgggcatttctcaaggctgggggtcctcgtgaaacttccgggaatcggggaaatgggccacggtggccataaaat

SEQ ID NO: 727656 - DNA, 181 bp, Homo sapiens
tagaggatcccttaagcatcagaagctttctttaacaaatcacacgcaccaccgcatcaggtgggaggggtctggccatgctgatcaagtgtccaggcccctcccacctgatgcggtggtgcgtttaattttagagaaaacgtcctaaaaatatctcgggtaaggaatgctgccggaaacc

SEQ ID NO: 727657 - DNA, 111 bp, Homo sapiens
tcaaggatctcttgttgggaggggaatgagaggatgtactttaatgaggtgtgggatgatgggtagaggagcagttgagtccttcaccattactcggcgtccaaagcacag

SEQ ID NO: 727658 - DNA, 112 bp, Homo sapiens
attagaagttgtggctcagttgcactataaatgttgagacacgagatatgatgacatccatgccccacctactctggaacaagaaagatgactggggaggaaacacaggggt

SEQ ID NO: 727659 - DNA, 144 bp, Homo sapiens
catccccatccaggcgcaagcagtgtgggcagcaagtggcagtcagggtgtgggtgcagggtgcaaacatggggcatgggtggccagcatccttccacacaatgtttcaaatcactcatcttcgttcaatgccagtctggttgt

SEQ ID NO: 727660 - DNA, 149 bp, Homo sapiens
  misc_feature (21)..(21): n is a, c, g, or t
  misc_feature (41)..(41): n is a, c, g, or t
  misc_feature (61)..(61): n is a, c, g, or t
cgcgaccttggggtgagaaangtccagagcttgggacaaancaagggcatgtttcagactngggacatacctgctctaaagaattatgggctctagggagctcaaagatcaggacaataagaggagggtggatcaggaagggtacagga

SEQ ID NO: 727661 - DNA, 813 bp, Homo sapiens
agcgacgatgtagaggcggtaccggttttattcagtcacggggctggagctttagtttatgtaatggacgtcggcagcaatatgataatgtgtgctcagtaccaacccacagaagactatggtaggatcagccagctggacagactgtagcgcgtaagggatatatctaggtctagaggaaaaaaaacctgtccccatggtagcagagagaaatcagagatagtgagaggaataactaggggttgatctattataggaactacagatagcagtaggtagaagcatgtactagagggtcacgatcgtggagtaaactagggctagccttccaccaccactatgcaccctatataagtaatactaggggacagatagatacgtacaacgtgaagatctaggcgacatagaatagaatacaaaggcataggagaggtatagatcacctagcacgggagccatataacaacaatagtaatctatgtagccgatctataccacacctcgaccaacgagtatgatacctacagacaatatactagagagacaacagagtaatatacggagtactagaggatatagtactaaagcaggcactaggagagtatacagaactatcacacgcagaagaacccactgatacgtatctctaggcgatccataggcgtgctacacgcctaaaaccttaaagctactattgccagccaggcacatgaataggtaggtaatgatagtgtcaaagctaggaacagggaaacggccagcctatgctagtacatagggcaatcatgctacactcttgtccaggaccgctac

SEQ ID NO: 727662 - DNA, 337 bp, Homo sapiens
  misc_feature (21)..(21): n is a, c, g, or t
  misc_feature (122)..(122): n is a, c, g, or t
  misc_feature (191)..(192): n is a, c, g, or t
caaaaatagccacttttttcntctctctctttttttgagattgggtcttgctctgttgcccaggctggagtgcagtggtaggatcatggctcactgcaaccttgacctcccaagctcaagtnatccctcgcacttcagcctcctgagtagctgggaccacaggcatgtgccaccatgcccagataattttnnagttttttgtacagacagggtcttgatatattgcccaggctggtctcaaacttctggtctcaagtgatcctcccaattcagcctcccaaaagtgttgggattacaggtgtgagccactgatcccggtggctagttttccttttga

SEQ ID NO: 727663 - DNA, 198 bp, Homo sapiens
gcagtgcacgcttgatgctgcaggtactctagatggaccccggcaggcacgtgaaagccaatcgattttgtacatgtttgaagattctgctgtgcttcctcagcccgatgagagggtgccgaggagagtagcctgtttcggggagcgcggggcacggggactgggtcatgagaagccccagggggacgtggaaccgag

SEQ ID NO: 727664 - DNA, 327 bp, Homo sapiens
ttgaagcatgcgccagtaaaaagactggtggtctggaaaagaatggagatactatccattgcaacgactgcctcactatcaacgccagtgtaccatgtgctcttccgacccatgctcctacagctgatcgtccttagccagtccagtctctacgaagaactggcatatgtacttgctgtaggtcaccctgtagctgaattacttctccatattccggctgctcaattacagtaccattgcaggcaaactttatcttaaacgccttcactagtttctgttgatcgtaatcatcagcgatcccttgtcatagctgctgtaattggggta

SEQ ID NO: 727665 - DNA, 1024 bp, Homo sapiens
  misc_feature (422)..(422): n is a, c, g, or t
  misc_feature (802)..(802): n is a, c, g, or t
taaaattgtttaacactgacttctttaaatgttactcttttcaaattatttcaacaagcaaagtaagtgtcagcagttttaactaataattggccaaagggttattcaggaattattcacctttcctcccttgcttacaacaaaaacaaatacaaaatattaaagtttataggtaaagtattattatttatcaaaggggatttttttttaagaacaagagatgttctccgcttcttgtgtgcaaccaagggtgtgggagtgtggcagtggggggcaatctctccaagctccatctgggaactctcccatcctcccggatgttccaaaggcagattctcctctggcctacaagccttccgtgagttatccgtgggatttagcgggctctcccccacacccatgtgccgtgttaattccccagnctataattttgtgtggatatttttaccataaaagaccaagggtttttcgccgtgggtgtgaacaaaaggcggagaaccacctattctccaagaggagtagagtgggtcttatccaaactctaacaattggtgccgagagaagcccttgggggaatatttcactatttctctcaaaaagaagcaccctagtgtgtggggacctctcttatggcgcccttatatacaaacgagaaaacaagacactggggggctacttttctccccaagatgtgaggggccccatgtgtgtgcaggcgcgggtgaattataccctttggggaaaaccccccatttcggggcctttgaaaagcttgtgggcgaggcgaaaaagaattccccanttgtgggtaagcctccccagagagaaagattttcttactgcatctaaaaatttatacgggtgattttaggccccaaatcttccccgtgtgtccaaggggagacactctaaagcgagacacactgggggttgagggggcttcccccggaacaagttgtgtttccattcttcctcggcgcaaaaacttggtgggccaggaaatacccttctgggtttcccctcg

SEQ ID NO: 727666 - DNA, 715 bp, Homo sapiens
  misc_feature (343)..(343): n is a, c, g, or t
aggaagatggcgggctctggggcggacgccgtaggtcctggtacaatacttggtgttacgaaaggatctatcacaagctccgtgtctcctgtgccggcgggcgcactggtagcgcaggcttgtgatcgcggcgcaccgcggtgcttgtcgagcactcgaccgggagcacccgtagactagccgtttacctccaagtaggctggggctgctatgcagctaaagtgtgtcctcgtagggcacagatgagaccaaccgctaagaggaagctggtcgagaccctgctacagaatgaacattgagcacattgtgtgtggggctttggagtcaaactcacgatgacacnattcgaccagcattggtgagtatggcgtgctggcggaccgcgtatcgccgcgaacaggagagaaggtgggtgccagatattttgataagaacgtttccgagtttgctatcagaggtaaacctgggtggcattatggactgttgatattgtaacttactgcagagcgccatccctaattacgccacaaaagacgagtcactgggtggttcccttttggctacgttggtccatgcatttgtgctcccccggtcgtgtcctcgaggtgtggtgcagcaagtcttccttgaggggctataaaagcaagcaggttcccgagtattaagaggttgtccattaaattaagacatacaacaacaacacacacagaacaag

SEQ ID NO: 727667 - DNA, 811 bp, Homo sapiens
  misc_feature (707)..(707): n is a, c, g, or t
  misc_feature (712)..(712): n is a, c, g, or t
  misc_feature (774)..(774): n is a, c, g, or t
  misc_feature (778)..(778): n is a, c, g, or t
  misc_feature (781)..(781): n is a, c, g, or t
  misc_feature (798)..(798): n is a, c, g, or t
  misc_feature (800)..(801): n is a, c, g, or t
  misc_feature (810)..(810): n is a, c, g, or t
agcggagagtgtggtcaggcggctcggactgagcaggactttccttatcccagttgattgtgcagaatacactgcctgtcgcttgtcttctattcaccatggcttcttctgatatccaggtgaaagaactggagaagcgtgcctcaggccaggcttttgagctgattctcagccctcggtcaaaagaatctgttccagaattccccctttcccctccaaagaagaaggatctttccctggaggaaattcagaagaaattagaagctgcagaagaaagacgcaagtcccatgaagctgaggtcttgaagcagctggctgagaaacgagagcacgagaaagaagtgcttcagaaggcaatagaagagaacaacaacttcagtaaaatggcagaagagaaactgacccacaaaatggaagctaataaagagaaccgagaggcacaaatggcttgccaaactggaacgtttgcgagagaaggataagcacattgaagaagtgcggaagaacaaagaatccaaagaccctgctgacgagactgaagctgactaatttgttctgagaactgactttctccccatccccttcctaaatatccaaagactgtactggccagtgtcattttaatttttcccttctgacaaatattttagaagcttatgtatgactgtataagtagatccagatccagactgttagatgttgtttangggcntaaagggagaaactggaagtgtttactccttttctaaagtggtggcctttctaaggagctantttnctngtggaacttttacttangnncactggggnc

SEQ ID NO: 727668 - DNA, 756 bp, Homo sapiens
  misc_feature (652)..(652): n is a, c, g, or t
  misc_feature (657)..(657): n is a, c, g, or t
  misc_feature (719)..(719): n is a, c, g, or t
  misc_feature (723)..(723): n is a, c, g, or t
  misc_feature (726)..(726): n is a, c, g, or t
  misc_feature (743)..(743): n is a, c, g, or t
  misc_feature (745)..(746): n is a, c, g, or t
  misc_feature (755)..(755): n is a, c, g, or t
agcggagagtgtggtcaggcggctcggactgagcaggactttccttatcccagttgattgtgcagaatacactgcctgtcgcttgtcttctattcaccatggcttcttctgatatccaggtgaaagaactggagaagcgtgcctcaggccaggcttttgagctgattctcagccctcggtcaaaagaatctgttccagaattccccctttcccctccaaagaagaaggatctttccctggaggaaattcagaagaaattagaagctgcagaagaaagacgcaagtcccatgaagctgaggtcttgaagcagctggctgagaaacgagagcacgagaaagaagtgcttcagaaggcaatagaagagaacaacaacttcagtaaaatggcagaagagaaactgacccaccgtttgcgagagaaggataagcacattgaagaagtgcggaagaacaaagaatccaaagaccctgctgacgagactgaagctgactaatttgttctgagaactgactttctccccatccccttcctaaatatccaaagactgtactggccagtgtcattttaatttttcccttctgacaaatattttagaagcttatgtatgactgtataagtagatccagatccagactgttagatgttgtttangggcntaaagggagaaactggaagtgtttactccttttctaaagtggtggcctttctaaggagctantttnctngtggaacttttacttangnncactggggnc

SEQ ID NO: 727669 - DNA, 198 bp, Homo sapiens
ggacatccaagaagattgtcatcacagactgtggccagttgagctaatctgtggccagggtgctggatggggcagctgcaatgtccatgcaccaggggccgcgttgggtttcagcaaggtgcttaacgatacgtgtgtccactcactgtcacagtgtgccttaggaaggctgctagggatgttagacctcggccagga

SEQ ID NO: 727670 - DNA, 539 bp, Homo sapiens
agcggagagtgtggtcaggcggctcggactgagcaggactttccttatcccagttgattgtgcagaatacactgcctgtcgcttgtcttctattcaccatggcttcttctgatatccaggtgaaagaactggagaagcgtgcctcaggccaggcttttgagctgattctcagccctcggtcaaaagaatctgttccagaattccccctttcccctccaaagaagaaggatctttccctggaggaaattcagaagaaattagaagctgcagaagaaagacgcaagtcccatgaagctgaggtcttgaagcagctggctgagaaacgagagcacgagaaagaagtgcttcagaaggcaatagaagagaacaacaacttcagtaaaatggcagaagagaaactgacccacaaaatggaagctaataaagagaaccgagaggcacaaatggcttgccaaactggaacgttgcgagagagggtaagcacttgaagaattgggaaaaaagagatcaaagactgtgagagatgagctgatatgggc

SEQ ID NO: 727671 - DNA, 335 bp, Homo sapiens
  misc_feature (42)..(42): n is a, c, g, or t
  misc_feature (49)..(49): n is a, c, g, or t
  misc_feature (74)..(74): n is a, c, g, or t
  misc_feature (86)..(86): n is a, c, g, or t
ggccaatgtgtcctaaaaggctcctaataaatggggcccccnacccccnggaaatgcctacagtcatgagctgnccgatacaatancccatgagctgcctgtagatatcaagtgcttgaaatgtgaacacccccaagttctgatgcactgtgaatgtaaaatgcacactggatttcaaaaacttagtttaaaaaagaacatactatttcttattattgatacatctcaaaacaatatttagggccaagcatggtgctcatgcctacaatcccagcactttgggaggccaagatgggaggatcacttggggccaggagtttgagaccagcctgggc

SEQ ID NO: 727672 - DNA, 159 bp, Homo sapiens
cccgcccgggggggttttcctttgaaaacggggaaacttgggcgggggcccggggctcccgggttttttttcccccctttggggggttgggggggggggttcccggggtcgggaaattgaccccctccggcccggggggggggacccccttttttctta

SEQ ID NO: 727673 - DNA, 1743 bp, Homo sapiens
atggaagtgtcaccattgcagcctgtaaatgaaaatatgcaagtcaacaaaataaagaaaaatgaagatgctaagaaaagactgtctgttgaaagaatctatcaaaagaaaacacaattggaacatattttgctccgcccagacacctacattggttctgtggaattagtgacccagcaaatgtgggtttacgatgaagatgttggcattaactatagggaagtcacttttgttcctggtttgtacaaaatctttgatgagattctagttaatgctgcggacaacaaacaaagggacccaaaaatgtcttgtattagagtcacaattgatccggaaaacaatttaattagtatatggaataatggaaaaggtattcctgttgttgaacacaaagttgaaaagatgtatgtcccagctctcatatttggacagctcctaacttctagtaactatgatgatgatgaaaagaaagtgacaggtggtcgaaatggctatggagccaaattgtgtaacatattcagtaccaaatttactgtggaaacagccagtagagaatacaagaaaatgttcaaacagacatggatggataatatgggaagagctggtgagatggaactcaagcccttcaatggagaagattatacatgtatcacctttcagcctgatttgtctaagtttaaaatgcaaagcctggacaaagatattgttgcactaatggtcagaagagcatatgatattgctggatccaccaaagatgtcaaagtctttcttaatggaaataaactgccagtaaaaggatttcgtagttatgtggacatgtatttgaaggacaagttggatgaaactggtaactccttgaaagtaatacatgaacaagtaaaccacaggtgggaagtgtgtttaactatgagtgaaaaaggctttcagcaaattagctttgtcaacagcattgctacatccaagggtggcagacatgttgattatgtagctgatcagattgtgactaaacttgttgatgttgtgaagaagaagaacaagggtggtgttgcagtaaaagcacatcagcgtgaactttgtaatggagctattcttgctcattgtaatttacgtcttatgggtagtagtgatagtcctgctagtgctagtagagttgctggtattgctggtggttgtcatcatactcagcttatttttgtttttcttgttgaaactggttttcatcatgttggtcaagctggtcttgaacgtcttacttctggtgatcctcctgcttctgcttctcaaagtagtggtattactgatgttaaggtgaaaaatcacatgtggatttttgtaaatgccttaattgaaaacccaacctttgactctcagacaaaagaaaacatgactttacaacccaagagctttggatcaacatgccaattgagtgaaaaatttatcaaagctgccattggctgtggtattgtagaaagcatactaaactgggtgaagtttaaggcccaagtccagttaaacaagaagtgttcagctgtaaaacataatagaatcaagggaattcccaaactcgatgatgccaatgatgcagggggccgaaactccactgagtgtacgcttatcctgactgagggagattcagccaaaactttggctgtttcaggccttggtgtggttgggagagacaaatatggggttttccctcttagaggaaaaatactcaatgttcgagaagcttctcataagcag

SEQ ID NO: 727674 - DNA, 260 bp, Homo sapiens
ttgttccttggtctactaaaaatacaaaaaattagccgtgtgtggtggtgtgcacctgtaatcacagctacttgggaggctggggcaggagaatcacgtggacccgggaggcagaggttgcagtgagctgacattgtgccactacactccagcctgggccacagagcgagactccgtctcaaataaataaatatttctctatattatttattacatgcaatctcctacaactcaatggttggtttgattttcctcaggga

SEQ ID NO: 727675 - DNA, 1608 bp, Homo sapiens
atggaagtgtcaccattgcagcctgtaaatgaaaatatgcaagtcaacaaaataaagaaaaatgaagatgctaagaaaagactgtctgttgaaagaatctatcaaaagaaaacacaattggaacatattttgctccgcccagacacctacattggttctgtggaattagtgacccagcaaatgtgggtttacgatgaagatgttggcattaactatagggaagtcacttttgttcctggtttgtacaaaatctttgatgagattctagttaatgctgcggacaacaaacaaagggacccaaaaatgtcttgtattagagtcacaattgatccggaaaacaatttaattagtatatggaataatggaaaaggtattcctgttgttgaacacaaagttgaaaagatgtatgtcccagctctcatatttggacagctcctaacttctagtaactatgatgatgatgaaaagaaagtgacaggtggtcgaaatggctatggagccaaattgtgtaacatattcagtaccaaatttactgtggaaacagccagtagagaatacaagaaaatgttcaaacagacatggatggataatatgggaagagctggtgagatggaactcaagcccttcaatggagaagattatacatgtatcacctttcagcctgatttgtctaagtttaaaatgcaaagcctggacaaagatattgttgcactaatggtcagaagagcatatgatattgctggatccaccaaagatgtcaaagtctttcttaatggaaataaactgccagtaaaaggatttcgtagttatgtggacatgtatttgaaggacaagttggatgaaactggtaactccttgaaagtaatacatgaacaagtaaaccacaggtgggaagtgtgtttaactatgagtgaaaaaggctttcagcaaattagctttgtcaacagcattgctacatccaagtcttctaaatactggtcttctagaaaatctaaacaacatattttattaaatttttttgttctttttaaatttattaatgatgctttttttggtatttgtccttttaagggtggcagacatgttgattatgtagctgatcagattgtgactaaacttgttgatgttgtgaagaagaagaacaagggtggtgttgcagtaaaagcacatcaggtgaaaaatcacatgtggatttttgtaaatgccttaattgaaaacccaacctttgactctcagacaaaagaaaacatgactttacaacccaagagctttggatcaacatgccaattgagtgaaaaatttatcaaagctgccattggctgtggtattgtagaaagcatactaaactgggtgaagtttaaggcccaagtccagttaaacaagaagtgttcagctgtaaaacataatagaatcaagggaattcccaaactcgatgatgccaatgatgcagggggccgaaactccactgagtgtacgcttatcctgactgagggagattcagccaaaactttggctgtttcaggccttggtgtggttgggagagacaaatatggggttttccctcttagaggaaaaatactcaatgttcgagaagcttctcataagcag

SEQ ID NO: 727676 - DNA, 485 bp, Homo sapiens
gggtcatgttactattaaacgaaaacagctgatggaaagtgtgcatacagagcaagttactcagatggaaaactgaaagcccctcctaaacatggtgcctggcaatccaaaggggacccagatcacggtggaggaccttttttacaacataagccacgaggagaaaagccttaaaaaatccaagtgaagaatatgggaaactttggaagtcgtcggcaggtattcagtacaccatgccaggcattcagatttctccagattaaaacaaacaaggagagacagtagctgatgttaggacactaccactgctcaaccgtggacaatattcgctccatctttggaaatgctgttagtcgagaactgatagaaatcgggctgtgaggcattacaaccgtagccttccaaatgactggttccatatccaaatgcaaaactactcagtgaaagaagtgcatctctcttactcttcatcaaccatcgtctgg

SEQ ID NO: 727677 - DNA, 291 bp, Homo sapiens
  misc_feature (102)..(102): n is a, c, g, or t
gcggggttcatctcggcctgcttgatcgcctgcgataggcgaaccaggtgacggccacttccgatggcgtcgcatggctgccatggctcgcgccgtaacggngggcagaaatccatcaccggcttgtagtcccaccagttggcgagcttgcatttgatcggaccgcggttcgacgcatcgcccgaaagcgaccgatccgcataaatctcgggcgaaggcgggcgttgatcgtcgagacattgccgccatgcccgtttgaaaaaatagatgcgctcgaaaccgtgccgcgca

SEQ ID NO: 727678 - DNA, 390 bp, Homo sapiens
atgatgtcatgtccacaaaaataaataaattagccaggtgtggtgggcacatgcctgtagtcccagctacctggagaggctgagtcaggagtatcagatggggcccaggaggttgaatttatattgagctgagattgccccactgcactccagcctgggtgacagagcgagactgtctcaaaaaaaaaaagaaaaaaagaaaaagaaatggagaaccgggctgtgtttgggggcaacaaagggggacacttgaggagccaacttcctcccttgaatagcgggtgtgtttcttccttccgggattgccagcttgcaggcaggaattggtttggatatagtatctaaatactttctctattggactatcttaatctgggggcccaaagcctg

SEQ ID NO: 727679 - DNA, 837 bp, Homo sapiens
tgggccgcatcgcagtttattattttatactgctttgtatgttgtcagatcctgggccactgctacactccacaatattattaaggaatgtggtgcactactttttaacatcgcgcgcaaaagaatagtaagccttgtggtcatggacatcttcaattgattgatcgtagagccgctgttctgtattaacttcattaatacttgcagtttatgaaatgattggtcgattaactgaataattgaggctgttgtgtatatatacaaatagagattctggtctcaatataatatactgtatacgacataacattcgtatctttcccttttaatgtgtaatgtacatacacaggaagtgtctatccttatgaatcgccagccatttctcttgttgctatccatggtaagggcccgcagcttctactgggtagttcactgctggtataccaatgccttttgtctatgcccctgcagcctacttttgtgtaacccatgggattgcccttggtctcgtagaaacattggctcagtgggccttttgatacagggaccttttgcaggactgggaccgtcccggcccacatgttcaatgcagtctttttggctcgcggcggtaccaacttattatactgggacacacgctcagcttccctcggcgggcgggccacaatggcgcccgaccctcatgggcattttgcaactcttaggtattttgtattcctccataaaaaaaaaaaggaggtttcaaggctctttacttttgacttaacctggggtagacaaatctgggtcttattgggtctttttgggcgaactttgggcttttccacaagtcttttg

SEQ ID NO: 727680 - DNA, 169 bp, Homo sapiens
gccagtagcctatgccagagccacgcaggtgcaggatccgaacctcattgtgacctacaccatagctcatggcaacaccagatccataacccactaagcaaggcaagggatcaaacctgcatcctcattaaccactgaacatgggtttattaaccactgagcacgacag

SEQ ID NO: 727681 - DNA, 211 bp, Homo sapiens
atatatattttgaatgcctttatagattcctttaaattcccttatacacccattaatagaaaatcattacatttaaaatataccttacagctaaagcatccaaataagaatagggctcatgcccttatttttctttcagctgaatacgaatgaacacagtggtgcaattcctgaagggaagtgatgaaattatatttattccagtgggcac

SEQ ID NO: 727682 - DNA, 506 bp, Homo sapiens
gtaagtcatagtatgagtaattaattattatactggagtgtgaatttgaagcctgtgcaaggaacacacccatcagaaagtttgtgaatgagccacaccatggcccagagtctgtatcttcctgcagcctctgcttccctgcctgtcacccacctcaaagtagctctcatgaaatgatcatttgttattattcttcatcactatttaccttttacaaatgttattaagttcatgtctgaaattgctacaatagtgatgtcattgacacctatggtgaaaaattatattttatggcagatattattttacaagcttctgtaagtttctttggtcctgtatttgtcacatcattatggacctgaagatgtgcccactaatgaaatattttgttacaatttgttgagttttgtggggaaacttgtctgctcttgcagtttgttcaaatttggcatcaagaatgtttctggatatattcccctcccatgtcaagggtttttagtacaaaa

SEQ ID NO: 727683 - DNA, 1606 bp, Homo sapiens
gtaatgacttctgcggatcttttttctcccctataggcttcaataggaaaaaaaactcccacctttatataaagggaactctttaacaaggtttcctcagtaagaggaaccggggcttacgcagaacccagagttttggaggtccgtgggtgaacaagtccagcgggtagagatgtgcgtaaactcagggtgatataacccgaatgtggccccaatgtccaatatatttagaaattatagtgtataacagagtgaagccaagctcttatatttctcacctatacgcccatcgccagaaggtgggcccaaagagcacgaattgtgccggtggaacctgtggcctctcttaagacccgaactcttctcctgtggcccaaacatataacttgtggcgcgtatatacgcgagtgatgcgtgtctcccgtgactgtgaatatgtgtgctctctccacaatatagattctgtgggagcaattcttatacacaccacacgcttttgacgacgcttatgtgcgcgctctcgccaccacaagaagtatacccgctcttatacaacacgggcgattttgtctcctcttccttgtgtggggcacattctctcctcctctgcgagacgacacagccggccgcgataagacaatgttgtgagacacgcgatatacgcagcacaaacccccaaaaaacccgaggagacaaacagtgtggccaccacttaaacgcacacaaaccccgacatcttgctggggagaggcttccccactcctgtggcaacaccgcgccgacacaaccgtggtggtgtagcaccaccggctcctcatacattttcccccccacaacttttgtgcccgtagaaaaggccgcacacacacggcttgtgctctaccacgaccaacaacacgtactacaccacctccccccacacatgacgggcgtctttttacaagatgcgccaatgatgagaggccaaccaatgttgacaagtcttgtgggggcacggcattaactaccaggaggcagctcttcctgtggccccccaagttgcgtcatacgccactacagcgattatagcggggcagtggtagcaaactctcgcccgcttacaacattagtcggcggctaccacccgacttcgtgtggcacaaatcattcaccccttataattttataacagaccgcccccctattattaagtgggcgcccactacgcggcctccgaccaagacacggcgggcgcccccccacgaacaaaccatattacaacacccgatgcggccaggctgccccccttgctaaacaagacagacgcacccactgcaggagccaattcaaccgcccacgagagcaccctgcgcaacacggcggtaccaaaaccaacaccggcgcgcggcccccgcgagcgaacaacagagcggcggccgccccacccgcaccatcataatattagtggcgcgcccccaccacacatcatgatcgccgccgaacgaccacaacccaactcgcggaggcggccccccaaacatatgccgtggcggacgtccacacaacacatcacacaaaataggcccgtcggctcggacgcgagccacaccccaccagcctctccaac

SEQ ID NO: 727684 - DNA, 537 bp, Homo sapiens
gggaccctgcagccgcagagatgttgatgcctaagaagaaccggattgccatttatgaactcctttctaaggagggagtcactggtgcctcaagataggatgtccacatgcctacagcacccggagactggcagacaagaatgtgcccaaccttcatgtcactgtaggccaagcagtctctcaagtcccgaggctacgtgacaggaactagatcttgcctaggagacatcttcatactggtaccttaccaagtgagggtatccagtatctctcgtgagttaccttcagtctgcgcctccggagaattgtgccgtgccaccctaccgccgtagaccgtccagagactggcaggccatcggcctaaaggtctggagggtgagacgacccgcgagactcacagagaggggaagatgacagagatacctacagagcggagtgctgcgccaccatggcgccgacaagaaagccgaggaccggggactgggtcagcaaccgaattccagttcagaggcagataactgccgaccatgtcagcca

SEQ ID NO: 727685 - DNA, 310 bp, Homo sapiens
  misc_feature (215)..(215): n is a, c, g, or t
  misc_feature (279)..(279): n is a, c, g, or t
  misc_feature (304)..(304): n is a, c, g, or t
tgttttggtattcagatgtctgtggtagttttatttgcaatggccaaaaactggaagcagctcactaaacaaacagtggcatacccatagaactgcatacttctcagcagtatgaaagaatgagctacttatataagcatcattgataaacctcaaaaaaaaatgccacatgaaggaaacccaaaggggaggaaacatgaaaaactttatatgtncagtccatattaaaattctaggaaaatggcaaacttattccatccttaaagggaaagttaaatncaacagttgttctggggagggcccngtggag

SEQ ID NO: 727686 - DNA, 678 bp, Homo sapiens
gagcggtgtgtgtagggcggctttgagactggggtgtctgtccccagagctcagagcagaggtggggcggtaactccatgcccgcgggcacaggcggggtcactgagtgaggagaatggctcgaggctgagccgtccctcacacggggccagcgtggacacttggcgtcctcccttcggtctttgcgtgtctgttagtgagccgtgtgtgtgtgtgtgtgtgtgtgcacaagaagctggtgcccgtgatacactgctgctctgtgacctgcatgtctgcaccctggctgtctgcacccaggagtctgtgcgggaaaggaactgctgccttcagcccatcggcatcctttattggcactgagacgagaaacagcagaaatccatacagggagaggacatccctgatcagcgacatcgagcgaattctgagacccgagttgatggtcagcctcgaggagcagcaatagcctggccagaaaaaaaaaccaggtctgcagtcccagccagcaccgttttgctctacatctacgctgcgagttgtagcagtggatcccagcatctggcagacagcatcagccttggcaccgctcgatcagcaaagacagagtggcatccaagactagtgaatctgaccacacagaaccagccaacaccaacgggcacgaagagccagggaagc

SEQ ID NO: 727687 - DNA, 280 bp, Homo sapiens
tttttatacttgcttttggtatgagatagggtctcaccatgttgtgcaggctggtcttgaactgctgacctcaaatgatccatccgtttaggcctcccaaagtgctgggattacaggtgtgaaccactgcagcgggctctggataatcttcctcaaactctcctgattagagacccttgaaactttaatgctcctttactcagtgccacataccaaccttggctcttttcataacccttattcctcctcagagcaatcctgtgaggtgggaggagaggaa

SEQ ID NO: 727688 - DNA, 164 bp, Homo sapiens
gggccaaaaaaaaaaatttttctccccccaacctccaacctttgggggccaaggcccggcccccccaggtcctgggggggtttccccccaaccagggggggaaggggggttttttttttaaaagggggggcctttccccccaaaaaaaggcaatttttttaaga

SEQ ID NO: 727689 - DNA, 220 bp, Homo sapiens
ggggggggggttttctcgcaattttgtttttttttggggcgcccccttcgggggcgggggggaaaaagccaccccccgttttccttcggtcggggtggggggctagggggggggttttttagggccccccttcccggcccccggcccggggggggggggttccccgggggggggcccattaaaccccccttttttttcccttttcccccttttgggggga

SEQ ID NO: 727690 - DNA, 155 bp, Homo sapiens
agtacgggggaaacctcactttaagcgagttacatgctaaacatctaaaataaagcctcacaaaaagttaaaattcagaatatgggaaaaggcatgaagaagaatgcaagacagaatgtccaggtcgactaatggcgtagtactattcatcaggc

SEQ ID NO: 727691 - DNA, 365 bp, Homo sapiens
tcatggaacaccggggcaaagagggcaggacagctccaaagatgtcatgtgccacggctgatgaaagcgcccaagcagactgctcagtatataaatatattttatatttatacgagacgaagtcaacctctgcctcccgggttcaagtaataaacctacgtcagactcccgagtagctgtcaggtgcacaacactacacccagataatttagtatttaatagtagagacggggtttcaccatgttggtcaggatggtctcaatctgacctcgtgatccgcctgcctctgcctcccaaagggctgggattacaggcatgagccaccgcgcccagccttacttttcgtatttataatggagatgggg

SEQ ID NO: 727692 - DNA, 155 bp, Homo sapiens
tgatctagagatctccgcggtgctctacggggtctatatggtgaatcatcctgcctttcaaattggtttcataatagttagatgaaaactattttttgggagatgttactgaagttgatgagcaataaaagtctacttaattaaaaaaaaaaaag

SEQ ID NO: 727693 - DNA, 990 bp, Homo sapiens
  misc_feature (990)..(990): n is a, c, g, or t
ccgcagctcctggcgctcggcgtgggctaactgcagcgcggagatttcgtgccgccaagctccgctcccgcccccgggctgtgccccgtgggctcgcctgaggccgacaaccgtaccaccacactcctatggcggtttgcgtcgatggcccagcttcttcgcaggccacggaaatccatgtagtgctcgccctggttggcatcgcacgactgccaggcgacaacatgcacgtgcggacacccgacccacaagccagtaaccggcggcactggagcacatgacgaaccaggacacacgccgacactggacacggcacgcgccaggtggacacaggacgacagtcgaggacagagcaacgagaggggcagcagcaaacagcaacgggacgaacacaaggcaagaaaacagcccaataatgacaggccaaagagcaccaccgcctgagaatgtggggcagcaacgcaacaacggggcaggcgggtcaagggggcaacacagcgaacccagacaaaacatacgcgcgacagacagcgacaaagaagataacagcagtacagggcccaggaagggcataacagacacgcgcaaacaggtgagcaggacacccagaagctgcacaaacccgcccccgtagcaaggacaccgccgactgcactggcacggaacaccggcaggagacagacccgcagcaaccaagatagagccgaagagacgcgaactgaaggatccacacgaggcagaccaaaacaccccgcaggacggaccatggaacacctggggaccatacacggaggacacaaagagcagcaaccggaaagaaacacacagcaggacagaagaccagtggagacgtcagcgcaggaagcacagcacgacgcacccgccagcaggccccacgaacaaagaagacgcgccgacgcgagcgcgagcacgccgaacacacgcacgagccacgacaacaaaagaaaaggcacagcagacgcacggggn

SEQ ID NO: 727694 - DNA, 810 bp, Homo sapiens
gtgtacactgattcaccaggtggtctcctctgcactttcaacagcgacacccactcctccacctttgagcgcttggggctggctattgtcctcaacgagcactttgtcaaggctcatttcctggtatgacaagcgaatttggctatcagcaacagggtggtggacctcatggtccacatggtctccagggagtaagacccctggaccaccagccccagtcatatgagcacgaagtaggagcgagagagaccctcattgctgggtgagtccctgtcatgaatcgagtcctccacaacaaaactgaatctacccctcctctacagtttgcatgtagacccccttgaagaggggatgggcctagtggagccgcatcttgtatgtaccatcaatgaagtactctgtgttcgacaagattggaccctgtgttccctagaagcacccctcattgctggaggggcgcggaggcaccaatcctttctgtgagcggccgccttggtattccttggcctccttttctttagctcagggcgctcgcctctcttgtggcctttagttatattctctgcaccggggggctccatcccaaagaccatttgccagggagcaccccgcggtgatggaggtgccccgaggaggggagcctttgcccggggggggccacattctttgaggagactggccccggagagatcaaggggtcccggaggaaggtgtacgccggcaccctttttcggggcaggaacccggctggaattcccgggggggaatatgccgcgcgggctgtatcaggcgaaattaacgacggcgaca

SEQ ID NO: 727695 - DNA, 156 bp, Homo sapiens
gggttagattccggtgacagcacagacagtagaggttatctcctgaacggtaattggtgtatgaagggtgaattctggggaggtctggaccatggcggagattcagggctgaactggagtgagttggagacggttagcagcgggtacctgagctcg

SEQ ID NO: 727696 - DNA, 208 bp, Homo sapiens
aacagttaaaaagaaacccacaatcatatggcaatggcctctggttctaatataaacttggttacaaccattcaaattctatctttacggcaatttcacactgctcctaggagcccttatagcatctgattctaagttattctgacacggacaaccaaaactactcctgacaacctatacctcactcaggactgactcacactggaac

SEQ ID NO: 727697 - DNA, 428 bp, Homo sapiens
gagagagagagagagagagagagagagagagagagagagagagagagagagagagagagagagagagcgatagtgagctagagcccgtgacagcgttctcttatgccctgtctgcttactgttgccttcttgcccttgcccctcatctttttcctcgcgatatttttgtcgcctctcgctgtctccttctgtcctctcatcctgatctacatctttaccttttcttctagtcttgtcgtctcttcactccttatcactggcttttcaagttctccctgttccttcctccttacctctctgcctcttctgtctctttatgattacttcccactgctccttgtcgcagtcttctcccctgtccattgccttgtcctccttttcccgctgcctccctgctgccttccctgcttctctttctgttcctctcg

SEQ ID NO: 727698 - DNA, 266 bp, Homo sapiens
tctagaggatccctgtgcgtcgtagcgggtcatttccgcgccgtgcacagccaggccagcaggaccaggaacaggccccagccgaggtattgcggccaggtacgtatgcccacggcttcagcgtgcagagttgtcatggtggtcctcgatctgaatgtgggagctggcttttgtgggagcgggcttgctcgctcccacacaaagcccggttcccacaggggttagccgtttgctgccgttttcttgtcgagctcagagatgcgttg

SEQ ID NO: 727699 - DNA, 708 bp, Homo sapiens
  misc_feature (226)..(226): n is a, c, g, or t
  misc_feature (228)..(228): n is a, c, g, or t
  misc_feature (250)..(250): n is a, c, g, or t
  misc_feature (252)..(252): n is a, c, g, or t
  misc_feature (301)..(301): n is a, c, g, or t
  misc_feature (340)..(340): n is a, c, g, or t
  misc_feature (425)..(426): n is a, c, g, or t
  misc_feature (460)..(460): n is a, c, g, or t
  misc_feature (608)..(608): n is a, c, g, or t
  misc_feature (683)..(683): n is a, c, g, or t
  misc_feature (689)..(689): n is a, c, g, or t
  misc_feature (692)..(692): n is a, c, g, or t
tccattggtttaagccccttgttccaagtatttatgccagggaaaatttgtccctgtctagagcttgcacaataagaaataagcggttcccaacagtcttaataatctcaacgtcttcattaggtcaataaggaaggctttgtaaagattactaaggactctaaaaagcacacttgaggttagggtattatcaaccattgtccttttttttttttttttttttttnanacaggtctcactctgttcccangntgaagtgcagtggcacgatctcggctcactgcaacctccgcctccgggntcaagcgattctcgtgcctcagcctcctgagtagctggnactataggcatgcgccaccatgccggctaatttttgtatttatagtagaatggggtttcaccatattggccagtctggtctgganntcctgaccacatgatctgccgacctcggcctccnaaagtgctgggattacaggcgtgagccaccgcacccagcctttttgttttgttattacagataatgtggcaagcatattttggattctatgaattatttctggagaataattttttcttctttgatcgttatctgaaacccatgattntgaggtaatcatatttaacaattttgtgccatacatacatatatatatatatatacgttgagactccatcaaaancaacancancaccaacaaaaaaaaa

SEQ ID NO: 727700 - DNA, 118 bp, Homo sapiens
cgtgcgctctgaatcgagttcatcgaactggcggtggctgatggcccaccagaatactgccccgatagcaaaaacaagcaataaacttaaaggtacaatgcaaatacaagatgtccat

SEQ ID NO: 727701 - DNA, 244 bp, Homo sapiens
aacattcgtgttcctgtaaggagacctcccacgattgtactggaatcatctgtggacttgcaagagcaggatcgtggagggtagcagctgcctgtgtgagattcgttatcccactgaaaccgcctgtccgtgcaacgccacacttgactagaacaatcctctcctgccacagggccagggctttccttttccacagtggagcagctgagcccaacacacctttggcgttggacacgaatgttca

SEQ ID NO: 727702 - DNA, 714 bp, Homo sapiens
  misc_feature (232)..(232): n is a, c, g, or t
  misc_feature (234)..(234): n is a, c, g, or t
  misc_feature (256)..(256): n is a, c, g, or t
  misc_feature (258)..(258): n is a, c, g, or t
  misc_feature (307)..(307): n is a, c, g, or t
  misc_feature (346)..(346): n is a, c, g, or t
  misc_feature (431)..(432): n is a, c, g, or t
  misc_feature (466)..(466): n is a, c, g, or t
  misc_feature (614)..(614): n is a, c, g, or t
  misc_feature (689)..(689): n is a, c, g, or t
  misc_feature (695)..(695): n is a, c, g, or t
  misc_feature (698)..(698): n is a, c, g, or t
cccctgaaaaaatgttccagggggtaacccccctggacaggttttagcccgggaaaatttcaccctgggcaaagctggcaataagtcaccagcgtttctcccagtctcaataatttccccgtctccattagatcaatagaagaggcttggaaaaatacttaggactcaaaaaagcaccttgtaagtaggggttatatcaaccattgtccttttttttttttttttttttttnanacaggtctcactctgttcccangntgaagtgcagtggcacgatctcggctcactgcaacctccgcctccgggntcaagcgattctcgtgcctcagcctcctgagtagctggnactataggcatgcgccaccatgccggctaatttttgtatttatagtagaatggggtttcaccatattggccagtctggtctgganntcctgaccacatgatctgccgacctcggcctccnaaagtgctgggattacaggcgtgagccaccgcacccagcctttttgttttgttattacagataatgtggcaagcatattttggattctatgaattatttctggagaataattttttcttctttgatcgttatctgaaacccatgattntgaggtaatcatatttaacaattttgtgccatacatacatatatatatatatatacgttgagactccatcaaaancaacancancaccaacaaaaaaaaa

SEQ ID NO: 727703 - DNA, 538 bp, Homo sapiens
  misc_feature (35)..(35): n is a, c, g, or t
aacagctctgagaactggcatttttctttcatgtntctggtattgattgctttgttgttttttgtttgtttgtttgttttgttttgtttttttgagacggagtctcgctctgtctcccaggctggagtgcagtggcgcaatctcggctcactgcaagctctgcctcccaggctgaagcaggagaatcgcttgaacccgggagatggaggttgcagtgagccaagatcacaccattgcactccagcatggacaacagagtgagattccgtctcaaaaaaaaaaaaaaaaaagtaaaataaaaaacctgcacaaaacctgcacacagggcgtgcgagggtgggtagagctgaggagggagtggggtgggggatggcaccgcgtccgcatcccggccatggcgtggcactgtgtgtacacagcaggtcactgttggggacatcgcatacattcagggtacgcaggatctctctatattatttctaacaaccgcactcaaatgtacgatgatggcaaaattaaaagtttaattttaaaaaaa

SEQ ID NO: 727704 - DNA, 435 bp, Homo sapiens
gcaaatgcgaaacaactgcatcgaaggtctcgatgccggcactcgagagttcggacgctgagagcaccgaaatggaagccgggaccgcttgggcgggttcgatctcccggcgggcgctgacgacgacctcctcgagctgcatcgcaggcgccgcggcggtgtccgccgccggggcctgctccgcggcgaggcccagcaatccgagcgcgagtaccgtcgacctgcggcccatttcggcgctcccaaacccgtggtacggtaatcatggaagttgcgagtgcgcagcgcttatgcggggcacacaaagagttttggcaggcgcagttcctgggcgcgacagatggcgacggtttgttcgctgcaccgcacacaggatccgagcggaccgatctggaaaggggggcgcgtggagccgtttcgttggggcggggtcga

SEQ ID NO: 727705 - DNA, 935 bp, Homo sapiens
taacaatataacaacttgtttttcccttaaattttaattataacccaataggcatgtaaacggaatccaaactctccaaatcatccggcccaaaaaatatccggatcaatttttttaaaaaacaaagaggtctactgggtttaataaaatgtggtttgtagaggaaacttacaagtgggtccgaaacaccaaagaaataaaaatataaaatatatcactttgagagcacgagacaacataaatttatttgtggtaacacagcgagcaaatctgggtgctagaaaacgagggagtggagaaaaaatctaattataagagcaaaaagctcgaggaagaggggttgtccataaatccccggcttaatctaagaacctcaccattttagtggcgacaaaagggggcctcgtgaacactcagattctggggtttactaaaaatctaaaaacttccctcccgggtctcggcctaaaaatacaaaaataagcgggggcggtggggggcgcagtgccgtggtagcccccagcctaccccgtgaggctgaggcaagaaaaacgccggcgccgacagagagccggccccaaaaaaaaaaaaccccacaccactattactttacaactattaaaactgttcccctaaaaacttacaaatttcctcaccccccgcagacaaaaacctccgccgcggggaaaaataccaaaacgccgggggccacaagggggccccacttcagcaacaagccgcgggctaagtttcaaaaacaccacaccacgcggggggaccatcgagggccgaactgtgggaaaaccactctataattcttgtcccccagaagaattggggccagaaaaaggaaacatgctaacgtccgacaaaagtgcgccaacaaacttacgcacacttagaaaccaaactccatcaagagcaacaccgttcga

SEQ ID NO: 727706 - DNA, 1051 bp, Homo sapiens
gatgaggtagagagacgtgagtcttgtctgggtccttccagatctcggtgcagtctgaaatggcaccctcgtctctagcccagccctccctggatgtggactcgcaggttggtggatgggggatgggggatgggaggggggcgagctggggctcctaggaaatgcctggcggtgacgcgctgatgtctttgcaagagcttcattggctcgagctgggctgcttcctgccaggtgatctggtggggcatgtgggtgtttgggcatccgtccatggcggggatgtggggacgaggtcggattcccaactaaggccaaggagggggatccttagagatagtgacccctcagaacactgtgctagcagatgagatggttggggcgtgcgagtcgtgagcaatggtccgctgaaatttgacatgatgccataccttgcgaacaccagccctgatggttctgtcaactggcttctttgcacgacgagccaaaagtcaaggctggaccttgagcagctcaagcaacactgggtgacctgggcccgacagacacccgagcaaggcactgctgagacctcctgaagcggggcaaggtgccacatccaagacacctggaggaacaggacgacgggcactgagcataaaggagcaacatagagaaatgagcatacagatacgtgaaaccgagagcctggaccaagctgcaggcgaccacagcgtggaagaggggtgcgcaccgagatacacgggctacgactgcgcccaagtgatgaaagcaagatgaagtgcacataacggagccagaggaccgagagaactgaagggctggacacaaaaagcggacagacaccaaagagcaaaggaacgagcataagggacgacccaatacggaagaagccccacgaaggcagactagcacagcattcgcgaaaagcgggcacccaacaccatagcgcacaaaacagtgcagaaacgcagggaagccacaacaacagcagcgcgggaacacagagcgagaacagaacaaaaacaccagcagacacgagagcacgaacaac

SEQ ID NO: 727707 - DNA, 426 bp, Homo sapiens
tccccaaagaaagcgaaaaaccaatgcaaaaaggctgacaattacaaaaaccagaacccctcttttccttcaaaggatcacaactccctgctagcaagggaacaaaattggatggagaatgagtttgacaaattaacagaagtaggcttcagaaggtgagtaccaacaaactcttttgaggtaaaaggagcgtgttctaaccaactgcaaggaagctaagagccttgaaaaaaggttagatgaattgttaactagaataaccagtttagggaaaaacataaaagacctgatggagctgaaaaaacacagcacgagaacttcatgaagcatacaaaagtatcaatagccgaatccatcaagtggaagaaaggatatcagatattgaaggtcaactcaaagaaataaagtgagaagacaagattagag

SEQ ID NO: 727708 - DNA, 425 bp, Homo sapiens
tcatcgctgattcctgagcgtaaaacgacgtccaggagtcccattcttggtcatagttgaatccggagtaaaaacacccttcacactattcctattttttgtccaaggggcccccggacaaaaggcatctaaaggagactctactataatttcaggtttcctactctggatagaaaccatcttctctgcaaacacacagtctgtatctctgtgttcattggtatagaaagccctgtatgcaagatggagagagccacatttcccctgagaggttcaaaaaagtttgaggttgagatgacatatctgacactctgttgttaccctcagaagctactacatgtgaaattcttaatgactgcattatcctgccaagtgaaagaggcaggcttgagcaagtgcggttaagaggggtgggagccttatca

SEQ ID NO: 727709 - DNA, 287 bp, Homo sapiens
gacaggactcatggttgctttgaattgggtccttaatatttgtatggaaaggaaaattcttttcaagtacagtaggagactctgtattcagagcaattataatctatttattggttattttaaaaacgtcagttaaggcaaggcaatcaccccacacatcaccatatccataagcattcaaacaaagcaaattcaaccacatattgcccaggtgccagtggctcaccacttgccaatctccagcccactttcggcgcaggctcgtgcgtgggcaggcattcgcttgc

SEQ ID NO: 727710 - DNA, 561 bp, Homo sapiens
  misc_feature (423)..(423): n is a, c, g, or t
gggttttgctatattagccaggctggtcttgaactcctgacctcaagtgatcctccacctcagcctcccaaagtgttgggattacaggtgtgagccacagcccctggccttaatcctttttttagagacagagtctcactgtgttgccaaggctggtcttccgacttaagcacaacaaccaagcctcttttaattttaaatacaatcttttccttattattctataagatgaacccagaatatttttcatgggcctggagatggtggaatggaccacacttgggacaaatcaatttatttgcgcaatatgcgcttaagaggtgagtaacccacggggcgtatatatatatatatatatatatatatattgagagagagagtttctctgtgacacacactggtagtgacagtgatataacctgntctctgtgaactctccatcttctgggtgtagacgcctacatcttcttgtttccacgagagctgagactacaggcatgtgccaccacagccagattatttttgtatttttagtagagatgatgtttcaccattgttggc

SEQ ID NO: 727711 - DNA, 349 bp, Homo sapiens
tgttttttttttaaaaaaaaaccaaaaaccaaggggggccttgtttgtagagggggggccggccccaaaaggtatttttcccaacccccaaaattttggtttccccccaaggttttttaaacccttccccggggaaaagcaaaaaactttttttttcccctttcccattttcctaaaaaggggggcccaaggggttccgttggcgggattgcaacctttttttttgaaaactttttttgtaaaccccattcccctgttccgtttttttgttaactgccctcccctaaaaagccccgttgaaaaaccctttttaggggggttttttaaaagggttaaaataaaagcttta

SEQ ID NO: 727712 - DNA, 128 bp, Homo sapiens
  misc_feature (97)..(97): n is a, c, g, or t
cttcctggtggtgccgctatactgaattttttgttaatcaatcccatgcatattctactattcttactagatatatacttattcatatgcactcacntaaacatatatatattaagttggtttcaaaa

SEQ ID NO: 727713 - DNA, 836 bp, Homo sapiens
gatccacggaagggtcttgtggccggtacacgagcgaccgtgtcgatgatcagtaccccctaagagcccaaagtgcgcaaggccaagactcatctgatcacttgtcggcttggacacgtagattcgggcaagtccaccaaatatgggcatctgagtctataaatgcggtggatcgacaaaagaacatggagaaattgagaaggaggctgctgagatgggaaagggtccttcaagatatgccgtgaggtcattggattaagagcgtgaaaggctgagcgtgaaagtggtatcgaggcattgatatctccttgtggaaatttgagagcgagcaagtactatgtgactagtcattgatgccccaggaccacagagactttatcaaaaacatgattaccgggacggtctcaggctgactgtgctgtcctgattgtgctgctggtgtggtgaatttgaagctggtatctccaagaatgggcagacccgagagcatgccttctggcttacacactggtgtgaaacactaatgtcggtgtacaaaatggattccactgagccaccctaaagcagaagagatatgagggaaatcgttaagggagtcagcacttacattagaaatgggtacaacccgaaaagtagcatttgtgccaatttctggtggaatgtggcaattgttggagcaagtgtaaaatggctgtggtcaagggatggaagtcaccggaggatgggatgccgttggaacaggtgttgaggtctggaggttctacacagttgtcaatgacaggctggggctcttcggatttacaatggggttggacgtctctggcgggggagtgtta

SEQ ID NO: 727714 - DNA, 241 bp, Homo sapiens
ccccccccagcaaggatggcgctgttaacatagccccccctgttctgggggccctgggaagcctagataaggccgtgagcaaaaaaaaggggggggtcctcctttgttgtttaaggaggggctagggggggaaacttaaaactgatttattacaggggggttgttcaggtccccccaacccccgtcagattttatgattttctagcagggctttcaaaaataaaaaggtttcatgctgtga

SEQ ID NO: 727715 - DNA, 725 bp, Homo sapiens
  misc_feature (170)..(170): n is a, c, g, or t
  misc_feature (304)..(304): n is a, c, g, or t
cacaccaagctgtccagaaaaggccattcagatacgggataatccatattgtattacctcaagaagttattggttcttcggcatggatttgttcgtgagccttatgaccacgtccatgcctagctccctcagcccgccatgcgtagcgagggagagctggcaccctcaangagtgcatcacgcccgcctaaacatggccacctagtagaggtccacacatcactagaaccacgagtcactctagttgatgtcgccatcgaggaggtatcaagtcacactggagtctcgaccgagtagatctacntagattcatatcaacccgacataccgaggatatattcaagcgactgcttcattacaagtatgactggggtctctattgttagcctcactacagagcgctcagaggtagcttcgcagtcgtccctgtcaccagtgtgtccgaacggtggcatctacgacatcaacgattttatatgtaggccgagcagtgcttccacggtgacttcgacgttcattgattggactcgaactttcctcactatctgcttgcagtccagtgcaacgtaagtatttcagcttgtactgtccaacacatcacttagggcttcgagagcgcgccagctgatactggcagtttggtcagatcgtggtctctgactattatctgtattgtctccatctagttgatgagggtcttaaaacaaaacacactgaacagggca

SEQ ID NO: 727716 - DNA, 420 bp, Homo sapiens
cggcacgagctcgtgccgaattcggcacgaggaacacttttacactgttggtgggactgtaaactagttcagtcattgtggaagtcagtgtggcgattcctcagggatctagaactagaaataccatttgacccagccatcccattactgggtatatacccaaaggactataaatcatgctgctataaagacacatgcacacgtatgtttactgcggcattattcacaatagcaaagacttggaaccaaccgaaatgtccaacaatgatagactggattaagaaaatgtggcacatatacaccatggaatattatgcagccataaaaaatgatgagttcatgtccttcatagggacatggatgaaattggaaatcatcattctcagtaaactcttgcaagaacaacatggacacaggaag

SEQ ID NO: 727717 - DNA, 127 bp, Homo sapiens
catcagtacacaaggagaataatagatggggtttattaaagcgagcaaagtctgcattttacctggtgcgcctgagtggggtctttaagagtaatggggggtctcccatgttttctatgaaccatgg

SEQ ID NO: 727718 - DNA, 691 bp, Homo sapiens
ggagcagctggggagtgctcttgccgagatggaccgacagctcagtgaggctggcagacaccccgtgtgctctgccagtcctgcatgagcccggcgacgaagagagtgtgatgctggatcttgccaagcgcagtcgcagtggtaaattccgcctcgtgaccaagtttaaaaaggagaaaaacaacaagaacaaagaagctcacatgtatgcctgggagccccggttcacctctgggtggacagaggaggttgctgcctggctggagtcacctcagtctctgtgagtataagtgacatcttcacactggtacgactatccggtggctctgagctcctgcacctggagcggagggacctcatggaccttggtgcgtgtaccaaggtggtgccacatgtaagaggatcctgtgtgcgcatcaaggacgcttgagccggcagcgtccctcgtgcgtcgaggcctagcctcatgtcctcttcaagctctgtggctctccactatccgccgtcacgcctgagtgccttagccatcctgccctctcagtcgctgtggcactctgcagtcctcctgcacactgaggccctgggctagatgctgtcagcccgtcccccttctcattggtgctacttcctctgtcagctacagaaagcctccgtgacaaccgtccagcagagctctggggtctcgaacata

SEQ ID NO: 727719 - DNA, 605 bp, Homo sapiens
tggtcactgcaacctctgcctcccagttcaagggatctcctgtctcagcctcccaagtggctgggacacaggcatgtgcaccacgcctggctaactttttgtatttttagtagagatggggttcactatgttggccaggctggtctcaaactcctgacctcaggtgatccacccaccttggcctcccaaagtgctgggattatgggctgagccactgcactcagcctattattagtttttgagatggagtctcgctctgttgaccaggctggagtgcagtggtgtgatcttggctcactgcaaactccacctctcaggttcaagtgattctcctgcctcagcctcccgagtagctgggattataggcgtgaaccaccatgtccagaagatttttgtgtttttagtagagatggcgtttcgccatgttggccatgttgatctcaaactcctgacctcaggtcatctgcttgcttcagcttcccaaagtgctgggattataggtgtgagccaccgcacctggccccatgtgtataattcttattaccctctctgttggctctgtgtcataaggggtataacatttaaagctagaggggtctatgtgc

SEQ ID NO: 727720 - DNA, 933 bp, Homo sapiens
agagtggaactagagtaaagttggtacgagttcagtggaggagaccggaagtggagtggaggaggcagggggtaggggccccggaccaggtgcctcgcatggcaggcgtctgaagagctggggctcctgggaagacacgcggagggtcctagctgccgttccttaggcgtggtgaggcttgccggggtctcctgttccaactccacctagaagccctgaccaagaagagccaaccagacttcctgagccgccttcgaaggatgtcgttcccatgcatccctggggcgaggagctagccccgctcatgagtcccctcggatcttgctctctgccctatccggagcccatgctatggtttagagcctggcccagctactccagacttctagtgctttggtggcccagcggctggaacagctggtccaagagcagctgaaatctccgcccagtccagaatgacatgggtcccccatcgacagagaaggaagccatactgcggaggcctggtggcccctgctggaggaggaggcagaagtcattaaccacgagagctggcctcggaccccgtcctgagcagcaagctggtgccgcctgtactccgacatctttcgcccgcctggtggagctgtcctgtagccgggatgacagctctcgaccatgtcgaggcatggccctggggccctcgctccttccccggagcccctgtgccgctggtcctatgccatggagctgagccgtgtgcgtggccggggctggggggcaccctggccaggactcagccgtggatgaactgtgtcgcagcttcacgccctggatccatggcccacctggggggctggggagggcatcttggctatgttccacctgtgaacatgtaattgccccattggactgagctctttctcagacgctggtaccatacatgcacctcag

SEQ ID NO: 727721 - DNA, 673 bp, Homo sapiens
tccctttgtgcttagttaggaaggcagtaggatgtggcctgcatgtactgtatatacagattattggtcatgctgggattcccaaccctcgaattctgctgtgaaactttcattcccttcagattgggcttgacaaaggcaggaggtacaaacagaagggctggtattgtcctcacacgtggctctgctgtcgctctcagttcctcgataggctcagagcagaggtggaaaaacagcattgtacggattttcagttacttaattcaaacacctcaaatgtcgaggtgcttttaactcttttacacctttcatacactagccttggcctcttccctcagccttaaggaaaccatctgccaaaaattactgactcctcgcatgatggcacgccatagtgccatagctactaaaactcagtgcaccttgaccattatcttagatggggagcctcgggaaagaggtacgaggagctcacgttaccattcacttgttttcacacgaaagaagtgtggggattctccactgaaacggtctaggaacatctagaagtactccttgcaggcacagcaaactaagactcttcacccatatgcttcgcgtaaggactccgaggactccaagcttacacagtccctatggcaacagatgggctctcaacaaccgaactagatct

SEQ ID NO: 727722 - DNA, 436 bp, Homo sapiens
  misc_feature (322)..(322): n is a, c, g, or t
taaactcggaaacacaaggggggaaatatattcttccccagggattataaacaatcttttcctttttttaaagtccttggggcttctagagctcataggaaaagggactggattggaattgggagccagagttaactggggtgggttatctatccatcagtttccggactggtcaagagaatactttaaagagaaaatagggtttttaaatcctaaaaatttttcttccactaaagataaccaagggtgcttacttatttgtaaacccatctatttaaaggcaagggggggtggaggtcagtttacatagcagaaaggtatncattatcctctaaagatgggtccgcgaaaacttccatgggtttagaatttcaaaatttcacctggtacaggggccagcccctaaagcgggaaacatttatatgggttctctgga

SEQ ID NO: 727723 - DNA, 219 bp, Homo sapiens
cagcccttgcttgcaccaggttggttttagaacatgcagaatgtggagcatgttccgctgtccttggcagaccatgcggctggtaaagatgttttcatttttgcggctagaaaaatgtgtacactggggacgcactccggatttgcatagtgaccaaaaaggctcagggaggaaatgtttcctaaggaaagaatgttttgtgtgtttttttccaccatc

SEQ ID NO: 727724 - DNA, 394 bp, Homo sapiens
ccagttgtgtgccttgacctttctcgcccctttctgggtgtgttcgcacatcctgtgtgtgcacagatgtccctccactggatcccctttacacgtgacccgtggggcagccagtcctcccagggactacataacaggcacctttgacagagcatgggagaaggtggataaaaggatgctgctcagtgcttttctcttccactttcctgccactccccactaccctcggagagaggtggtgggatgggagtagacccctttcaaatcctgtgtggatttgaagagccaacggcttggtctacctcaaaagcaccaccaccaggggccatgtttttatgctgaaagtgaaagctgccaaacctagatttggctgtgcccaaacatcttttgtttt

SEQ ID NO: 727725 - DNA, 188 bp, Homo sapiens
agtgctactccacaaacagagtgctactcccaaagtactgggatgacaggcacctgcaccatggctggctaattatttgtatttttaggtagagacaggttttcaccattgttggcaggctagtctcaaactcctgggctcaggcgatccaaccaacccgggctcccaaagtggtgggattaaagggt

SEQ ID NO: 727726 - DNA, 175 bp, Homo sapiens
tgtataaaaagggaaaaagtcagagactgattaactggagtgagaaaggcaagtaacaatttagttaaacaacctgctggcccaaggtcagtatgatatcataccttattaccagaatagttaagttcctgtaaagtccttaaccactctcgctcccattactagttcatcacta

SEQ ID NO: 727727 - DNA, 186 bp, Homo sapiens
  misc_feature (8)..(8): n is a, c, g, or t
  misc_feature (21)..(21): n is a, c, g, or t
  misc_feature (34)..(34): n is a, c, g, or t
  misc_feature (176)..(176): n is a, c, g, or t
tttgtacntcaaatattgaanttttattcaaaantctttataactttattacaatatagattttgtgttggatagttttgcccactgtaggctaatgtaagtgttctgagcatgtttaaggcaggctaggctaagctatgatgtttggtaggttaggtatattaaatacatttttnacttatgatc

SEQ ID NO: 727728 - DNA, 172 bp, Homo sapiens
gcgctcgggttataccgaagtgtgagcaggacataccggacacacggattgcgaaatgaacagaggaggggggcagaaccactctggttggggtagacgcaaggtcctgctgagctcttaaagaaagggcactgtatgcccggtgcggcggctcgcacctgtaatcccagca

SEQ ID NO: 727729 - DNA, 421 bp, Homo sapiens
  misc_feature (343)..(343): n is a, c, g, or t
gagactgcagaggtgggactgggcagtggggagacagcagctgtggccttgaggttgaatgtgccgttcggtggtggcggcggctgggcggagggacatcagagctgttcttgtgtctggtaccttcccctcagcccttccaggggcattggtgacaaagggcttactctgttaagcccagagacctcgaggctgaccccagggtagtcctgcccacccctccactccccatcaccatttccgcccacctggtcaccatcaccgtaccgcagtttccgtaacgagcaggcgcccctcggccccatcccaatgagtagcgtggacatccgcgatttgcacggcngagtgtgaccttgggcttctttaccaccccagatacgacgactaccaccacgagcgctggtagagggtccgtgcgcca

SEQ ID NO: 727730 - DNA, 421 bp, Homo sapiens
gggctcagaagagccagaccacgcaaaccaggagcacccttcgtagagatggaaactcctgccgtgagcagtcttgtctttcctatcagtccagcaactagcttaaaagtgacaggccacagcaagtgtctggcacagcacttgagatgcctgaatcccacactggagtcctggctcctccacttccaatcctgcttcctgcgactgtgctccccgggaggcagcaggaggtggcccaagtagttgggtccctgtcacctacatggaagacctggatggagttcctagctcctggctttgtcctggttcaaccccagttgttgtgagcatctggggaatgaaccagcagaggggagctctctgtcacctctctccctcaaattaaaattaaatgaattggctggcactgcagctcacttgg

SEQ ID NO: 727731 - DNA, 416 bp, Homo sapiens
  misc_feature (267)..(267): n is a, c, g, or t
  misc_feature (284)..(284): n is a, c, g, or t
  misc_feature (289)..(289): n is a, c, g, or t
acagaccagtaccagtccgtggcactggttaggaaccaggccacacagcagggggtgagcggtgggtgagtaagcacagcttcatctgtatttacagctgctccccaaagcttgcattactgcctgagctctacctcccgtcaggtcagcagcagcattagagtctcatgggagtgcgaaccctgttgtgaactgcacatgcgagggatttaggttgtgcactccttatgagaatctaatgcctgatgaatctaatgcctcatgatntgaggttgaatagattngtgcngaaaccatcccccacccccatcccgctaccccgagtccgtgaaaaattgtcttccgtgaaaccggtccctggtaccagaaaggttggggaccactggcttaaaataccaataaatttttgaccctta

SEQ ID NO: 727732 - DNA, 321 bp, Homo sapiens
  misc_feature (207)..(207): n is a, c, g, or t
actataccatggagggggaaaggccccaaaaaaaaatggctgggggttttaaccccaaccagggccttaacaggcttatgctggctgtgcgcgacattatggccaacttccccctcaacgacctggaggccccgcccaaggaccacccttagggggagggggagtgggacttagcgtccccaaaggtgacccaaaaaccgtataatnatgttccccatttttttgttggtcggagtcggccagttgccttaagtagggaaactgagtgtgtcgctccctggtcccctgtttttcctataaatgtaaatgggtcccccccca

SEQ ID NO: 727733 - DNA, 187 bp, Homo sapiens
cattaattgcagttctattgttattgacaatgttccagtgcatcaattgctcagcagtctgatccaattcacatttggggaaggaatagtctttgctattaagtctttgagtatttgttctagatctgacagagggctcctcttgagctaccgtttccctgaattctctctgcatgaactagtatgg

SEQ ID NO: 727734 - DNA, 402 bp, Homo sapiens
  misc_feature (83)..(83): n is a, c, g, or t
  misc_feature (109)..(109): n is a, c, g, or t
cagaaaggattgggacaacttgaaagtggggtgggggcttcccagcttattaggttagatttaaaaattctttctgtttgacnaattggttgagtttatataaagaccntgggatcaacagaaaggaatatcttgggcttaagataaagaattgtgggactgggccatagtgctcaggcctataatcacagaactttgggaggccgaagcaggcggatcacgaggtcaggagatcgagactatcctgactaacacggtgaaaccctgtctgtactaaaaatacaaaaaattagctgggcgtggtggcaggcacctgtagtccctgctactcgggaggctgaggcaggagaatggcgtgaacccaggaagcggagcttgcagtgagcggagatcacaccaatg

SEQ ID NO: 727735 - DNA, 123 bp, Homo sapiens
ttgcgtgcatgttgctctaaggatccccgcgctagcggattaagtgaacggatcaaataaaattatgagacagtttgctaatgacatgaatgtagcacttgcgttcacttaatgccgctagcg

SEQ ID NO: 727736 - DNA, 409 bp, Homo sapiens
taaaattagtttattatgacaaaattgcctacagatggacataaaactgtcttgaggaagggcacctggtttggactgaatcgtgtccccccaaaatcaaatgttgaagcctaatctctaatatgatggtatttggagatggggcctttgggagataactaggtttagatgaggtcaagagtgtggggccttcctgattagtaccctgaaaagagaaaacaccagagagcttgccctctctccctcttaccccacaggcacacaaagaggtcatgtgagtacacagtgagataacaaccacctatgagaaaacagaagaggcttcagagtgaaatctactttgctggtactgtaatcttggacattattctctagaactgtgagataataaatttatcttatttaagcc

SEQ ID NO: 727737 - DNA, 117 bp, Homo sapiens
ccgctagcgggcattaagtacggcgctagcggattaagtgaacggatcaaataaaattatgagacagtttgctaatgacatgaatgtagcacttgcgttcacttaatgccgctagcg

SEQ ID NO: 727738 - DNA, 169 bp, Homo sapiens
accattggatacataggtatggtctgagctatgatatcacatggcttcctcagggtttatcgtgtgagcaccacatatatttaccagtaggaatagacgtagacacacgagcatatttcacctccgactcacataatcatcgctatccccaccggcgtcagtatagata

SEQ ID NO: 727739 - DNA, 737 bp, Homo sapiens
  misc_feature (142)..(142): n is a, c, g, or t
  misc_feature (150)..(150): n is a, c, g, or t
  misc_feature (188)..(188): n is a, c, g, or t
  misc_feature (244)..(244): n is a, c, g, or t
  misc_feature (249)..(249): n is a, c, g, or t
  misc_feature (293)..(293): n is a, c, g, or t
  misc_feature (332)..(332): n is a, c, g, or t
  misc_feature (405)..(405): n is a, c, g, or t
  misc_feature (457)..(457): n is a, c, g, or t
agagacagagtctcactatgttgcccaggctggtcttgaactcctgggttcaagtgatcctcccacctctatctcccaaagtggttcagattacaggcgtgagccactgtgcctagcccctagtcattttctctacatatanacacttanccacaataggattctactggatccactgtcttataacntactttttctatttaatattatactggtgacatcttcgtggtattaaatattcttnaacantgccccaccccacccatcactcccacagctgcagtatactcttntgtacctcacttctcaaaaggaggaaaagctcttactcntggcttaaagtgttctctttaataataataccaataatattcactgaaaattaaggtatcaattccaaaggcncggcacataccaatttctcaagaatcagcataagcatactctagaattcaangtcaacatgggaagttcagctccctgtagatgtagttcaatccaagagccacattcatttatcttctggtgttaacaagtgaggaggaaatacagtctgaagcttaaaaaccaagttactgacaataattacggctgcatccaattgtcacacacaatgcatgaagcacaaaaggaatgagagcaaggaggagaatacaaagtgaaatgattcagtcgtgctttttctttctcttttgaaatgaggtctcattctgttgcccagactcgagtgcggtggt

SEQ ID NO: 727740 - DNA, 468 bp, Homo sapiens
atgtaacctgtgtttaactaggttacccaagaaacaaagaaacccagacccaggctggggagcacagccacccccccttctcagctccaaaccaccttgtcacagatggcggtttcttcagctcccagctcctcaaacaaagcccatacattcctgccagattcagcttgcaatctttcattctgtccaagaagcaaatctgtttaccatattgaaaagctagaggagttgcaaaaaaaaaagtggagagaaaaagctgttttatgaattataaaaggtgagcttgaatttttttaccaggggattcatttctgtatctccagaagggaaaacaaaagatagtcgggatacgtgtgtgtggaccatttcaatttggaaaagttacagaaggagtttcgtaggtgaaccttttcctctggatcttagaggagggaaaattgggggcttatttttcaagaaaaagagtag

SEQ ID NO: 727741 - DNA, 1037 bp, Homo sapiens
  misc_feature (1037)..(1037): n is a, c, g, or t
ggctctgcgcaagcgcgaccgaccgagcagctccgaaggagtccgaccgggaaacaaacattcacccagggtcaatgtcacgacttgggtctgcccgaggagccagtcagaaacgagtttacgtagatgagtgctaaggcccgcgttaagaaagtatgataggttggaggcgaagatattctcagctttgccatataatcaaatagctccggtcgcgtttgtgaccatctggtgtgctaacagtaacggagaaactgccatttgatatgtgcaccgatccgggtacagacgaagcttaagaatgggacccctgcgagaagtgtgtcttccctggtaggtaagacgtggagactactaagacatggcatgattgcaaggccagcgagctctcctgcggaagacccaggagagaacgctgtgcgttctccgttccctcacacaacgatgggagacgtatcgtcatggcatgcgctgtggttgaccaatggtgcttttaattcggcattgcacagggatagcatttggattaaacttccaattacgaaggggttttacatatgacccaggaagcttccacggccccagcccgacatccctgcctgaaagttcacaggatgttattccagtggtgccatcctggaccctattaatccctgcaatccacaaagggttcccatgaaccaaggcatcttacgttccacaacagtcactgggtcaacgcgttctgacacttaacatcactactcttttagaaggtaacacacaagacctcttgaaaggaccgggtggtccctttcatccaagactcacagggcgaacctggagcgtgccatcacctttggccaagttgttaggcgtgcgcccttatcaactcattctgtgggccacaccacagcaccgagacccttttggacgggttccagatttagtccttcaatcggatcgtattcaagccatcctctctgacaagaagtctctccctggacagcgtccatccacagcgcgcgtaaaagccaggttctagattctactacgan

SEQ ID NO: 727742 - DNA, 255 bp, Homo sapiens
gggctaacgaacctagatcaggacggcggtgtatgaatactcccccttaaggttacaagtaactacgttaacgtgactactagaaatagactcaacagactacttaagacggacaacatcctcaggccaaaaagcatcaatgtaggtttgacactagatataatgctaatcagcaaaaaatgacatgtgctgggcatctgaatttttttttttttttttttttttccccaccaaagggtcaccccggggtcccca

SEQ ID NO: 727743 - DNA, 134 bp, Homo sapiens
cggtgtctagaggatccggtttcatccccttcgtacggttagcagtgattttgcaatgctgcttataacacatcccaagtgcaggccgcagtggtccacgtacatccagccccatcaagtagacttatggttga

SEQ ID NO: 727744 - DNA, 105 bp, Homo sapiens
actcaggaggctgaaacaagaggattgtttgagcccaggagtttgaggccagcctgagaaacataagagagacctcatttcaaaagacaaaacaactgtcccccc

SEQ ID NO: 727745 - DNA, 486 bp, Homo sapiens
ttaattttaggaacttaaaaggagtctagaaaatccagcagaaaggaaaatggaaggtcagaattcccagagtcctcaatgtttcaaaacatgctcagagcaaaatggttatgttctcacattggcaaatgcacaaccaggtctgcaatatggtaatccttatgcatctcaggaaacaagaggttattacagtatttttggtttgggattagctgcatctggagatttttttatggtttatattttcatggattagcaaactgctgggataatcaaccctaatacaaacattaattaatttggaaaattggcaggtttaaatattaaacactgggaactgggtttatcttagaagtgatgcacccatgagaagagtacctttattttacttaatggcataaagtgtcacaaaattaaaaaatacccccggggttaaaaataaaaacattctatttttttcacaatgccaaaatggggcctataaaa

SEQ ID NO: 727746 - DNA, 144 bp, Homo sapiens
cgacactcttggttgataaaccacaaagatgtgcaggaagtagttcctataaaaatgggaatggtggttgcctattggaggaggaggtggcagtgggctgaggtcgtgccattgccttcccagcgtgggcaaccaagagtgtcg

SEQ ID NO: 727747 - DNA, 106 bp, Homo sapiens
aacttccttttaaaaaaaattaaggggaagggggggaatttccctttttatgttggggggggccaatgtttatcaaaagggccaaataaagttaatgatgattcca

SEQ ID NO: 727748 - DNA, 100 bp, Homo sapiens
atctcatatagttcggccccgaagttacaaatggagataagtcgatacctaaacagaatgtgcttaacagaatgtgaccaattttatcactcccaaggac

SEQ ID NO: 727749 - DNA, 372 bp, Homo sapiens
  misc_feature (61)..(61): n is a, c, g, or t
  misc_feature (170)..(170): n is a, c, g, or t
  misc_feature (201)..(201): n is a, c, g, or t
  misc_feature (207)..(207): n is a, c, g, or t
  misc_feature (359)..(359): n is a, c, g, or t
cccccctatcctcctacaaaaaattttaaacattagcctgggccatggtggtatgtgcctnacagctcctagcctacctcaggaggctgaggcagcaggatcacttgagtcccaagagttcaaggtagcagtaagctacaatcacacccactgcatgcccagactgggtnacagagggagacttcatctcttttaaacatnataatnataattacagactcaggaaatgcagtgaaagaaaaatacaggttggccaggtgaggtggctgatgcctgtaatcccagcactttgggaggccaagatgggaagattgctttgagaccagaagtttgagaccagcctgggccacatagtaagntcctgtttctacc

SEQ ID NO: 727750 - DNA, 707 bp, Homo sapiens
  misc_feature (1)..(1): n is a, c, g, or t
naaatgcgcccaagtggccatttgcgtacttcgcctaagggttcccaaatatttctaagaaaaaaggggccaccatattgtggacctcttcctgaaccaaaaggatatgcttggggctttaatcatatcaacggttggtccttgaacaagtttaggtgtgttgcatgttaaagtcacaagttatttacaaatctcccctaatactgcacaaatatctttcgtaacaagtatcgcatgctgttcagctgtgtaagttgatgaacaatatgttcgcaaagagtttaatattaaaacattctcgttccgtgcagatatatgaacgctttctgaaaagtccgtcaaatcaaatatcttttgctcttgttgacgtgttttcacaagcctatgcagcataagagccagttaaagctgttatggatgatttcgcagcttttgtacacaagtgctgctagtctgcggatatgatgacatgctttgcagaggagggtaaatacctagttactgcaagtctagctaccttagtcttataacatcgcgtttataagcatctatgcccaccatgtgaataagagaaagagtttgtagatcacacgctgattcatgtgtttatgatgttagttggtgcacaaccaacaccctgttttttatacatcgatttcttcaatcatttcgcggcgtttctctgggtgccattaataaaagattga

SEQ ID NO: 727751 - DNA, 286 bp, Homo sapiens
ggacggctcttacagctctcttgtactcactgatgtccttcttatgcttgcgtcaaacactccagccactaaaatggttgaccatatcggttgtcaaaatcttctcccaccaagtgggtgtctccaagctgtcgacttgcacatcaaagcttcccatcctcaatagcgaggattgaccacatccaacaagtgcccactcccaggtcaaagatgagcacgtttctttctgctcccaactttttgtctcacgccgtcagctatagcaaccgggattgaaagacggcca

SEQ ID NO: 727752 - DNA, 914 bp, Homo sapiens
gagatcacaggactggagagtgagatggagtgagatggagtcctggagagaaaaagaagagaggtgaacttaatgcttgtcatatggtggccagaatggtattcgtggcgcagggcatggatgctgctgcgtgctggctcttccgtgctgctgctcttcctgctgcccaccctggggttctgcagccccagtgccaagtacttcttcaatgatggccttctacgatggctggatcctcttcctggctgtgctcgcgatccctgtgtgtgccgtgcgaggacgcaacgtcgagaaccatgaagcatcttgcgtctaatgctggatccacatctaaactacctgtagcgggtatccgagtggaggtgctgaggggctctgccaattccctccctcgctagcgcctatgttgttgtctccaagcactcatgagctctctcgaatctgcttgtggtatgatggcggtactgccatggtcgtgtgtggccattgccaatcgcgagctactgtggggtggttctgccgggactggcctgttgtgctggcgaggagtcatgttcatcgaccggaagcgtaacgggggatgccagtcagagtcatgtctgaggtcgtccagatccgtgagtaaaccaggacgtgagggtctgcggtgtgaacctgaggggaagggaagaagaccaacaagcgtgatccatgctgggctttcacatcgtggcgcacttaccattcttcggcagtgcagggccccagggtgcccattcgttccccaatagttcatgttctccttatcaaggagtttttactgtcaatgcaaagacgcggttcacttcacctcggggacaatgttcaggtgggggtgcttgacctcaggtgccacggaagggtggacccaggatgagtccatttgggtgaaaagc

SEQ ID NO: 727753 - DNA, 378 bp, Homo sapiens
  misc_feature (74)..(74): n is a, c, g, or t
  misc_feature (77)..(79): n is a, c, g, or t
  misc_feature (81)..(82): n is a, c, g, or t
  misc_feature (86)..(86): n is a, c, g, or t
  misc_feature (88)..(88): n is a, c, g, or t
  misc_feature (95)..(95): n is a, c, g, or t
  misc_feature (112)..(112): n is a, c, g, or t
  misc_feature (119)..(119): n is a, c, g, or t
  misc_feature (121)..(122): n is a, c, g, or t
  misc_feature (167)..(167): n is a, c, g, or t
  misc_feature (171)..(171): n is a, c, g, or t
  misc_feature (218)..(218): n is a, c, g, or t
  misc_feature (352)..(352): n is a, c, g, or t
  misc_feature (354)..(354): n is a, c, g, or t
ggggaacaagcgtagcatttacgaatggcccagcgtcctcttaatcatggccacagctcccagccagaatcacngcnnnanngaanancccctgntgacaagaactataatnggatggntnntaaactaaaactaaatatttcttctgttaagttacaggaaatgtntctngcatagctggcaagaaacgtgtaacatatcatataactgccctttanggcagactcaggctcatagacacctagctagggaaacagcaaaagcaaggttttctccctgcactcccctcagtcacaccccttgtgctgggtactctgaaccactatagagagtggctcccactacttcattngncactcctttaaaatagactgtttg

SEQ ID NO: 727754 - DNA, 477 bp, Homo sapiens
  misc_feature (5)..(5): n is a, c, g, or t
tttanagcagctcaaatttctagtgtcttctttgacatttctgtagaactttatccactcagacttttctttcttccttccttccttaacacatttcttgctgttttttccagctaggccattattacttggctttcaagattttaaatgattaaaaggacacacaattagaatttgatgtgaggggaattagtattttgggaaaaatacctatttaatgagatgagaggaactgtttctccactagagagctgagcagggcagcagtagcagtaagctcctgaggagacagaacaggctcttaactgacctatgggggtggaatacagatgcacagctccaggtattgtgtgccctctctctctctgatagatatggctgttggctgtaacattccacagtctgtgtaatgaacgtttatttggtattgaatacaaaatacatttttgaactatgcattacttgtaaaaaaaaaaa

SEQ ID NO: 727755 - DNA, 213 bp, Homo sapiens
tgaggttccgtatgacatgcgctacgcggctaagtcagttcgcgcgttacggcgccgcctccgggggttggtccccggttcgttatggccgtcgccggaacaggtgcgggagctggaggccgaagaacgcgattggtacccggagcctggcagaccatgcagtgagtcgctgcgtggtgaagcagcttggccagaagagcagaacgcgttcgg

SEQ ID NO: 727756 - DNA, 875 bp, Homo sapiens
gaatttgtgtggccacgggtgcaactgttgtgttcagggggggcccccacagtttgtatggggggcacaaaagaggggttccagtttcggggaaaaatcgggttttttgttggcccacgacggtaatgctgtccctaagtgggtatttcatcggaatcgtatagcgccatcggtggttttaaggtgcaaaacaaccccagtattaccatggcgggcatcatcccaccaagactactggctggccgcccaagttgttgctgtgccattttttgtccgccgcgccaaagcatgcgctgttgcgtggtccaaacgtggttagattgttcacggattaccaccatcagggccgcttacgttgttttatgaaggtcccgcgaaagtacggcgcaagcacgaggatttctgttgagtgaccaaacggcactaattatgcaacgattgtaggagaagacaccacccgtagagtgtgtcggtgcgaaaactgaacacaagccaagcgctccggcggttgtgtgtatacgactcgccccgcccgttatgcaacgacgcgctggtcaagccttgtgtctttgtctccaaagagcgggggacacaagatccccttgtatcacaaaggaagagagagcattttattacaaaatataaggagggaaaacaaaaatgtgggtctcggccttatcataatggagtatgtagaataattgtctactactgtccacctatgcgagtgtaaaggaggatcacagcaacccccgcagtcaacgcggcacgcccctcttcctcaggcagtgattagctgtttcccaccaacgcacccttcgcccaccggacttgggtcccctctcgggctcccaaaaagcccaaaaccccacata

SEQ ID NO: 727757 - DNA, 183 bp, Homo sapiens
cctctagaatgctctaccaggcccactctggaacctacagaactcaaccattttcctccctgaatcccccctggggaacttaatcacagccatgaaggtttaaggcaccagtgacggcctgcaggcatgctcccccaggtcagtgggcagcaggcaagggatcgtctataggtctagctgcag

SEQ ID NO: 727758 - DNA, 222 bp, Homo sapiens
gttccccccccccctttttttttttgggagggcggcccagtttggccccctacaaccacagactggtaaataggaggggcctttcccggggaaaacaaggaaaaggttcccttgacccccccaaaaacccccccaatttgggggggggccttccctttggggaaaaataaaaccaacccgggggttttttaaaattttaaaaaaaaagggaattttttccga

SEQ ID NO: 727759 - DNA, 286 bp, Homo sapiens
tcgacctggagtgcaatggccgatctcggctcactgtaacctcctcctcctgagttcaagtgattctcctgcctcagcctcccaagtagctgggattacaggctcctgccaccacaccggtcagttttgtatttttaatagagatggggtttcaccacgctggccaggctggtctcgatctcctgacctcaggtgatccacccaccccggcctccccaagtgctgggattacaggcatgagccacccatcttcctttcagtgccgtgggtcgacgcggccgcaagt

SEQ ID NO: 727760 - DNA, 380 bp, Homo sapiens
tgccattctttatactacttatcaggcttttcgaaaaagcaggggtgggggcaaggtgcggtagctcacacctgtaatcccagcactttgggaggctgaggctggtggatcaattgaggtcaggagttcaataccagcctggccaacatagcaaaacaccatctctactgaaaatagaaaaattagctgagcatggtagcgggcgcctgtaatcccagctactcgggaggctaaggcgggagaatcacttgaacccctgaggtggtggttgcagtgagctaagatcacaccagctactcaggaggccaaggcaggagaatcgctggaacccataaagcggtggttgcagtgagctgagatcgcaccactgcactccagcc

SEQ ID NO: 727761 - DNA, 127 bp, Homo sapiens
tagcttctcagattttcaggtcatgaaacaagacaccattaagaagcccaaattctagaatatagtgagacatcctctccataaaataataataataattagccgggcgtgttgggcgataacatca

SEQ ID NO: 727762 - DNA, 141 bp, Homo sapiens
ggctagctggctgctcgtgttgtcaggtccccgaggcatctggctagtgtgtgacgttctggcggtccgttctgtccgcttgcgctccaggtctacactgagtggctcctgggggaagaagccctgtaccaggcatgcgag

SEQ ID NO: 727763 - DNA, 861 bp, Homo sapiens
aaggattttatttctccttcacttatgaagcttagttggctggatatgaaattctaggttgaaaattctttaagaatgttgaatatggcccccactctcttctggcttgtagagtttctgccgagagatcagctgttagtctgatgggcttccctttgtgggtaacctgacctttctctctggctgcccttaacattttttccttcatttcaacttggtgaatctgacaattatgtgtctggagtgctcttctcgaggagtatctttcagaaagttaacaaggatacccaggaatgaactcagctccacaccaagcagacgtaatagacatctacagaactctcctccccaaatcaacagaatatacattcttttcagcagcacaccacacctactccaaaactgaccacataggtggaagtaaagctctcctcagcaaatgtaaaagaacagaaattataacaaactgtctctcagaccacagtgcaatcaaactagaactcaggattaagaaactcactcaaaaccatgcaatacatggaaactgaaaactgttctgaatgactactgggtacataaacgaaatggaaggcgaaattaagatgttctttgaaacaatggaaacaaagaacaataccagatctctgggacacattcaagcaggtgtagaggggaattttagactaaatgcacagagaaagcggaagatcaaatgaacctagtacataagatgaagagagaaatcaagtaggagctgatattattggcgaagtgggtggaaaaactaatagatcggggttgggcacatgggggggcgaaaaaaaaaagtggggcataaaggggcgaaaagaaggaggttag

SEQ ID NO: 727764 - DNA, 340 bp, Homo sapiens
ggagtgcaactatcagtcttacatgtcacccctttagtcttccctgaccaccctatcaaaagtgggtttctggccaggtacggtggctcatacctgtaatcccagcactttgggaggccgaggcaggtggatcagttggggtcaggagttcgagaccagcctggccaacatggtgaaaccccgtctctactaaaaatactaaaattagctgggtgtggtaatcccagctactcggggggctgaggaaggagaatcacttgaacccaggaggtggagattgcagtgagccaagatcgcaccactgcactccagcctgtgtgatagagtgagactctgtctc

SEQ ID NO: 727765 - DNA, 181 bp, Homo sapiens
ctacaagtcatacgaggcggcagcaggagcgaccaactgatcgcacacatgcttggttgggatatggagtgaacacaattatgtaccaaatttaacttggcaacctttctatggcctgtcccatgtgcatcttatttaaaatttcccccatggaattcacctcctgatttccaccttgcca

SEQ ID NO: 727766 - DNA, 563 bp, Homo sapiens
tatggaactgttgtgaatacacttagatctttgctgtactgagaatcatatatttcccatagtgatgctggtatgtactcgaatgtagctactagtttacacttccagtccttatcagccaccacttatagatatatatattaattcccaggacacacaaactctaacttatgttcaccacattccatactataacagtcgaactgacacccctgcgttctgctttccagcttccactctccagtcgtgatgtgctactaccaccctgcgcggtattgctgttcaagttgaccaaaaaaagaaaaaaaaaattctacagtaaaaatcagtcctaaatgtagaagggaagatcatttaataacaaatcacaaaccactcttcatctctatttgctctgcattttcagaaaccatagaactttatattacaagttaatcaatccacatcacatctctggagagaggatcagcataaaaaaacaaacaaaatggaaaacaggagccatgtgtcagaattaggctagtgtcacaggatcttctatggaggtgacgaagcctcttcat

SEQ ID NO: 727767 - DNA, 707 bp, Homo sapiens
  misc_feature (18)..(19): n is a, c, g, or t
  misc_feature (31)..(31): n is a, c, g, or t
  misc_feature (327)..(327): n is a, c, g, or t
cccgccaatgaggagagnngggacggggggnggaggaggaacggggcagactccaacaaaacattacctctatgcccagttagtaatattagggttggagcaattcaagcactgaacggaggtgagggacctctccgcccaaccaaacgcagaaccaacgaccgacccccccacccccccactccccccctcccacaactccacccctcccaccagacaacccgcgccgcccccacgccggggacaagggaatgtatactataccccagcccacgcgcaacgcaagccgaaaaagacgcgtggtgagaagagtgggggtgctccttntcgccattttctcccgcttttctataatgttttattatgttgggtgtagtcgacgcgcattgcttaagagacgatgacgtctcgagccgcgccgcggagaacccgaaagatacccttcatatccaagtgaactagttagtcgactctctgatgaggtctcgtgcctgtcaatcaaccaaaccactcctcgaaccaaactcgaccccacacaaccacccaccctgcaccaaaaatctccagaggataattgttgaatcagactctgcgcattaaaacagtatcaataacacaagaatggcgtcaactctccaagaaccgccgaattaccatcccgacaccacgcgacagtccccacccccaattctactattctagatcca

SEQ ID NO: 727768 - DNA, 229 bp, Homo sapiens
accaaaaaaaaaaaaaaggtccaattagctgggttgggggactggcccttgtggccccagttgttgggggggctgagggggaaaaattgttgggccctgagagctggggtttatggggagaacctgaaatgccccactgacttgcaccctgagggacagaccgagcccttgtctaaagaaagaagtttgggaagggtttttaaaagactctattttaaaacaaggcggg

SEQ ID NO: 727769 - DNA, 282 bp, Homo sapiens
ggacattggaacactatactctattattgcggtcgtgcctagcagtctcgcgcatgtctcctcagcgcgcacagtctctctcagagagctcttctctctttatatgcgcagacccgcagactgggagacccagacccagggcaaactctcttcttaggtatatcgcacccatcatatctcacacatcgtgtatgtcgtatcatcagacccccatagagcatatatgctaaattaatgctctctttcatcagtaattaccccatatcataaaatgcgggcggg

SEQ ID NO: 727770 - DNA, 378 bp, Homo sapiens
tggtcggcttgggtttggctattaggagacaggtctcacggtggccaaggcgggagtgtagaaatgtctactttattgggcatctctctcagtaggtgagcatgaattttttttatatgcttatttacatttaaaatttcccagggcctatgatttccttggtacacatatctgtggagatctggaggtatttatttctacacatctgaaaaaaatagtacgggtatggacccttttatcatattggtcattctcagactactatcttctataattttattttccaataagaaaatattttaacatttggcatatttaggtggacaaaccttttccttggtgatttcttcgggtttaaaaaagaaagttatcattcct

SEQ ID NO: 727771 - DNA, 187 bp, Homo sapiens
gtaagactgtgctagtgagtaaactgcaggagagtacttgagatgaggcaggagaggaaggccaggaccccggatcaggtttgaacgggtcttgagccatcaggtgaaggcgttagactgatttgaggcggactggtcctttttgtatagtatgtgagagaagtggggacaaggtggggagtgggca

SEQ ID NO: 727772 - DNA, 263 bp, Homo sapiens
cgtttttacctgatatttgaggtattccccctttgatccctttaatggccactgttgtctgcatgtaactgctcacctgccatcagaatgcgatttcccactgtctctcacttctttgtatctagaagatgtatctagatgtatttagaagtgtctgtacttcacaagctggaggcagggatgagggcctctaatactttagacaatgctaggtaccagacggtttaaccagttttactaactgggaatgcgggctgtatagt

SEQ ID NO: 727773 - DNA, 196 bp, Homo sapiens
gaaggaaggtagacgatttacacatttgtttcacagaaaaatgcccaggcaagtctacataaattatgctgagatgtcttcaacttaaagcttttttttgagacagaatctcactcggtcactcaagctgaagtagtgcagtggcataatcacagctcactgcagcctcaacttcccaggcacaggcaatcaagct

SEQ ID NO: 727774 - DNA, 496 bp, Homo sapiens
tatcgtcgacccacgccgttcggcatccatgcccaccggatgggcatggtagcagttcccgagcgcgccatcacctactcagacagtcagcgagcccctagacacgccttcaacgccctaatgggctgagcacatacactacggcgcgggcaacatgaatgcctacgagcgtgcatcaggcatagctgataggggcccggggactgtgaacggagcgtgcaccccccgagcgcgctggccccctgtggccaggttataacaactcccagtccatgggtccccctggtggccagccagggaggctccctagccggccagacatagcagctgcagaagctcaacaagcagtatttcaaccatcacccctaaccccacaaacactacatgccggatatgcagccctgctgcaggccacagatgaacgggacaaaaccagcacttaccgagattgcaaccccaagcacagcggacggcagcaagcacccccggagggatc

SEQ ID NO: 727775 - DNA, 107 bp, Homo sapiens
caaaagtccttccaagttacttgctaaacagcatgatgatgaaaacaatgaaaaacaatggcaataaaaagaggagagaatctagctcaacaagatatacatttttt

SEQ ID NO: 727776 - DNA, 462 bp, Homo sapiens
  misc_feature (311)..(311): n is a, c, g, or t
aaacttacgttaagagacacagcatctggtcttacagtcggtttacttttttggttggttggtttttatgttttcctcagacggggttttactctgttgcccaggctggagtgcaggggcatgatcttagctcactgcaaactccacctcccaggctcaagagatcctccagcctcagctggactacaggcactacgggtacgtaccaccagggcgtgccagttttttatttttggtacagatgaagtttacccagtgtagcccaggcgtgtctggaactccgtgactcaaagggatccaaccacccgggnctcccaaagtgctaggattacaaaggtgagccatgacaccggtcccaagtcggtttttaaatcaaatcatttctccaaaaaaatttaactaccggggattactgggacatcctctccctccttatctaccatttgcgtatcaatacttatt

SEQ ID NO: 727777 - DNA, 364 bp, Homo sapiens
tactgtgttgcctggaaatgtatgcactggaaacttccagccagtccactctgattttcagctgcctctaaagaaaggaggcagagctgggcgtagtggctcatgcctgtaatcccagcactttgggaggccgaggcgggtgggtcacaaactcaggagttcgagaccagcctggccaacatggtgaaaccccgtctctactaaaaatacaaaaattagccaggcgtggtggtgggcgcctgtaatcctagctacttagtagagtgaggcaggagaatcacttgaacccgggaggtggaggttgcagtgagccgagatcacaccactgcacttcagcatgggtgatagagtaagactctgtctg

SEQ ID NO: 727778 - DNA, 272 bp, Homo sapiens
gtcacaggatgtggtcttcggcctatatagtggcccacagaggaccgcatgggtctggggaccaaggggtagaggcaggagtggccgcccgagtcaccagctcccagtgacccactgacaaggctgtgcttcctttccctgcaactcttaagctgtgagggctcagaggtcctaaaacccagccacctgggacagagtaaggcactgccccgctcgatggctgtgggtcacccggccggggccactcctgttccagcggaccagcaggcaga

SEQ ID NO: 727779 - DNA, 477 bp, Homo sapiens
  misc_feature (96)..(96): n is a, c, g, or t
agtgcctggcagagaggcacagagtaggcatctcattgatatttgttacttggatgttgaaagaagagaggttggattccattcgctccattcctntcaggttggattccctcctcggtcaccagcagagctgagagcaggagctgggcttgactcagaccttcccctcagcactcacacatccacctgcagctcccaggtgggggccccaccttcccggtcctctcctgcctgctgtctctcctcccatctagagcacattggagaaggtggagtcctccacaagcattcgagccagcccccagagaaggacacatcggagcggaggccagagaggtgaggggccataacactagcacctgcgttgttcaagagcagcccccagggttcaggggtgtttccgtctcctccaccttcagagcagtacctgattccgttccgtaaaaactcttaataaataaagccgtcttccctgaa

SEQ ID NO: 727780 - DNA, 278 bp, Homo sapiens
gtcgacttccactctggttgattccattcctttagattccaatcgaatacattccctcctattccactcggatcgattccattccattccattccattccatgccattccattccattccattccattccatttcgttccattccattctattccgtaccattccattccattccattccattccattccattccactcttgttgattccattcctttccattccgttcggtttgaaggcattccattccattcgatgatgattgcattcggtcgacg

SEQ ID NO: 727781 - DNA, 703 bp, Homo sapiens
tgtgtcagagataacctatagagagagctctagaatactatgttgaactgctctgaagctatcatttaaactataaattactgtggtcaaaattttatataccctggtggcgaattagaatgttctaaaaatatctttaacacgtgaaaacaattggaacaaaatcttaccccatctaaaaatgatagtgtctagttgaatttaagttaagctctttagtatatgaccatatgaaggggtaaagtttaatctttgtgtatttacatgtgaaaatacagaaacgtaagtgattgaatcacatcctacacgaaagttgtggagtgctccaggcgaatatcatgtgaaatacagaggtatttatatcgttctttggcaccaatagttcttgcttcagtaattcaccagtaggttttcattcatcgataatatatcagtttaaggctaaaataaaacactacatttcttagggcttatcattctatatagaaagaggaaacatcctaatgagtattggcgtgcagtgtttgtccacagagattctgaagcaaaaaaatgtgaactaacatctatatttgttatggagctagttaccttgcttaccttagatgctttaaacgtttgagtagatcagccatgatgtgataagcaggttggatgcttactgtgcttaggaggtaggtgtattgtgtctcttgaagaaaga

SEQ ID NO: 727782 - DNA, 258 bp, Homo sapiens
cttggccggctaaattgatagaatcatcttgtgaaaagtttgatattacctatcaccataaggatccaatactctaagaacacctcatatttctacacctaggtaaatattaatattttacaaactttacatatgtacataaagaaacacatgtgaaaatacttatagcacaaaactggaaataactatgtccactgatgggaaaaataataataacggcatgacagacctgctagaaaataacaacagtgtgtttat

SEQ ID NO: 727783 - DNA, 1645 bp, Homo sapiens
  misc_feature (75)..(75): n is a, c, g, or t
cgcgggttcagacctgccgagcgcccgccgccgcgggaggggcttgaggccggggcggggcggggccggggcggngcgtcccctcgtaggctccgggccgcgcattctcagcgctgggagccgccgcccccgcagctgccgccgccgccagggcccggactcggacgcgtggtagcctagagtcctggggagcttctgtccacctgtcctgcagaggagtcgtttccagcccggctgccccaggatgggtgagttcaacgagaagaagacaacatgtggcaccgtttgcctcaagtacctgctgtttacctacaattgctgcttctggctggctggcctggctgtcatggcagtgggcatctggacgctggccctcaagagtgactacatcagcctgctggcctcaggcacctacctggccacagcctacatcctggtggtggcgggcactgtcgtcatggtgactggggtcttgggctgctgcgccaccttcaaggagcgtcggaacctgctgcgcctgtacttcatcctgctcctcatcatctttctgctggagatcatcgctggtatcctcgcctacgcctactaccagcagctgaacacggagctcaaggagaacctgaaggacaccatgaccaagcgctaccaccagccgggccatgaggctgtgaccagcgctgtggaccagctgcagcaggagttccactgctgtggcagcaacaactcacaggactggcgagacagtgagtggatccgctcacaggaggccggtggccgtgtggtcccagacagctgctgcaagacggtggtggctctttgtggacagcgagaccatgcctccaacatctacaaggtggagggcggctgcatcaccaagttggagaccttcatccaggagcacctgagggtcattggggctgtggggatcggcattgcctgtgtgcaggtctttggcatgatcttcacgtgctgcctgtacaggagtctcaagctggagcactactgaccctgccttgggccttgctgctgctgcacccaactactgagctgagaccactgagtaccaggggctgggctccctgatgacacccaccctgtgccatcaccataacctctggggaccccaacctcagaggcagcttcaagtgccttttgctgcgcaccaatgcccagcaggggaggtgaggggggctggcggggcgaagtttggggggtgttttgtggggctccccggacatactctctgcctggtggtcagatgcaggttggaaggggccttgctgagtggcgcaaggccgagcgttcccagcagggggagaaacccttcacaccccaggcccttcaggaactggggctttgccttgcagccacatggccccatcccagttggggaagccaggtgagctctgacccttgggcctgggcctctgcccctcccaacccagccgtcgtctccctcgacagcgcccctgctgtcttccccaccgcagtcaccaccacccgaaatgccacgtggtcactgtgcactgccctgttcatgtgcctctgcggggcagggccttcctggttttgtacactgctgtacccagatgcctacaaccatccctgccacatacaggtgctcaataaacacttgtagagcaga

SEQ ID NO: 727784 - DNA, 937 bp, Homo sapiens
  misc_feature (50)..(50): n is a, c, g, or t
  misc_feature (87)..(87): n is a, c, g, or t
  misc_feature (112)..(112): n is a, c, g, or t
  misc_feature (139)..(139): n is a, c, g, or t
  misc_feature (165)..(165): n is a, c, g, or t
  misc_feature (170)..(170): n is a, c, g, or t
  misc_feature (178)..(178): n is a, c, g, or t
  misc_feature (186)..(186): n is a, c, g, or t
  misc_feature (266)..(266): n is a, c, g, or t
  misc_feature (273)..(273): n is a, c, g, or t
  misc_feature (276)..(276): n is a, c, g, or t
  misc_feature (297)..(297): n is a, c, g, or t
  misc_feature (299)..(299): n is a, c, g, or t
  misc_feature (302)..(302): n is a, c, g, or t
  misc_feature (307)..(307): n is a, c, g, or t
  misc_feature (310)..(310): n is a, c, g, or t
  misc_feature (314)..(314): n is a, c, g, or t
  misc_feature (317)..(317): n is a, c, g, or t
  misc_feature (326)..(326): n is a, c, g, or t
  misc_feature (334)..(334): n is a, c, g, or t
  misc_feature (337)..(337): n is a, c, g, or t
  misc_feature (343)..(346): n is a, c, g, or t
  misc_feature (348)..(349): n is a, c, g, or t
  misc_feature (352)..(352): n is a, c, g, or t
  misc_feature (361)..(362): n is a, c, g, or t
  misc_feature (364)..(367): n is a, c, g, or t
  misc_feature (413)..(413): n is a, c, g, or t
  misc_feature (491)..(491): n is a, c, g, or t
  misc_feature (493)..(493): n is a, c, g, or t
  misc_feature (519)..(519): n is a, c, g, or t
  misc_feature (524)..(524): n is a, c, g, or t
  misc_feature (550)..(550): n is a, c, g, or t
  misc_feature (561)..(561): n is a, c, g, or t
  misc_feature (568)..(568): n is a, c, g, or t
  misc_feature (574)..(574): n is a, c, g, or t
  misc_feature (577)..(577): n is a, c, g, or t
  misc_feature (581)..(581): n is a, c, g, or t
  misc_feature (590)..(590): n is a, c, g, or t
  misc_feature (668)..(668): n is a, c, g, or t
  misc_feature (689)..(689): n is a, c, g, or t
  misc_feature (767)..(767): n is a, c, g, or t
  misc_feature (772)..(774): n is a, c, g, or t
  misc_feature (777)..(778): n is a, c, g, or t
  misc_feature (780)..(780): n is a, c, g, or t
  misc_feature (798)..(798): n is a, c, g, or t
  misc_feature (843)..(843): n is a, c, g, or t
  misc_feature (937)..(937): n is a, c, g, or t
ggagcaaaaattaagcatgaatggggggtgtgggggggggggggggacanaaattttttaaatttcacaaagccattatcgagtgtngcaatgaaacagagactgtaaattntaggtagctaagattctttctgaaacnaatgttaagtgaaagaaatataaagnagggnattacacnaagtttcnggatctagtacactaaaaagagtgaaacctaggaaaagttacctactgttttacagaagaaataaagacctgcaaaagcngattttnggntgtatatattttacacactgngnggngtggnggnatcngcnaattgaagnagagatgngcngtattnnnncnnggnctgtatcgnngnnnnctccctccccacccccaacaatctactaccttataccaagtattgnggatatgagcgcaagtcatcccagagaatccagtgaacaagtgagtgtaatgcactggtgtgaagtgtgagagataananagtgcctttcaatcttcatcaaagtnctgcngtagaagaaaattggcagcgaaattntcattcttctnacaagcnaaatangcntgtntcacaagtncttcaggaaatcctaatgcctttaacctttctatagcttctttttcctgaggtgttacttgaatgtagttcatatgancacttccagcttctgcaattnctccactgccacctccacctcctcctccttgaccaccagcttcttgaactggttcatttaacatctgaataaaatgcncctgnnnttnncnaatttgctgaagtaattnaggattctctcgacctatctgctgtagtaacgctggaagcaaggnaggattctgctgaataatttgtctcatctgttgaaactgaggctgattccgtaaaaattcaaggggatgtcctccagaacttgttgttgtagtn

SEQ ID NO: 727785 - DNA, 904 bp, Homo sapiens
  misc_feature (51)..(51): n is a, c, g, or t
aaaccaaccacctccccctgcacaaataggctaggtcgaggctcggtgttnaatcggccgaggggtggtggctctttgtggacagcgagaccatgcctccaacatctacaaggtggagggcggctgcatcaccaagttggagaccttcatccaggagcacctgagggtcattggggctgtggggatcggcattgcctgtgtgcaggtctttggcatgatcttcacgtgctgcctgtacaggagtctcaagctggagcactactgaccctgccttgggccttgctgctgctgcacccaactactgagctgagaccactgagtaccaggggctgggctccctgatgacacccaccctgtgccatcaccataacctctggggaccccaacctcagaggcagcttcaagtgccttttgctgcgcaccaatgcccagcaggggaggtgaggggggctggcggggcgaagtttggggggtgttttgtggggctccccggacatactctctgcctggtggtcagatgcaggttggaaggggccttgctgagtggcgcaaggccgagcgttcccagcagggggagaaacccttcacaccccaggcccttcaggaactggggctttgccttgcagccacatggccccatcccagttggggaagccaggtgagctctgacccttgggcctgggcctctgcccctcccaacccagccgtcgtctccctcgacagcgcccctgctgtcttccccaccgcagtcaccaccacccgaaatgccacgtggtcactgtgcactgccctgttcatgtgcctctgcggggcagggccttcctggttttgtacactgctgtacccagatgcctacaaccatccctgccacatacaggtgctcaataaacacttgtagagcaga

SEQ ID NO: 727786 - DNA, 761 bp, Homo sapiens
cacgagagagagagagagagtagagagagagagagagttagagagagagagagagagagagagagagatacagagagtgagagagagagagtgtgatagcgcttgacatacatactctctctctacccttttgtaacgtttatcatcattctacccgcttcttgtccttctcccagagacttatctcttgctctccagatcccaccctttcttcccacctcctctttccccatattttcttctacacttaccctgtccttttgtctccctttcttacatattctcctcttgtgtcgccttatccttttccacttttttttcccttctgtttccaacccctatatctgtctatctcacctttattctccctatctccttgctgataatcccttcttttcctgctccgtgctttcttctcctctgttcctacctctatcctttcttctttcaccctcttgttcactttccctccctgccatcgtcctctgcctcccttcttcctacttctcccctccctttcttctactctctccctactctttttactctcttttctcttcccccctctttcgtttttgtctttcccttcctcctctttcccctttttcttttctctaccccctcctccttcttattctccccctcttttctcgctctcccctttccttcctcttgtcccctcccctctcccctcttttttcccctcaccccttctttgtcttctttcttcctcttctttcgccctttctcttctttcctcc

SEQ ID NO: 727787 - DNA, 109 bp, Homo sapiens
ggtgttccttgtctcagaagataagcttcagtagacatgcgcatgagtctcacagcactggaggcacattacatcccatctgacatcgcatttccatagaaatgggcca

SEQ ID NO: 727788 - DNA, 1014 bp, Homo sapiens
  misc_feature (51)..(51): n is a, c, g, or t
  misc_feature (878)..(878): n is a, c, g, or t
  misc_feature (880)..(882): n is a, c, g, or t
  misc_feature (886)..(887): n is a, c, g, or t
  misc_feature (908)..(908): n is a, c, g, or t
  misc_feature (914)..(914): n is a, c, g, or t
  misc_feature (919)..(920): n is a, c, g, or t
  misc_feature (930)..(930): n is a, c, g, or t
  misc_feature (941)..(941): n is a, c, g, or t
  misc_feature (948)..(948): n is a, c, g, or t
  misc_feature (953)..(953): n is a, c, g, or t
  misc_feature (956)..(957): n is a, c, g, or t
  misc_feature (965)..(966): n is a, c, g, or t
  misc_feature (979)..(979): n is a, c, g, or t
aaaccaaccacctccccctgcacaaataggctaggtcgaggctcggtgttnaatcggccgaggagacaacatgtggcaccgtttgcctcaagtacctgctgtttacctacaattgctgcttctggctggctggcctggctgtcatggcagtgggcatctggacgctggccctcaagagtgactacatcagcctgctggcctcaggcacctacctggccacagcctacatcctggtggtggcgggcactgtcgtcatggtgactggggtcttgggctgctgcgccaccttcaaggagcgtcggaacctgctgcgcctgtacttcatcctgctcctcatcatctttctgctggagatcatcgctggtatcctcgcctacgcctactaccagcagctgaacacggagctcaaggagaacctgaaggacaccatgaccaagcgctaccaccagccgggccatgaggctgtgaccagcgctgtggaccagctgcagcaggagttccactgctgtggcagcaacaactcacaggactggcgagacagtgagtggatccgctcacaggaggccggtggccgtgtggtcccagacagctgctgcaagacggtggtggctctttgtggacagcgagaccatgcctccaacatctacaaggtggagggcggctgcatcaccaagttggagaccttcatccaggagcacctgagggtcattggggctgtggggatcggcattgcctgtgtgcaggtctttggcatgatcttcacgtgctgcctgtacaggagtctcaagctggagcactactgaccctgccttgggccttgctgctgctgcacccaactactgagctgagaccactgagtaccaggggctgggtcctgntnnnaccnncctgtgcatccatactctggngaccanctcanngcagttcagngctttggtgcncatgccnagggnggnnggggctgnnggaaatggggggntggggcccgaatccttcggtgatagtgaggtgtag

SEQ ID NO: 727789 - DNA, 840 bp, Homo sapiens
  misc_feature (304)..(304): n is a, c, g, or t
agcggagcggcccccgcaccctgaccgttgcaactgtagcataatcacttgttccttaatctcggacctgtctcattggatcccccagatttctctggtgctctctgagcttcctgaccacgctgcaaactttgcatcctgccccgatgatactaggcaggcccgatatgcagcgagacgagaagagcgaagcaaggacctcatactgtaggcgtaatgacaactttagtgtacagtgccacatgcgagtcactcgtaaggcaaaccgcacatgcgtctctacatatctacacaacagccgtgncacttaaaacagtttgcgtgttgcgtagctgcatgctcgtggaagcgagaacgcgcaagcctgccgagtcattggtagcgatgctaacgtacttgcaccagctcgaacaggcgatactacctataggcgtccacattgatccgagtcagacttggacctaaggggaacaagcttacccgtaagggacttaacagctgcaagtccgtattcgtagcagtccattagtatacccgagataggcgtttacggacccgtcgacttgttggcatcatggacattgctcaactggatgcgatgccgcgtacttaaaaggttcgatgtatgtttcaacggattgaaagttcctaacgtgatctgcagttcaggacctggagtaatccaggtcggtttctagtctacgttcaaattaccgtcccatgtaccgaaaggacacacgagaaataaagcgcctacttgcacattaggcgcccttcccccgtaacatgagtatcattctcagggctttaggtactttaataccctacgaaaccacctca

SEQ ID NO: 727790 - DNA, 2140 bp, Homo sapiens
  misc_feature (75)..(75): n is a, c, g, or t
cgcgggttcagacctgccgagcgcccgccgccgcgggaggggcttgaggccggggcggggcggggccggggcggngcgtcccctcgtaggctccgggccgcgcattctcagcgctgggagccgccgcccccgcagctgccgccgccgccagggcccggactcggacgcgtggtagcctagagtcctggggagcttctgtccacctgtcctgcagaggagtcgtttccagcccggctgccccaggatgggtgagttcaacgagaagaagacaacatgtggcaccgtttgcctcaagtacctgctgtttacctacaattgctgcttctggctggctggcctggctgtcatggcagtgggcatctggacgctggccctcaagagtgactacatcagcctgctggcctcaggcacctacctggccacagcctacatcctggtggtggcgggcactgtcgtcatggtgactggggtcttgggctgctgcgccaccttcaaggagcgtcggaacctgctgcgcctgtacttcatcctgctcctcatcatctttctgctggagatcatcgctggtatcctcgcctacgcctactaccagcagctgaacacggagctcaaggagaacctgaaggacaccatgaccaagcgctaccaccagccgggccatgaggctgtgaccagcgctgtggaccagctgcagcaggagttccactgctgtggcagcaacaactcacaggactggcgagacagtgagtggatccgctcacaggaggccggtggccgtgtggtcccagacagctgctgcaagacggtggtggctctttgtggacagcgagaccatgcctccaacatctacaaggtggagggcggctgcatcaccaagttggagaccttcatccaggagcacctgagggtcattggggctgtggggatcggcattgcctgtgtgcaggtctttggcatgatcttcacgtgctgcctgtacaggagtctcaagctggagcactactgaccctgccttgggccttgctgctgctgcacccaactactgagctgagaccactgagtaccaggggctgggctccctgatgacacccaccctgtgccatcaccataacctctggggaccccaacctcagaggcagcttcaagtgccttttgctgcgcaccaatgcccagcaggggaggtgaggggggctggcggggcgaagtttggggggtgttttgtggggctccccggacatactctctgcctggtggtcagatgcaggttggaaggggccttgctgagtggcgcaaggccgagcgttcccagcagggggagaaacccttcacaccccaggcccttcaggaactggggctttgccttgcagccacatggccccatcccagttggggaagccaggtgagctctgacccttgggcctgggcctctgcccctcccaacccagccgtcgtctccctcgacagcgcccctgctgtcttccccaccgcagtcaccaccacccgaaatgccacgtggtcactgtgcactgccctgttcatgtgcctctgcggggcagggccttcctggttttgtacactgctgtacccagatgcctacaaccatccctgccacatacaggtgctcaataaacacttgtagagcagaaaaaaaaaaaaaaaaaaaaaaaaaaaaaaaaaaaaaaaaaaagggggggggggtaaaaattcccccgggggggcccattttgggttccccggtttttttggtacaagggtgggccccatattatagagggacgtcggtatataattaaggccaatagggagcgtggcgcggtgggttaacaacaaaggtcgttggtgatcgggggacaaaccttggcatacggctgggggaatctgttgggggaagagggagcccataatcttctggtggggggggggcgattcacttggtggccgcaaacctacctcttacaggaagtatttaacgcgctctaggggtgcaattattacaactttttctaacggtcgtattatgtgggttgtaaacactaccttggaaaatattggctaggcggcggtaggaagatagtttgtggtaacagggagttattcgttatttgagaaatttttattcaccggggagctgtgttatagc

SEQ ID NO: 727791 - DNA, 180 bp, Homo sapiens
atgcagtggttggagtacaggacacaaccgggacttgggcgtctgaagtgggagcagtcttacgggactgaacccttcacctgcaggacctgatgcttcctctgggtagatagtgtcagaactgagttgatacccaattggtgtctgctggaggatttatggggaacccccacccccaca

SEQ ID NO: 727792 - DNA, 2548 bp, Homo sapiens
  misc_feature (75)..(75): n is a, c, g, or t
  misc_feature (1704)..(1704): n is a, c, g, or t
cgcgggttcagacctgccgagcgcccgccgccgcgggaggggcttgaggccggggcggggcggggccggggcggngcgtcccctcgtaggctccgggccgcgcattctcagcgctgggagccgccgcccccgcagctgccgccgccgccagggcccggactcggacgcgtggtagcctagagtcctggggagcttctgtccacctgtcctgcagaggagtcgtttccagcccggctgccccaggatgggtgagttcaacgagaagaagacaacatgtggcaccgtttgcctcaagtacctgctgtttacctacaattgctgcttctggctggctggcctggctgtcatggcagtgggcatctggacgctggccctcaagagtgactacatcagcctgctggcctcaggcacctacctggccacagcctacatcctggtggtggcgggcactgtcgtcatggtgactggggtcttgggctgctgcgccaccttcaaggagcgtcggaacctgctgcgcctgtacttcatcctgctcctcatcatctttctgctggagatcatcgctggtatcctcgcctacgcctactaccagcagctgaacacggagctcaaggagaacctgaaggacaccatgaccaagcgctaccaccagccgggccatgaggctgtgaccagcgctgtggaccagctgcagcaggagttccactgctgtggcagcaacaactcacaggactggcgagacagtgagtggatccgctcacaggaggccggtggccgtgtggtcccagacagctgctgcaagacggtggtggctctttgtggacagcgagaccatgcctccaacatctacaaggtggagggcggctgcatcaccaagttggagaccttcatccaggagcacctgagggtcattggggctgtggggatcggcattgcctgtgtgcaggtctttggcatgatcttcacgtgctgcctgtacaggagtctcaagctggagcactactgaccctgccttgggccttgctgctgctgcacccaactactgagctgagaccactgagtaccaggggctgggctccctgatgacacccaccctgtgccatcaccataacctctggggaccccaacctcagaggcagcttcaagtgccttttgctgcgcaccaatgcccagcaggggaggtgaggggggctggcggggcgaagtttggggggtgttttgtggggctccccggacatactctctgcctggtggtcagatgcaggttggaaggggccttgctgagtggcgcaaggccgagcgttcccagcagggggagaaacccttcacaccccaggcccttcaggaactggggctttgccttgcagccacatggccccatcccagttggggaagccaggtgagctctgacccttgggcctgggcctctgcccctcccaacccagccgtcgtctccctcgacagcgcccctgctgtcttccccaccgcagtcaccaccacccgaaatgccacgtggtcactgtgcactgccctgttcatgtgcctctgcggggcagggccttcctggttttgtacactgctgtacccagatgcctacaaccatccctgccacatacaggtgctcaataaacacttgtagagcagaaaaaaaaaaaaaaaaaaaaaaaaaaaaaaaaaaaaaaaaaaaaaaaaaaaaaaaaaaanaaaaaaaaaaaaaaaaaaaaaaaaaaaacaaaaaagaaaaaaaaaaaaaaaaaaacaaagcggggcggcggcggccaccattaaattctttttctcccacggggcgacgcccgcccccccgccccccacactcatgtgcacgcacagaggcgcgcgcccccacgacgacagacggggcactcgtctaaaaacaaaccgacgagccgcggcgcgccgcccgggacaagacacaacagacagcgagcagcgcgagcaggacgaaaaacgacgccacgcgcggaagccgcgcgcatgacgaccacgagacgccagcaccaaccaaacccgccggatcaacggagcaccacacaaagcaacgaggcacacggcacaccaccccacaaaacatagacccaagagcggagcgcgaggagctaaaaaacagcaaaacaacgcacccgggcgagtcacaacataagaagaatacaagcaagccacaaacaaagaatagcagaactaggtgatcgtgagcagtgaaaaccacaagcacagcgcgacgaccaagcgcggacaagcacccgtcagcgacgcaaacatatactaccaccccgcggcgcagcaggaacaaagacagaaaacgacaagcaagccacaaaggaacagagagcatagcacgcacgagcaacaagaccacacaagaaccccgcacaacaagacaaggagagacgagatgcaggccgcaagcaccacccatcagtaccacccgacgcgagcagcgacgacgcgaacgagcgcccgagcaccagcgacgtaccgcagccacacacagcagcccagagccaccagacacccaccgacacacgcc

SEQ ID NO: 727793 - DNA, 2172 bp, Homo sapiens
  misc_feature (75)..(75): n is a, c, g, or t
  misc_feature (2172)..(2172): n is a, c, g, or t
cgcgggttcagacctgccgagcgcccgccgccgcgggaggggcttgaggccggggcggggcggggccggggcggngcgtcccctcgtaggctccgggccgcgcattctcagcgctgggagccgccgcccccgcagctgccgccgccgccagggcccggactcggacgcgtggtagcctagagtcctggggagcttctgtccacctgtcctgcagaggagtcgtttccagcccggctgccccaggatgggtgagttcaacgagaagaagacaacatgtggcaccgtttgcctcaagtacctgctgtttacctacaattgctgcttctggctggctggcctggctgtcatggcagtgggcatctggacgctggccctcaagagtgactacatcagcctgctggcctcaggcacctacctggccacagcctacatcctggtggtggcgggcactgtcgtcatggtgactggggtcttgggctgctgcgccaccttcaaggagcgtcggaacctgctgcgcctgtacttcatcctgctcctcatcatctttctgctggagatcatcgctggtatcctcgcctacgcctactaccagcagctgaacacggagctcaaggagaacctgaaggacaccatgaccaagcgctaccaccagccgggccatgaggctgtgaccagcgctgtggaccagctgcagcaggagttccactgctgtggcagcaacaactcacaggactggcgagacagtgagtggatccgctcacaggaggccggtggccgtgtggtcccagacagctgctgcaagacggtggtggctctttgtggacagcgagaccatgcctccaacatctacaaggtggagggcggctgcatcaccaagttggagaccttcatccaggagcacctgagggtcattggggctgtggggatcggcattgcctgtgtgcaggtctttggcatgatcttcacgtgctgcctgtacaggagtctcaagctggagcactactgaccctgccttgggccttgctgctgctgcacccaactactgagctgagaccactgagtaccaggggctgggctccctgatgacacccaccctgtgccatcaccataacctctggggaccccaacctcagaggcagcttcaagtgccttttgctgcgcaccaatgcccagcaggggaggtgaggggggctggcggggcgaagtttggggggtgttttgtggggctccccggacatactctctgcctggtggtcagatgcaggttggaaggggccttgctgagtggcgcaaggccgagcgttcccagcagggggagaaacccttcacaccccaggcccttcaggaactggggctttgccttgcagccacatggccccatcccagttggggaagccaggtgagctctgacccttgggcctgggcctctgcccctcccaacccagccgtcgtctccctcgacagcgcccctgctgtcttccccaccgcagtcaccaccacccgaaatgccacgtggtcactgtgcactgccctgttcatgtgcctctgcggggcagggccttcctggttttgtacactgctgtacccagatgcctacaaccatccctgccacatacaggtgctcaataaacacttgtagagcagaaaaaaaaaaaaaaaaaaaaaaaaaaaaaaaaaaaaaaaaaaaagaaggggcggcgcgcgcctcatagaaatatttcccctcagggaggggcccccattttagcgctgttcccccgatttttttgtggtacacagagggtggcccccctatatagggggagcgcgtttattaaaactcagaggcaggtgggccggcgttttaaaaccaccgctctggagcgcgggacacaaccccgagcacccgtgaagacactcttttgacgagagagcgcccctttaacttccgcgggggtgggaccccaatattttggggcccaacatatctacctatacgagagagattttataaaacggccctaagagcagcaaaaaattattacacattttacacagggtgacatcgtcggtgcgtagccacccacccccggagaaattcgctcgtcggcgtcgctagagaacaagtttcccgctcaacccggcgatatagattctcgaccaattttttttccacggggcgcctggcaatan

SEQ ID NO: 727794 - DNA, 115 bp, Homo sapiens
  misc_feature (98)..(98): n is a, c, g, or t
cactacagcagctatacaagctttatggtacttgaggtacagttttgtggctgctcttagtgtatttcagaaaaaaagcagataggacgaagaacgancttacagacgtgggttt

SEQ ID NO: 727795 - DNA, 145 bp, Homo sapiens
acacccgctctgcatccacgacccattatggacaccctgaacatggcacctcctactctcccgagacatcccaacatgggtggactggactgtaggctacccctaccccccccctaccctctaccatgatatcacagcgccttct

SEQ ID NO: 727796 - DNA, 1586 bp, Homo sapiens
  misc_feature (75)..(75): n is a, c, g, or t
cgcgggttcagacctgccgagcgcccgccgccgcgggaggggcttgaggccggggcggggcggggccggggcggngcgtcccctcgtaggctccgggccgcgcattctcagcgctgggagccgccgcccccgcagctgctgccgccgccgccagggcccggactcggacgcgtggtagccccaggatgggtgagttcaacgagaagaagacaacatgtggcaccgtttgcctcaagtacctgctgtttacctacaattgctgcttctggctggctggcctggctgtcatggcagtgggcatctggacgctggccctcaagagtgactacatcagcctgctggcctcaggcacctacctggccacagcctacatcctggtggtggcgggcactgtcgtcatggtgactggggtcttgggctgctgcgccaccttcaaggagcgtcggaacctgctgcgcctgtacttcatcctgctcctcatcatctttctgctggagatcatcgctggtatcctcgcctacgcctactaccagcagctgaacacggagctcaaggagaacctgaaggacaccatgaccaagcgctaccaccagccgggccatgaggctgtgaccagcgctgtggaccagctgcagcaggagttccactgctgtggcagcaacaactcacaggactggcgagacagtgagtggatccgctcacaggaggccggtggccgtgtggtcccagacagctgctgcaagacggtggtggctctttgtggacagcgagaccatgcctccaacatctacaaggtggagggcggctgcatcaccaagttggagaccttcatccaggagcacctgagggtcattggggctgtggggatcggcattgcctgtgtgcaggtctttggcatgatcttcacgtgctgcctgtacaggagtctcaagctggagcactactgaccctgccttgggccttgctgctgctgcacccaactactgagctgagaccactgagtaccaggggctgggctccctgatgacacccaccctgtgccatcaccataacctctggggaccccaacctcagaggcagcttcaagtgccttttgctgcgcaccaatgcccagcaggggaggtgaggggggctggcggggcgaagtttggggggtgttttgtggggctccccggacatactctctgcctggtggtcagatgcaggttggaaggggccttgctgagtggcgcaaggccgagcgttcccagcagggggagaaacccttcacaccccaggcccttcaggaactggggctttgccttgcagccacatggccccatcccagttggggaagccaggtgagctctgacccttgggcctgggcctctgcccctcccaacccagccgtcgtctccctcgacagcgcccctgctgtcttccccaccgcagtcaccaccacccgaaatgccacgtggtcactgtgcactgccctgttcatgtgcctctgcggggcagggccttcctggttttgtacactgctgtacccagatgcctacaaccatccctgccacatacaggtgctcaataaacacttgtagagcaga

SEQ ID NO: 727797 - DNA, 1929 bp, Homo sapiens
  misc_feature (75)..(75): n is a, c, g, or t
  misc_feature (1662)..(1662): n is a, c, g, or t
cgcgggttcagacctgccgagcgcccgccgccgcgggaggggcttgaggccggggcggggcggggccggggcggngcgtcccctcgtaggctccgggccgcgcattctcagcgctgggagccgccgcccccgcagctgccgccgccgccagggcccggactcggacgcgtggtagcctagagtcctggggagcttctgtccacctgtcctgcagaggagtcgtttccagcccggctgccccaggatgggtgagttcaacgagaagaagacaacatgtggcaccgtttgcctcaagtacctgctgtttacctacaattgctgcttctggctggctggcctggctgtcatggcagtgggcatctggacgctggccctcaagagtgactacatcagcctgctggcctcaggcacctacctggccacagcctacatcctggtggtggcgggcactgtcgtcatggtgactggggtcttgggctgctgcgccaccttcaaggagcgtcggaacctgctgcgcctgtacttcatcctgctcctcatcatctttctgctggagatcatcgctggtatcctcgcctacgcctactaccagcagctgaacacggagctcaaggagaacctgaaggacaccatgaccaagcgctaccaccagccgggccatgaggctgtgaccagcgctgtggaccagctgcagcaggagttccactgctgtggcagcaacaactcacaggactggcgagacagtgagtggatccgctcacaggaggccggtggccgtgtggtcccagacagctgctgcaagacggtggtggctctttgtggacagcgagaccatgcctccaacatctacaaggtggagggcggctgcatcaccaagttggagaccttcatccaggagcacctgagggtcattggggctgtggggatcggcattgcctgtgtgcaggtctttggcatgatcttcacgtgctgcctgtacaggagtctcaagctggagcactactgaccctgccttgggccttgctgctgctgcacccaactactgagctgagaccactgagtaccaggggctgggctccctgatgacacccaccctgtgccatcaccataacctctggggaccccaacctcagaggcagcttcaagtgccttttgctgcgcaccaatgcccagcaggggaggtgaggggggctggcggggcgaagtttggggggtgttttgtggggctccccggacatactctctgcctggtggtcagatgcaggttggaaggggccttgctgagtggcgcaaggccgagcgttcccagcagggggagaaacccttcacaccccaggcccttcaggaactggggctttgccttgcagccacatggccccatcccagttggggaagccaggtgagctctgacccttgggcctgggcctctgcccctcccaacccagccgtcgtctccctcgacagcgcccctgctgtcttccccaccgcagtcaccaccacccgaaatgccacgtggtcactgtgcactgccctgttcatgtgcctctgcggggcagggccttcctggttttgtacactgctgtacccagatgcctacaaccatccctgccacatacaggtgctcaataaacacttgtagagcagaaaaaaaaaaaaaaaaanaaaaaaaaaaacccgggggactttatatgggggggggggaaaaaagcgccaggaaaggggacccgggcgcccatagggtgctcccggaaccccagctttctggccacccaggggggacaactcggacgggctcccccataagagagacgccgcaaaacaattccaacaacgcccgggggttaccacggatatagacacgtggcacaaacgccggcacgcagtccccaccgagaccaccacaatctcaacagacacagacacacaacc

SEQ ID NO: 727798 - DNA, 1746 bp, Homo sapiens
  misc_feature (75)..(75): n is a, c, g, or t
cgcgggttcagacctgccgagcgcccgccgccgcgggaggggcttgaggccggggcggggcggggccggggcggngcgtcccctcgtaggctccgggccgcgcattctcagcgctgggagccgccgcccccgcagctgccgccgccgccagggcccggactcggacgcgtggggcccggactcggacgcgtggtaggctgtagctgctgctgttgtgggggaagggctagtgatgggtctggagcgaaggccaagagtggggcacctgggggatagcctagagtcctggggagcttctgtccacctgtcctgcagaggagtcgtttccagcccggctgccccaggatgggtgagttcaacgagaagaagacaacatgtggcaccgtttgcctcaagtacctgctgtttacctacaattgctgcttctggctggctggcctggctgtcatggcagtgggcatctggacgctggccctcaagagtgactacatcagcctgctggcctcaggcacctacctggccacagcctacatcctggtggtggcgggcactgtcgtcatggtgactggggtcttgggctgctgcgccaccttcaaggagcgtcggaacctgctgcgcctgtacttcatcctgctcctcatcatctttctgctggagatcatcgctggtatcctcgcctacgcctactaccagcagctgaacacggagctcaaggagaacctgaaggacaccatgaccaagcgctaccaccagccgggccatgaggctgtgaccagcgctgtggaccagctgcagcaggagttccactgctgtggcagcaacaactcacaggactggcgagacagtgagtggatccgctcacaggaggccggtggccgtgtggtcccagacagctgctgcaagacggtggtggctctttgtggacagcgagaccatgcctccaacatctacaaggtggagggcggctgcatcaccaagttggagaccttcatccaggagcacctgagggtcattggggctgtggggatcggcattgcctgtgtgcaggtctttggcatgatcttcacgtgctgcctgtacaggagtctcaagctggagcactactgaccctgccttgggccttgctgctgctgcacccaactactgagctgagaccactgagtaccaggggctgggctccctgatgacacccaccctgtgccatcaccataacctctggggaccccaacctcagaggcagcttcaagtgccttttgctgcgcaccaatgcccagcaggggaggtgaggggggctggcggggcgaagtttggggggtgttttgtggggctccccggacatactctctgcctggtggtcagatgcaggttggaaggggccttgctgagtggcgcaaggccgagcgttcccagcagggggagaaacccttcacaccccaggcccttcaggaactggggctttgccttgcagccacatggccccatcccagttggggaagccaggtgagctctgacccttgggcctgggcctctgcccctcccaacccagccgtcgtctccctcgacagcgcccctgctgtcttccccaccgcagtcaccaccacccgaaatgccacgtggtcactgtgcactgccctgttcatgtgcctctgcggggcagggccttcctggttttgtacactgctgtacccagatgcctacaaccatccctgccacatacaggtgctcaataaacacttgtagagcaga

SEQ ID NO: 727799 - DNA, 829 bp, Homo sapiens
gggtaccactggaacgtggtgctgaactatctgagctaccagcccaagtaggggcacgaaacgtccccgggatgatgaagaggaggactcagaatgatgcggtcgtgaaagcgaaacgtgggtactcgagagacgcagtccgcctaatcgggaagaagaaactgactgtggttggatcgaacgcggctgtacctgactgaagcaagcggcatgctgtcggacttagtctgacatgagatggtggcctgcccggaagtagcatacatagtacgcgcagacaatggggcatgagatagctcagggtagagggtaaggaatgactgcctcatccatattcggaggataagactcaatggtagaagatgctacagcaaattgccaagggaataaacgatggcacaaggacacactacaagagcatacgattcagtgagcacacttgcagaggccttgagaccctagacaattgaacctaatcgaatacaaagggaacgcaatggctcctattcggcctgtgcggaacacgatttgccacagattcgacgtgggttaccctaggaccagctttcgtgcgcctggggtagagcttggaagatgcgttgctaacaagggcggggatgacgtcgggtcctgaggcgtgagggaacgatcggattaacttaccaggaatgctggtcccgataacgccgtgctgtggatcgcgacttcttggcctatctacagcgacagtttacaccagtatatatcagtacgaaccgcattccgagtggcaagacgttgcacggcagtggtacgacagcaaagtggcatcacttcagaattgtctcat

SEQ ID NO: 727800 - DNA, 819 bp, Homo sapiens
  misc_feature (496)..(496): n is a, c, g, or t
gcagctacgaggtgctgtcctggactatgaaaaggtccctggggagaagggctgtccaggcagacctacactacgtctcaacacgctttatctgagacccgtggtgcagtcgttgtgatccacctagccactcagtcgtgtacacggaccgcacggagaatgctgaggttctgatgatggaggggcccggcagacttacagcatccttcgccgcctagtcgaaccgaggacctgggtcctccttggccacgctgaagtgctggactccctgtggtcagtcacatgtcaatccgattgagctgcatcaatgcactcgtccgtctaccatatggtggggacagagcggtagtccatgactgatgagctgaaacacggcatgaacctcgagctcttatgtaccagaattccaacatccagatccaccacgtatcctaattgggattgtagctgtgaactgtgcccggactgcatgatatagcgctgagcagcacactgntcaacaaacggggtggtgcacctcgatcgtataaaggtcgatctcgcaccattctaccgaactaatgatccgacgacagagtccatctgtagatcgtaggactaccgttatgaggaggccttcgggactgcgtgtggctgcattcagggggcgtctaacgacgattgcttgaagggtatacggccatgtagcgacgcttttttggcccgaccatagtgaggccttcgtcgataggatcacctatgtgatgactttgaaccagtagttctgggcgaacgaggaaggcccgtgagagtacctggtgaaacaatacagatcattga

SEQ ID NO: 727801 - DNA, 1580 bp, Homo sapiens
  misc_feature (75)..(75): n is a, c, g, or t
cgcgggttcagacctgccgagcgcccgccgccgcgggaggggcttgaggccggggcggggcggggccggggcggngcgtcccctcgtaggctccgggccgcgcattctcagcgctgggagccgccgcccccgcagctgccgcgcgccaggcccggactcggacgcgtggtagccccaggatgggtgagttcaacgagaagaagacaacatgtggcaccgtttgcctcaagtacctgctgtttacctacaattgctgcttctggctggctggcctggctgtcatggcagtgggcatctggacgctggccctcaagagtgactacatcagcctgctggcctcaggcacctacctggccacagcctacatcctggtggtggcgggcactgtcgtcatggtgactggggtcttgggctgctgcgccaccttcaaggagcgtcggaacctgctgcgcctgtacttcatcctgctcctcatcatctttctgctggagatcatcgctggtatcctcgcctacgcctactaccagcagctgaacacggagctcaaggagaacctgaaggacaccatgaccaagcgctaccaccagccgggccatgaggctgtgaccagcgctgtggaccagctgcagcaggagttccactgctgtggcagcaacaactcacaggactggcgagacagtgagtggatccgctcacaggaggccggtggccgtgtggtcccagacagctgctgcaagacggtggtggctctttgtggacagcgagaccatgcctccaacatctacaaggtggagggcggctgcatcaccaagttggagaccttcatccaggagcacctgagggtcattggggctgtggggatcggcattgcctgtgtgcaggtctttggcatgatcttcacgtgctgcctgtacaggagtctcaagctggagcactactgaccctgccttgggccttgctgctgctgcacccaactactgagctgagaccactgagtaccaggggctgggctccctgatgacacccaccctgtgccatcaccataacctctggggaccccaacctcagaggcagcttcaagtgccttttgctgcgcaccaatgcccagcaggggaggtgaggggggctggcggggcgaagtttggggggtgttttgtggggctccccggacatactctctgcctggtggtcagatgcaggttggaaggggccttgctgagtggcgcaaggccgagcgttcccagcagggggagaaacccttcacaccccaggcccttcaggaactggggctttgccttgcagccacatggccccatcccagttggggaagccaggtgagctctgacccttgggcctgggcctctgcccctcccaacccagccgtcgtctccctcgacagcgcccctgctgtcttccccaccgcagtcaccaccacccgaaatgccacgtggtcactgtgcactgccctgttcatgtgcctctgcggggcagggccttcctggttttgtacactgctgtacccagatgcctacaaccatccctgccacatacaggtgctcaataaacacttgtagagcaga

SEQ ID NO: 727802 - DNA, 348 bp, Homo sapiens
gtaattaagcttacagttattaaatgagaacgttttggacaataatgcagttgacagtattaaagtagggccaggcacagcggtcacgcctgaatcccggcctttgagagaccaaggaggacggatcacttgaggcaggagtttgagatcagcctggctaacatggtgaaaccctgtctctactaaaaaatacaaaaattagctgggcatggtggtgcacacctataatcccagctactcaggaggctgaggcataagaattgcttgaacccaggaggcaggggttgcagtcagccgagatcgcgccactgcactccagcctgggtgacagagtgatgactccatctc

SEQ ID NO: 727803 - DNA, 1555 bp, Homo sapiens
gtgtattctgtttcttacttggttttggggtggtgcggtggtcgcgtttgttgtgttggtgttgcttgtagtttgtggcggtttggcttttatcttctagtttgtgcttgtggtttttgtttttcgtgtctgtcgtcggtgttctgagtgttttatctcttgtttcgcttgccgactcggatcgtggtcatcccacgtcgcccgtctgtctagtcgtactgggttagattgtcactttgtctcactcgtctcctcttcctttcgcgattcctgcagcctgcttcgttgcacctgtgttctgctgtattctctcgtagtttggggtggtggtgcgtcattcgtggttttgctggttgtgttgttttggtgttggtgggtctagagtgctgtggatctcttcggggctgtggtgtggtctgtgcgttggttgttggtttgtgttggggtgtgcgtgttgtggggttgtgtgggtgtgtttgtttgtcgtgtttgtgtctgtctggttgtggctgtgttggtgtgtggttggttgtgttttgctgtttgttgctttgttcttgtgtcgttgggctgttgctggtgtggtcttcgttttgtgttctttgttgttgtcgtccgtccttgttgcggaaagaaagaagaaaaagaaaaaaaaaagagaagcggtgagagatgtgatcgtggcgctggggctccgggctcggagatggggcccaaaggttcggttctctcgagacggcggttgtccccgtgtttcccccccggccggtggactttgacacaggacccgtggacccaccgtgttggcagtttccgccggcgcccctggcaacggcccgctccagaagctttgggttggagctgggccgtcagagtgccctccggtttctggctaaaactctatcccgttccgggttcttaagagtccagttcaatggccgagcccccacgggaaaatgaggcttttcggggtggtttgacccgcttacctgagagcacacgtgttcccttccccgatgacctgggatggtggcaccggccgtgcccttgctgttgctgggccgtgtccttttggaaagggagctgcccccggctttagtgcagctgcccaccctcgttaggcctggccttcttcgaggcctcttctgacctcaagggtcacaccccctccaagagtccttctcacccctggtagttgctgctcgtggttctgtcttgtccgtgcacccgagtggcacaccaccgcacccccacccctgtacatctgaaattggcgagatgagattgagagcccagactctgcggggtccatcacgccagccctggttgtgcctgcccttccatggtggtctttccagggtatcttggccaacacattagtaaccattgcttttatatttttttcttttttgctttccttgtacagtccgtactataaaatttctcttttgagattttataaccctttgtagccttttagatagaccttgtgtttgtactttgttgtgtagagtggaagaattgtgttgaataaaccccagatccggaatgccca

SEQ ID NO: 727804 - DNA, 659 bp, Homo sapiens
ctcttctacttatctccaaaaaaaaaaccacactaccacacaccaacacccccaaaaaccccacaccaacccacctacaacaacacttcccaattaaaccaccccaaaccgcgcccaaacccacgcactaccacatccaccaccatcaccagcaaaacaccaaaccccccccaacccctcccaccccaatctcgaccccgccacacccgacacgccagcacactgccacgaactaccgacccctcaccaaccctccaataccccccccccccctacccccccaaacccccaacacaaaccacatcgaacaccctcgcacacaccccctcacacccttacccctaccctaccactccaccccactccccccgccaaatcaccaactcccacccgcaacccacccaacaaaacaaaaaagcaccacccatactctccccccacaccatcccgcccacaaccctccccacacaacggacacaccctcactacacacccacacacacacccaccacctccacccaacaccaaccccaacaacccctccgcgccaacccccactctaacccatcctaccacgccaaaccgcccactcaataaactccacataatcactccctatcaccacacgtcccacacacccactaacacacacaccgccg

SEQ ID NO: 727805 - DNA, 498 bp, Homo sapiens
attagtcggtgtcatctgggcagatccatagctggtactgcgatggaggtctcattatgcgccagtcacagtgcggaataatctgacgagtataatcgtccaacggaaggactctgaaatattagacttgtcctgaaataagcttacctaggatgataccacttcgcttaatcagaatttcccctttccaactattgaacagtggcaaatataaaaaatctggtagttaaaatacacagcagtcacttcatattactgccgtccctcaacccactcaccttctgaagaacagggcttattcaagtttggttcccctttaagttttaatagaaacaaaaacgttttaagtcatgtggtaccattatatccccagaaagaatggcaatttaccaaggtttccacgtgtttggcgagaactcttactgaaagactagtgatgtccattttccagtaaatactgagcgaacacaattttataccccaatctgaggtctaact

SEQ ID NO: 727806 - DNA, 496 bp, Homo sapiens
  misc_feature (338)..(338): n is a, c, g, or t
acattgtgtgggcttagaaaccgtgagccttgggaaggaccatcttcctctgagctctgggcgtgttgaactgcggaggcttaccacttcctcgcctgtggtcatctccagcctgacccatggtggcgtgatcctctctcatcatccgtcacagtttttaataaagaaaatatgttccagaaaggccgagtccccatgccgcatcaggtcagtgatccaagtgcattatagtgaaagtcagaggaaatagctgcttttaggacacgctgaacttgcctaagaaagttattagtgggaataaatgagggggaagaaagcatgctccgactaacgagaanagtatcagcctgacattttgtgtcgtcctaactttgaaaagctatttatacccacttgctagcagtttctatgagaaattagatatgaggagatgtacagaagagaagagtgggagctgggtgactgtgagctcctcctcagaaactcttccaggcgg

SEQ ID NO: 727807 - DNA, 370 bp, Homo sapiens
gtttccgttagtatgagctcttagaaggaagcagcaccacatcattacaattccccaaataacaactattatccatttacgtctttagcagcatgagtagggcagccagcctcatatcggctctggaatcccagtcggacagtgatggcaaaactcgggctttggtgctggtgccacacactttggtgacccagggctgtcccacacaactccagggggcactgttcttctccacagcccacgaggctggcttctgtcctccactcgcaccttgcgtggccctccgtggccttgggccgtcagaaaagcgctttactatcaggagctcatggggcaagggagggggctcggctcgagacaaagggaaaca

SEQ ID NO: 727808 - DNA, 857 bp, Homo sapiens
  misc_feature (1)..(1): n is a, c, g, or t
nttccctctgagtggtctcacccccttgtagggtcgtgatttcacttcccaagggtgctgcataatggtgccattctaatgggaagatatattgaattaccgctcctccccgtgggggtctacacatctcaccggcgcttagaagctaaatgtttatgaactctcttgttcacggctggacgctctctaagggggctcggtctcgctcgcacagatgtcgcacaaatgcttagcgctcgctgataagaccctcacgtctgctgtataccagggggaggcctccttacccattaaggggtttgctcacgcacacaaaggtgaaaaagctcactgttgcgagctggacgggttttccatgggccggcataactcggtccttggataacgccccgtgcgacgtccggacctcgcactcgcactatgtttacaaacgcctcgcgcggggagtgaaagactactctcgtctttcttcggttaaggaaaagaactcactcgcgctattttctcggcgtgtacccttacatagtagcacttgttgcactggtttcactacaggtgagaccggacacacactcacgttagggtgaggcacctcacgctaactaagacgcgcctacgacatattttttctccccgaactacctcggtgtgcggcttgcgattcacgctcgcctccaccgtgtcttgcccaacgactaagagacgcggctaccgcacgctgcagggtaccaccacgctacactatggtatgtagagcgcccttttaccccccttacgtgacgcccatatgtctcttgcgcccccccgacctacaatagcatcggggttgtccttcgtttaaaaaaaaacatagacga

SEQ ID NO: 727809 - DNA, 304 bp, Homo sapiens
  misc_feature (5)..(5): n is a, c, g, or t
  misc_feature (20)..(20): n is a, c, g, or t
  misc_feature (45)..(45): n is a, c, g, or t
  misc_feature (94)..(94): n is a, c, g, or t
  misc_feature (100)..(100): n is a, c, g, or t
  misc_feature (119)..(119): n is a, c, g, or t
  misc_feature (139)..(139): n is a, c, g, or t
  misc_feature (191)..(191): n is a, c, g, or t
  misc_feature (195)..(195): n is a, c, g, or t
  misc_feature (206)..(206): n is a, c, g, or t
  misc_feature (214)..(214): n is a, c, g, or t
  misc_feature (234)..(234): n is a, c, g, or t
  misc_feature (250)..(250): n is a, c, g, or t
  misc_feature (255)..(255): n is a, c, g, or t
  misc_feature (261)..(261): n is a, c, g, or t
  misc_feature (263)..(263): n is a, c, g, or t
  misc_feature (286)..(287): n is a, c, g, or t
gggcncaaccaccaatcccntttttaaaaaatgtgaaagtcaaanaattaagttttagttttgactcatcccaaaaggtcaaaagtatttgttnctgtancattcaattcccatttganaatcagggtaaaaaaaactngtatttcccttcccatcatgatcctactgttgagttaggaaaaaatggttanacanactcccattantttttttnaaaggtaaactttaaattantgggtcaacccaatantattnggccananaggtaaaaactcccaaataaaannggattttgtggtttcca

SEQ ID NO: 727810 - DNA, 378 bp, Homo sapiens
gaatttattttattatttttattttggttaagggcgggggccttcgggcccctcttttaatcttttaagggatttgtttgccattttgggggaagactttttttatggggcctttttctttgaagttttagcgggccatttgcctttttaatgaacatgggaagttatactgggggtatgcaccagctctcccccacgcgggtttttctttgggttagtgccctacccgccccctggatgttttcttttccccctttggggtgcccctcttgtttccccctagtcccctttttgttttaagggcctttagtttttcccgttccctttttcccgggcttttttctgaagttttttttttaatatgcctaaaatacttta

SEQ ID NO: 727811 - DNA, 487 bp, Homo sapiens
tgaggtataatatcttatgttactctaacttttccacctctagatagacaaactacttgccattgtgttacagtgcctacagaattcagtacagtaacctgctatacaggttgtagcttaggagcaataggctatcccatatagtctaggggtgtaggaggctattccatctaggtttgtgtaagtacactcgatgatgttcacacaatgacaacatcacctgacaactcgtttatcagaacatacccccctcattaagtgatgcatgattgtagatgacattctggaaaaggccaaactatggagggagcaaaaagaccagtggttcccaggaattaggggaaagcatgagacaaacaaacagagcacagaggatttttagggtagtgaaagtattctgtatattactacaatggtggatacatgtcatatgtttgtcaaaaaccaaagaatggacaccaaaagtgaaccctaaggtaaatgctgc

SEQ ID NO: 727812 - DNA, 377 bp, Homo sapiens
cacgaggatggccactctcaccctcgccgcggccactgttgctatggctgcgggcgttggcgttgcgcacgccgcagatgtcatcgacaaccagaattccgtgaacgcgaagggcaagccgaactccggccccggcgtgcagggtgcgcctgatacgcgcacaggtcccgcgacgcgcgcccccggcggcgaggagagcggtaccgcaaacgaaggagcgtcttcgggcgcaagcgggtccggcgcaacgacgcagccgagccaggattcgagcggcgtggaaggtatgccgggcaacaagagcggcccggccgcgaagtcgccgtccaccaccaactaacggcaaagcgcggaatttccgcgcgatccccggctga

SEQ ID NO: 727813 - DNA, 572 bp, Homo sapiens
cacacctaacagccctcactacgagacagcagagggtggccagcttctgcattttcttttaccttttttaaaaaattctttattttattatttatttatttatgagacagggtctcattctgtagcccaggctggagtacagtggtgtgatcatagctcactgaaaccttgaactcctgggctcaagcactcttcccaccttagcctcctgagtagctaggaccacagacacgcatcatcatgcctgggtaactttttttttttttttttggacaaagagttacacattttggtggcccaggttgaaatgcagggccactatctcggctcatggaaacctctgcctcccgggtccaagcgattccccgctaatttgggatatctcaagaagatggggtcccccatgtggcccaggttgatctcgaactctgtgaccataaggtgatctacccactgtggcctctcccaaagttgctagaattacagaggtgaccccattgtgctccagcctaggtggggaggtattaaaaggtagtccttacaagtcctatgatttttaaattccacacaat

SEQ ID NO: 727814 - DNA, 295 bp, Homo sapiens
tcgagtttatttttatttttttttagtaaagatgggttttggccatgttgaccaggctggtcttgaactcctgagctcaggtgacccgcctgcctcagcctcccaaagtgctgggatatacgggtgtaagccaccgcactcagccatgcctgctgtttctcaaaaccaagaaccgtgggggaatgggagaaagagtggagttgtttgggaaactgaagtggtgctcaagaaccaatcaagaagctgatgctgcaggtctcagaataggtgcgctcgtccacaccctagatccgcg

SEQ ID NO: 727815 - DNA, 151 bp, Homo sapiens
  misc_feature (61)..(61): n is a, c, g, or t
cttcaggatctaagagcaaaacaccaaagaaaacaagacgccagagacagcacataagaanggcgctgctgatgacagacgtgcaggaaaggaaagggcgtgctgcacccgaggaagttgcaacccccattgcatcactggcccacaggca

SEQ ID NO: 727816 - DNA, 140 bp, Homo sapiens
  misc_feature (39)..(39): n is a, c, g, or t
  misc_feature (63)..(63): n is a, c, g, or t
aagagaattgactcacacaatcacaaagcaaagtcccantactaggccatctgcaagctgagnaagaaagaagccaatagtagatcagtccaagtccaaaagcctcaaaagcagggaagctgacagtgcggacttcagtc

SEQ ID NO: 727817 - DNA, 950 bp, Homo sapiens
  misc_feature (15)..(18): n is a, c, g, or t
  misc_feature (24)..(24): n is a, c, g, or t
  misc_feature (30)..(33): n is a, c, g, or t
  misc_feature (61)..(61): n is a, c, g, or t
  misc_feature (102)..(102): n is a, c, g, or t
  misc_feature (114)..(115): n is a, c, g, or t
  misc_feature (127)..(127): n is a, c, g, or t
  misc_feature (130)..(130): n is a, c, g, or t
  misc_feature (180)..(180): n is a, c, g, or t
  misc_feature (202)..(202): n is a, c, g, or t
  misc_feature (215)..(215): n is a, c, g, or t
  misc_feature (669)..(669): n is a, c, g, or t
  misc_feature (692)..(692): n is a, c, g, or t
  misc_feature (760)..(760): n is a, c, g, or t
  misc_feature (872)..(872): n is a, c, g, or t
  misc_feature (908)..(908): n is a, c, g, or t
aggctctggcatgannnnccctcncagggnnnngcccaccctttcctccgatggggctacnccccatgagtcagagaccaccagctatcccccccatgccanctggcatcctgnncccaatgcttcnacnaatgggggcgccaccaccattcacacagataccaggaatggtacctccgntgatgccaggaatgctgatgcnagcggtgcctgtnaccgcagcgacggctccgggtgcggacaccgcgcgagctctgctgtggctgggacaggccctccgagggccgctatggagtgagcatgtggccccagatgggcgcatctactactacaatgctgacgacaagcagtccgtgtgggagaagcccagcgtgctcaagtccaaggcagagctgctcctgtcccaatgtccgctggaaagagtacaagtcggacacaggcaaaccttattactataacaaccagagtaaagagtcccgctggacccggcccaaggatctggatgacctagaggttctagtcaaacaagaggctgcagggaaacagcagcagcagctgccacagacacttcagccacagccacctcagccacagcctgatccccacctgtgcctcctggccccaccccagtgcccacaggcctcctggaacctgagccaggtgggagtnaagattgtgatgtgttggaggcncccagcccctggaacagggttcctgcagcagctggaggagggcccagcagttctggacagcatcagcnacagcaggaggaggaggaatcaaagccagaaccagagaggtctggcctcagttggagcaaccgggagaaggcaaagcaggcattcaaggaactgctgagggacaaggctgtnccctccaatgcctcatgggaacaggccatgaagatngtggtcaccgacccccgttacagtgccttgcctaaactgagt

SEQ ID NO: 727818 - DNA, 341 bp, Homo sapiens
  misc_feature (263)..(263): n is a, c, g, or t
ctaggcctttaaagagaagatgagtctcaccaccttccacatcccccctctcctatctctgtttctagcatgcaactatgatgagttagttttactaacaacttacatgagattttatattccaagtaaagtttttcagaatctctcccagcaccaaagaccacccaaattaaggaagctcataatagtctaggaagctctttgtccacccagatggtcagctttttcagaactgaaaactttcatgttttcattttagagtncatcctgtgcagtttgtggcaatagctcagagcccataccttttatcaaatccccaggaacgcttatttcccatcctt

SEQ ID NO: 727819 - DNA, 366 bp, Homo sapiens
cgagcagtgtgcataccaggtgggaaggcagtggttgcgatactgggtatcatttagcaagagtagcagccaaaaggataggctaggaagggaaaggcaagcacaagcagcatccgtccacaggagggccaccaaggtatatagcctgaggcactgacgaacagactgagatggagcaggcaacaaacatcattctcagctgccatgcgttggatgcatattaactctgtctctctctacgtctctgtctctcgctctccactttatgcattaatcctgccctcacctattttcagatgagaaaactgaggctgagacccaatcgagatcacacacatagtgaggggcagcgcctggaattgcatg

SEQ ID NO: 727820 - DNA, 549 bp, Homo sapiens
cgagttgaaatgtgtttgactatgaccaacactctaggcagcgcaaccaaatgatggaaaacaactggatcacactgcaaatgtcccacaaaagaaagcacaatgtacaaaatgtgcatgtttcagttatacactatacgaaacatagtataaaatactttccaggtaaacattgtaacacttaagaaatagtactcagtacgaaattggcactacaaaggcaaaaatgcaacaagtattttcaactatgaaaacacaagacagtggaattggaaactttcgggataaaacactgtaacccagttagctctgtgggggtgtgcggggagagatgggccctcaacatatctgcagataacttttttttcccctaaattcatctcaattacctatcattatcccaaccaggcacttcaaactattaaactaaaacacagactcttaatctagttatgactatccttcaagaactcatgtgagtatctttctttacaaagaaagtttcctttcatgacagctatacagtttcacataacacacatcattcac

SEQ ID NO: 727821 - DNA, 96 bp, Homo sapiens
ccaccggccgcccacgcgtccgagagcagattaacaaagatttgcataacacactggaggatttgcgcttgcggcgggaatcaccagaatccgagg

SEQ ID NO: 727822 - DNA, 469 bp, Homo sapiens
actagagacccacgagtaataagactcatctagatttcataattacagtaagaagacaatctgcccaagttaaaaataacaatgcaggggacgggctgtggtggctcacgcctgtactcccagcactttggaaggctgaggcgggcggatcacaaggtcaggatatcgagaccatcctatgtatgtttttctgcctacttttgaatgaatgtattatttactatcattcaatttaatctattcgtaagttttttagctacgatactttttactgcttggggattggtatatgtatgtgcatgagtttaataaaagggtttgggtggttgctctagggcatataacatacagtatatgcctttacttatcatagtctgtcttcaagtattatatcactttgcataatgtgtaaaaatcttttaatggtatactttcatatccccactcctgagtctgtattaactgcttg

SEQ ID NO: 727823 - DNA, 104 bp, Homo sapiens
ctttgcctttttccagccgcttcgactcagcttcggtggcctgtccctattcgcccaggccacgccattttcaagggcaggaaggggcagtgtcctgaagccca

SEQ ID NO: 727824 - DNA, 398 bp, Homo sapiens
  misc_feature (305)..(305): n is a, c, g, or t
  misc_feature (397)..(397): n is a, c, g, or t
ttctgtaacacagttgatgtagtttggatatttgtcctctccaaacctcatgttgaaattggccgggcacagtcgttcacgcctgcctcgacctcccagagtgctgggattacaggcatgagcatcgcacccagcctttatcattgagttctaagagttctttatatattctggttacaagtccctttatatgatatatgatttgcaaatattttctcccattgttttagggtcatcttttgttggacagtgtcctttggatggcacagttttaaatttttatggaggtccccatttattttttncttttgtcacttgtacccttgtgttatttcctaataattcatggccaatccagggtcaggaggattacccccaggtttcctacagggtggtna

SEQ ID NO: 727825 - DNA, 1539 bp, Homo sapiens
  misc_feature (1)..(1): n is a, c, g, or t
  misc_feature (842)..(842): n is a, c, g, or t
  misc_feature (1096)..(1096): n is a, c, g, or t
nccttttgtgagagatgatgggggaaaaatattactcttatgatttactttttttggggcgccgcactacacaaaatcaccaaacatcataataatgtttttggggcagtgcgcccacgtactgctgcgcaacaaagagtgtaccgttgaaaataagtttctttttttgcttccattagacgcacaaattgtgcgccccaccaactagggccgtcttccccctttaattttgtgaaaacacctcttgctccttattaacagggttttttcttcgagaaagttttctttctaataaatccccccccaaggcccctaccaagggggttttttaataagtcccgcccggacaccaacacagtgttgtggtaaggagggggtattttctcacaggcgtgtttcccccccgcaacaagtaggttttatataatagaggcgtatagatataagagcccccctctttatataacagctccttttttctaacacacaaagaggggggggtttttgcgctcgccgctcgtcctccatctcggggtattatgtaggatatccccagctatgttgtcctctccttaacgccaccctccctggtagttgtgaaaattgttcttcgccctcgctgtgttttgtggagacacgtgaccactgtgtgtttgagaacaccccaccccggggtgaacacaaaaagttgtgtttgtgggggtgtcctctttaaaacagcgccctcccgcccacgtggtgagaaagtgtgttctccacaaacagccccaacgagaccacaccttggcggtgttgtggagaaacacactgttgtgatacccacaggtgtatacacaaatagnctctgggagattcctcttttttgtgggccacacagtgggtgtgtgtctgctcacagcacctgcgggctgcggagtagttcttctgtgggtgatattactctgtgtgtttgagagataaaaagagataaaatagggtgaagccacagctggctgtttctctctcggggtgtccctctccacagagagagacttctgggagatttattaaaggagtgtgtatatggggagaaggggagactctgtgtttgcccccngtatattcactgtcactgcgagattgggggtgagacccactctgagactcgcacactcacacacactgcgggtgttatattctcatggagactctccgctgcgagaaggtgtcttaactctgcacgagactcttctctctcgcgcctctcctctccacaccccgagagaatgccacagagagatctcttggaagaaagaaagaccttggggttaacactccagatgagagtttagagatccaaagaccaaataggtgggacatgaatcttgccttggttggataccagagtggttgtgaagaaaagagtgcccaaagaggaacattttaaataatttgaccgggtagggaattgtctattcctgaaataaaataccgtgaggactcttgcttaaggcacagagatttcagaatttactgttggaattaaccccactcttcatg

SEQ ID NO: 727826 - DNA, 1294 bp, Homo sapiens
gggacgcgctggcggacgcggtggggtgtggtggcacatgcctgtggtcccggctactcgggaggcttgggcaggagaatcgctggaatccgggaggcggaggcatgcgtgtgagccgagatcacgccactgcactccagcctgggctgacgtgatgcgagactcctgtcgtcaaaaaacacacacgacgaacgcgaaatgggggcatagccgaactcgaaaacaggggactcccatagcacgcagagcaaaggcgcccaacataccaccttccagaagtcaccagaggacgtggtccacagaacacacaaaagcgcggtcatacgtgtaagtagcgagcgaccagcaccgcgcagcaccaacgcgcgacgcaccagccgccccgcgggcacgaacacgagacagcgctcaggccaataagcgccccgagaaaaccccaaacgagcattagcgggcccctatacagccacgcctcttgccagggacgaacccgtgacgccacaaccagcaaacagacacggcgcgcggcatcatcgggccagctgcaccgatagcgaacagggcacagcgcgggccatacgcgccgacaaatgacatgcgtgatccgccgccccagttacacgcggcggccaacaccgcgggcgccgcccacgaaggcaaccagcgtggcaccccgccatctatagcgaccacacagctcgcgaccgacccctcacgaaacggtaacgaccacgcacgcccagctctactcagacgaaggccacaccccggggcctcaccgacgcatcacacgggccccgacgtgcccgggaccgtgacggccaacgtatggccatggtgcggcgcggcccaaccaccacaggggctcggctcacaacgctgcgccccggcccacactgtgaaccgctatcgaccccctcagcgcgcccaggcacaccgcgagagaagaccactacacgcgaccaacgccctggacggccgccaccccgcgcgacaaccaccgcgacagggggggccacccacacccgacgccgttacgcgcccacaacttcgaccacgggcaccagctagcgaccagccaccactgccgcaccggctaccgcggactatacacagcgcgatcaaaccaccacaccctacgggtgccatcatacccacaaccaccacagtcgcgatcgcggccaccagacgcgcgacagcggcgacacccacaaccaccaggccccccgacgcgccgcacaccacagcagcacgaaccacgcccgcccgcgacactgttggcgcagcacacaca

SEQ ID NO: 727827 - DNA, 158 bp, Homo sapiens
  misc_feature (1)..(1): n is a, c, g, or t
ncgactctagagatccccttatttagtaatatatttgtgatcaaaagggagtttgaatttatgacccacaatatgaatcttacagattcagatattaagctatgtgagaagaaaacaagatttgaggtggtaggagctgaagaggtgggaggagagga

SEQ ID NO: 727828 - DNA, 312 bp, Homo sapiens
tataactgaagaggattgagaggtaccaacttccagttataaagtaaataataaatagataaatgtcgtgtacagcatgggaaacatagttaataatattgtagtaacttggtatggtgacagatggtagctggactggtcgtggtgatccttttgtcgtgtatgggaatatgaaatcactatgttgtgtatctgaaattaatatcatattaaaagtcaattatatttcaaaaaagggattgctgtgggtcagtggcgtcggctcaattttcccgggataccgaagctacgaacatctcgtaagtcaatggt

SEQ ID NO: 727829 - DNA, 868 bp, Homo sapiens
  misc_feature (149)..(149): n is a, c, g, or t
ggcattttcctgcataaccctttcaaataggagacaatttcctggcccgggcacgggggctcactcctgaagtcccagcgctttgggaggccaaggcccacgttggtaatcaccctgtggctctacggatgtttgggaccagtcctganccgagcattgatgaaatccccattctctaggctataatacacatagaaattagccaggtgtgagtggcgcatgccgtgttaattcgcagtcgttcgtgtgcagagacctgatgggcacggacgaagtcgcttgagcccaggagggcagaaggattgcaggtgagctgaggattgcaaccatttgtcactccaatactggggcgagcaacggcaatagactccgtctcagaaaaaagaaaaataaaagaagacaatttcctcagtaaagaaatggacgcttataaataataaaattatggatcagcttaccctagttatgcatgtggaggaatacattgtaaggtatattagttatggctacagtaaagctgataacaaaacccatcaagcacaatagtttacaacaacatgcatttattttatggttcaggtacatatatgctgatgagttatgctgtgtgctggctgagttgtggatcccagatagccaggatccagttaagcaaaaaccagtcacatggtctaaaccccaaaatcagtgggcagagatgtacacaacccctacttgacccactgtggggtccagaggggggacgggattgggaccatttcccttcactaacaagaaaatcattctcttctattgggggattcaagcggtcctcctgtttctcaggtgcattgcgaaaaaacggatcaatgataaaagccgtagaata

SEQ ID NO: 727830 - DNA, 793 bp, Homo sapiens
gcctttgaagaagagttgggaagagtcaagggtcacttgtggacctatcaacagtgttgccttccatcctgatgcaagagctacagcagcgggggaaatggtacgtccgtatccattacttcgacccacagtacttcgaattggagtggaggctaaagaagctgatctcctgccgggcgtgttgctcatgcctgtaatcccaccactttttttttaaaggcaggcggatcacctgaggtcaggagtttaagaccagcctgaccaacatggagaaaccctcgtctctactaaaattacaaaatttagccaggcatgtgtgcacacgcctatagtcccagctactcaggaggctgaggcagggagaaatcactttgaacccaggaggcaagagtgttgcagtgaagctgagatcacggtcatgtgcattccatcctgagccaaaagagcaaaatccgtctcacaacacacacaaggagcgagggggggtctccaaccggggcagagaagtttcccacagaggtttcgggacttcccaaagacacaccgtggcgggacacaaagtggcttcgtggtccaggggaacacaccagacacacaaaaaaaacacccttggtgggcggggccggcccaaagaatttcaaaccatctgtgggcgccgcccagagagtatgaacattggcacagtggtgccaaggaatcggccgcatggtgggtcccccaaaaaaaaggcggaccgggttcggaaccccaaggggcgggtatgggcacacgcggcagcctacccccccggcgt

SEQ ID NO: 727831 - DNA, 1086 bp, Homo sapiens
ggccagaacacaggtgtcgtgaacactacccctaaaagccacacatgggaacggccaagactcatatcaacattgtcgtcattggacacgtagattcgggcaagtccaccactactggccatctgatctcatcaacatgcggtggcatcgcaccaaagcacacccattgcaacaacatttgcagcacaggcaggctgctgcagcatgggcacacagggctccttcaagctatgcctgggtcttgcgcatcacactgacaacgctgcagcgctgcacccgtgcctatcccccatggatcatctccttgttggccacttggaaacacagcacagtatcatactgtgatcaatactacactgagagtgccccacgagaccacacgagacctttactcacaaaaccatgacttaccagggaccctctcacggactgacctgtgctgtccctgacatgtcagctgctggtcgttgcgtgcacattcgcacagctggtcatctccaagaacatgggccgcacccgacgcagcatgcccgttctgcgcttacacactgggatgtgaacccaagtactctgtcggtgtcacacacacaactggattccactgagccaccccataacacgcgcagcacagacgattattgacggacaactcgcttaccaggacacgtccatgcacacttccacctacaccgacacacttgggcttccaacatccacggcaccacacgctacgcactaatctgcacaccataccatggctctgagacactgagctgacacccaccattgactcggacgcgaaaagttggtgttacacggccttggccacggagttccaacggggaactgccaccaacgacgcacgccgcacccggcgaacgcggccaacggcacccgacgggaaacaccaacctcttgcatgtgagaagcatcataagaaatggcaatctgtccccaaccaacatcagcgtaacctgcccaagacccgattgcgtcgccgcaatctgccacgaactcatctaccgtcccttagcgggcaactcgttaatcgtaccgctgctgcgaccggcaggccacacacctcca

SEQ ID NO: 727832 - DNA, 276 bp, Homo sapiens
atggtcgccgggtggtacgcggtgcgtgacaagatcaagcctgacctgctcgacaacgtggttccgagcgacgaagggatgtaaaccatgcaaacccacattctctacaccggcggaaccttgggtatggtatccactcctgacggtttggctccgggtgctgatctgacagggtggcttacccagttactatctggcaccgaactcgccggagctttcgagactcaaagtttcgagcatctcattgattcggccaacgccactcccgatgattgg

SEQ ID NO: 727833 - DNA, 90 bp, Homo sapiens
  misc_feature (61)..(61): n is a, c, g, or t
  misc_feature (81)..(81): n is a, c, g, or t
ttcctttacctacccaaatctcataaaatggccccacccgtatctcccttctgactctctntttggactcagcctgcctgnccccatgtg

SEQ ID NO: 727834 - DNA, 157 bp, Homo sapiens
  misc_feature (52)..(52): n is a, c, g, or t
ggctccaagtgatctcttgtaagacagaaaagttcacatgtccccgctcganccaggaagtcagctaggttcacctctcatttcttcagagaagggtgccttgcttctttctaaatcaggccttcctactgtctctcagaggggtgtgtgtgtctgt

SEQ ID NO: 727835 - DNA, 234 bp, Homo sapiens
acggtgtccttggtcatgagtgagcagctccatctccttcttagcaggtgtgtgtctttctctagcgatcaggaacttgcagtccttgtgcaaacaggtcatcgctctgcacacttgtcgtgcaggcggcggaggtggaaacgccagtgtacacagccgcaggactctggggcatgttgttcttcaccccatatgctgtggcagtggtggtggtgccattgggccagcgggggt

SEQ ID NO: 727836 - DNA, 437 bp, Homo sapiens
cgttggcctagatagccgaatcctcgctgatctggcggtgtatggcgtgctgcgtgtgatggaggggctggatgcacttcgatgacctgatgctagcacacgcacatccagccctggtacctgcggtgtgtagagggccatcaccgaggcctccctcagcgcactgaatgtccccgcgcagacgcagagtgtgaatggcagcgttgaacgacgccagctgccatgggcctggtggccactgcggccagcgcctggcgatactggttcgtgggcgcaggatcattctggccccttgtccactgcacccaccaccgagccctctcgcttctaacacagggcacctgctgggctacagggatcgcttaggctacgagttccagctcctgccacatgccctaggtgcgcagacccctgcctgtgccatgcctccctgctct

SEQ ID NO: 727837 - DNA, 1308 bp, Homo sapiens
gtaaggtattgccaacggaatgatgaagcctgaaacgatcgactcctattgatagctcttgcacctgacgtaccgtacatctctgcgacgaagcacagcagctagtgatgggacaaaaaggtggatcaagaaggccgatttacgcagacgtgagattgttcactcaggttgtacacacactgggagcaaagaagggccgagacgacatatgcgtgtgtacagaaacaaaggcacatgactagatcagtactgtagatccaatggctagttgtctcatattacaagtaacacataatccatgttccgatgacctagatgtagtcatgaaacctgacccggagcaaagtcacgacaactaatgcactcgtggaactgcctctcacgattaagcatcgagcagaagattccacgagcagagcactctacgtggtggaatgtcacatcatggcgtgactccctactcaaataacacccacaagacacgcgtcagtacgcatccaattgatgacaaagtccagaagagtggtcgatcttccatcacgcggtgtatgccttactacagcacaggtaaaggagtgtggacacagtctgctactgcgaggtgcgaaccttcccagaaatgctcaattctccgaagatctagggcgagattagtccacatgctcgggcaaaagggatattataccccatgtttcgaaattcatttcgaaatccatcagaatagcaatgagggttgtcggggctcccctgtgggcacctttatatgtcccctatgaaccaagatcttccccggcctcctagggttggtcaccaagacttgggtctgaaatttgggtcgtgggcctgccgccaaacagccagcttataggttctccccacatcctggaagaagcttagtgggtttggagcaaccccaaagaagcgggggcagcattaagagattcttccatacaacatagaagggggtctaccaaacacactgtgggctatctagatgttcacgaggaccagctccgtgtacaggtacaaatctcatcgtggtccgatccacgagagatccccgggtgtccggaagttttcccccaaagtgccgtgttgctacataacgccagtatcgtatacagtggcaggcataaatccttctaccacaagaggcatggacggcaagcgcagtggcaaaatatagagcaatacggaagactagttgtcttcgtctctaccgtctatatcgtaccgtacatcagcagcagacaaacatacactcagcatgtacactggactacaacgcagcatcgagacagcacagaa

SEQ ID NO: 727838 - DNA, 411 bp, Homo sapiens
agagttatatgtgtttcatttcgtttcctttggatatatacctggaagtggtattgctagttcatacagtagttctgttcttaactttttgaggaacctcctccgtacaattttccataatagctgcaccagccaggtgctgtggctcacgtctgtaatcccagcactttggaaggctgagacgagtggatcacgaggtcaggagttcaagaccagcatggccaacatggtgaaaccccgtctctactaaaattacaaaaattagctgggcatggtggcgggcgtctgtaatcccagctactcgggaggctgaggcaggagaatggcttgaacccaggaggccgatgttgtggtgagccgagatcacgccactgcacttcagtctgggcgacagagtgagactgagtctca

SEQ ID NO: 727839 - DNA, 612 bp, Homo sapiens
caccataattcacgatcctgtgcggaatttcgatataataagttgggggcattgagaaatgacctttccgagggggaaaggccttgaagggcactagacctgattaattatatagacggtgcccagcaagatgaaagttgccctttgttcctccggaggaagaatttattatgggagtttcccagtatggcataaaagtatcaacatcagatccataaaatgttttgcccaggcaagctctcttctttataatccggaaggtgtggttccaatacggtttgggggcgggaaaaaactttctggcttttaagaccccaaaagcaaacaattaggaaaacagcctgtggggttttagtgccacagcctgggacaagcccaaaccctttgcaagggtttatcccccgctttttgctttgtattaacatttgagaaaccctggatcctgccatcaagtagaaggccactttctttgaaaggtcagctgttttccaaccgcaaaggtgaaatgttatgccaaaaaagaaggtatcccctgctttaaatttttttaaaaaaaagggatggggaaaaagctggtcctttgttttttaaaaaggttcctttttccgtgga

SEQ ID NO: 727840 - DNA, 917 bp, Homo sapiens
cccctggtgtgatccgtcctgcgcgggttgtctctggagcagcgtctttatctccgccgccttctctcctacctaagtgtgtgccgccacccgatgaagatcgatggacatggacatgagcccctctgaggccccagaactatctttgcggttgtgaactaagggccgacaaagattatcacttaaaggtggataatgatgaaaatgagcaccagttatcttaagaacggtcagttaaaaggggctgtgcaaaaggatgagttgcacattgtgttgaagcagaggcaatgatttacgaagggcagtccaattaaagtaacattggcaagtttttgaaaaatgtcttgtacagccagcggttttcccctgtggggggcttggaaatataacaccaccaagtggtccttagggtggaagtcgtgggtcagggcccagtgcatattaggtgaccagcattgagtagcctgtggaggaagatgcagagtcagaagatgaaggaggaggcggaattgggaaccgtcttaaggtatatctggaaagcggtcctggccctgggtggtggtaagccaggttccacaagaccaatatgtaaaacttggtgctgattgaagatgtttgacgatgatgatgcagaggttgatgatgaagcttgatgatgatgagattggttgcatgaggaagctgagaaaagggccgggaagaaatttataggagaatcagggcagaatggcagaagcaatcggtggtagggtccacattttacccaggtcaagggagggattctagaaaggaaattctaaacaaagggtctttgtagattagcatgcaataaagggctccagggcgaaaaattgggagccgggagaggtaatggggggctaaaaagagcgctttgagtgttcaactgttttgagatc

SEQ ID NO: 727841 - DNA, 109 bp, Homo sapiens
cgatgaggagttggagagatgttgaatacaaggtgtgtggcttgcaaccacaacacttagggaaaaggttcccccagtcatttacgtctatgatgttgcttccatagct

SEQ ID NO: 727842 - DNA, 659 bp, Homo sapiens
tctgctctgctgctcattgttcttttccgtccgtcctcttgcttcgtcgttctgctcctggtctccatcttctgcctcgtctctctcgtgttcttcgtctgcttgctcttcgcccacacatggggcgccccgttttgccaccctaaaacccgtgtagtaaaggcggccccgggtctatcatagagaagttacttactcccgcccccttggggccacagacattctcaccacggaccagcgcctgtgcgaggagatccgcccattatcccccgccaaaagctcccgccaccaagatagccaggttatgtcacgcatctgatgaaccgaattcagagaggcccccataagaggtatcttcccatccagcttccggtaggaggagaagagaaaggagagcacccattatggtcctcgaggttctcaaccctggatcacagagattattgaagtagatcctcgaccctaaggaaatgctgaagcttttggagcttcggccatctgtcccaccctcaggtcaactcagcctaccattgggaatgaatttccaaacccctcggggacccgtttgaattttttctgtagtgctggattattttccataaatgcgggaaccacccaaaaaagaaaaaaaatacaagtcatcactcgtcgataatatg

SEQ ID NO: 727843 - DNA, 250 bp, Homo sapiens
ttccccccccccccccggggggaattttcccccctttttttttccccggggcccccccccgggggcccttttttttttaggggggggggggggggggggggggcccccccccccccccccccggggtttttttggttttgggttttttttcccccccggggcccctttttccttttttgggggggggggtttttgggttttttttgggggttttttttttcccctttccccctttttcccccccccccca

SEQ ID NO: 727844 - DNA, 258 bp, Homo sapiens
gatggtgttctcttttatgatgtggcccattgccggccagtaatgacgatcgaggagcggtacgatgacgataccgctgtgcgcgctgttctcaatgtagttgtgttccacccggttgttgcgggatccggccaacgcgataccgttccccgccatggtctcggtcgcgtagaacccggctgcttcatctttcaagccactatcagagatgacattgcccgccatgaccgtgtcgtggcccggcggatagcgctcgat

SEQ ID NO: 727845 - DNA, 1295 bp, Homo sapiens
ccattcacatctccgcgcccgttctccgagctgtcctcccgttccgctgccctgcccatgccaccatgacggaacaggccatctccattcgccaaagacttcttggcctggaggcatcgccgccgccatctccaagacggcctgtggatccgatcagagcgcggtccacagctgctgcttgccaggtcccagccacgccgagcacagcagcatcagccgccgcaccaagccagtcacccacagggccatcagttggcacctagccattagtccagccatccacccaaggcagccaggggcgatgacatggtccatatcgtgagacaggtggcaccaccattgtgccacaacgatcacattacagacatcactttaccacctagcatcaaaggcccacatcgaaacatatccgacacattacaaagcgactcaaggatacacacgcaaggagtacctctcaccatgagagcgggggcccgcatcggccaacaaacacgaccacacaacacgcccaggaataaccatagcagaacagcgataaacgctactaatggcaagcgagccaacaagcacattggcgcaccaatcacagtagacggagacatagaacagagaacacagggacacgaccgtcaaacacagttcccgccataccatgacaaatcatactcaggaatgaataacaccacacacaagacacaattgggagacacacttacactagcatcggccacaccaacaggaaccacaccccccacgggcagccagatggagaccacaacgagcccgggcacaccggcatagaagcgcaaccacaatgattccacccagagggccaacccacagagcagcgcacgaccagcaccgcgttaccacccgacaacgactggcaccaatgcgcaggagcaacgacaacacactggaccacacatgggcagctcgcaccaaaggcaacataccaactcccacagacaacgcaagtacactcccggaaacacgctagcacagccaatccgccgtacggcggcacacaccccatgaacatcaacccacaacaagggggtcagcgataccaccgcaggacgtcggaactccaatcaccaaggaaatcagccaaccagcgtggaccacgagctccaaatgtacgcacaactaccattaaccccactgaagtagcacgtctgcacaccagtcatcaacaagtcaccgcgaacggacaatgaaataacacagaacagtacacgcgagacacaccaagcagagggagacaacatagtccattccacacacaggac

SEQ ID NO: 727846 - DNA, 159 bp, Homo sapiens
gggtttttttttgggatgggcctgggcacggggccttttcttgtcagtgggggcccaccccccagagggcccccaacccccaggcagcccggcagaggaggggaggagaccagtcccccccccacccgtcccaaaaataaaggtttttgtgtttcttta

SEQ ID NO: 727847 - DNA, 147 bp, Homo sapiens
gggtagtctatcattgtcgggccgatcttttcgcactggagtcggcttaggttactgtcgtgtctacggccatctgtgtggagctgcgactagtagggctaggcccaccgctgcttcgcgggcggcaaagactagtatggccatagg

SEQ ID NO: 727848 - DNA, 370 bp, Homo sapiens
caccgctgcactctagcctggatgacagagagcaagactctgtctcaaagcaaaacaaaacaaaacaaaaaggcgggcgcagtacgtcacgcctgtaattacagtgctgcctataatcccagcactttgggatgccgaggcggccggatctcttgaggtcaggggttcgagaccagactggccaacatggtgaaaccccgtctctactaaaaacacaaaaattagccgggcgtggtggcgggcgcctgtagtcccagctactcgggaggctgaggcaggagaatcgcataaaccctggagggggagcttacagtgagccgagactgtgccactgcactccagcctggcgacagagcaagagtctgtctca

SEQ ID NO: 727849 - DNA, 81 bp, Homo sapiens
  misc_feature (70)..(70): n is a, c, g, or t
  misc_feature (74)..(74): n is a, c, g, or t
atgttccaaatacagcatttggcagaggctcacgaggcccagggaatcctctggaccatcagattaccantganagaggag

SEQ ID NO: 727850 - DNA, 513 bp, Homo sapiens
  misc_feature (203)..(203): n is a, c, g, or t
  misc_feature (232)..(232): n is a, c, g, or t
  misc_feature (244)..(244): n is a, c, g, or t
  misc_feature (327)..(327): n is a, c, g, or t
  misc_feature (377)..(377): n is a, c, g, or t
  misc_feature (388)..(388): n is a, c, g, or t
  misc_feature (404)..(404): n is a, c, g, or t
  misc_feature (422)..(422): n is a, c, g, or t
  misc_feature (441)..(441): n is a, c, g, or t
ggatctgcaaacaccgcaatctcaggaagtggagctacgtgatagtaaagatgatgatgacattgacctctttggatctgatgatgaggaggaaagtgaagaagcaaagaggctaagggaagaacgttcttggcacaaatatagaatcaagagaaagccaaataaacctgcacttgtatgccaagatcttccatacttactangatgtgaaaccttgggcatgatgagacangatatggcgaanattagacggagtgcgtcagcaagcattcaagccagacggcttatgtctggggctcatactaaactagttccagtggcgatacnggaattaagacaacttcaacatacagcgtgtatgattgaagatgataaangttggaacagnatatgctggaggagcnagatcactgcttttgagngactatgtgcagtccatgnatgtggctgctttcaacaagatctaaaatccatcctggatcatggcatttaaataaaagattgcggtgtttg

SEQ ID NO: 727851 - DNA, 213 bp, Homo sapiens
  misc_feature (18)..(18): n is a, c, g, or t
  misc_feature (23)..(23): n is a, c, g, or t
  misc_feature (26)..(27): n is a, c, g, or t
  misc_feature (34)..(34): n is a, c, g, or t
  misc_feature (50)..(50): n is a, c, g, or t
  misc_feature (77)..(77): n is a, c, g, or t
  misc_feature (88)..(88): n is a, c, g, or t
  misc_feature (104)..(104): n is a, c, g, or t
  misc_feature (122)..(122): n is a, c, g, or t
  misc_feature (141)..(141): n is a, c, g, or t
gtggggggattacgcggnaattntanngaaaacntttcacaatataccanttgtgtgttagtttgaagatgataaangttggaacagnatatgctggaggagcnagatcactgcttttgagngactatgtgcagtccatgnatgtggctgctttcaacaagatctaaaatccatcctggatcatggcatttaaataaaagattgcggtgtttg

SEQ ID NO: 727852 - DNA, 137 bp, Homo sapiens
  misc_feature (117)..(117): n is a, c, g, or t
  misc_feature (125)..(125): n is a, c, g, or t
ttaagtggttttccttttttttttttgtaagagaaaattaaaggtttttttttttaaattttgctttattgaggtttatattacaccattctaaggtgtaagggtttgatgagttcnaacatggncttcacttgtgt

SEQ ID NO: 727853 - DNA, 721 bp, Homo sapiens
ggcgggcacctgtaatcccagctactcgggaggctgaggcaggagaatgacttgaacccaggaggaggttgcagtgagctgagatcacgccactgcactccagcctgggcaacagaacgagactccatctccaaaaaaaaaaaaaaacctctaaatatatggggttaattcatagaaacaactggtaatttaaattacatattcatagtcgtggcctacgtggcatgagcatgtttttatggcttctaaccgggatggaaatctatgactttttataacagtcatggagtctgttccaaagggaactctggtgggtaagtattttggcatgatggtactcaagggtatcaaggtttaacaattggacttttttccattgggaaagcatatgtgattaactagcatgggatggcttctggacctggctggtcaggtggtaggtctttttcttctaatataataaccaggggattaatggaaaatcaaggttccatcctcagacaagaggtaaaggttcacacgattcttcccatggtctggtgccagaaaagaaacctattcaggatataagttaagctaatttagtaatcctataatggtcctctgagagatttagatggatgggccacttcacagtagcagccaactcacgggagcaccggggcaacgctagtgggactttttggtagtgagtgtgtgatcatagaacaatgtagatttc

SEQ ID NO: 727854 - DNA, 366 bp, Homo sapiens
  misc_feature (8)..(8): n is a, c, g, or t
  misc_feature (39)..(39): n is a, c, g, or t
  misc_feature (72)..(72): n is a, c, g, or t
  misc_feature (75)..(75): n is a, c, g, or t
  misc_feature (112)..(112): n is a, c, g, or t
  misc_feature (161)..(161): n is a, c, g, or t
  misc_feature (166)..(166): n is a, c, g, or t
  misc_feature (297)..(297): n is a, c, g, or t
  misc_feature (319)..(319): n is a, c, g, or t
  misc_feature (332)..(332): n is a, c, g, or t
  misc_feature (342)..(342): n is a, c, g, or t
tggccaantcctcccccacaatccgaaaactagtgcaanagagaaccatccttagtttaagttaacttacanaantggaggccgggcatggtgcttacgcttgtaatcccancactttgggaggccgaggtgggtggattatctgaggtcaggagtttganaccancttgggcaacatggtgaaaccccatctctactaaaaatacaaaagttagccaggtgtggtgcatgtgcctgtaatcccagctactcagcaggctgaggcaggagaatcgcttagaacccaggaggtggaanctgcagtgagccaagatcacgntactgcactccancctgggcaanagagcaagactctggctcaaaaaa

SEQ ID NO: 727855 - DNA, 1158 bp, Homo sapiens
gcagcatcaggggctcgggacggtaaaagtcgcttcgcacgtttccgactagtttggaagaactcgaagaaggccgggaaaggagtaggagatggcacgacgctgtacgctggggtctatgaagatagacgagagacgagtgacgacgttagcgaacgagtgggacacgggactgactagagtgtggcggcctccgaagaaacaagttgtaatgagaacagcacggaatatacaggacttacaagagtaaagatatgtggaacgtaaaatacgccagagaagcgaaccccgcatattgtaaagatttgtaacaaaatttcacagtatgcagactggaagtatagatacggttcgtagagtgggaaggtggattgggaacaccgagagggaggcccatattctagctggcttaggcacacaaatgggcgacgaaagtagccagttagtaagccgatcaaacagggagttgttctcttgcataagtaaggctatccgaggcggccttaaatcggatggtcgtaaacggcagttaaataaccgtagtcgtagatattcgttcacgccatcaatgttcaccgggtcccgaaaaggggtaccaagagtggtttcagcaaaggtcaagttataaaggtcgaaacacacgaggaagagaaaggctagcaagtggcaccccgttatccaaccattttgccgcccactacaaatgttgtccgtaatttaataaacatcagggtgttctgcccacgtatgtgtgtctgtaacgagtgtaagaataaaagagttttggcattagggagttaccgggttcgttggggtaagtaaaccgattaaaacaaggttaacccagtggacacaagggggatacgccttccccaaatttactagaagaggggaaagaatttttaagtgcatctgaatagtattaacctgtttaaagatatggaattgagcgtataagatttttgagttgggtgccacaatatttgtgggaagagattcattagctaaaggttaaggtatggcattagttaaaatcaagaatacttcggagtacgtgtgggatccatagggttggtgtaagagaccaacacttggattggcaaaccggttaagagtattggaaaagccttatacgtgggaggagatccacacaaaaaa

SEQ ID NO: 727856 - DNA, 336 bp, Homo sapiens
gaagcacaccctcgggctctgtctgtctgttagtagaacacctctctgtctttctctctcggtctctgtctgtctgttagtagaacacctctctgtctttctctgtcggtctctgtctgttagtagaacacctctctgtctttctctctcggtctctgtctgtctgttagaagaacacctctctgtctttctctctcgatctctgtctgttagtagaacacctctctgtctttctctctcggtctctgtctggctgctagtagaacacctctctgtctttctctgtcgctctctgtctgttagcagaacacctctctgtctatctctctcggtctc

SEQ ID NO: 727857 - DNA, 257 bp, Homo sapiens
gtacgacaaattagaaaaagttatatttatcacgaagcagcatacatatacacaaatataagagttacagctttcctgaggttggtttcatggacaagttattaggtcccatcgtggaatccaggattccagagtcttgggtttcagaggttatatcattggcttctagacctattgagcactcatgaaagcattgagaaatatctaatatctcttaatgccttagtatagatactcatatatcaaagtagactgtg

SEQ ID NO: 727858 - DNA, 286 bp, Homo sapiens
gatacagtatctctcacccagtctggagtgcaacagcgtggtctccgctcactgcaacctccacctcccagattcaaatgattcttgtgcctcagcctcctgagtagctgggactacaggcatgtgacactatgcctggctaatttttttgctatttttaagtagagacggggttttgccatgttggcccgaggcaggtggatcacttgaggccagaattcgagaccagcctggccaatgtggtgaaaccctgtatcactcttttaggcccttctgtcgtcttctc

SEQ ID NO: 727859 - DNA, 103 bp, Homo sapiens
tatgtgggacgtttccttggtcttcatggtccctgccagtcctgtgaactacaacttatgggtgtcggcatgacccaacatgaaatatgagctacagctggcg

SEQ ID NO: 727860 - DNA, 736 bp, Homo sapiens
  misc_feature (21)..(21): n is a, c, g, or t
  misc_feature (23)..(24): n is a, c, g, or t
  misc_feature (27)..(27): n is a, c, g, or t
  misc_feature (29)..(31): n is a, c, g, or t
  misc_feature (34)..(34): n is a, c, g, or t
tcaggctagtacgaggccctntnntcngnnnagngcggcgtgagaagccatgagcagcaaagtctctcgcgacaccctgtacgaggcggtgcgggaagtcctgcacgggaaccagcgcaagcgccgcaagttcctggagacggtggagttgcagatcagcttgaagaactatgatccccagaaggacaagcgcttctcgggcaccgtcaggcttaagtccactccccgccctaagttctctgtgtgtgtcctgggggaccagcagcactgtgacgaggctaaggccgtggatatcccccacatggacatcgaggcgctgaaaaaactcaacaagaataaaaaactggtcaagaagctggccaagaagtatgatgcgtttttggcctcagagtctctgatcaagcagattccacgaatcctcggcccaggtttaaataaggcaggaaagttcccttccctgctcacacacaacgaaaacatggtggccaaagtggatgaggtgaagtccacaatcaagttccaaatgaagaaggtgttatgtctggctgtagctgttggtcacgtgaagatgacagacgatgagcttgtgtataacattcacctggctgtcaacttcttggtgtcattgctcaagaaaaactggcagaatgtccgggccttatatatcaagagcaccatgggcaagccccagcgcctatattaaggcacatttgaataaattctattaccagttcta

SEQ ID NO: 727861 - DNA, 514 bp, Homo sapiens
  misc_feature (1)..(1): n is a, c, g, or t
  misc_feature (74)..(74): n is a, c, g, or t
  misc_feature (118)..(118): n is a, c, g, or t
  misc_feature (135)..(135): n is a, c, g, or t
  misc_feature (143)..(143): n is a, c, g, or t
  misc_feature (174)..(174): n is a, c, g, or t
  misc_feature (176)..(176): n is a, c, g, or t
  misc_feature (193)..(193): n is a, c, g, or t
  misc_feature (195)..(195): n is a, c, g, or t
  misc_feature (204)..(204): n is a, c, g, or t
  misc_feature (211)..(211): n is a, c, g, or t
  misc_feature (315)..(315): n is a, c, g, or t
  misc_feature (336)..(336): n is a, c, g, or t
  misc_feature (340)..(340): n is a, c, g, or t
  misc_feature (346)..(348): n is a, c, g, or t
  misc_feature (351)..(351): n is a, c, g, or t
  misc_feature (368)..(368): n is a, c, g, or t
  misc_feature (381)..(381): n is a, c, g, or t
  misc_feature (385)..(386): n is a, c, g, or t
  misc_feature (390)..(390): n is a, c, g, or t
  misc_feature (423)..(423): n is a, c, g, or t
  misc_feature (427)..(427): n is a, c, g, or t
  misc_feature (465)..(465): n is a, c, g, or t
  misc_feature (471)..(471): n is a, c, g, or t
  misc_feature (486)..(486): n is a, c, g, or t
  misc_feature (498)..(498): n is a, c, g, or t
  misc_feature (507)..(507): n is a, c, g, or t
  misc_feature (509)..(509): n is a, c, g, or t
  misc_feature (512)..(512): n is a, c, g, or t
nagcggccggctctcctggcgccccgttctccctcccattctctaggtccctggaggccagacccctgggtgtngcccatcctagcagtggttctggctgggtctgtcctgggcaggngaggagggtccctgganaggcagtnatggctacaacgtctgtagggaactggggananttccggccaaccatganangcccaagcntgctcanctctgcacttctggggatccccttattcctgactctcccccctcccccacctggaatatacctaggccctgcaccctaatgatgaggatcggggtgaaggggtncaaaatgtcctgggggttttncgancgcttnnnagnggactcagcaaggggancgtagggcgggcntcanntctncagctccaagaggcaattgggctctaaaggtgngganccggccgggctggagctatgggcctcgcggaggtcctncaacanccggaaaaccgggcnaatgaatcctcngggactttncnaangc

SEQ ID NO: 727862 - DNA, 113 bp, Homo sapiens
aggatccctcgggagtagacttgaggaatgctggtgatattggtatcagcaatgcggatgtagcggacgagcatatcttcagttacgcgcgtgtgaaaggccccattttcaat

SEQ ID NO: 727863 - DNA, 784 bp, Homo sapiens
  misc_feature (21)..(21): n is a, c, g, or t
  misc_feature (23)..(24): n is a, c, g, or t
  misc_feature (27)..(27): n is a, c, g, or t
  misc_feature (29)..(31): n is a, c, g, or t
  misc_feature (34)..(34): n is a, c, g, or t
tcaggctagtacgaggccctntnntcngnnnagngcggcgtgagaagccatgagcagcaaagtctctcgcgacaccctgtacgaggcggtgcgggaagtcctgcacgggaaccagcgcaagcgccgcaagttcctggagacggtggagttgcagatcagcttgaagaactatgatccccagaaggacaagcgcttctcgggcaccgtcaggcttaagtccactccccgccctaagttctctgtgtgtgtcctgggggaccagcagcactgtgacgaggctaaggccgtggatatcccccacatggacatcgaggcgctgaaaaaactcaacaagaataaaaaactggtcaagaagctggccaagaagtatgatgcgtttttggcctcagagtctctgatcaagcagattccacgaatcctcggcccaggtttaaataaggcaggaaagttcccttccctgctcacacacaacgaaaacatggtggccaaagtggatgaggtgaagtccacaatcaagttccaaatgaagaaggtgttatgtctggctgtagctgttggtcacgtgaagatgacagacgatgagcttgtgtataacattcacctggctgtcaacttcttggtgtcattgctcaagaaaaactggcagaatgtccgggccttatatatcaagagcaccatgggcaagccccagcgcctatattaaggcacatttgaataaattctattaccagttctagcaaagagtaagacaattgcaaggcattgtagtagggtgcggaaaacg

SEQ ID NO: 727864 - DNA, 733 bp, Homo sapiens
  misc_feature (21)..(21): n is a, c, g, or t
  misc_feature (23)..(24): n is a, c, g, or t
  misc_feature (27)..(27): n is a, c, g, or t
  misc_feature (29)..(31): n is a, c, g, or t
  misc_feature (34)..(34): n is a, c, g, or t
  misc_feature (678)..(679): n is a, c, g, or t
tcaggctagtacgaggccctntnntcngnnnagngcggcgtgagaagccatgagcagcaaagtctctcgcgacaccctgtacgaggcggtgcgggaagtcctgcacgggaaccagcgcaagcgccgcaagttcctggagacggtggagttgcagatcagcttgaagaactatgatccccagaaggacaagcgcttctcgggcaccgtcaggcttaagtccactccccgccctaagttctctgtgtgtgtcctgggggaccagcagcactgtgacgaggctaaggccgtggatatcccccacatggacatcgaggcgctgaaaaaactcaacaagaataaaaaactggtcaagaagctggccaagaagtatgatgcgtttttggcctcagagtctctgatcaagcagattccacgaatcctcggcccaggtttaaataaggcaggaaagttcccttccctgctcacacacaacgaaaacatggtggccaaagtggatgaggtgaagtccacaatcaagttccaaatgaagaaggtgttatgtctggctgtagctgttggtcacgtgaagatgacagacgatgagcttgtgtataacattcacctggctgtcaacttcttggtgtcattgctcaagaaaaactggcaaaacgtgcgggctctgtacatcaagagcaccanngcaagccccagcgtctgtattaggatgctccaataaacctcactgctgccactc

SEQ ID NO: 727865 - DNA, 163 bp, Homo sapiens
gttgcctcatgcagttggttggcctactgtgcagctcaatatgccatggctcagaccttggagcgccagtgccacacctttctccttggcccatgttgtgagcactcgtgaacccacttgaggcagacgcctgaggctctgtcaccgagtgccatgctctaca

SEQ ID NO: 727866 - DNA, 860 bp, Homo sapiens
agctggagagaaggaagtggcggagagggcagggagagacgtgtacggacggactctgcgtgaccgcgggacaccagcgggttgggtagggctccccgggcgtccccgcccggtggcggggcccatgggtacggtcccccgtgcgcgaaagaggagccccaaagtacacgggggaaaacaaagtggcagggataacaagagaaaatctggcttgaagccgaggggtccttgtggctggagaatcacgaggcaagtcgtgtcggcaaagcgtccaatgtgctcgcccgaaccctgaatctttggacccagcgggaaaaaatggctctcctcaagtggggtccccccatgtgggcgtggaaagagcggtggcccgctagcctttgggaacaaggagccacccccggcggtgtgagaaagtgaaagtacaccttgaccccgggcggcacgacagagtgcgttcggccccaagggagagatcccgtgtgggagaccagttaaaaaaggccatttctcgtctaaggtaattacaaggatctgaatcccccttcataaggtggttgatccacgatggagccctgccaccgacggtgggtggaacctactgccccagcgggaaacccccttatttcctctggcccccaattcttcacctttagacgtgcgaacccccctgcaccccccgtgttgtaagatatatacgaaaatagtatatctataagagagaaaaagcttcccgtcctctgtgtgaataagaccccccgcttctaatactaggccagccatggggacatttttttgaatgaagaacgtctttccttttttttttaaaaaaacttaaaaaaaaattcccccaacaaaac

SEQ ID NO: 727867 - DNA, 1121 bp, Homo sapiens
  misc_feature (21)..(21): n is a, c, g, or t
  misc_feature (23)..(24): n is a, c, g, or t
  misc_feature (27)..(27): n is a, c, g, or t
  misc_feature (29)..(31): n is a, c, g, or t
  misc_feature (34)..(34): n is a, c, g, or t
  misc_feature (216)..(216): n is a, c, g, or t
  misc_feature (232)..(232): n is a, c, g, or t
  misc_feature (237)..(237): n is a, c, g, or t
  misc_feature (565)..(565): n is a, c, g, or t
tcaggctagtacgaggccctntnntcngnnnagngcggcgtgagaagccatgagcagcaaagtctctcgcgacaccctgtacgaggcggtgcgggaagtcctgcacgggaaccagcgcaagcgccgcaagttcctggagacggtggagttgcagatcagcttgaagaactatgatccccagaaggacaagcgcttctcgggcaccgtcaggttggnaccgttctgatcccanccagncctcagtgcccccgtgcttgcccctcccctgcaggctcccgctgagccggaggcgggcacgtcggtactgatgtgctagggtagttcagaccctctgctccgggcaggcgcggcgtggacggatcccctaccctgtgttcttaaaacatgaggggaggcgtgggatcggcctctggcctgagcaccgcacggccagcctgagaagccaggcatggatgctggtcgaatagtgaacgcgtccaggtgtaaggctacggttggctagcatagcggtcccatgaccacttcaccggacccttgaggacccaggtgctaggtcgtaacctgnttgagtgctgtcccaccgaaagacgcaggcacttaagtccactccccgccctaagttctctgtgtgtgtcctgggggaccagcagcactgtgacgaggctaaggccgtggatatcccccacatggacatcgaggcgctgaaaaaactcaacaagaataaaaaactggtcaagaagctggccaagaagtatgatgcgtttttggcctcagagtctctgatcaagcagattccacgaatcctcggcccaggtttaaataaggcaggaaagttcccttccctgctcacacacaacgaaaacatggtggccaaagtggatgaggtgaagtccacaatcaagttccaaatgaagaaggtgttatgtctggctgtagctgttggtcacgtgaagatgacagacgatgagcttgtgtataacattcacctggctgtcaacttcttggtgtcattgctcaagaaaaactggcagaatgtccgggccttatatatcaagagcaccatgggcaagccccagcgcctatattaaggcacatttgaataaattctattaccagttcta

SEQ ID NO: 727868 - DNA, 797 bp, Homo sapiens
atccccaggctggagtcaggctcagcgtgtggggctgggagcatgggctctcaggctgctgctgagtggaggaattgggccgcctggcgagtgtgtcctccagcctctctgtgatgctccatggagtgggggtctgggagtggtgagggaagggtggctgcatctcgatgagctcgctctgacaaatttctcggtccatgacaatgtgggggtgtagtgaggcgcagctgtggtcagggccatgcttgcatgggtgccagtggtggccgtccttcctcagtcctgtctggcctccctctgcagtggtgcttcaaggatgaccggatcgtcttctggacttggatgttctccacctagcttcatgtggcgaaatgtggctccccggctaggaccggagcatgcttgttcatatgtgacgcctggaagcgtggcgtactccggctagcgaagagcggtgcgagactgggacggaacggcagctgagtcctgaggtggacggtggcaggtgtaccgagtcgggactccaagaagctgccaggcctggcgatgacctgacatcgagctgggagtgagagcgtctgcctgagtctcatcctgcagaaggctggactacatggtgacctgtgcgtgtgtggcacaccgtgctgacggctggggacattcacggtccgtaagaagaaatctcagcaagtgtacgcgtccccagtgaacaccccgatggacgagaagggggaggagtcccaggatcagctaccgccaacatcgttcttccatgattgacgagcttcgagggcagt

SEQ ID NO: 727869 - DNA, 195 bp, Homo sapiens
ttgcctttctaattgatggctccagcagagttggggatagcaatttccgcctcatgcttgaatattgtattccacacatagccaatgacttttgaaatctcggacattggtgccaacgatagctagctgtacacgcttactatatgatcagccgcacggagttcagttttcacctgacaacggcgtgtacccgac

SEQ ID NO: 727870 - DNA, 1465 bp, Homo sapiens
  misc_feature (560)..(560): n is a, c, g, or t
  misc_feature (576)..(576): n is a, c, g, or t
  misc_feature (581)..(581): n is a, c, g, or t
  misc_feature (909)..(909): n is a, c, g, or t
cgcgggtgagaagccagtgaggtgagttggtcctgaaagcgctatccgcgttcatccgcgccttcaggtgccccggcgagggttcggatcctgtaggccgcggccgcggacccttggcgccagctgcgtccgcggggcatttctcaaggcggggtcggcctgcgggtcgcccttcctaccaggtccgatcactgagagcctcccgtcttccaccggggcttgggtctgggtctgagtcgtcccgtgcgctctagcttggtgtccggaagtctacgggggagtccgcgcgtgggcccggccgcccgtcgtcggaagcctagacctcggaggcttcctaggcagtccgagcgtgtggactccggcgggccgtgagcgcccggtcggcttctctcccgcagcagcaaagtctctcgcgacaccctgtacgaggcggtgcgggaagtcctgcacgggaaccagcgcaagcgccgcaagttcctggagacggtggagttgcagatcagcttgaagaactatgatccccagaaggacaagcgcttctcgggcaccgtcaggttggnaccgttctgatcccanccagncctcagtgcccccgtgcttgcccctcccctgcaggctcccgctgagccggaggcgggcacgtcggtactgatgtgctagggtagttcagaccctctgctccgggcaggcgcggcgtggacggatcccctaccctgtgttcttaaaacatgaggggaggcgtgggatcggcctctggcctgagcaccgcacggccagcctgagaagccaggcatggatgctggtcgaatagtgaacgcgtccaggtgtaaggctacggttggctagcatagcggtcccatgaccacttcaccggacccttgaggacccaggtgctaggtcgtaacctgnttgagtgctgtcccaccgaaagacgcaggcacttaagtccactccccgccctaagttctctgtgtgtgtcctgggggaccagcagcactgtgacgaggctaaggccgtggatatcccccacatggacatcgaggcgctgaaaaaactcaacaagaataaaaaactggtcaagaagctggccaagaagtatgatgcgtttttggcctcagagtctctgatcaagcagattccacgaatcctcggcccaggtttaaataaggcaggaaagttcccttccctgctcacacacaacgaaaacatggtggccaaagtggatgaggtgaagtccacaatcaagttccaaatgaagaaggtgttatgtctggctgtagctgttggtcacgtgaagatgacagacgatgagcttgtgtataacattcacctggctgtcaacttcttggtgtcattgctcaagaaaaactggcagaatgtccgggccttatatatcaagagcaccatgggcaagccccagcgcctatattaaggcacatttgaataaattctattaccagttcta

SEQ ID NO: 727871 - DNA, 766 bp, Homo sapiens
  misc_feature (21)..(21): n is a, c, g, or t
  misc_feature (23)..(24): n is a, c, g, or t
  misc_feature (27)..(27): n is a, c, g, or t
  misc_feature (29)..(31): n is a, c, g, or t
  misc_feature (34)..(34): n is a, c, g, or t
tcaggctagtacgaggccctntnntcngnnnagngcggcgtgagaagccatgagcagcaaagtctctcgcgacaccctgtacgaggcggtgcgggaagtcctgcacgggaaccagcgcaagcgccgcaagttcctggagacggtggagttgcagatcagcttgaagaactatgatccccagaaggacaagcgcttctcgggcaccgtcaggcttaagtccactccccgccctaagttctctgtgtgtgtcctgggggaccagcagcactgtgacgaggctaaggccgtggatatcccccacatggacatcgaggcgctgaaaaaactcaacaaggacatcgaggcgctgaaaaaactcaacaagaataaaaaactggtcaagaagctggccaagaagtatgatgcgtttttggcctcagagtctctgatcaagcagattccacgaatcctcggcccaggtttaaataaggcaggaaagttcccttccctgctcacacacaacgaaaacatggtggccaaagtggatgaggtgaagtccacaatcaagttccaaatgaagaaggtgttatgtctggctgtagctgttggtcacgtgaagatgacagacgatgagcttgtgtataacattcacctggctgtcaacttcttggtgtcattgctcaagaaaaactggcagaatgtccgggccttatatatcaagagcaccatgggcaagccccagcgcctatattaaggcacatttgaataaattctattaccagttcta

SEQ ID NO: 727872 - DNA, 470 bp, Homo sapiens
  misc_feature (238)..(238): n is a, c, g, or t
attattttagtagtgttaatatttacctactttacacaactcaaaagaacatatatgttgactatatttttgtttaaaaaagataggaaaataggaaaacatacacataactacttggctatataaacacgatgaagataaaccagaaaacaatgatgttagttatctacaagggatggtgaggaggtaaagtgcaagcactggtatgctgctgtttatttgtactggcttgcaaganccaattgttaagtttccaggagttttgcaagctggctgacattatgttggtagtgtgaaattagccactgttgcgggtgtatttacaccatggaaatcagcaaatgttgcaaattgagacttttctgtcccaagtagcgcagcatccccaacagggggcgtaacacttctttgactacacttcaaaaaatacgtatttatcttttggaaagatttcaatgtttcatatatta

SEQ ID NO: 727873 - DNA, 377 bp, Homo sapiens
tggccgtgtcagtgatgaggaccccaagtatgcaggctttgcgtcacctgctggtatcatgtgctctcagctcatgagtagctttctaaggctgacaaactgctcagcaatgacacacagcccacatgctacagtctcttttcctgcaggctgtaggaatgagaaagtgcaaggataaatgacactaaataatgcagaggtgtacaccactcacgcaagagcataacaaagtacatttgagagagctgcacagtggaggggggcatgtggaaaggttagcactccacactgggctccaaatcatagctcttaagcttaaagacagcacccgcatgggtctccttcatgtctcaccagtccacctgcactgacaacgg

SEQ ID NO: 727874 - DNA, 289 bp, Homo sapiens
taacattcgtctcttctatagggtgatagcatgagtccaatatgggatgtgaggagtacagttatatgtttggcattttgtaggtaagtgagtgttgagacttgaacgctttcttaatgggtggctgcattataggcctactatgggtgtaaaattttttactctctctacaaggttttaacctagtgtccaaagagctgttcctctttggactaacagttacacttgtacaaggggatatagagggttctgtgagcaaatttaaagttgaactacgattctatctggg

SEQ ID NO: 727875 - DNA, 473 bp, Homo sapiens
ttcccgcaatggcatcatatcgcgagagtcgtatcccgtagaaagaaatttcttatcgaaagaaaaggaaaccgcaccacggtggtcaacaagatagccgacatcttgcccccaaagcttcaccttgcaagtaaacgtttcagcatgctttgccatacaaattacctctcaaactcaccatgaattcatcaaactaaccattagctcacaacggcttcgcccttcgacaagcgccttgcgattgaaaataatacgttcctttcggcatcgtaattaggtgcatgcttaaattgatcccatccaggcatgctggttttaaagtccggccagatatttccctttggcctcacaacctcaataatctttctgccatcaacgtgcagcaatccccacctttctggcaagtcttctttttcaatcacacctggagggcaaatgaaaaaccgatatatccccagaccaccttcagatcg

SEQ ID NO: 727876 - DNA, 778 bp, Homo sapiens
  misc_feature (21)..(21): n is a, c, g, or t
  misc_feature (23)..(24): n is a, c, g, or t
  misc_feature (27)..(27): n is a, c, g, or t
  misc_feature (29)..(31): n is a, c, g, or t
  misc_feature (34)..(34): n is a, c, g, or t
tcaggctagtacgaggccctntnntcngnnnagngcggcgtgagaagccatgagcagcaaagtctctcgcgacaccctgtacgaggcggtgcgggaagtcctgcacgggaaccagcgcaagcgccgcaagttcctggagacggtggagttgcagatcagcttgaagaactatgatccccagaaggacaagcgcttctcgggcaccgtcaggtggcttaatgtcacactcctccgctcgctaatgttctcttgtgttgtgtccgtgggcggacacatgcatgcacatgatgactgatggctagaggcccgtgcgatattcctcgcatcggtggacattcggatggcgtctgagttaaaacctcagcaagaattcacgaataaaaaactggtcaagaagctggccaagaagtatgatgcgtttttggcctcagagtctctgatcaagcagattccacgaatcctcggcccaggtttaaataaggcaggaaagttcccttccctgctcacacacaacgaaaacatggtggccaaagtggatgaggtgaagtccacaatcaagttccaaatgaagaaggtgttatgtctggctgtagctgttggtcacgtgaagatgacagacgatgagcttgtgtataacattcacctggctgtcaacttcttggtgtcattgctcaagaaaaactggcagaatgtccgggccttatatatcaagagcaccatgggcaagccccagcgcctatattaaggcacatttgaataaattctattaccagttcta

SEQ ID NO: 727877 - DNA, 1292 bp, Homo sapiens
tgttcgatgtgcactctcgttcacgtgatgtgggtgtccctctacccgttttgattgtgtgctctgtgacttctccgcgctcctctgtcggttcggtgtgcgttccccccatcttgtttagtgcccactctgttggtgaccccgttcaacggctgctgctctttctaccacccagtgggttttccctccccgcgtgtttgggttaaccccccccggggttgttcgaccgacccttgtccccccttgttccccccccctctggggggatttccgtgacaccagccggttggccccctccaacataagggcgcataaataaggggaaacaccctgggtttaaatatgtgtcgctttgtgtcgcccaaggggcccgttgtctatttggttgaccccctgagccactttataaggagggggttccctagaaggctttttcccacacatataatgtggttgggaggtttcctgggtaccctgaagggttggggtatccaccaccgccctttgggttccccttcttggggcctttgaagataattaaggcaattaattggggaaggggcaaaacctcccctccctgtggaagaatttcccctgtgcccacgaggttcccccagacgatggtatacaataggaggggaaatttgcgtgctcggaccctgtaattctggcgcccgagcggaataggattgggaaatgaagggtatcaaaatggcacgcaattaccacaggcttagccgcgggggccaccccaaagaagtttctttctcctgggaacaaagttttgtcctctaagacgccaaggagtggaaaaactggggaccaccccaaaggtaaacgccaacagtggtgagcccctcgggtttggaccacagccccagaaggcccacgcgtctcccacgtattataagccacaacccaggccctccggggagcccacacacggaagaagtggaattaagagcacccaagtctggcctcacctgaagtggaaccaagaacctgaatgggcctcaatacacgggtgaacacattcacccccacgggcacagcctgaccacactcttggcccctcagcgcacttatcccactttggaaatgtgaaagtggtggcacaagtgggcacgaggaccccccctgggaacccttttccctcacgttagctggggagactagcaccctcaggtaacccaccactggcgtaatttatatctgaacccagaccagacgcttggatccggccctatgcttaaggaatatatttatttgctaatatatttatccccccaata

SEQ ID NO: 727878 - DNA, 147 bp, Homo sapiens
gagtggggcaaagaatagggatactgaacatgcttgaacttggagatgaaaaagtttgaagtgtagtgtgcttcttttggaagactcacatattcaagccaaatgttaacatcattattcattcaacaagtatttattggatatata

SEQ ID NO: 727879 - DNA, 168 bp, Homo sapiens
catcttctccttacacactagcagagtgttctcatatcttaggggccatcgaagtttcatctacaacaattatcaatataaaccccctgtgtgaacctcagttatccagacaccctcttcgtctgatccgtcctaattacagcagtcctacttctcctatctctccca

SEQ ID NO: 727880 - DNA, 450 bp, Homo sapiens
  misc_feature (127)..(127): n is a, c, g, or t
agcagggtgggcatggattacggtagctgcttcttgagaccggctggttctgtggatgccagtgccatggtgaggtgctttttgggccgtgacccgaagcagggggccttcctcttgagcagggggntgcgggtcgggggttgcgagccggagccgcaggtcttgtggggtagagcactggaccgcgcagtatggaatgagatgcggcggcgggggtgtttttgtccttggttcaggatggggcaggatctggttcgtgccgggctttggaggggtgcctgagaggttgtcctgagtcacgcccttgaacgcccctccccggttgagggcggaatgatttttcttattggcctacacgattttggggtcggtccctaacaaaatgggggggtggcctggccctattacatatccatccttcttgcctggcagttaatccccttcctccga

SEQ ID NO: 727881 - DNA, 1014 bp, Homo sapiens
gatccgaccgcttgcgccgcatggagtccgaatcggaaagctggggctgctgctgacacccccccactggagaccctaagcttccatggtgatgaagagattatcgaggtggtagaacttgatcccggtccgccggacccagatgacctggcccaggcagcatggcaagcatgtggcactttgcaggcacagcacagcaggcaggcaagcagggccaacgacagcagggctgcggttctcagcaaccccaggcaaggggctggtcggccagccatggcagggccccgactgatagcgaggtcacctttgcatttgcactcagcatctgtgttctcgtgtgagcctggaccccaagaccaataccttggcagtgaccgggggtgaagcatgacaaagccttcgtatggcggctcagcgatggggagctgctctttgcagtgtgcaggccataaagactctgtgacttgtgctggtttcagccctgactccactctagtggccacaggggcaccatgagtggcctcttgcacagtgtggccaggtggcacactcaaggcaggagcgtctggtcctttgcacacgcgggcagacctggcagtggcatggacaaggcaatcctcgacgcaccaaggtcctgtctgggcggcacacacgcctgacggcaaaacctggactgacggcccagtcccgcactgcagactggacagaacgtaccagggtccccaaaagccaagccacacgggggcccgagctcatacacatgatcgcgacacacagcaggggcgacggccactaaccaatgcggacccacccaagaaaacagggaacacacgcacccagcgcgaacgcccccacacgcgtcaccggcaacgggcgacgggacgggcacaccgcgacccacacacacagacgtgccacgacaccacagcctgacaccgaacccaccacggccccccggcagtcgcagccccacggtccaggcccaccaacgcacaggagagggaacacaacgaa

SEQ ID NO: 727882 - DNA, 1577 bp, Homo sapiens
  misc_feature (675)..(675): n is a, c, g, or t
tgagtgcctaccctttcgttgttttatgtactcgtacctttgtatgtgtgccatacgtacggtgtgtggcttcccccaccagagagcgacgacagaagtgctttatataatggagcggcgcctggtttgtgtggtacgtctgtcgcctccctcctgtgtgtagtatatttttgtcccccccgttgtccccacccccttgggggggggagcacaccgagccgcaccaaggggggcgcttttaattccccccacgtgttgtgcgcccaccaggaaagggcgcctcactactttcgtgggtagggtagacgtcttttggtggaaggcccccccttggtggtgtgtggccgccccgtggtagcacgctccgttttcgtgtgggaagggtttcctcgagccccacacgttgcgtgtttgttagtaagaggaagggagatgtcggccccctcgtctgcgagtgtttgttttaataagtgagccccccctctctccctctttcgtccaacaagtctcccacaagagggcgtgttcgcccgccacaaacaggcgggatgatctggggtggcgcccccccccctggtttgttcctgttcgtgtagatccgccactagaggccgttaaatagtccttctcttgggcgccgttcctcctctgttggcgagaagaagttcccccacncaggggagagaagagggaagtgtggccacacccctgctgttggccccctcctgggtgttgtccccccgcaccttctcaacttgtctctggtggtgtgagaacaccccccacctgcttaccccacatctttcgtctcgtccctcccacatgtgttgctcaacagcgagacgtctacagccgcctctcactagagactcacacacagtgtgagagacacacagtttctcacacgctcctctgtgagaggagagtgagatattttctctgtgccacaggcttgtgtggttgcgccacacgctgctccacactgctcacagggcgcgcctcacacacccgcggttttgagagaccctctctgtgaaccacatctactctctacacagggcacccttggcccctgagattgggagcccacctgtgtcactcggacgattttgtgtcacactctacagagagagaaaaataacgctcctcccacctgtctcacacaggagatatcccacacacacgctctctcgtgagagaactcccctataggccacgcgacacactctcctcgagaaccccacaagaccacacttacacacacaccacgcctataacacacaccacgccttccgcacttaccccctcagagtttctccacagggttcttctctcttgccccccccaccccagattgggggaaagaccccaggtgggctttccccctgggctcgctgccccgagccccagccacctcttcttaggacaccccacacccacacccaaagagttgttcccttaaagattaagggccagaatccacccgcggggccagactgatcacccaattcccagactgtgttaaaagagagcttaatgataatattgtggtgcccacccaattaaatggatttatt

SEQ ID NO: 727883 - DNA, 117 bp, Homo sapiens
taaatttctggccctacactattctgttcccactgctagagagatttttttcctctacctccccattcttaaggtttcagtttagacaaagggaaacaccgggaactctctagagtc

SEQ ID NO: 727884 - DNA, 1638 bp, Homo sapiens
cgtggtgatggacacctgtaattccagctactcaggaggctgaggcaggagaatctcttgaactcgggaggtggaggctacagtgagccgagatcacgccattgcactccagcctgggcaaaaagagtgaaactccatcttgaaaaaaaaaaaaattcacgatcatctgtagcaaaatttaaatctttaatgctttcctcccccatcctccccacctatgggaatcggacaaaggttatgtttacgtaaattagcacttcaaatcttaagggatgtaggaggacattttcccttaagtagcccaatttctcccacagtggcaggaatcccaggacagacaagtcatggaagccagctgagggtcaacacaatggacctatccctagagcaccagaaatcgggaagacccggatggacgtggtagctccaagcctgtaatcccagcacttggggaggccaagatggatgggatcaactgacggccaggagtacgagaccaacctggcaacatggtgaagaacccaatccgctactaaaattacgaacatagccaggtgtggcggcccatgcctgcactcagcaatgggaggcagagcaagagaacagctgacgggaggcaaggtgcagagaaagttgtgccatgaaccagctgggaaaaggaaccgaccaaccaagaacggaccccgaggccaactacatgggccagggacacgcggcggtcagcgtgcacacaaacgagacgactggaaccaaagaaagacaatacaggctaattgcgccacgtcctcttttcagccatgagcaaacagaacaaagcaccaccacacaacgaagcagcaaaacagcacaacagagcacaaagaaacacagcaaacaaccaaccaaaaacaaaccacaacacgacaagcacaacaacccaagaccaacgcagcgcagcagggcgggcaggaggcagacgacgggagacgagagatgaggaggaagacaagcgaagaagagagagagaagacgacgggagaaggagaaagaggaggaagcaaaagaaggagagagaagagaggaaagacgaggacaagagggcgaagaggggcaacggacaggaacaggaggaagggcagggaggcggaggcgacagaagagagcaagagagcgagagggagagaggaggaaagggaaaaagagaagcagagaggaggcgaagcagggaaggaggagggagaaggcagaaaggacgaaggaacagagaagagacgacgagagcgcggaggagcacaaaggaagcagggagagaggagacgacgagggtggcgagacgtgaggggagggaaaggaagcgaggggcggaggagagaaaagaggaccaagaagagacgagaacggcaaaagagacggcgaaaggcagagcgaggagaaggcaagcagagagaaagcggagaagacacgagcgacgaggagagaggagcaccgaagcaagaggacaggagaaggaaagacagagagaagacggagagaagcagagcgagaccgaaagcacggagaagacaaaaaggagacggagcgaggggacaaggaaagacgggcaggcggaaacgaagacgaagacaggcgaggaacgaaggaagagacaagcaagcgaca

SEQ ID NO: 727885 - DNA, 208 bp, Homo sapiens
ttttgtaagcccttggtgaactgctgacttaactcagttttaagatttcctctttccccccaacttttccccattttttaaatgagggggtaattttctgcaaacatggccctttaatataatattgctgttagattcatgggaccctttatgaagcaaaaacatgaaaaggaaacccccactttaataaactttaaattaaagatta

SEQ ID NO: 727886 - DNA, 975 bp, Homo sapiens
ggatcttcgtgctaggcagagtttacacttgctaactggactatagcagccttatctcggttatagtacaaaacaagaacacagaaccattcaggatgactccattgaaaacaaacaggcaaaaataatgtcagcatggttcctgaaatccattcttgtttcattcgaaaactattaataatattgtgtggtcgagcaggtgtaagagctggttgtccgtctgaccaactcgtattatgatcgatccgtcatttcaaccctggaggtctctacatgtagagatggatttcttgaacgcgtccttcctaccagcatgatatgaagtaatgatagcatatcatccgacaaaaatgtcgttacggtggctgcttgtcacgcttatgtagtgatatcatttgtagtgttgagacatcagtgcgcatctctatatccaatagcactatttgaacatctgagagataggagaccagcaagaatcattcacgcgtggcgacactgaaccgcgggagacgcggtcgaaacagaggcgataattcgaccaggagtggatacaatagttggtatacgtgattacgcccgacacgccagagatgactcctgtgacacgaatggttcagcaataactttctcgcgcggctgtcccgcactgctacgctgcgtactcgcaatcacatggtcagcgaaaaacaccgcccgtggtaaacccaggtcatcgaaaatgaccccgcgcaaaacaccgacacacaacgcatggtcaacggacgacccccccaccacacccccccacaccaccagccgaggaagcccagcgggtcaccatatccacgagcagccctcccacaccccagctaggacaccgacacgccacccactaacaaccgactgccaccagacaagaacgccactacaccaactactgacacggaccgaaccaaacaccagcacactctcgtaacataccacacccagcacccc

SEQ ID NO: 727887 - DNA, 162 bp, Homo sapiens
accgcccctcagacgccggcacgcgtccgatatatcatcgccaagggctggagcctgagggctggaaggcgactgagcctgacgctcggaaggcgtcttgagaccaccatctgcctgagggctggaagctgctcctgcagacgctcggcaggcgtcttgaca

SEQ ID NO: 727888 - DNA, 112 bp, Homo sapiens
ctaggacagccaggacagccaggccagcaacgatgcccacttatggggatggtgggctgagaagatggctccgatctcagggtgaggggctccggcagcccctcgtgctggt

SEQ ID NO: 727889 - DNA, 318 bp, Homo sapiens
gggagaccaaaagctaacatgtgattagtagccatcccagtgatgttcttgaccataatttgagagctcagcacattcctggcaccgaattgccattcatttattacctgatatcattctcacattcacaagctttatgagctcattttacaggtgagtgatttgttcagatcacacagctattattgcagagcttggctttggactttgtctttttgctcagacacacctcttttcatattccccacagcctccttgagatgcgagaaccttcaaatttgtgccttctggtttgagtctctatggcacagcatgaca

SEQ ID NO: 727890 - DNA, 1029 bp, Homo sapiens
gaggcattgaggcagccagcgcaaggcgtttctgctgagtgcgggcgagagtcggagtcattgagcgataaccgggagaataaggtgtcatcttgtcatcattgtgaatgacgatagagtattgaatgacaacatcactctgatgaaagatatcagatcgcaatcagtgttgacataggaatcattgctgttagcgattttaagtttcttaacgttatatgttgtatgtagcttaatgattgtgaagaagtaaaattatgaagtacattagaaagaacgtggacatgaaggcataggcatcctagcatcaaacaggtttcttagaatacatgtacgagaggttgcagattgtaagctctcttcatgtgagttagataacacatgttatttgaaagatgaaaatgtagaagagaaagggagctacagaggcactcgcgaatttaataaccaatagaagggcaatggctttgtgaggatgtgagaatgagaggtgacttaaatcagctttagagtttacgtttcaaaagttgtaggtgattaggaataatttgaaggcgatcttttgaacagagatgagattaaatccgaaggtgattaaaagaccttgaaatccagtgacgcagggagaattgcgtcattgtaagagccgtagttaagcgcagtttactaaacgctagacgaaaatggcaacagattaacttgggacgtgggtaggatgacacacaatttggagaagatagaacgtcatgccgtggaaaactggaagacagaaagtacgggaaggcgacgcacccgactcgagaacgatcgggcaactttggaccggaattcacacccatcctttttagaacgcacacctccagattccattttacagctctgacaccaggtaggcaaggccaggacagaagagacccgcacgcaggctagggaacctaacaaccgctgtaggggacaaaatgctacacaaccttagcaggaaaattggacagcactcgaaaaccaggattgaacgctggaaacaacttg

SEQ ID NO: 727891 - DNA, 117 bp, Homo sapiens
acccagaagctttcaacccggaacggttccgcgagaaggtcgggaccttgggtggaaacaaccttcaggtcttgaatggagtcgacaaagacgatccgatcgcaattgtatacggct

SEQ ID NO: 727892 - DNA, 148 bp, Homo sapiens
tccatttctgactcctgtgtaactggtaccacaggcgcctgccaggtcctggagaaatagtagcatggcaatgtttgtgggttatttttttttaccacaattttagaggaaacccaattgattttgatacccaatattgacacatttt

SEQ ID NO: 727893 - DNA, 735 bp, Homo sapiens
  misc_feature (666)..(666): n is a, c, g, or t
ttaacggtgctagaaatgaaaattctaacccaagacgatgacgattcttagctgtaacttaagctattaaggccttttccacacgcattaatagtcccattttgctcttgccaattgtagctttgcccactggtcttatggcacatgggtggacacggatctgctggggctctgccttgaaacacacactgcagcttcaacttcttctctttagatgttctgttgaaactaatacttaccgagtcagacttcgtgttcatttcatttgcagggctcttggctgcctgtgggcttccccaggtggcctggaggtgggcaaagggaagtaacgagacacgacgatgttgtcaaggatggtttagcggactagaggctcagtggtgggagagatccgctgtcgagaaccctagcgcaactcatgaacgtggtttgcctgaggctgtaactgagagaagagattctggggcgtgtcttatggaggagatatagacattctcacataagcccagtgtcatcaccattgtcctcctttagcctttcagtgcagtttcttttcacattaggctgtgggttcaaacttttgggagcacggactgtcagttctctgggaagtggtcagcgcatcctgagggtcttctcctcctctgtctttgggagaaccagggnctcttctcaggggctctagggactgccaggctgttcagccaggaaggccaaaatcacgagtgagatgtc

SEQ ID NO: 727894 - DNA, 1132 bp, Homo sapiens
  misc_feature (223)..(223): n is a, c, g, or t
  misc_feature (263)..(263): n is a, c, g, or t
  misc_feature (554)..(554): n is a, c, g, or t
  misc_feature (557)..(557): n is a, c, g, or t
  misc_feature (561)..(561): n is a, c, g, or t
  misc_feature (584)..(584): n is a, c, g, or t
  misc_feature (588)..(588): n is a, c, g, or t
  misc_feature (596)..(596): n is a, c, g, or t
gggggtggcttccgtcctcaggagttcggaactatataaagttcagaaagacagtgtctctgaagatgaagtgacatccgaggaccactatatttatttccagaatggtcgcattatacctaagttgaatattgcgcatggaaatgcttattggacatgctaggcagcgtgtatagggagttttagcaaatgatggtgtgtgggcttgcggggcaggagcagnacgtccaacatcgcacgaagtcttctggtgatggaagtcntgtacttgttctggaaaaaaaatttataagactcgaagtggagggacagtgtgtttgccagttgtggacaggcatgaactgtctggagtgctgaatgttctggacgtaaatggaactacaggggctcagtgctcagaaggtattctatgacagtatcaggagccgataccttgtgagcagtcgggttacagcgctcgtgtgatatcaaacaatgcttatacacacattgtggatggagaacgtccctttggtgtttcattgctgtacattggctgggataagcactatggnttncagntctatcagagtgaccctagtggnaatnacgggggnatggaaggccacatgcattggtcaatcatagcgctgcagctgtgtcaatgttgtacatagactatataagaaggagaatatgaccttgtaagtcagcaccttgctttagctatcaatagtactaaataagtactcatggtatgttagtaaactctctgctgtattaaagtggaaattgcatactacttacatagagtagaatggaaagacagtaattagagttctcaaactaataaggatagtggagcagttgtatcttaaaaacatgaggaagatagtaagcctaaaagtctgagcgtgtagaagaaagtaaaagaacagaaagaaaaggataaatagaatcagagattttattactcatttggggcaccatttcagtgtaaaagcagtctactcttccacactaggaaggctttactttttttaactggtgcagtgggaaaataggacattacatactgaattgggtccttgtcatttcgtccaattgaatactttagtgtaacgatgattagcgtaccggtatggacgtctat

SEQ ID NO: 727895 - DNA, 544 bp, Homo sapiens
  misc_feature (174)..(174): n is a, c, g, or t
  misc_feature (191)..(191): n is a, c, g, or t
  misc_feature (247)..(247): n is a, c, g, or t
  misc_feature (256)..(256): n is a, c, g, or t
  misc_feature (323)..(323): n is a, c, g, or t
  misc_feature (400)..(400): n is a, c, g, or t
  misc_feature (427)..(427): n is a, c, g, or t
  misc_feature (429)..(429): n is a, c, g, or t
  misc_feature (462)..(462): n is a, c, g, or t
  misc_feature (514)..(514): n is a, c, g, or t
tacggctgcgagaagacaggtgatttctgcatttccgactgaggttttagctaaagaagatactgaggcagctattcaatcaatattatacaaagaaaattctgtaattaagggaaatgctttatagaacattatgatccaaaagagtatgatcccttttatatgagcaagaangaccccaattttctganggctatattcaataaaggattcaaagaagttgagaggtttcagctgcattccagantcccacaanttctattcaggcacttataactccaaacgagtggctgaaactgcctacaagatacatagaaagtgantttgtagaggagaagaaacaagggtctccttctagaaagagaaccgctgtgctatcaggagggaaataatccagtgncaaagaggccatctctgaagggtattntnttcctggagctcagccaggaacgggaggaagancaggatgggtctccctcccgcgttgggatgctgaagctggggctataaggangaggagtttcaccccaggggcacacacctg

SEQ ID NO: 727896 - DNA, 157 bp, Homo sapiens
tcgcctgtgtcggcttgagtgcatgggcgatcttgatcactgcacttcgcctcctggtccgtgatctcctgcctcaacctcctgagtagctgggatcgcaggtgccaccaccacgctccagctagtttttttttttttttttttttttttttttttt

SEQ ID NO: 727897 - DNA, 945 bp, Homo sapiens
taccggctcggccaagtgcgcacgtaatcgcgctcgtgcccgcgcgggtgcgttgccagtcctggcctgcgcccctgtcctgccgctcccgctcctcgcctggctgatgtatgttgttggcctgatggggagctacgtagccgaggtttgcgctgccgccgccaggcccggtccggttccatgcctctgcccggacgctagccggcctggccatggctgaccgcgggtgcccgctggaggcggcgcctgttgcctgcctgatggtgcgggagagcctgctgagctgtagcttggagctgtcggaaggtgacatcactcaaaaaggatatcaaacagaaaagggcaaagctgcttgcacgttatataccgcgttattcaaaggaatagacccgtctctgcaagcagacgaatagaattccttggccctcacaaaccactggcgctgcaacccaatgcagcagaagtctctggcccaccggctccgagggatgagcgcttccggtcagattgtccacacttgaagcctgtgcgaagcagcctttgtgccaagtacaaaggagaggaagatgcctatgcccttccaaggagacggttcttgtccttgtgcattacgtctgtggaaacctacacccctccagaacacgtcgtctgcctcagaagatgagggctcattacggcgaacccgggcgactcacctccacgtccggtaccagagccagttccagcgtcgagccctgggtcgaccgggtcattcagagggtcgagtagcacacttcagttccctcttagatatcgtacagcctcaatatcacccccggtgaaagaaaaaaccaaacagcatgttcccagatagatgaagccaaccaccggagccagccgacaccactcgactcaggagccacagagaaggcccaccagaatgatctgagatatagacacaccgaa

SEQ ID NO: 727898 - DNA, 553 bp, Homo sapiens
  misc_feature (219)..(219): n is a, c, g, or t
agcgggggtgacctaggtcgcatggacctgcgaggaacgtagagcgtcagggcagcgcgtcctcctgatcgcactcctttgcctcgttggccggacgatgtgcgagatccggcgtggtggctaccggcatgtagtactactaaggacccctgcgcccgctacgcccggttgcaagcccaagtcccattcgtctacagtgatgaaagcgttcgacctcantcgtggacccgacccgttgaccctcgttgagagaaatttactagagcggcagccacgcaaaagaacaggtattactactaccaccggcaggtaccgccgcgttgccagacatcactgagtgcaagggaggaggaccatcatgttgcatgtatgaagccgaaatgcagtggaagagggactacaaatgtcgaccaagaacattatcaacattatgcaggatcggctcaaagcctgtcagcagagggaaggacagaactaccagcagaactgtatcaaggaagtggagcagttcacccaggtggccaaggcctaccaaggaccgctatcaggacct

SEQ ID NO: 727899 - DNA, 356 bp, Homo sapiens
ataggatcccaatgcagcggactcgagcacatacatcgagaagtgcgtgcacgccgcagccccatcccctgattcggaaatgtggacatcttgtcatttgaggagtccaaccgcgccatgcagactggtgtctccgggatcatgattgcccgtgtcgccctgttcaagccgtggctcttcacggtagatcaaggagcagcggcactgggacatctcgtcgtccgtgcgcctggacatcctgcgggacttcaccaactacggtctgcagcactggggctcgtgacacgcagggcgtggagaagacccggtgctttctgctccactggctttccttcctgtgccgattccgctgcatt

SEQ ID NO: 727900 - DNA, 237 bp, Homo sapiens
gggagtagtgtaggagagactctgactctgttgagacagcctgtcaggataccgtccatgtctcctgaatcatgttcatagttgttgcctgctagagataagtcatccgaaagttgtcctttgaacaactcaaaaccccttcctatgaaacattttcttaaaaaagtccttcagtacaccacaaggaaaagatatacacattcgtcaggtatggtggctcacgctctaatgctagca

SEQ ID NO: 727901 - DNA, 388 bp, Homo sapiens
taagacttatttcatgatccagattattgactttttttgctaatgttttgtgtacacttgaaaagaatgtgtattccagacagtgtggtggcacactgcttgtaatcccaacactttagaaggctgagtgtgggaggatccctggaggccagaagtttgagaccagcctgagcaacagccagacctcatgtctgccaaaaatataaaaatcagccgggcactgtttggtgggcacctgcagttgcaactactcaggaggctgaaacaagaggattgcctgagcacaagaggtcaaggctacagtgagccatgatcatgctactgtactccagcctgggtgacagagaaagaccctatctcaaaaagaagcgtatacagcagcagaaag

SEQ ID NO: 727902 - DNA, 261 bp, Homo sapiens
tgcgggaatgaaagactcggtacctttctgtctgggtcagtctgttctcccagggctcatgtctcagattgagaactctgtgctgtgtaagtattttgcatacacaggatggtctatgtatcggtccattttgatgctgccaataaagatatacctgagactgggaagaaaaggagctttaacttgacttatagttccacatagatggggaggatcatggtggagtgtgaaaggcacttcttacatggcagcagcaagaga

SEQ ID NO: 727903 - DNA, 4452 bp, Homo sapiens
tcttctcgctggcggaggtgcgcgtaggctaccagtcacagaacatctcctgcttcttccgcctggtggatcgcgactctgtgtggggctacgacctggggttgcgctcactcatccccgcggtgctcaccgtcagcatgctgggctacccattcatcctacccgatatggtgggcggcaacgccgtgccccagcggacagccggcggcgatgtgcccgagcgcgagctctacattcgctggctggaagtggccgcctttatgccggccatgcagttctctatcccgccctggcgctacgacgcggaagtggtggccatcgcgcagaagttcgccgccctgcgggcctcgcttgtggcaccgctgttgcttgagctggcgggcgaggtcaccgacacgggtgaccctatcgtgcgccccctttggtggattgcgcccggcgacgagacagctcaccgtatcgactcgcagttccttattggggacacgctgcttgtggccccggtgctggagccaggcaagcaggagcgcgacgtctatttgcccgccggcaagtggcgcagctacaagggtgagcttttcgacaagacgccggtgctgctcaccgattacccggtcgacctggatgagatcgcctactttacctgggcgtcctgacccagcccagggcccggtaaccgcaaagcccccagtcttcatgcagaccttgaaccctccgtcacacccgcaccatgtactcccaggaacctccacctctataccacccattaagtggctgctgacttaaatgtgctggaaccagctgctgaaggtggggcctagggagggggcactgaagcaatctcctgctccaacgcacaatccttactgtgccctttccacccccacactcacaccaatctgcagaaacctcttccctggggtggaagccagagagcttagaggaaaaaggtcagctctcttcctgttatacatggttatacatggttggggtttaaaagcacaaagagaaacctccccctcctggctttcgtggccatctttgtccatcttaggtggggacttgatcttatttaaggtctccaaatagcccccaccacacttagaacgtgtgttttcttagtgttagaagccaggccctgagtccccagcactcacctgaactgtggctgatttggtcccagtccagctggggaggtgtttggctgacaaggaggcaagagatcccctcccagggaacaggaggactgggcttagcacagagccatcatcatgttcccaatttgtgaagagactcctaacactgcactaacccatttgtgtacatacatgggctcagccttgggccaaatgtgcctgatgggaacagacttgcagggccatgcaggccagacttcgtgccttaactgaagagtgtgcgtgtgtgtgtgtgtgagagagagagagagagaaacacgcatcatgggtccctgatctatgaaatgaacacaacctctctgaggctggatgatctggaggaagggggcatggagcaaatttgaggctctgattgctgagccagcctcctcccaggcggtttccccaggactctcgtaggaaataaatagccctttcaagattcctcagctgcctcaccccctgcacatgtgcctggggtgtggcctagaagggagtgatgttcttactctggtggtctgtgcttctgaacacaggctacatgcacacactgacaactaccaataaacagacaggggaaggtctttcatctcagccattttctcttccccccgcccccccttagatggagtcttgctctgtcacccaggttggagtgcagtggcacaatcagctcactgcaacccctcctcctaggttcaagcgattgagtagctgagattacaggcatgcatcactatgcctggctttttgtattttttagtagagatggggtttaccatgttggccaggctagtctcaaactcctgacctagtgatgcacccaccttggcctcccaaagtgttgggattacaggcatgagccaccacgccagccattttctctttctaagaagagcaacctcagccggagtgagttttttctgactttgcagctgagtctggagaaaagtggcatgccagagcgggtcggtgggaaacagggtgaactttagcttccatcaacagctctggtagcaaaaccagtcccctaccccctagagaatgcatccgtttccccacctgatatggtttggctgtgtccccacctaaaactcatcttgaattgtagctcccataattgccatgtgttgtgggaaggacccagtgggagataattgaaatatgggggcagtttccgccatactgttctggtgatagtgaatagatctcatgagagctgatgattttataagaggtttccccttttgcttagttctcattctctcttgcctgccgccatgtaagacgtgcctttctgtcatgcttgtgaggcctccccagccacgtggagctgtgagttcattaaacctctttttctttataaattacccagtcttggttatgtctttatcagcactgtgaaaatgaacctatacagtaaattggtaccagtagagtggggcgctgctgtaaatacccaaaaatgtggaagcaactttggaactgggtaacaggcagaggttggaacagtttggagggatcagaagacaggaaaatgtgggaaagtttgggacttcctagagacttgttaaatggctttgaccaaaatgctgataatgattgggacatgaaatccaggctgagttggtctcagatagcgatgaggaacttgtttggtactggagtaaaggtgactcttgctatattttagcaaagagactggctgcattttgcccctgccctagagatttgtggaactttgaactcgagggagatgatttagggtatctggcagaagaaatttctaagcagcaaagcattcatgaggtgacttgggtgctgttaaaagcattcagttttaaaagggaaacagactataaaagtttggaaaatttgcagcctgatgatgagatagaaaagaaaaacccattttctgaggataaattcaagccccctgcagaaatttgcataagtaacaaggagccaaatgttaatcactaagacatggggaaaatgtctgcagggcatgtcagagacctttgcagcagtgcctcccatcacaggcctggaggcctaggagggaaaaaatggttttgtgggccaggcccaaggtccccttgctgtgtgcagcccagggacttggtaccatgcatcccagctgctctagtcatggctaaaaggggccaagatacagctcaggccttggcttcagagggtgcaagccccaagtcttggcatcttccacgtagtgttgagcctgcaggtgcacagaagtcaagaactgaggtttgggaacctctgcctagatttcagagaatgtatggaaatgcatgtatgtccaggcagaagtttgctacaggagtgaggccctcatggagaacctctgttaaggcaatgtggaaggggaagcccccacacagagaccccactgggacactgcctagtagagctgtcagaagaaggccaccgtcctccagacatcagaatggtatatccactgacagcttgcaccatgcacctggaaaagccacagacactcaacgccagcctgtaaaagcaaccgagaagtaggctgtaccctgcaatgccataggggtggagctgcccaagaccatgggaacccacctcctgcatcagtgtgacctggatgtgagacatggagtcaaaggagaccattttggagctttaagatttaactgccctgctggatttcagacttgcatggggcctttagccacttcgttttggccaacttctcccacttgaaatgggtgtattcagccaatgcctgtacctccgttgtatctaggaagtaactaactagcctttgattttacaggctcataggtggaagggacttgccttgtttcagatgagactttggagtatggacttttgagttaatgctgaaatgagttaagactttgggggactgttgggaaggcatgattgatttttaaatgagaggacatgagatttgggaggggccagggagagaatgatatggtttggctgtgtccccatccaaatatcaccttaaattgtagctcccataattgtgggagggacctggtgggagataattgaatcataggggcagtttctcccatactgttctggtggtagtgaataagtctcacgagatctgatggtttaataaggggtttccccttttgcttggctctcattctctcttgtctgctgccatgtaagatgtgccttttgccttccaccatgattgtgaggcctcccagccacatggaactgtgagttcattaaacctctttttcttcat

SEQ ID NO: 727904 - DNA, 1235 bp, Homo sapiens
  misc_feature (215)..(215): n is a, c, g, or t
  misc_feature (308)..(309): n is a, c, g, or t
  misc_feature (328)..(328): n is a, c, g, or t
  misc_feature (341)..(341): n is a, c, g, or t
  misc_feature (346)..(346): n is a, c, g, or t
  misc_feature (358)..(358): n is a, c, g, or t
  misc_feature (369)..(369): n is a, c, g, or t
  misc_feature (485)..(485): n is a, c, g, or t
  misc_feature (493)..(493): n is a, c, g, or t
  misc_feature (575)..(575): n is a, c, g, or t
  misc_feature (625)..(625): n is a, c, g, or t
  misc_feature (680)..(680): n is a, c, g, or t
  misc_feature (719)..(721): n is a, c, g, or t
  misc_feature (727)..(727): n is a, c, g, or t
  misc_feature (731)..(731): n is a, c, g, or t
  misc_feature (736)..(736): n is a, c, g, or t
  misc_feature (738)..(738): n is a, c, g, or t
  misc_feature (740)..(740): n is a, c, g, or t
  misc_feature (744)..(744): n is a, c, g, or t
  misc_feature (747)..(747): n is a, c, g, or t
ggacggcgtgggtcgacccacgcgtcggttgtagttcttcaaaagcatgtgcagtagccagccatactatgtgtattcccagtatcatgtacgcactaaaaaaaatgtgtgcttgctgctgctgtgagtgaaccatgcttaagataaaaaacttaactagatctgtaaatgtacagaatagcatcagatgtttctgagagattagaaaatgtttngaatttataaaattaatgtttttctttgtaacatttatatatattttttaacattttaagtttaacagattgtattcctttcaagttctatanntgcttaagcaatctgattngagtaagggtctngattngtgctatatgtnctgttagtttngcatgaatatactaaagctttttttttttttctctagcatgtgtttctctcctcttgggttcctcttggtatttactactttctcttttcctggggtgtttttttctcccggtttnggtttggntgggggtttggtgccctggtctccatgggttccgggtatttctttacccctcgggtattccccaggggctgggatcgagatnggtccagtttatgcccagttccttcctcctcctcctcctcctcgggtaanagcactctggcgatgctgacactggccaacctccagtatcctcaccctcgcagangatatctctctgggcctcttaaatcccttacctgggaannngagggntttnaaacncngntttnacnttgaagggccttattcaagtgctgtgtaaatgcttccatttcgggctgcttttggttttccatttttctttcagaaagaatttttctaacttagggtctgtctggcttgtattacacccagaatacagtgttgggaacctaaatctgttggtgcgtctgcatcaaaggaacattggcttcacggggtgataaccttggatgaactgagattatgtccaagtaacgttaccgggtgaagtttacccacagtagctgacttcaaaggtgcctgttctgtaattttattttaaacccgtgttaccatagttcttaagttgtatatgctttatcagattgcctatgttgaaagcttactattatgaagttaattctgccttatgaagaccttaagaagggttccatttcacagggctaatggttggtactggctaggtatgttaaataatcattgctgggttataaagcagggaaactctaaaaaaaaaaag

SEQ ID NO: 727905 - DNA, 275 bp, Homo sapiens
tcctagaggatcccccccggtatccccacccggctaatttatgtattttagtagagattggggctttaccatgttggcaggctgtctcgaactcctgacctcacaagatccacccaccgtggctcccaaagtgctgggattacaggcgtgaggcaacacgcctggctcaaattcctgaaaatttaataagccagcattagtgagccaatacacaccagcccccagcacactgctgtgtataataattcccatgtatgggtggggatacccagggg

SEQ ID NO: 727906 - DNA, 186 bp, Homo sapiens
  misc_feature (53)..(53): n is a, c, g, or t
cagggtatagggtgggaccccttctcactggaaggtatttagacccacaatcnagaaaggagggggaacattagagtcctgccttggaacaggtaaaaagagggcaggaggtcagaggcctgcccctgaggcccaacgcacccaacattataacaaaagactgtaacaggggcttttggggttatg

SEQ ID NO: 727907 - DNA, 287 bp, Homo sapiens
ctgtcgcgtaactgtctgaaagttactgctaaggctggaagggtgtttagctgtcgcagcaacattcttaagcaggctatgtcagagccgacaatccagaattatctgtactctttaaatcgtgcttcagccactttggttggccttgggtgtgtgtgctcttgttgtgaattgggggtgaaaggggggcgggggatccacaaaagggcggcggagactttcatagctgggggcgaggacgcgcgagctacacaaggcgaataggatgtaactgggtcagtcttaca

SEQ ID NO: 727908 - DNA, 954 bp, Homo sapiens
  misc_feature (204)..(204): n is a, c, g, or t
gactagttctagatcgcgatctatagatattgtactagcatttaccatctcactctcataggaagtacgtgaagtatatcgcacacagctcatatccgcccgtactatgcctagcaaggaatagatacgtatcgcgtgttcattatagctactctcataaacctcaagactccagtcccatcttagaccaatgatgtgcctatngccatactagatctttgccgcgcgtgcgaagcaggcggtgggcctagtccctactagtcgtcaattctgcgcaaaacaatatggcgctagactacgtacataacctaaaactactccaatgctaaaactaatcgtgcccaacaatgtatatcagcgtaccactgagcatgacttgccagaaaacacataattggaatcagcgaaacgaaccacagcctaataataagcatcgatcccgtctagctattttatcaagcatagatcgaacaacaacctatttagctgttcccgcgaatccatgttcctccgaccgcctaaataaaccgcaacgctcctaatactaagtacctgattccttatccttgtcataatcgtgggcaccgccataggcctacttatccgagtgaaccaactgatcacgaaagaaactcgtagctactgctatactaagtactccctacaaatgctccgttaaagcatcacatacacagccaagaagtaatcgtattcacatgcttactccgaagaacacatttatctcaatcgtgggtaatcatgaccgatgagggacacagtcagaactgctgaagcagggcatatgactgcctattctagaccctaactaggtacctagccctaatacaatcgagtaattgtacactgcacaaacgtagggtcacaaaaattctaatatccaatggcatgggcaaagaatatcaagtccggagcaaaacttaaatgatagctaaa

SEQ ID NO: 727909 - DNA, 211 bp, Homo sapiens
ggattgtccccgtggaaatgggcttcgaggctacgccaccatgcctagagtatatctgtatatatagtagagacagggtttcaccatgataggactaggctggtctcgaactcctgacctcatgtgatccaccgtgcttcagccttctctgaagtgctgtggattacatggcgtgaggttcacctgcgcccatgcctgaattttctatatt

SEQ ID NO: 727910 - DNA, 140 bp, Homo sapiens
cctgttacccggtaaatggtaaagtacaatgattcctgagatcctctccaaagaaccagtgtatcagtatgttcagctcccctgtgctttgtccttcattttaaagtttaaattcctagttctttatttctccttgcccc

SEQ ID NO: 727911 - DNA, 321 bp, Homo sapiens
gcttcataaattataaagtaatatgaatagctctctctcacaggacagtcctagccctgtgtttcttgggcttctcaaagatttttttttatctataaatcacagtgaagattcatgattaggcaagagctcttcctgtcaacatggatggctctcctaacacaatgtgtgaacaaactgttggaatgttttgtttaagctgagtatttggtacctgcatattcattatatcacttatactttcttttttgaggcataaaaacatgcagaaaagtacactcatcttaagtgtacagcctaatggacttttacatatgttta

SEQ ID NO: 727912 - DNA, 419 bp, Homo sapiens
  misc_feature (24)..(24): n is a, c, g, or t
tttttcctgatttcccctggggtnccctttggtccaaagcagggtcccattcagtcacttgaggggccttatgattttattcctgggtttacacaatccttaagtcaaaatagaaaataaggaaaaaagcccagacgcggtggcctcactccctataatcctcagcatttcgggaggcccgaggtgggtggatcacctgaggtcagaagtttcccagccagccctggccaacataatgaaaccccatctctactaataatacaaaaattagctgggtgtggtggcaggtgcctgtagtcccagctactaagctgctcgggagactgaggcaggagaatcacttgagcccaggaggcagaggttgcaatgagccgagatggcgccattgcactccagtctgggtgataagagcacaactc

SEQ ID NO: 727913 - DNA, 299 bp, Homo sapiens
taaagaactctatacatacagtgtatatataccaaatgcaccctgaagcatgacagagtttgtcaccagcttgtggaattctagttcaccaagtgctggatctaatctgctgtgcccctaaaatagcatttcagaagtttaggatatgaaaaacagaagagagaaaaatattcattattaaaagccgaacctacattgtaccagttattggatactaaatgaccgacttgtttatccccttttgaatcagcagaaaccatggattatattctttttttcccttcagtagtgagcagatg

SEQ ID NO: 727914 - DNA, 385 bp, Homo sapiens
  misc_feature (12)..(12): n is a, c, g, or t
  misc_feature (42)..(42): n is a, c, g, or t
  misc_feature (325)..(325): n is a, c, g, or t
  misc_feature (358)..(358): n is a, c, g, or t
gcccacaaaaanggatgagttccatggtcctttgccgggacncggatgaagcctggaaacccatcattcctcagcaaactatcacaaggatagaaaaccaaacacccacatgttctcactcataagtggaagctgaacaatgagaacacatggacacagggagggaaacatcacaaaccagggccttttagggggtgaggggtacaggagggatagcattgggagaaacacctaatgtagatgacggattgatgggtgcagcaaactacaatggcacgtgtgtacctgtgtaataaacctatgcattctgcacatgtatcccagnaaagtataattttttaaaaaagattaaaaaggnatatataatagagttcatttcctatct

SEQ ID NO: 727915 - DNA, 776 bp, Homo sapiens
  misc_feature (61)..(62): n is a, c, g, or t
  misc_feature (65)..(67): n is a, c, g, or t
  misc_feature (70)..(70): n is a, c, g, or t
  misc_feature (94)..(94): n is a, c, g, or t
ggctgaaggctgtggcgcgcggctgtccccattcccacgtgaagcgctacgctagcatcgnncgnnngtngctcccagctcgccgcggagcagncccggcagcagcgggggaccggaattggtctcgcgtaaggctcagagagctagtcccggagcccggtgtgtggcgcctcggagcacggttgactggctgccatgtccctaattctgtctccatctctatactgagattgcctgggagcacccatgtgtatcccctgtctctaatcatgtttattgagcggccggctcatacgacggaaagtcacattgcgagagtaatggtacctgaccccatacaacacacgcagtctctctccgaggagtcaagctcactacgatcatcaagagttgctcaccccgaaatccgggcccaaggcgctccctccgaggccaccagcatcccgggccattctgaaagctttgcaggatgagtgggatgcagtcatgctgcacagttcactctgcgccagcagctgcagacaacccgccaagagctgtcacacgctctgtaccagcacgatgccgggctgccgtgtcattgcccgtctcaccaaggaagtcactgctgcccgagaagctctggctaccctgaaaccacaggctggctcattgtgccccaggctgtgtcaagttccaaccaagtgttgtgggtgcgggtgagccaactggatttgggtgagctgttgggaatgacacaggagaattttcggagctcaagaaaggcatgtgaacag

SEQ ID NO: 727916 - DNA, 677 bp, Homo sapiens
  misc_feature (345)..(345): n is a, c, g, or t
taagggggctcttttttaaaggaaactaaatcactgtttacaaaaccctggaaaagcccttttgcccatccctttaaaagttcccttggttaaacctttcctgtttaacaggaactggaaaaaaagggggggggaacacccccccccccttcctttgaaccacaggaagggaaaggccctgggctccaaccctgggccttaaaagggggacagttttttcttccaaatcctttcccatggggcctggatttgcatggatgaggggggcccatgcccccatggtttttaggccccccttcaaaccagagggaaagggtgggaatgcccccccccaggggcccgttnttggttattctgaaagctttgcaggatgagtgggatgcagtcatgctgcacagttcactctgcgccagcagctgcagacaacccgccaagagctgtcacacgctctgtaccagcacgatgccgggctgccgtgtcattgcccgtctcaccaaggaagtcactgctgcccgagaagctctggctaccctgaaaccacaggctggctcattgtgccccaggctgtgtcaagttccaaccaagtgttgtgggtgcgggtgagccaactggatttgggtgagctgttgggaatgacacaggagaattttcggagctcaagaaaggcatgtgaacag

SEQ ID NO: 727917 - DNA, 376 bp, Homo sapiens
agaaaaggaaatggttgaaaaacaaaaacaacaaggaaatagctgcagctgcagctactggaggttctgttctttaattttgcttccctttttggcattaaggacaaaaggtaacaccctaatttggccattggcagttttaaattggcagcccttcaaggtaaaagttttgaaagacaaaggatatatctttcccggggttcctataccccaccctctttaaacccaataaaatttgctaaacaagaaaaaaagggaaaattcttggggcaggaaaagaaagggggaacaaccccaattctgctgaaatggggaaaattttgttttggggaaacaggcccaaattaaaattggggggaatttgggggttattagg

SEQ ID NO: 727918 - DNA, 501 bp, Homo sapiens
  misc_feature (287)..(287): n is a, c, g, or t
  misc_feature (414)..(414): n is a, c, g, or t
  misc_feature (484)..(484): n is a, c, g, or t
aacaggctgatgctgtgatgtggttgagatgattacgtgcataccatctttaattgccattccattttgacttttctttttgatggtcacaagtgctgaaaaccctaatgtgctcaaaagcaagcttccacaacttttgttctgttagttgtatgcagcctgtgctacaaacaccagaattctctaagactgagagctgagtggttcatgtgtgtcctgtatctttgaaagtcaataaggtcatctttgcagaagtctgcatcattcatacaggattgcaccatccnggatgtaaggctcacggatgcagaagaaggtgaattacagtaatacgtggagctcactctcctcctctgcagcaggaccagaagtgctggctagcatcacagacactctactggcatacagagcacnaacacctcgtccagcatgttttgcttggcttagacatgttatcatttaaaaaacactttcagaagaggtncataaatcttttttttt

SEQ ID NO: 727919 - DNA, 177 bp, Homo sapiens
acctgtctggttcccaaatatttccatcagcctaaaataaaacccattggttgagcacgggggctcacacctgtaatcccaatactttgggaggccgaggcaggaggatcacttaagcctgggggttcgaaaccagcctgggcaatacagggggacctcatttttacaaaaaattta

SEQ ID NO: 727920 - DNA, 225 bp, Homo sapiens
  misc_feature (2)..(2): n is a, c, g, or t
tnggcgtgctgcggtgcatctcgcggctcccccgccctttttttacacttggtcccttcggccaactttatgttgttttgttctgttttgtttgagctggcgtctcgctctgttgcccaggctggcgtgcggtggcgcgatctcagctcaccccaacctccgcctcctgggttcaagcgcttctcctgccccagcctcccgcagtagctggggggtcccgcagct

SEQ ID NO: 727921 - DNA, 968 bp, Homo sapiens
gatgacgtatgtcaagcaataatgacctcagatagagttccagtatgtgccataagtcaaaaagaggtataaccggaacatacgtctgcgcctagtaaactgaaaatagacagagctctgcaggagacagacccaaacttgcatccggtatgatgaacaggtaatatccacagaatctgtgcgtatgcatggaatctctggaaaagagaaaatagagagcgagttaacgagacaaaacattgttgaatcgattgtaacagagagtattgaggctcatcccgtgtgtccaagtggatcacccggcttggtattgataggacgcctacctcgaaattaagctcgtgtgcctgtagatgcttgaaagaatcctgcatatgttacgccatagaatgccctacatggctgaaggaaggggctgcattgcaaatgactgtactgattcctgagagaattgctgtgaaacgtagctgaatggctatacactgtcgtcttaagcagagagtgtgtggacagaattttacctgtatgactgtctcatactaatctttgggcctccaaattcccaaagtaggcaatacaagtttagcttataagccctggacataggcatgcttggggtacatcaggaagactcatttcaaatgcaacttaaagacagattgtgtatcagcccatagggggggtacggagaattcatccggaagaagggataggccgaatcgtacgtttgtcccttcgatttgttgggccaacttggtaccttttgggaaatttccatcaactggggctctttatagtgacggccctcggaagctttttaccattatgaatagggcactccggagtgtacaaggccaaaaaattggtagatcctagaaacgtacgctaatctctcaaggacaaaacttttaacttcattaccgggacattaggaaggcctttcagagtttcattaatggatctgagcc

SEQ ID NO: 727922 - DNA, 798 bp, Homo sapiens
  misc_feature (127)..(127): n is a, c, g, or t
  misc_feature (172)..(172): n is a, c, g, or t
  misc_feature (176)..(176): n is a, c, g, or t
  misc_feature (181)..(181): n is a, c, g, or t
  misc_feature (189)..(189): n is a, c, g, or t
  misc_feature (191)..(191): n is a, c, g, or t
  misc_feature (274)..(274): n is a, c, g, or t
  misc_feature (290)..(290): n is a, c, g, or t
  misc_feature (298)..(298): n is a, c, g, or t
  misc_feature (301)..(301): n is a, c, g, or t
  misc_feature (303)..(303): n is a, c, g, or t
  misc_feature (319)..(319): n is a, c, g, or t
  misc_feature (366)..(366): n is a, c, g, or t
  misc_feature (373)..(373): n is a, c, g, or t
  misc_feature (417)..(417): n is a, c, g, or t
  misc_feature (428)..(428): n is a, c, g, or t
  misc_feature (459)..(459): n is a, c, g, or t
  misc_feature (463)..(463): n is a, c, g, or t
  misc_feature (488)..(488): n is a, c, g, or t
  misc_feature (494)..(494): n is a, c, g, or t
gatttcttgtagatgtatccttcacgttgtaaatatgtttgtagagtgaagccatgggaagccatgtgtaacagagcttagacatccaaaactaatcaatgctgaggtggctaaatacctagccttntacatgtaaacctgtctgcaaaattagcttttttaaaaaaaaaanaaanaaatngggggggntnaatttatcattcagaaatctggcattttcaaaaattcagtggcaagcgccaggcgattggggtctaaggatacgattttgganccatatgggccgtgtncacaaatntgnanacacctgtttccacanttgcacctgatcaagagcagtgcttctccattggtttggcagagaantgttttncattccccgtgtgttcccatttccttctgaaattctggatttantccattttttnaggcccctctttatctcctttcttaaggccntgtngctatggccttttctataacctttncatccngtgtacagtagtttaaaattgccgtgattgagcataacctaaattgtgcggtgataacatctttggaaatctcccatatgggcccccccggtaaagacaggggcctttaaaaaacgtaccgtgctggggaacacggcactggtggtggctccaaaagtgacccaatcggatgggcgccaacaatattacaggggcatatgggccccaattcgaaaccgttggtctggtcgggaaaggagaaaaacgaggggaaccacgagctagttcacactgtgcaacatcaggaatactgaggcaaataaac

SEQ ID NO: 727923 - DNA, 186 bp, Homo sapiens
ggatgtggtgtggagcgacggcatcccctcacattacataggaccagggcatcgacttcagtaacgaaatcctatcataacagaacagtacaaaaaaatagtaggggtgggttttttttttttttttttttttttttttttttttttttttttttttttttttttttttttttttttttttttttc

SEQ ID NO: 727924 - DNA, 119 bp, Homo sapiens
ccgcctactactactactgctcgaattcaagcttctaacgatgtacggggacatgactctagttaagcgatgcctttctgtagaacttactctttgtattgaacttgaggtttaaaaaa

SEQ ID NO: 727925 - DNA, 135 bp, Homo sapiens
tggtgctctcgccggtcccctcccatcaggacacattggcagttttgctaccctgcctccaggtcttcctgcgttttccttacgggccttattcttggtgtttccctactgttttgttagactgtgggacgaaga

SEQ ID NO: 727926 - DNA, 314 bp, Homo sapiens
  misc_feature (1)..(1): n is a, c, g, or t
  misc_feature (176)..(176): n is a, c, g, or t
ngctgtggagggtgaaggaaaggtcactttgaaagtgtctgcagctgcattcatttttttttagagccactttaaatcagtatgttactaaaccagaattctgagcctgattggttttaaaaattcaaatctcgtatcacctttattgcttatctacaaaaaactgggcatcaggnaaaatgaggatctagccctaggtctgctgctcactagatctgaaggccctgggttaaagcttcccttcttcagcagggccccatgtattcatctaaaatttgaactgggatgggattattcccatctggtatgattct

SEQ ID NO: 727927 - DNA, 101 bp, Homo sapiens
  misc_feature (44)..(44): n is a, c, g, or t
  misc_feature (70)..(70): n is a, c, g, or t
gatccagtggggtccggacactgggccccgcagcgaaagcacgntccagccaccaggaggccacctattntttcaaaataaagactgcgttcctctcttgg

SEQ ID NO: 727928 - DNA, 1774 bp, Homo sapiens
taattttggcataacaagtttatttttttaaacaggcaaacaaaaaaaacaaaacaaaaaaacaacaaaaaaaaaaaaaaaaaacaaaaaaaaaaaaacaaaacaaaaaaaaaacaaaaaaaaaacaaagacgaggcggcccccccaacaccacccacctattatagtaggagcgccaccaatacagatataacgcagacacacaaatctgatagtggtgaataaagaaggcgcgcctgcacacatactacagggcgctcatatattaaaaaaaaaagaagcagagagggataggatttacataaacatcatagatcaagagcgagaacactaaatcccagcgcaccgaactgagaacggacgaaacggatagagcaacgagagaagacgacaacccaccaccacacgaggcggaagagaaaaagaaacaacacgaaacaagagagggaaagagaacaaacaaaccaaaaaaccacacaaaatcctcgaacccacacaccaaacaccacccttccacacgagagaaacgcactatcataaaaaagacaactaagatagactgagcgagctgacgtgatctagagatgaggctagtgacttctacactactacgagatggctgcggactaacgctcgtgacgcgtcagcgcgaccgctaaagaaagacaacaaacatagatgtgacgccgcagtcccacgaacggactagaaccagatcaacatatcgacgatacactaaaaaacagatcattgatgcttaatcacaaacgaggagcgaggaacgataagagcagcgaagagaagaagtaaaacacgagtcgacatagacaacatgagcagagccacaaacgagcgcacgaactaggactggaatgcaggcagccactacaacccgaagccgagcactcgagcagagaaccgacgatgcagagtacgcaatcgaagacactcatgatgcacagcacaggaatccgaccgcgtctacgcgacgtctgccagagtgtaggcgcacgcgaagtgaacagacgcgccgtcctcgatcaactataccgcaccaccaaaacgacgtctggaagctactgccgacgcatggatgagataggtagcacggagcagcgacagcttcccgcacgtccattgcacctagaacaccgccaacaccagtacgagacggcggtaagccgaacagatagcagcaacaacgatcgacagtacagcaagagagcggagcagagcgagacagaaaccgacaaaggcggagcagagagactccaaacacaacataacgctacgatcacgtagacaacaacaacgagagggagacgaagcgcgagctacacacaggcctaacgaaagacacgatagatggatagaagaaagcgaaggagtagggaacgagcgacatgaggaaatgaagaaaacggagacgtaagaccggcaggcaggacgaagtgcggaaagataggagaacgggaggcacagacacgtaagaggatgagtacagctggctgggatggagatagtgacgaagaagagccccggaggagtcacaccgacatcatacagagcagcagagtagagaaggacgggacgcatggacgagatcagtgcgaccagcgagagataagatcaaggcagaataggagatcctggacgacgatacgaaactcaggagcagaacgtcgcgtgccgagagcgaagaaaaatagacactgaagaagaaaagaagagaatcccgcagcaaagcataaagcagaaagcgacggagcacgga

SEQ ID NO: 727929 - DNA, 181 bp, Homo sapiens
  misc_feature (68)..(68): n is a, c, g, or t
  misc_feature (123)..(123): n is a, c, g, or t
acagatgaggaatagcattcacgtagacgctgttttttttgtaccacagggcatgaagtgctctcctntgtttcgtcctggggctttttatttaactctggatcacagttactgcatttatcnttcttcagagattgaaggccattttgatagaatttcacgtttgctccttcctagtttc

SEQ ID NO: 727930 - DNA, 230 bp, Homo sapiens
  misc_feature (150)..(150): n is a, c, g, or t
ggtacttagaggatcccggttaggcctcgtcgagttgggcaagtgatgctgtagatacccccagacagtgattcaggacgctggccgataccccccaagagtggctcaggacgctggccgatacccccagaagtggtgcaggacgcttgncgatacccaccaggcgatggtgctggacgctggccgataccccccatacagtggctcatggacgctgtgcgatagccccg

SEQ ID NO: 727931 - DNA, 156 bp, Homo sapiens
tggtgtagtaatcgattacagaacaggctcctctagaggaatatgaagcaccgccaggtccttggagtttaaagctggtggctcgtagtggtctgggcgagcagttttggtggattaaactggtggaggttaacgggctaagcatggggtaccgga

SEQ ID NO: 727932 - DNA, 280 bp, Homo sapiens
  misc_feature (64)..(64): n is a, c, g, or t
aaatgttctgcccttgggtgcagtggttccgcccctgtaatcccagcactgtggcggatcaccntgagccaggagtttgagaccaacctggcaagatggcgagaccccatctctacaaaaaaatttaaaaattacctgggcatggtggcacacacctttattctcagctactcaggtggctgaggtgggaggatcccttgagcccaggtggtcaaggctgtggtgagctatgatcatgccactgcactccagcctgggtagcagaacaagaccctgtctc

SEQ ID NO: 727933 - DNA, 498 bp, Homo sapiens
ctatttcatgggatttcagttaatatttattatgtggcctttaccaactaactgtgcccaattttgaccacagggctatttttaaaaatagactttgcttctctaaataaaatatatatacaattacaggactataagctctgttagttcttcgatggtgaaatatatctacttccaataagccgaaatacatgtcctgaaaacaaagctaagtacctcagcatttacaatttagttaaacttcctttctagggaatccagttcattataaagaagttgtggcacacaaaatctagttctatttaaaatatatgaatcccaggtagtaagggagagaaagaagcaaggtcaatcaatagagaggtgataacagtggaataggcagaaaacctgcagacggtccgtaaatagatggtggctgtagggaagtcttttatttatctcggtatcttcatctttgtacataatccatttaacgtttactgaacaatcaccatg

SEQ ID NO: 727934 - DNA, 930 bp, Homo sapiens
atatacctggaatttctctagaaacaatggaggacggcatggtttaacagtcagccttcaatcttgcaccacacttacttcccccgtccgtgtaacaaatgccacgctgcacgtgaggcaccagtgaggaagatgtgcacgaggccgttcaactggtccgttctgtcgaggaaggagaatcggtgcgctatccgtcaaggagctggtagacgctgcgtggtcctagaagtctccgcctggctgagtgttccacactcacgtggactactggtcctgcgcatgattacacttggccaccgacagacaaagcgtgacccatcttcctagatgcactgtggcgcggaagctgaagcccctggggtgagcatggattcgtgctggtgagtccttgtcagctgaagcgtgctggagtgcgagcgccggggaccgtgcgccttcgaacggcctgctatccgtgcctgggacatgcgctactactagtgaaccagggtggagtgagcacgctctactgcgtggaccacgaacctgcgtcaaggagtacttccccgtgcaggtggtcagctgcacgggctgctgggcatctaccaggagctcctggggctggccttccaccacgaggagggcgccagtgcctggcatgaggacgtgcggctctacaccgcgagggacgcggcctcgggggaggtggtcggcaagttctacctggactgtacccgcgggcaaggaaagtacggtgcacgcggctgtttggcctgcagccggctgcctgcggcaggatggagccgccaaaatcgcatcgcggcatggtggcaacttcaccaaagccaagcgagcgcctcgcgtgcagcatgacgaggtgagactacttccatgatttggccacgtgattgcccaagtcctgcccagggattggcatgtcaggggacccgt

SEQ ID NO: 727935 - DNA, 385 bp, Homo sapiens
  misc_feature (134)..(134): n is a, c, g, or t
  misc_feature (211)..(211): n is a, c, g, or t
gatatgctgttcagcaatgtgtggccataattaggtctgtaattatgtatccttgatgatcgcataactgtggtggtggagtggtggatggatttttagagttgcttctgaactgagtctgggttatgctattnggaactgtcattgatggtgagatagagatgatggaagaaaacccaaatataccagaaatgggtagtacacctccatngtctatttatattttattctcatcaagatttccaccaaggtgactcacaccactaatcttatcactttggggggccgagtgggaggattgcttgaggccaagagtttgagacaagcctgggcaacatagcgagattctgtctctacagaagtttttttttttttttctttggga

SEQ ID NO: 727936 - DNA, 941 bp, Homo sapiens
accatctcacttctaggaatactagtatatcgctcacacctcatatcctccctactatgcctagaaggaataagtactatcgctggtcagttatagctactctcataaccctcaacacccactccctcttagccaatatggtgcctatgcgcatactagatctttgccggctgcgaatcagcggtgggcctagcccgtagtagtctcaggtctccagcacatatggccgtagtacatacgtacataacgcctaaacgctactccaagtgctaaaacgtaatcgtcccagacaatgtatatttactacgcactgacatgactttccataaaaaccgacataatttgaatcaacaccgaaacacccagagctaattattagcatcatccccctactatgttttaacccaaatcagacaacaactatttagactggttccccaatctatttgcctccggacccacctgaaaaacccacctgctaaatactgaagctatcctgactgcctaacccctcacaaatcgatagggaagacaggaggcgagcttatccaagtgacagcactatcacgcaaaccacaaactctaccgtgctgtgatactgagatctcgctgacaaatactcgttaacttatgaccattcccagcgcaacagaaacgtaagtcattacttggactatctgccttgggaaaccgtactataatgcccagcctttgcttgtattcatcacgccgatgaaggaaaccagccagaaagcgccgtgaaaacagggcacattcgtccataatctatcaccctatgtaaggttccctttcccatacatcatacgatctaatttaagctcaacaaaaccgttatgttacttaaaatttttaatactcaccttaagtgaccagaaataaaacatctgagccaaataaatagtggtacagagaatttaaga

SEQ ID NO: 727937 - DNA, 151 bp, Homo sapiens
aatcaagacaggagaggacaaccatggccacccaccataaggacttacagcacgtagctcgtaacgaggagacctatgaggttatagtaaccttgttgaccgattatcaaactgagaccaacgctttagacccaggtgacgagccacgacg

SEQ ID NO: 727938 - DNA, 186 bp, Homo sapiens
cacgaggcgaagcgcgcggcgaagcggtacatcgtctcgcgccaggtccagaagctgtcggcgggatcggtctggcgctcggccagtccggccatcgcacgctggaaggcgtgcgagtgcaggttggcgatgccgggcagcgtccagcggccgtcggcggtggtggcgacaaggggggtggagggg

SEQ ID NO: 727939 - DNA, 224 bp, Homo sapiens
tacagttgaatcttcttccttagagtaatgattttcaacattttttttttttggagacagagtctcgttctgtcgcccaggtgggattgcaagggggtgatctcggctcacggcaacctcggccggcggggttcaagcgattctccggtctcagcctcccgagtagcggggactacaggcgtgtgccaccacatccagcaaattgggtattttaagtaaagagg

SEQ ID NO: 727940 - DNA, 515 bp, Homo sapiens
ggctactgctatcgtggattcatcggaatccttcaccatggcatccacgcccggcccagcgtcggcgagtgcaatgatcctctcacctccagccctgtgccgaagctccctggactgtactagatgccctcacctccagccctgttgccgtgaccttccaccatttgatgattgagtcctgaggggctcctaggcacagagtggcccctggatgtgaagaagatgtgattggagaggacgctcattggagatggcatggaaatggtgactacctgcgccatctccagagctgtatcgcctatgagagccgagggactgtggtctgggatagatagagagacagtatggaggagctagacggccacgtcacgagggcatggcatgcatgagctggagccatgcggcagagtgaccgaggagtgcttgggcctggagtgcctggggccgcatgtgccgttgggctcctgtatgaccagcgatgacgagtacgaggagacgcctctgtgcctgcaaag

SEQ ID NO: 727941 - DNA, 255 bp, Homo sapiens
gtttgcaaggactaacccctataccttctgcatactgaattatactatgaaataactttgccaggagagccaaagctaagacccccgaaaccagacgagctaccttagaacagctcaaagagcacatcccgtctatttagcagaatattggtaagatttataggtagaggcgacaaacctaccgagccttgtgtatttgctggttgtcctcgtatgaatcttagttcaactttcatattttgccctttctggtgt

SEQ ID NO: 727942 - DNA, 363 bp, Homo sapiens
ttgctgggcaaaacgagcccgtggagagatccttccagtcaagtagcttcagggtaacctatggctagaggactagtacctgcatacttgtctacgactggggaacgacaagtcaaaaagttgatcttaccagatgtcacgaatacttttctaaacatcaagatacagctcagaacacttcaataacaagatttggtctacttaggcatccggcttgacagctaaacactttagaccacacaaagttaacatcatgttacatacgtcttacagtgcacgttaccccaatctgtgaaaataaaccaacatgaaactcaaaaagcattactagctctgctttagtgcctaaggtatcacagcatc

SEQ ID NO: 727943 - DNA, 162 bp, Homo sapiens
cccaccttcccaactgggacattctcaagcttttcacaccgaaaaggaaaaaaaatgttatttttagacacattttatgaataacttgtgtaaggaatagggcgggaacccttggggaaggtaataaagaaaccaaatggtggggaaaaaaccaaaaaaccc

SEQ ID NO: 727944 - DNA, 160 bp, Homo sapiens
acagcgatcagtgtagaggtgatgtccagaggttgaaaatttagagtgggagttaagagagataaatagaagataagtataggtggccaaagagagaaaatgaattagggtcactaaggcagaaatctagatccacaaatatagagagccgagctgtata

SEQ ID NO: 727945 - DNA, 305 bp, Homo sapiens
  misc_feature (206)..(206): n is a, c, g, or t
  misc_feature (219)..(219): n is a, c, g, or t
  misc_feature (250)..(250): n is a, c, g, or t
  misc_feature (259)..(259): n is a, c, g, or t
gcgcgtaaccgttccggtttggggttggcatcttagtatgcggctgcagcactttcacacgaaatgtatgccgattggtgggtttacgctcgtcgtaatacctataagtacacaggtatatttgtatgtcgtatacggcggtgtctcttccactagggctggtatcctgttgtaataataacagtagcaccatgttacagtagtangtttacctacacnggatcaggtgtatcgtagactttactctccncttgctagnttagtcgcggcattaggtgtccggccccccgtgaccaaaaaaaaaa

SEQ ID NO: 727946 - DNA, 280 bp, Homo sapiens
tataccacgccgacacccagaccttttcagcacgggacgcccaagctgttgcagcgcgggcggcatttcagctgtgaggaagggcattgcattcatgtgttgtatctgcaaaaatggttgtcttaacttcttaacctcatattggcaagtgatcgataaaaattggtgggagtttcatgacatgtggacttctttggaaatagcaagtcaaatgtcgtgaccaaattgtggaagagatttctgtcaaataggagatgtgtaaggtcgcctcacgggggta

SEQ ID NO: 727947 - DNA, 128 bp, Homo sapiens
ggcaccagtttctgtccacagccacccccacacttttcttgtatttgtctgccaacttcagaagaacttccagataagaatttctgcctgcagctccagtatcaaggatatggggcagcacagccaca

SEQ ID NO: 727948 - DNA, 427 bp, Homo sapiens
acttcagggccctgttcaactaagcactctactcgtcagtattactgctaaatccaccttcgatccttaagttacatatgggctatcgtagcttcactagggaggagataatgtagtcccatgtcttgccacctcatggagtctatgcctggtatctaacgtctttactgtggctacttcgctcttaactatgtaaccttcatcaggttttgctggaaagatgcgtcggtatttagtctgagctagaggtggtgatgttgactcggggttttactcggttccagaacgggctcctctagagtgcgagtatcgaagcactaccgggtctttggctttttacgctgtgtcttccctgtgttctggcgagctggttagtctgttgtgctgtggatcgtctagggctgggcgttgtgggctgtctggtccc

SEQ ID NO: 727949 - DNA, 415 bp, Homo sapiens
  misc_feature (141)..(141): n is a, c, g, or t
atctgaataaaacctaggttttacagataaaagaaagcaaaaatgtaagagatgttgttgaaggtcacagaggtgactgccctaacttccagagcagggcttctgatccctttaagaaattacagggccagccgggcatgngtgtcacgcccgtaatcccagggctttgggaggccttggcaggtggatcacctgagatcgcacgttcgagaccagcctgaccagcatggagaaaccccatctctactaaaaacacaaattagccaggcatggtggtgcatgcctgtgatcccagctactcgggaggctgaggcaggagaatcacttgaccccaggagacgtaggttgtggtgagctgagatcgcgccattgcactccagcctgggcaacaagagcaaaatccgtctcaaaaaaa

SEQ ID NO: 727950 - DNA, 205 bp, Homo sapiens
cagtcatgtgcattatcattaaaattgttatggggttaggaaagcaaaaattgttaaaataagtgcaacaggcttgggtgcacacagttgcacaggccttgcgagaataaagtgtcagagcagaatctgtacaaacatcttgttacatgagagagagaccactagatggctatctcttacattcctatgtgcaaactgaaatgag

SEQ ID NO: 727951 - DNA, 313 bp, Homo sapiens
atttccctggtgacactcttagccatgaaagctgacctatcgcgcatggtgaacatctttattctagaaattggcatgtttggaaccattagcacagatttgcttaggtgaaggacacgtgtcttctagttctgcctttttaagtttttgtacatgatggatatgaacatccatttttctttatgtaccataactaaaataaagtccataaagaccattctgactacaaatttggatatgatcaggaaaaatggctaatacattttgattcttagatactattccatttttatcttgctgtacagtattttaa

SEQ ID NO: 727952 - DNA, 176 bp, Homo sapiens
gctttgagccattgttaaatccggtgctgtattgtgattaacagattcagggcttggagcagtggctcatgcctgtcatccaggactttgggaggccgaggtgggaggatcacttgatcccagaagttcgagaccagcctaggcaagacaactcacacacacacacacacacacac

SEQ ID NO: 727953 - DNA, 135 bp, Homo sapiens
aggatgctttggagacggcgcgagccagagcacggggtagcgttgcgcttgaccccgggcgtcagaccgtagggaagagagaagccgtcctcatactccgccggcagccagcgcacaagggcagggtgggaggcc

SEQ ID NO: 727954 - DNA, 1237 bp, Homo sapiens
  misc_feature (356)..(356): n is a, c, g, or t
aggtttttccccccttctgggccccaatttgttgtgcgtggtccccccggttttcagtgaccaccccttcgggtggtctcccctctcgggtttgtggtgcccccccgcgtcgccccctgtgaacccttctcgctcgacggctattttgtacccactgggagttgacgggcaagaaatcattgttgtggatactccccctctatagactctctccgccctcttttggcgagaggtgtgatagttctggggccccaccaccgcggaatttttgaggtgccaaacaagaccaacctgcgggtggcccaccaagcccttcgccgcgataataggctggtttgcaggccgcctctttttangtgagagagccccccgctacagagagttgtttttcgcgcgctttcgcacccatgaagtgtgcccccccgctaccacagttgcttagtaaacccacgcgcggtgtgtgtggtgccccccaccacaagaaacgcgcacggtttgtcgtgtgtgtgtaccctcttctctgcgggtgttgtgggcagacacatcaggcatgttcccgtagcgggtatacacttctaccggccgcccgtacgttgcgtgggtggcgctctccaacatatgtgggggagatatccacgcccccccacacacgaggtatccatcatcctcgcgcgttggtcacgcgagacacgcgggggcttaacaacacatgtgggctcttgtggggacaaaatttttccaccgccgttggggcccaccataaccccttcacggttccggcaccccctttaccaatgggcaaggacgtcactatggcgtttcccgtgaggccccccccgctccccacgcggttattgtgaatcacacgaagagatgacaccggcgggttcaccacagacacacagcgttctttttggcggctaacacaaacactgatacttgactaaggctctttatttataccacaggtccttctcccgccgcttggttggttgggatccaggacactggggggtatcaccaggccgcaacacaaagcgaagtggtttccccactcgaaagaacaccacgatttataggcccttcgccaagaccacaatagggtgattcctttttcttagagagaaagaatttacgcttggtggcaaaagataacatatcctgccccgggccccatcaaacaaaattttccagaattttcatttaagtttaaataaaactttcctttaccagttta

SEQ ID NO: 727955 - DNA, 453 bp, Homo sapiens
ctatctttttgatgatagatgatttaatggatgtgaagtggtctcttgtggttttggtttgcattaccctaataactaatatggttgagaatcttttcatgtgattactaaccaacctttctttgtctctccttcacccctactattcccagcctgtggtaaccatgaatccactctctacctccatgagatccacatttagctcccacatatgaatgacagcatgtggtatttgtctttctgtgctcagcttatttcactcaacataatgacctccagatccatccaagttgctgtaaatgaaagcattgtattttttatggctgaataatattccaccgtgtatatgtaccacattttctttatccatttatccattgatggacacataggttgattctatatcttggctattgtgaatagagtaataaatatgaaaatgtggatacgtca

SEQ ID NO: 727956 - DNA, 100 bp, Homo sapiens
gcaacatcctattttctaactactctgggaacctcatacaagaggaatcatacaatattgtgtcctttcgtgactggcctgtttcagcgcaacgtattca

SEQ ID NO: 727957 - DNA, 151 bp, Homo sapiens
tctagaggttaccgttcgacggaagcagcaggacgttcaggtggaagcagctgcaggcaggagaggaaggaggcccttactcttccttctcgtccatgggagcatctactgcagcctgcagctttgcgtgctcctccagcaagcggtcgaa

SEQ ID NO: 727958 - DNA, 692 bp, Homo sapiens
ggagagagagaactagtctcgagtttggttttttttttttccacaaatagcacttttaattggccactattggaagtctgaacttataaacaaatcctgggacggggggtccatatccatcagctcgtctcaactttagcaccggtctcgtccccgaggggctttcccagaactactggccttcaccatgaagctccatgagcttccccaattcaaacttggggcttcttcagcattttaacttttctaacgaagacttcatgggagaggataaatcagattgggcaacgccttttctatgtctttcccaatgctgtctgggaatcaatttatggaccacttctttcaagtcatttggtctggcacctctcgggtcatgattctccatcatcttctcccggattgggcggagacctgtgggtgctagagcataaaggaggtctcccgtatctagatggtggcgtttttaacgtaaaaccaaaacagaacagacgaagcaagtaaccatcggatagtctggacttcaagcggtgagcttcaaatcatggtctggccatttttggaccagggaacacttttggtcaggggtaagatccatgccagggaagttagtcaggcagttttaaccctgaacatcttcagtaatcagcttgaatttgctaaatgcaacttcatcattctgcaaatcagca

SEQ ID NO: 727959 - DNA, 670 bp, Homo sapiens
gctttccgccaaaagattgggtccccccgctataaagccgcacagaagagggtatagtctcccctcgccccctcttctctttaaagactgtatagtcccccatagccgagaggggtctttaaggcccccacggaagggggacgttgttgaaaaaggtggtccccacgcccccccctcataaggaaggaaagatttcccgccaccgtttacacccacccttttccggcggcccgcagatgaccacctggcgactcccgcgaggaccaccccccccattatttcctcgggagaagagcgccttccccgcgaggaaaccacacggcttgagacccctatgtggctattgcactcaagtgttccgcctgaccccctggaggttctgcccactgaaagaaagatatagaaagacccacccacacaccacacttggtgttcacttgttggagtgtttaaagcccacccagcacccacgagttaaaccacggctgtgaagaaagcgtgtattgaccacttgaatgtggcccaggctcaacacccctgagttcggcctgatggagagaaagaaggcataatgttcgactggctcctgattatcgagtgctttggagtgttgccacaccacaaaattgggagtcattttaaactgaggtccacagctgcctaattttga

SEQ ID NO: 727960 - DNA, 415 bp, Homo sapiens
ggtttctttaaagtgggagtgaaaactaagacatattttaaggtgttccaagtgtaggggtttttatgagtcccccttccacttacccacatgtgaattgacatatttttgccaatataaatttattcttcctttccaaagccattaacttaatattcataaaaagagctctgttttttcttttgcactcatatttcattggtttaagtaacccactttatcatataattagaatagtaagtacggtttatatcatcttggaatgcattagctgggcaacagataattcacttggtgggagtagaagtaaatggtgtactaccagctgtgaacactcagcagctactatgcactcatcaaagagtgttataaagggttacagagaattgggaacttagttaagggcagatttgtt

SEQ ID NO: 727961 - DNA, 406 bp, Homo sapiens
tagagatagggtcttattcggctatctaggctaaagtgcaggggtgctattatagctcacggtaaccttgaactctgggggtaaagtgactctccggccttagtactcctttggagtagctgagactacgggctggcgcaaccatgtgtggccaattttggtatctttggtagagaagaggtctccctatgtggcctaggcgggtctggaactccgggcctcaagccttcctcccacttaagcctcccagagggctaggattataggtgtgaaccacaaggggttttagagagcatctataatcctttttttctaggcaagagaacggaaagtggaatatagaacatgagtaaccagggcagagccagattggaacccatatcttctgactccgagttcagttcgg

SEQ ID NO: 727962 - DNA, 106 bp, Homo sapiens
acttagggtcttagggagtaagcacaatgaggttgtctgagaagaaacaggtttccaaggtcctgggaaacctgtttcctcccagaccctactccctaagacccta

SEQ ID NO: 727963 - DNA, 178 bp, Homo sapiens
tctagaggatccctgtggagacgggggttcaccattgttgcccatgcttggtctgaactccttgagctcaatgtaatctggcccgcctccacctcccagactggctaggattacaggcatgtgccaccatacccagctgtattagttcttgttctataaagctttttttttttttttt

SEQ ID NO: 727964 - DNA, 140 bp, Homo sapiens
  misc_feature (39)..(39): n is a, c, g, or t
  misc_feature (76)..(76): n is a, c, g, or t
agctgcaggagtaaaagctttttaggatcatgttatctntccttaaaatctggttagatggataatttcataaccnattttttttttaactcttaacttctttttgaaacaggcttcactttattaaataggggaggatt

SEQ ID NO: 727965 - DNA, 623 bp, Homo sapiens
gaaacccactccagcttactacgagacaagcttagccaaaacatttacctcaaaataacagtataggcagatagacattgaccacctggttcacatagatctaggaacccgaaggggacgatgaaacattataaccaatgcagtaatatctgcaaggactagaccacatattccttcttgcattgattgaacttaacttagtaaaataatgtttgccaggaggagcctagggaggttagacctcccgtagagaaccagtacggatgctaccataacgaatcccgcgtcagaaagatgcacacccggattagggtaggcaaaaatatgttggcgaaaggatacagagtgtaagatggctgaaaacactgtaacccgaagccacttggttgagtacaacctgtgtatggaatcaggacaagaatacgaacaaactatgggggcctaagagttagataggctatgcgcttccaatgaggaaatccccattcttgagacaatacgcacgacattgtgaaaaatgcaagaacgtgcatgaagggtacccatcagggagtggtaacagaaaacgaagttgggtcatgactacaggagacataaccgtggaaggaagaggagtacaagga

SEQ ID NO: 727966 - DNA, 361 bp, Homo sapiens
attttttttccaattttttttttcccaaaacatcgtttcagctcatttatcaagtaggtaaaatgagccttttgtgtacacacaaaggcacatgtgcacgcacacccaacttgtgaacacacatttttgttaaagaagttagaaaattaaagatgggttgggggctttaagtgcatcaaaggtatgaattttgtaaaactgtcaggaaatgtaaaattcctttttgaagtgttttttttgtgaaagggttcaaagcaaattttgcttactatgtagtgttgcccttaagaacaggggggtaattttattcaaaattgtgtttttttatcaaaagcctttggaaataaatgttccgggatca

SEQ ID NO: 727967 - DNA, 839 bp, Homo sapiens
  misc_feature (7)..(7): n is a, c, g, or t
  misc_feature (97)..(97): n is a, c, g, or t
  misc_feature (107)..(107): n is a, c, g, or t
  misc_feature (113)..(113): n is a, c, g, or t
  misc_feature (177)..(177): n is a, c, g, or t
  misc_feature (185)..(185): n is a, c, g, or t
  misc_feature (395)..(395): n is a, c, g, or t
  misc_feature (409)..(409): n is a, c, g, or t
  misc_feature (415)..(415): n is a, c, g, or t
  misc_feature (605)..(605): n is a, c, g, or t
  misc_feature (612)..(612): n is a, c, g, or t
  misc_feature (615)..(615): n is a, c, g, or t
  misc_feature (651)..(652): n is a, c, g, or t
  misc_feature (657)..(658): n is a, c, g, or t
  misc_feature (671)..(671): n is a, c, g, or t
  misc_feature (695)..(695): n is a, c, g, or t
  misc_feature (703)..(703): n is a, c, g, or t
  misc_feature (710)..(710): n is a, c, g, or t
  misc_feature (720)..(720): n is a, c, g, or t
  misc_feature (724)..(724): n is a, c, g, or t
  misc_feature (728)..(729): n is a, c, g, or t
  misc_feature (731)..(731): n is a, c, g, or t
  misc_feature (746)..(746): n is a, c, g, or t
  misc_feature (750)..(750): n is a, c, g, or t
  misc_feature (755)..(755): n is a, c, g, or t
  misc_feature (760)..(760): n is a, c, g, or t
  misc_feature (764)..(764): n is a, c, g, or t
  misc_feature (767)..(767): n is a, c, g, or t
cagccanccttggaaagcccaggcccagcagccatggcggtggaaggagaaataaaatatgtgaagatcttgctctacgtcctccagctggcctttngcgcctgtgnagtggnactaattgccgtgggtgtcggtgtacggcttgtcctgagtcagaccataatccagggaactacncctggctntctgttgccagtggtcatcatcgcagtgggtgtcttcctcttcctggtggcttttgtgcgctgctgcggggcctgcaaggagcactattttcttatggtcacgtttgccttctttctttctcttttcatgttggtggaggtggccgcagccattgctggctatgtgtttagagattaggtgatttcagagttttattaccacttccggcngcagatggagaatnacccgnaacacaaccacactgcttcgatcctgcacgggatgcaggcagttttttagtgctgtggggctgctcactacacagattgggagaaaatcccttccatgtcgaagaaccgagtcccccactccggctgcattaatgttactgtgggctgtgggattaatttcaacgagaaggcgatccataaggagggctntgtgganaanattgggggctggctgaggaaaaatgtgctggtggtnnctgcnncagcccttggaantgcttttgtcgaggttttgggaantgtctttncctgctncctcgtgaanagtntcannantggctacgaggtgangtangggtntggtntccncancctcctcatttgggggaatggaaaaggaacccccaggtttttcaaataaacggaatattttttcagaccgga

SEQ ID NO: 727968 - DNA, 201 bp, Homo sapiens
ccgcagctcgtgtcctggctttatttgagacagagttttgctctatacccaggctggtgtgcaatggcatgatctcggctcactgcaacctccacctcccaggctcaagtgattctcctgcctcagccacaggcaccaggctgcactcagcgaactctgcctcgttggctccgtatgcagaacacctacccagtagaaagg

SEQ ID NO: 727969 - DNA, 616 bp, Homo sapiens
gcacgcggggtagagagcgctacgaggtgaatatatggactctatgcgcaaaatataccatgagacgtatatgctgaccacacgtgcacgaggagaacgagccacagatttacacatagagcacgaatttatggttacaattaaaagaaacgtcttgtgaacacaccttacgtggataacttctataaaagggctggtggtggaattctggctacagtgggtgaacttctgaaaattgggaatgcgatggtttatagggtaccaaggtgggctggttaagaactcaaatggaaatcttttacctggataccttaaaccagaaacacatgggtatgaagtggaccccagaccctaacacagagaagtcttgggataaagagggtgaatatgccatggcgtggggtgtgtgtgggaaacaaacgcatgggtcgcgtataaagcgacgcgattatgcttcacatactggaagggcacagggtgccacaagagtgctcggtgggctttctgagaaactggtacacgagactctaaataacaagggttccccaagagggatcatatggtctataatatgtgacatgcgcactgtggggctctagcaccgctatgtgtgcgc

SEQ ID NO: 727970 - DNA, 621 bp, Homo sapiens
  misc_feature (1)..(1): n is a, c, g, or t
  misc_feature (29)..(29): n is a, c, g, or t
  misc_feature (42)..(42): n is a, c, g, or t
  misc_feature (77)..(77): n is a, c, g, or t
  misc_feature (525)..(526): n is a, c, g, or t
  misc_feature (587)..(588): n is a, c, g, or t
  misc_feature (617)..(617): n is a, c, g, or t
nttttacttttttttctacggaaacgcgncatttgtgttggntaaccccggggaattcggcccttaatgggcccggngggggattttttgaccgggcctcttggcggagaattgggggggtttcttttccttagagccgcgcggcttggggaaagttttctcccagggaaaaaacccttttttttatttttgggccgccaaatttgggaaccccacatggtgggagaaccccgccccggtttttttttcccccttttttcccaaggttttttgggggggggggaaaaaaaccccccgggggggtttttgggggggggtttttatcccccaaaaaaaaaaaaaaggggggggggggggaaaagaaaaaaatttttttgcgcccccccccaaaaatttttaaaaaaaaaaagggttttgtttttttggggaaaaaaaaaaaaagggggggggggttgtttttttttttttgggaggggagggtttttccccccccccccgggggaagaaaaaaaaaaaatttccccnnggccgccccccctctttttggggggcgccgccccccccgggtggtgttggtggcccccccnnaaggggggggggggggggagggaaaacanctcc

SEQ ID NO: 727971 - DNA, 892 bp, Homo sapiens
gggccacaggcagagagctggggtgactcggcgaggggttgcgcggtatagctacctgtggtagttcacccggggtccgctctcggctgggcgcgcacgggaggaacgggaggcggcatgggtttctgcgtgggagccgaacctaagcaagtgatgtgactacaaaatgtttccggatgatcaacgagcagaagtggggacatcacattgattcttctacggcgatacatcacctgctcagctttcaaccatcgtcagctcatgtacttcgcctttaccaggtatgactctgcttccagaagacaacatctggagaggatcctctctgttattttcttctttcttaatcatcagtgtgttagctttccccaatggtccgttcactcgactcatccagccttatggcgaatggttttggactcagtgtgctctacttcctgttcctggtattcctactcttcctgaatttcgagcaggttaaatctctaatgtattggtagatccaaatcttcgatacgcccaaagggaaagcagatgtcatggagtatgctgtgaactggcatgtgatcacctgggggaaggattatcagccactttgatatttttgcgtttggacatttctggggctggggccatggaggccttgtctgaatccgagtaacggtctctgctggcaatcagtattacctgggagctgactgagcccttcttcattggattttctccccaatttgcgagtgcttgggggcatccagtccttctggcatcctgtgtgccatgcggggctgtgggtggctggcggtgccggttagatcagggttccctggggggtcatgacttctcccccgggagacagaactttcggccctgtccgcgattctgttgccctctc

SEQ ID NO: 727972 - DNA, 191 bp, Homo sapiens
gtgtgttctgtgtgtgctgtgtcgcgtttgtgtgctgtgtgtgcctgtgtctgctgcgtccttgtgtgtcgtgctgtttgctactgtgccgtgtgtgcctgtgtgtgcgtgtgcgacgcggtagacgctgctgtgtgctcgtgtgtgtgctctatgtgcgtcagtctagacacagacagacccaaaaacga

SEQ ID NO: 727973 - DNA, 1679 bp, Homo sapiens
  misc_feature (134)..(134): n is a, c, g, or t
  misc_feature (394)..(394): n is a, c, g, or t
  misc_feature (1402)..(1402): n is a, c, g, or t
tattggtatgtttgttgggcttatcctttttttgtgagtcactatccgctgtggttgcttggtgtagtgattactctaggagtgctggtgtggtttgctcggtggttggtcgtttacatcccgctgtttgttcngttcttgtatagttgtgctcctcgcagtgttgtcgtatcttgttgtcctcggtgttgttttgttcctcactcctcttgctcgtctcggtctttccccgggggggcgcattcttgggggtaagtgttgtgagagtttggtgtggtctcttgactctcttctttgggaacccccatctttgtggcccgtgtgggtgtttatttggtgtgtttttctactcaccgtggtgccatccttgttctgtgctatcttatttcgtggnctttgtgggggccctcactattatggccactagtggtccccattcgttgttccggggcgccttgttgtggagagcacaccccttgttcgggtggttgctccccacgaggagtgtttttttgttggtgtactcaccgaccaggggggggtctccccactcttgcttccctctagtgtgccctcgtgtgatgggggagcattgttcttgttctggtgggaattcttctcccctagggctctcgcgagagtttttttgtggttgctgttgtaatacctgccccctgttgattggtgcctgtggtgcctgggtccccccaccaaattttttcgagatgtttttcttcttttcgttgtgtttttgggtgggctcttggcgttcctcctgttttggatacagccccgctgtgtcgtcactctctgtggggggggagtccttctctcggccgacactctactcaggtcgtgacctctttttgtttttccccacggcaggagaggtttgtagtatggggataactcaacgatcctttggtgtgtgtttcacatgcaacaaaacattttcacacaaacgcggggggtcgaacccgtttctggtattaaatcccacggggagtcgagtaccttggttataccacgcgcgcctctggggcccacagctggtgtgatagagagttttgtgccacactcttcgccgttgtggaagcttctgtgagattgcttgagctagagagcgtcctacagggataccccactctttgtcgtctttagactacatagcgccacacgctctctctctctctgtgaggtctctctcctgagatagagactctctgtgtgtgtgagtttttttgctgcccacacacttgtggacacagtggggcacacacccactctacaggatacccgcgcacaacacccacatggtgccctgtgttgtgcacagcctatatcacaaactgtggctgtgtcttgtgtccctcgagagagagggggagacccgcatatgtcnctatgtgtagatactccacacagcgtgttatagccctaccacgctatgagagaatggagggggcccgcggagcccaatccgctgccctcggtatattgtcacgacaccacacccacggcttgaatttggagtccccacggcagagtccaagggaaaggtgtgagtttttctgagggaaaagaggtgagttttgaaaataatgtaacttgtcacaatggtgttggacacatttgcgcccaaagatatggtaattttattattaaataattttttgaga

SEQ ID NO: 727974 - DNA, 1462 bp, Homo sapiens
agtgtaattactatcatttacctttctcatgacttatgaaatactatgtataacgtttacacccttcataatacctgccgtatatatagcactaaaaggaatgtgtagtagttcggctgttcaatgatagttactactcagtagacactacaacgaggctcacatacccttctctaatctcgaatatatgtcgccatattggcctagtgacttgactgcgtttggcacagccatgatgaagctacaaggtgggtcatagtctcataatagtgagcaatctggaaaccaaaataattgagtccgtgaggacccatcgataacggttgcaacgcattacacaactcgtcacatacttagattcggctaatcacagcatcagagtgctgttcaccctatacctacaaatgtactaagtatcatccttaagctaacatggaaacgaaattggaacggtctttgcccagggaaaagaacgattactaaaaatctttgggtaaattttctacaccaacgataatccaaagcacaccaacaaggggcataaaagtctaaaattaacaggcctagttgcacatttcctcgcttgcatcaatctgaatgtgtttaataaagaacccacacgatggcgaatccgattagcaacattccctttactttttaggccatagatatggcggcacccaacatcaacttgttgggcacgggcacgcggaactcgccacataaaaacaaatgattcctcatttctcctaagattttaagcgtgaatactttgactctgttgaagttttccttgatctccacttttcatcacctttcgggtgcgtcagagtcacgattcggtcgcgaattaacattgggaggtagaaattggaccggataaacttgcatgttggaaccttgtcctttaagctacatggttgactaagtgggggtgggtccaccgtcaacgataccctcgttcgcaagtatgggtcgtcacttgaaattcgacctgggacgaccttgaatatcctcggtcgactcagtgtcccctaagttcgttggcggtgcggggagacaactacccctttttaattccccgcaaacctttgggcaggaatttataacagcaccggggtccacggcacagcggcaagtctccaaaccgacatgaaattgcttggactggcaggaatataaccccacgaacgcgtaccaccaataaattagggcgcacacgtatgccgagaaataacagagggggacaggaaactccacaacaccgtgggcacgcgaggtgatacgtgagaacaaatctcgcgcgatgcgcgacatccaagtccaccaacaacacagtacgaccgccgtaacagcaacaatcccatagagacggccctactgaaacgacaccccgccaaccaaaggacaccaccgtgcggcacccgacagaacaccataaaacagacggtgaagaccaccc

SEQ ID NO: 727975 - DNA, 413 bp, Homo sapiens
agcctggaaggttgaagctgcagtgagttgtgtttgtgccactgcactcccggctgggcaacaaagtgaggccctgtctccaaaaaaaaaaaaaaaggaagggaaagggaaaaaagggcccccgagagcccaatttgtccccacaaaaataatttactaatttaaaaggcggtttaaatccttccaaaaatttatgtagctggggcatatttttatctaatcccaatttttaaaaggaaagaggccctttaaagcctaaaggggaatattttataattaactcataaacttgtatgagaaaattttttccaaaaggatttgcaccattgttttttcactcagggggtaaaaacagcggcctccctacaaattttgggacataacaaattggtttcttttccataggcggcaag

SEQ ID NO: 727976 - DNA, 362 bp, Homo sapiens
cattggagttatcagatctgggaaggaggatggagggcgagggactggggttgtggaatcctcagagacccttgtactgcgcggggggcgcctgtgaggaagagttccccgcttgagggatcggcctctcgcgattaggccgtgaggttagtcctggtagagcatgtctcgggagctcccggggtcgatgggcggagggctcgatagaatgtcgtgggcggagttgagggattgaatgggtggaagggtagtcgaggtgaaaggcacaggttgagtcggtccggggttgaagccttgttgggggctcagaagatggaattgtgaccccattcaagattacgcggttgcaatctcggggttgg

SEQ ID NO: 727977 - DNA, 160 bp, Homo sapiens
tttccccccccaatttttaaccaaacagtggtttccacatttgggccccctccaaaacccttaaaaaccccccccccaaactccttgggggaaaagatttgggcttttttcaggtttcctcattggggggccctaagattaaagttttttttttggggca

SEQ ID NO: 727978 - DNA, 1035 bp, Homo sapiens
  misc_feature (696)..(696): n is a, c, g, or t
gtatgactattctctaccatgacactaatatattgatacctcatactacgctattattactgagtgccactgatcctggatgtccttagcgcactacggcgtctaaagcctccttattcgaggccgatctgtgtcaggccagggcatactcgttcataggtatagcgatccaactatcgttatctactgtgagtcgatccaccagcccctatgactattatgatgaatagaatctttctctcataagtaataccccatcattaactccggtagcgctctagggataactcgatctgagttatccccctaaataatctggtgccccttgtatatggactgtttccccagctataaacgaacgataatggcttaacttgacatccttactcgtcccttcctcctccatactctcatgcatcgcatctgctatagtgcggaggccggagcaggcaagaggttgaatagtcatacaccttcctcttaacgacgagtaagcttacttcccagaccctgtacgctctcgctgtaagacccctacactccactcttctcgcttctacaacctatacagggttgtgttctcttcgtatctttatgggagccgatccaattctcatcgactatatcaacttaatccattaatagcatacccccctgccaaataacaccatataaccaaacagcccccttctttgngttctttgaatcccgtcctaagtcaccagtcaggtccttatcttctccatatctctctccagctcgctcagacttgcgtggacagtcactgatagctaactaacgagatcacgcaagctgtaatcacacacactttttcgaatccctgatcggacgtggagggagaacccctattctataccaaacagctatttctgtattttttcggtcaaccctcgaaggttaatatttctgattctaaccagggttgggaataaatttcccaatattgttcctttaatactgcggggaaaaaatagcctgttgcgttcctaagtttggtcttgaggaagagttacg

SEQ ID NO: 727979 - DNA, 119 bp, Homo sapiens
aacgatggtctcagcatagtttcttcccctgtgcatttggaactcctttttagtggtgggtgatatccttgggggttcactggccttggtaaaacaagtaaataaagtaagcggaagat

SEQ ID NO: 727980 - DNA, 86 bp, Homo sapiens
taaaaggagcaaacatgtgacctggagataaacgctggagcaatctcctcggaaggattcagcacgagtagatggtaaacatttaa

SEQ ID NO: 727981 - DNA, 1035 bp, Homo sapiens
gaaaaagataaaaaccgtttcaaaaattaaggcaggccaggtgcggtggctcacgcctgtaaacccagcactttgggaggccaaggtgggtggatcacctgaggtcaggagtttgagaccaacctggccaacatggtgaaaccccatctctactaaatatacgaaaattgggtgggcatggtggtgcacgcctgtggtcccagctactcgggaggctgaggcaggagaatcacttgaactcaggaggtggaggttgcagtgagccaagatgcaccactgcactccagcctgggcaacagagtgagactctgtctcaaaaaaataaaataaaaaatataggccaggcacggtggctcacgcctgtaatcccagcacttagggaggccgaggcaggcagatcctgaggtcaggagaacaatcccagctaacagggtgaaaccccgtctctactagaaatacgaaaattggctgggcgtggaggcagggcagctgatagatcccagatccccaggaggctgaggcagaagacatggcagtgaacctgggaggtggacgcttgaacgtgggctgagattgcatcaactgcactccaagctgggcaaaagaacgagactccatctcaaaaacaaaatatattatatatgatatacacacacgaccacagagatccgtaatcaaacaagacgagacacaaagaggaaaacaacagagagcgaaaacaacagggaacatacacacagaacacataacagaacaaacaaaacaaacaacacaaacgaccaaatcacacaagacgaaaaaagaataaaacacccaccaagggaaaaactaaaaagtaaagaaataaatactaacattggaacaactgagcatgatatacaactaaagccgaagacaaaagtgatgaacataagagcgacaaacaaaagataacacaacaacagacagaaaaaaaccataagaagaaacaaaaaggcagcacagagacgaagatcagtgacacaccgtgaccagcaaacataaatacaagaagag

SEQ ID NO: 727982 - DNA, 701 bp, Homo sapiens
cggatcgtgccgcggcggcgagcgcagctccttggaccgtcccagtgacccctggatgctacaggagggtgtccagaaggccacgatgccatggctgtggtggaacatacagacgagctgcccgataacattctgctggagctgttcagcgcacgtgcccgcccgtgcatctgctgactgaactggccgtctggtctgtcagggctctggcgggacctcatcgatactcgtgaccctctggaaacgacataagtgcctgcgacgagggcttcatcactgaggagctgggaaccagtccgtggtgcgacctggaacgatgcttctagcttacttagcggagacctgtagcacggaactcgtgcctgacacagacccgatgtgcgctgaacgaggggtatcgagtttctggaggcctggcatgtgaagtggaggctgatagagtggaatggtggaggatctctctcgagaccagaggaaggaattccacgcaatgagctaggtctaagaaatacttcgttacgttcagtattatgtaagatccggtggacttggggtaggggaaaggtcggccaaatcaactttacgcctggcggtctcgtcccgaccccgtggaacggggcagatccgtagcccgctcatgtgtcctagtgtgtgagacccgagtgcctatgggatcgtcaggctggcacgcgacggctgac

SEQ ID NO: 727983 - DNA, 328 bp, Homo sapiens
  misc_feature (129)..(129): n is a, c, g, or t
  misc_feature (154)..(154): n is a, c, g, or t
  misc_feature (169)..(169): n is a, c, g, or t
  misc_feature (181)..(181): n is a, c, g, or t
  misc_feature (187)..(187): n is a, c, g, or t
ggtaacctcggaaagtgaaacgcagctgttcacagacatgaggcactttgaagaatgagaccatactctaggatggtagaaaagacagaagaattttagatcactatgatcaccatggggtttctcagntagccttggacttaataccactgcnttatctccctcttanaaattcattgtntatcantgtcgaaatacaactgattttgtacattgactttatattctgtcacgctgttcaattcacttactagttctagtaattttgtctagattcttcatgattttctgtatacaaacgttattcgtttgaggggaaaagaccctg

SEQ ID NO: 727984 - DNA, 646 bp, Homo sapiens
agcgatgggggtggatctttcatgactaattcagcaccatcttcttagtgctgttctcatgatagtgagttcttctgaaatctggttgcttaaaagtgtgtagcacctctccacaccacccgcttgccttggtctactcctgctatgtagatgcttgctcccactttgcattattccatgagtaaaagctccctcaggccttcccagaatcagatgcagctatgcttccttcaacagcctgtggaactatgagccaattcaacctcttttcttcataaattaacaagtcttgggtatttctttatagcagtgtgagaacagaataatacagaaacatggtacaacgaggagtgaggcattgctagaaagatacctgaaaatgtggaaacagcactggaactgggaccatcagaccagaggttgcaagagtgtggacgggctccgaagatacgcgcacacgacgaggcgaagttcggcaattctcttcgagcatccgtcacaatcgttcgaccaaaatactgatagtgatctggacaatgaagtccaggctgaggaggtctcaagatggagatgagggacttattgggacctggagtgaacgtccactttgcttcaggcacatcgtgctcagcagacatgtgcccct

SEQ ID NO: 727985 - DNA, 802 bp, Homo sapiens
gttattgatatagacgattaagcatcaatatctttttttttatctcgaacagtctgccataaacacagggggggtgtacataataaaaaccacttgcacactcaatcttaactcagcttccatctcttactattattcttttgatgcagataaactgtcctagttcttcaacaactaaacttcagtattttaatcgtttccttaatctatccacttgaccattgacaacgtctgattatcattaaatacgactaagggacgactctcatataatagctcaatcatgcatcctgataacgattatcaggaatccatttgatgtatctactctaatcaaatatgaattgtcattctatgcaactagtttatatgtctcacgcttataagatagtagaagataatagactgccatccgaaactcggataaaacaagttctatattctcttgtaactgcacccgctaaatagtggtaacatttacagatctaataataacagtatgctcattaatgaatacatctgtctgctgtgttacggagcgaccggtcatacgataatgttataaaacgataacattaatgtatataatattaacatcatccattctgtatacaagctcccatgtctatctttttctcagtttaacttacatatcatcaaacatacggcgtagacgtatcatcacattattcattagcatttccgcataaattgagacatcccataattcgaaagcgcgtttcgggcctagaatttactgttggctacataactgagcattcgtataatactaagactattg

SEQ ID NO: 727986 - DNA, 836 bp, Homo sapiens
agcggtttggagacctgtagccaggaaaaattagaattaagtccaaactgtaaaaaatgataaaaattgaaaaactaggtaagactagaatctaacaggtgtactatagccaggcgcagtggctcacacctgtaatcccagcactttgggaggtagaggcgggtggattacctgaggtcaggagttcaagaccagcctggccaacatggtgaaaccccatctctaccaaaaatacaaaaaaattagccgggcatggtggcgcatgcctgtaatcccagctacttgggaggctggggcaggagaatccttgaaactgggaggcggaggttgcagtgaactgagaattgtgccactgtagcaggacaagtcgcagacaaaacccctcagacaccgagttaaagaaggaatggctttattcggctgggagcttcagggaagactcacatctccgaggaaccaagctccccaaatgagcaacttcctgtcccttttaagggctcacaactctaagggggtccacgtgcgagggtcgtgatcgattgagcaagtggggtacacgactgggggctgcatggcgccctgctaatccaggttggaacagaacaggacagggcattttcacaagtggcttttctatacagtgtctgtaatctatagataacataaccgattaggtccaggggtcaagtcttttaactaccaaggcccagggtgtggcaccaggctggctgcttgtaagatttcatttccgccttttaagttttacttcttccttctttgaaggcagaaattggcgctaagacatatgaaggggcctcttcctcacaccacatcag

SEQ ID NO: 727987 - DNA, 661 bp, Homo sapiens
  misc_feature (27)..(27): n is a, c, g, or t
  misc_feature (91)..(91): n is a, c, g, or t
  misc_feature (172)..(172): n is a, c, g, or t
ccggtgtttaacccattttgggttgantttgggttttgccggaagagaagtcccaattttgtaacttttgcatattagaaatctgtttttncccaacaccatttgtgaaagagaatgtcttctcccccagtgtgtattcttggcagcagtactatttttaatacccaagatnttgtggaaacaacccaaatgtccatctatgaatgactagataaagacaatgtggcatataaatccaatgaaaactatttagctttaaaaaagaaggaaatcctgtcatatgtgacaacatgaatgaacattgaggacattatgccaagtgaaacaagccaggcacagaaggacaaatactgcgtgattccacttatatgagttagataggtccaggcaaggtggctcatgcctgcggtcccagaactttgagaggctgaggagggagggtcacttgaggtcaggagtttgagaccagcctggtcaacgtggtgaacccccgtctctgctgaagatacaaaaattagccaggcatggtggtgcaggcctgtggtctcggctacttgggaggctgaggcgggagaattgcttgaacccgggaggcggaggttgcagtgaccgagattgcatcactgcattccagtctggtgacagagtgagactccatcta

SEQ ID NO: 727988 - DNA, 2218 bp, Homo sapiens
ggtaaagcgttagataaagatcgaaagtcgactgaacgcaccgaggctacctgacatagaccggctactataagtatatgagcgccgctattgtccattcagtgcagacgcaacacgtgcagcactcgaacgtcatcgcgaatccatggaagacacgccactgggacaaaacctggatctgagcacaaacgttcacgccatctgacacacgccgacctacacaccgtgctctactcgactgctcagacctgacacgatacacgactcacctcaggcatgctcacacgcaaaggctaccaacataatctggcaccacacccagcactagggctacccattgcgggcaaacacaacgccagtaagcgcaaacagaaacagaaatagacaacccatcttgcatgacatgcttacaacaaccacactccaccagagctaggagaccaatcgaaagaccaccaccagtcatggacacatacgaacatgacacccctgaaacacatccgacaatacacaagaggtacatataaaatgtcacagcgttggcatcactccagccccaggagcacccacccgccaccaaagcgccacaacaacgatctaaacacaccactcctgtccaccacacatcacattctcactaccatagcgcgcacaaacacaaccgtacacattgacaccaacaagcatgaacgcccgtccttttccacacgcgtccatcaacaatgcggacacagagcgacagatctgcacatccaccaacagcgtccacagttcaccttgctgagacgcatcatgcacgaaaaacaacgcacataggcaaggtagccaaccaacacctagtacaagcacaagcacatatcaacggacacaaacaaatacacgacataccgccacatggacgtaccagaccacgtcgaacaaactcacaatagcgcagagccggagatcagccacgccacaccgcacacaccctaacaccaaaatgagcgaaggagacgaacaacagacgcacataacacgatacaactcggaacactatatagccacccgccagaatccacaccaccagtaacacataaccattcaccatcacccggcgaaatcgacacacacacaagaatatacacatcccaccatacggcacacaaccacgactaaccaacactcgcaccacacaactaggcgacagcataaactcgcaacaccacaacgacgacacgtaacacacagaacagaaaacaatcacccacatgaccatcgaatagcaacacacaccaacgacaaagccaccaacaacgaataatacagacaatagacaacccacaacccacaagcagggaaccaacacacccacaaaacagagacaaccacaacacagcacaccacgacagtcaagacaaacatgccatcaggcaacccaagacgcgcagagcacacacaccacccacagcacaaacacagcgacaaaccaaatgaaagcgagccgaaacaacgcggaaacacgaccggaccaacatacaacaacacaaaagagaacccaccgcacaaagaacgcagaccagccttcacacacgaaccatacaaacacccaacgaccacagaacacacacaacacacacacgcgcgcagctacaacactcacccgaaccgacatgcactacagcaccacaacggcacgcacaaagacgcaacacacccactcgacatacagacaccaacacaacagacacctaccaacacccacgtcgacccacaacgcagactacaccaccacgaccgctcagaccaccccgcaccgctccacctccgctcactacgaccgagccgacacagaacaaagatcccatcgcaccaacactctcacgacgcgcacgaaacacaacaaacaccaaccaacagaacgacgacgtacgcagcaaccatatagtcagccacgacaccaaccacacacaacgcaacccgatacagcaagacaacaccaacacactcacacgcgaacgccacaacacagagcacacacaagcacaacacaacaacacaaaaacagcgaaacccaccgtcagagtagatcacaacaacaaacgacaacacacgcagtgcagcacaccaccccacagccagaacaacaccaacaacaacaaacacagaacacagaccaaacacacaacacacactcactaagacacagacactcagcaagaccaaccagttcggtcca

SEQ ID NO: 727989 - DNA, 105 bp, Homo sapiens
taggagtatagttggagcgctttgtcatgattcaggttggctttgtccacacgctatttggccaatgcaccttagcctcaaagctggcaaatcgtccaaattctt

SEQ ID NO: 727990 - DNA, 835 bp, Homo sapiens
ggaccccgaggcgcgcgcggggtgcggcgctgctcactgacctctaccaggccaccatggcgtgggctattggcgcgcgggccgggcgcgggaccgccgccgagttcgagctcttcttccgccgctgcccgttcggcggcgccttcgccttggccgccggttgcgcgactgtgtgcgcttcctgcgcgccttccgcctgcgggacgccgacgtgcagttcctggcctcggtgttgccccctagacacgggatccgtgcgttcttcgagtcaccgttcgggtccctcgacgtgctccgtaggtgacggtgcggagccctgcccgagggctccctcgccttccccgggatgtgccgttcctgcaggtgtccgggccgtcctggtggtgcagtgctggatgaccaccgctgtctctgcctgggtcatgctacgccagccttggtggccaccaacgcagcgcggcttcgcttgatcgcatgggccgagagaagcggtgctagagatgggcctgaggcgggctcagggccccgatgggggcctgacagctccacctacagtagctgggcggttcgacagcagcgagcaaccgtgctaggggggccatgctgctgaggttgtgccggtggcggggacccgtggcccactccttcgtcacttccttttccaggcaggcgagggtgccccctggaccctgaatgttggcgccagcagctggtgaagggccctggggggtggacctggggggcaaaaggccagggtgtggttgggagcggggttgttgccacctgggggctgggggtgcaggagccggattcaggcggaacggggcaggcttgg

SEQ ID NO: 727991 - DNA, 345 bp, Homo sapiens
  misc_feature (322)..(322): n is a, c, g, or t
  misc_feature (343)..(343): n is a, c, g, or t
tcagatagtttttctgtttgtaaactggtgaatttgtatttatttcatggctaaatttctgaagtaaaagctataggatctttgtgtgtgtgtatatatttaaaaggcctttataatttctataattttatgtttaattggcaattaaatctgttttaatttccctccagcacaccagactttttctctccatacgttatgatgtaaattttgctattcgattttcacctcagtttccttaaaatgcaaattcaaggctatttagctgacaaccgcttaggagtagtaaaacaggttatccaaggattcggaaggtgtggcnggggcacggtgggctcacgtnct

SEQ ID NO: 727992 - DNA, 116 bp, Homo sapiens
tttgtagtgggttatgtttttattctacgttattggtaggacaggtaacatgggccaagacctccacactcccctgggaaggaacagtcaggagaattagatacatctcaagtggg

SEQ ID NO: 727993 - DNA, 746 bp, Homo sapiens
ctacctccctcaccaaagcccggtaatcgcataaaacttaaaactttacagtcagaggttcaattcctcttcttaacaacatacccatgggcaacctcctactcctcattgtacccattctaatcgcaatggcattcctaatgcttaccgaacgaaaaattctaggctatatacaactacgcaagaggccccaagcgttgtaggccgcctacgggcgtacctacaagcctgtcgctgacggccataaaacttcttcagccaaaggagcccctaaaacccggcacatctaccatcaccctctacatcaccgtgcccgaccttaggctctcagcatcgctccttctactatgaaccccctctcccctgtaccaaccgccctggtgcaactcagacctagggcctcctatttattctagcctagctctagcctagtcgctgtttgacctcatgtcctctggaatcgaggatgagcattcaagagtgctaacacctacgcctcgtgatcggcgcactgggagcaagtagcaccaaaactatctcatatgaagtcacacctagccacatgattctactatcgaagcattagctaagtaacgtgggtcttttagacctctaccaaaccttatcataacatgaagaaacaactctgattactccttgcatcatgacccttgggcataagtatgatctaatctccacagtagcagagacccaaccgaagccccttcgaccttgccgaaggggag

SEQ ID NO: 727994 - DNA, 654 bp, Homo sapiens
  misc_feature (633)..(633): n is a, c, g, or t
ttggtctccttgtccgtctgcgtttgtctgttcccgccctgtagctcttttcctccttccaggtgtttctgccctgtcctcttggttctcttgactgggtatctactcatgctcgtttgctccttgtccggcgctttttgctaccctgcttcctaatgccggtttccctgtgagctgtctcttaccatttttcttgcttgattgggttcatccctcttggagcccctccttctttgtactatgctcccggctagcagctccagcgtctaaatttgtctccacctaccttcctgcctcccggaagagcttcaagagctaagaacctgcctgcaagtacactgccttcgcaagtgcgagcaacccacagcccatggagattgcctctattgctaggcgagtttgctcaagccatgctctcttatcctttttctggagagtagtctagaccaagccaatttgcagaaccacattctttagttccacaggagagccccattcccagccctggtgctcccgtgccgcagttctatattctgttcaaatcagccttcaggtgttcaccacagcatgggcccactgctagacaccgagaatccaaagtgttcccgaatctaaatcatccatacagatccntacccatggcaatttgttttt

SEQ ID NO: 727995 - DNA, 139 bp, Homo sapiens
ccgggcgagattaaccctctccccggatttcagggccagcgagagctaccggacgcgcggaaacggacgtttcaaggcacggccctctttgggggaaccattcaggcgcctgtcctttcaaagaaaagagaatctcccc

SEQ ID NO: 727996 - DNA, 217 bp, Homo sapiens
ttacaatgaggttactaaaaggtcagagagtaggacttatggagaaaatttaggacaggcggagtcaccgcgttccccggggtctaagccaaagaggcaccacatggtttaaggaagtaatggggacgtcgagggtccttggggccaggcccttatggataagtgggggttccatgtaccagagttccttttggggcccaggggtcaactatgcact

SEQ ID NO: 727997 - DNA, 379 bp, Homo sapiens
  misc_feature (7)..(7): n is a, c, g, or t
gattggntggagcagcagcaaatacttcattgaaatagattataacagttaacaaagagactaaacttctaactcttctacaactgctgatgtaaacaacacttgtttcctcaaataaaggcctacctattgttgcttcaccattacctagaaagtactagtgtactctgcttaactgaccatacagagggaccctaacattcaaatgaacacaaaaagaaacagactctacagctgaatcaattcagttggccacctgaggtgtatactacttggggaaccgtgcacgttaacgattactaggactatgcagaaaccagagagtttaagaaaccgcattgtctacttactcccttccctcccactttctacctcccta

SEQ ID NO: 727998 - DNA, 388 bp, Homo sapiens
ccgcagacgcggccgcttgtagctcgtgtggggtctctggtccagagcgcggcatgtgcgtgctgtgcgcagcggcgcgctgtctgtgtccgcggtgcggaccgaatgagcaagtggaccagcaagcggggcccgcgcagcttcaagggccgcaagggccggggcgccaagggcattggcttcctcacacttggctggaggttcgtgcagatcaaggagaaggtcccggagttcgtcgtcccggatctgacacggttcaagcttaagccctacgtgagctaccttgcccctgagagcgaggagacagcccctgacgggcgcgcagctcttcagcgccgcggcgcctgtcatatggagcttaaggaccggacctttgaacctgccctgg

SEQ ID NO: 727999 - DNA, 337 bp, Homo sapiens
  misc_feature (337)..(337): n is a, c, g, or t
atttacttacattttctttgccattgcattccatatagcactaccatatctcccattgcaaaagtccactctcacaaccccctagagccctggtactcaaagtgtggttcatgaagcattagcattgttttttagtgtctggatctgccccagaccaactgaaccattatttcagttttagttagatacccagtatgattcacatgcacattaaagcttagcatatatggcaggcctctaatgaggacttgtgtattcttaggccgtttatatgtatatgtggaagaagtttctgttcacttttctctatccttcccacttaaacagtctcctgttn

SEQ ID NO: 728000 - DNA, 119 bp, Homo sapiens
  misc_feature (3)..(3): n is a, c, g, or t
  misc_feature (6)..(6): n is a, c, g, or t
  misc_feature (10)..(12): n is a, c, g, or t
  misc_feature (91)..(91): n is a, c, g, or t
  misc_feature (93)..(93): n is a, c, g, or t
  misc_feature (100)..(103): n is a, c, g, or t
  misc_feature (108)..(109): n is a, c, g, or t
cgnttntggnnngttgtatctctctgtttcatgtaactaagttattaatatatttcatttttagtgtgatgtaatgagagactgtgtgtgnangttaggnnnnaatgnnaactgtatgg

SEQ ID NO: 728001 - DNA, 422 bp, Homo sapiens
cgtcacaaagttacgcaattttgcgcatgagggagaaacaggtactctgtggatggggtcgagatgaaagaaaccatcatagccttggcctgggaggcacctgggagtaagtcggctgtgctggacgtagaggctccgaggatatctgtgtctttctaccagtgtcaaaaacaacgggaagattgaactcatcaagatgttcgacaagcagcaggcgaacaccatcttctggagcccccaaggacagttcgtggatgtagcgggccttgaggagtatgaacggtgccttagcgtagtgtggacacttcggactgcacggtccatgaccatcgcaaagaattacaatggctatccagatgtcgaatggggatcctacctggcgctacgttttcacctctgtgtcctggtggagccataagggg

SEQ ID NO: 728002 - DNA, 194 bp, Homo sapiens
  misc_feature (127)..(127): n is a, c, g, or t
  misc_feature (182)..(182): n is a, c, g, or t
tatgcatgtatcgactgtggaaagtcctttaggcagagcacccacctcactcagcaccggaggatccacacaggagagaagccatatgcatgtagtgactgtagaaagggctctaaccacagatctncccttaccatggaccagagacctcacactagataagcccactccacatgtgctgnggacataggaag

SEQ ID NO: 728003 - DNA, 200 bp, Homo sapiens
tagggggtgactcttccccctggggacacaggcaggatggctggagactgcgtcaccactacttctccagaggcaccaagcgaggccagaggcaccaagggagggcgaagtcgaaggccctgtgcgctagaggccagagtagatctcggtggacggagagcaacgtgcacgagggtggactcgccagctcacagtgatgc

SEQ ID NO: 728004 - DNA, 480 bp, Homo sapiens
  misc_feature (456)..(456): n is a, c, g, or t
gctgtctcaaactccagagctcaagtgatctgggccggccttgcgcctcccgaaagtactggggattacatggtgtgggccaccgcgtctggcctaacctgtagtggtctttatggtattatggctaatgatgttgctgcctgactgaaagaagtttctgccattgagatagagacagatcagtggaaagaattttcagtggagcgtcaagagattatactggatgggggagtggactgacatctatggtaagactttctttccttggttggtggccggcaaagggggtttcatggtgtagctgaggctggtctggaagggaactcctaatctaaaaggatccttccaactcagcctcccaaatagctgggattacaggcatgcaccacaaggccgggtttggtgattaatatcacaggttgacgggttgagactgagaaactcagtcctgtgttncagtatagaaagtgagttctgaga

SEQ ID NO: 728005 - DNA, 561 bp, Homo sapiens
cagagaatggggatttaaggttagcagagaaacttggaaagttctgtgttaggatcttgctggcagaattaacttttgtgcaaaagttttatacacagatattgtgtattaaattgtggagccatagtcagaagactcagatcataattggcctatttttctatttccgtaactattgtaatttccactttgtgtaataatttgtgatttacaacatataacatttatttatttaatttttttaattagttcaaaaatcttgtgctggttggtagtctggcaactctctaacaatggattggtggtgtgcttttagggatttgatccagaaggaaacacttccaaaaattggagatgacacatgttgggttgcagccagtttataacgtaatatagtctaacaaggcaaaacaaagtggctggccaccttttatgcatgattttcctaaatcggagaacacatttggcgctgctatccacaatagaacctttatgtttggttttcaggttgaaaacttggcctccttgtggcaacattcgtcaaatgaagcagaattttta

SEQ ID NO: 728006 - DNA, 919 bp, Homo sapiens
  misc_feature (219)..(220): n is a, c, g, or t
  misc_feature (223)..(224): n is a, c, g, or t
  misc_feature (229)..(229): n is a, c, g, or t
  misc_feature (252)..(252): n is a, c, g, or t
  misc_feature (271)..(271): n is a, c, g, or t
  misc_feature (283)..(283): n is a, c, g, or t
  misc_feature (299)..(300): n is a, c, g, or t
  misc_feature (336)..(336): n is a, c, g, or t
  misc_feature (347)..(347): n is a, c, g, or t
  misc_feature (351)..(351): n is a, c, g, or t
  misc_feature (358)..(358): n is a, c, g, or t
  misc_feature (360)..(360): n is a, c, g, or t
  misc_feature (362)..(362): n is a, c, g, or t
  misc_feature (368)..(369): n is a, c, g, or t
  misc_feature (374)..(375): n is a, c, g, or t
  misc_feature (379)..(379): n is a, c, g, or t
  misc_feature (382)..(383): n is a, c, g, or t
  misc_feature (386)..(386): n is a, c, g, or t
  misc_feature (388)..(388): n is a, c, g, or t
  misc_feature (393)..(393): n is a, c, g, or t
  misc_feature (397)..(397): n is a, c, g, or t
  misc_feature (399)..(399): n is a, c, g, or t
  misc_feature (415)..(415): n is a, c, g, or t
  misc_feature (422)..(422): n is a, c, g, or t
  misc_feature (431)..(431): n is a, c, g, or t
  misc_feature (438)..(439): n is a, c, g, or t
  misc_feature (448)..(450): n is a, c, g, or t
  misc_feature (458)..(459): n is a, c, g, or t
  misc_feature (470)..(470): n is a, c, g, or t
  misc_feature (918)..(918): n is a, c, g, or t
gtggccacgttggtgtcaacctccttcgtgaagctcacacctcccccgccccgggaggggtttgcccgccactgtcgctgaatgattgcatcatcgaaagcagaaaaccacttttgcatccttcggcctctggcgtgcctgccatgacgtcatagctctgcggaggtggaagttggggagctttgaggtaactggattcttgatctgagcgcagacgtnnttnntaaantaaatgaatttggaggaaatggngggggggtgggtgaagggnaaggaaagaggnaggatgagagattggnngaggctggagtatgaggggaatgaatgtttaaaggnaagagaatggngatnaggtggntngnttagtnntaaannagtnatnnttntnaaggnatantntgtagaatggaaaatntgtaaanatgcttgtnttagganntcatggatnnnagggggannaagagaggagntgagaagaaagaggtagctgagcctcggaacaaacatacctcgtccagcaccttctctgcccacagaccctgccctctattctgggccctttcctttctaccggcgcccttcggaactgggctgcttctccctggatgctcaacgccagtaccatggagatgcccgagccctgcgctactatagcccaccccccactaacggtccaggccccaactttgacctcagagacggatacccggatcgataccagccccgggacgaggaggtccaggaaaggctggaccacctgctgtgctggctcctggaacaccgaggccggttggaggggtgagcaaagcgttggtaggcagtatatctggagacccgtacctaccctctaaaattaggagagccaaagccggggtgagaatcagtccttagaagaaacaagactattcttcgaggggng

SEQ ID NO: 728007 - DNA, 462 bp, Homo sapiens
  misc_feature (33)..(35): n is a, c, g, or t
  misc_feature (48)..(48): n is a, c, g, or t
  misc_feature (88)..(88): n is a, c, g, or t
  misc_feature (230)..(230): n is a, c, g, or t
  misc_feature (275)..(275): n is a, c, g, or t
cggcacgaggggcggccaccgtggagagcagannnggcggcttggaantgctaagtcagagccgcgatgttccggattgagggcctcncgccgaagctggaccggagagatgaaacggaagatgcgcgaggatgtgatctcttccatacggaactttctcatctaccgtggccctcctgcgagtcactccatttatcttaaagaaattggacagcatatgaagacagganatcacatatgaatgcacgatatgaagagcctgggttacaagtttncgactcctctcctgcaagtgaataggccccagaaaggtgtaagagactcttttgaatggacataaaattctgcttgttaagaacaaagtttggctcctggtaactgacccttcaaagctaaaaatataaaactatttggggaagtatgaaaccgatgtctccgtgatctggtgtacccttatccctg

SEQ ID NO: 728008 - DNA, 130 bp, Homo sapiens
accactgagcaagctcttcaattagggaaggaaatgtcccccatccaatgggacaaatcctttataaaaaattaagcccagaggaccagaaagatgcctggtttactaatggacgacgcatatacactgg

SEQ ID NO: 728009 - DNA, 592 bp, Homo sapiens
  misc_feature (592)..(592): n is a, c, g, or t
attctttccattttttattaattgaggcacttataaaagaggctcaatgattaaggaaatttatgatctttagacagggtgttggctttacaccaacgaacaagaaaaacagatgagtaagctttggaacttcattatctgttggttattctcatggaaggttgagatgcttttaaatgggatgttataagcctaaggcagctagactggcataagcaagttttttaccctgactcttaaagcaggtctgcttattgtaagcctgtgcgaactctatgtacgaaagctgcgaaactattcatgacagctttcaggagcttttttgttgcctggggcttgtgtttcacaagctcaacacgggcagtttgcatctggatattgttcttcttgtcagaaagcgtgtatatatgtgtctggaacgggaatgtttcacaattaaactttttgtgtacgtattgttgatcgcctttcaaagcatgcaaagggtgcccccctgttgaccaaggagtttcgagcgcatttggagacggtgacaattacaggagggtacttatgccaaacacctactggcttaggaaccccgtatgatagn

SEQ ID NO: 728010 - DNA, 441 bp, Homo sapiens
cggaccgccttggtcactggctagtctgaggtgatagtggtcgtaggaggctgtgagcgagctcggaggatttaatcttccatactacagagtgctacgatcctgtagcaggagaatggaagtctgtgggctaagcttgcatgaatttagcagatcagagtatgcagtctgtgctctatggaatgacattcgttgttgcaggtggacgaatcgaacagccgtgatgtctggactttataactcacagttgaatattgggatcagagtagcctctcgtcaataaaggcagatggcgtcacgaaatggctgtcctccttggtgacgtatatgttgtcggtggctatgatgggcaaaacagacttagcagcgtagaatgttatgattccttgtcaaatcgatggactgaagttgctccccttaaggaagccgtgagttctcctg

SEQ ID NO: 728011 - DNA, 821 bp, Homo sapiens
gacggtctagcgctgcgtgggccatggtgcagctccgaccgcgagcgtctcgcgcccgggtcggggaggcgatggtggacgagggccagtgcctcggaggaggagcgaggcggagccaggggctgtggctcggggcagcccagcagcgggcgcgtccggcggagccccctgggaggaacagcacgagggaagggggcgacgatggagtttgagacgaatgaagcgcccccggtgaggtaaggcagcattttccgcccaagcgggcccaaggggagcgtaagccgagcacaagaaggtacgccggacgacttggcggaaaaaccgggggcggcaggggtacataaacccggccccggaagggacaaacgagggcacggcgaccgccggaaggaccctggctcctccgcgccccgcacataacagagaacacccctccgtcgcgaggaccacttaattgggacgaacgtacacccaaggttcacgagaatgaacccttcagacacctcgccaggacacgggtgacccgacggtactttgggcaacaacagaccgccatacgcacgaccgaacaccatacgttgtccgcgacccgctatcccccggaacacccgtcttatgacacccctctgtgggggcgcggcgcccaccatagtggtatcgccacgtgcgacaccgcggaccccagagaacccggcgccacaacgtgccgtgcccccccccataaacacgccgggggacacgggggctcagaacaccccgacgcgcgaggcaccagggccacaagggcacagggctataatcgcagacgtggagcgacgcca

SEQ ID NO: 728012 - DNA, 800 bp, Homo sapiens
tctgctacggggactaaaatggaagcgttttgggggtcggggtccgaatttggggcggggggtccggccccaggaaagtttaaccgatttccatccattccgcgaattccttcagtggactccgggcgtcgtgcacctttacagaaggttccaattacacggcggacccagaaacccccatgtgtgtgaccgggaacctcagtccttcgggggtaaagttcaagggcgaaggtggtgaattgccgaaaaacatttcgtggaactccatagggacctccttgggacctcgttttcgcgaaaaaattcttcttggcatttagtgcagatctcaacaagcagatcaccagtggctggggtgtgccttcgtgggcagaaatacggcgtaatttctccagttatttggaaaagccaaaggttccctgcgggccaaaaagtgggtgtagatttgtgagtagaggagaagcttttgtgcgggaaatatgtgtgtccaccaacgtatatataagacagaataaaaagcatatatcacatttacaggtggggttgacccaaggggcgccatatgttaaaaaggccgagggaccatccgagacagcatgttgcaaacccctccttatgtcggggacaaaaccacccgatgagggtcacaatcacggagaagcacaataatgcatgtgaacacttgaaaaaagaaaggactattcacgtcgcggatcatagttgtggaccaacaagtgttctggaggacttgtgatacccctcttcaatagacgaccccccccttttccgacttggtcccc

SEQ ID NO: 728013 - DNA, 383 bp, Homo sapiens
tgcagcttggctcatatcaaatacccggagagctcttaaagacatttccaactgcccaggagtcaccctctgtatattctgatattaatgcatccttttttggtacttgtgcttcagtattttttcattttaatttcttgcatttactaaattttagtcttatatgtggcataaaagttaccatttttatcatttttaagtgtcacgtttagtgcctttcagtatcttaatggtattgtgttgctcgtcaccttctactctagtttgggcatttctgtatcccctacatggatatcccttgccccatcgtgagtctatcctcattttccccttctccctgtcgggccaggccccagctgcggcggtaccgaggctctcattcg

SEQ ID NO: 728014 - DNA, 574 bp, Homo sapiens
  misc_feature (254)..(254): n is a, c, g, or t
ttaaaccctgcgtggcaagtccctgacgcaccgccgtgatgcccaggtaagtacagggcgacctgggaagtcctaactacttccttagagatcaatccagactagttggatgattatccgaaatgtttcagttgtgtggaagcagacaattgtgggctccagacgcagatggcacgcagtatccgtcgatgtcgccgttcgcgaggaaggcttgctggtgcatgatggggcacagtaatcattcccagtgcatnggctgtccaacacggcgctagttcgcggccatgggcggccttatcctcgttgggggaaacattaggcatcggaatacctcccccaaaggtcgttccttggcgcaagaaaacatcttgcttggccttcaatattcccggcgtggacactgtggcgctcgtcgatggctttcagcctcacacgtggccacggggaacccccgagattctacgcgcttggaacggcaattccacacgcgtggaccccagtggctttctgggccttcggggccctaggagtttaccacggggtgggtcccaagggccgttggccttggtccccg

SEQ ID NO: 728015 - DNA, 131 bp, Homo sapiens
tcgctctgaacataatcatgtaaacggaagaagtcatcaaatccatgaaggaaggtaactgggtaacacttccccaaaacgtgtaaaggtaaactttgggtctcaatatctttctttttagacagtgtttt

SEQ ID NO: 728016 - DNA, 1496 bp, Homo sapiens
cgtgatgcgtgagttcagaaccaagacgttgcagagaggtaataccgtagaggactgacttcgaaacctatgcacgaatgatatctatcatggcatgaggaatatctggaagactagttccaagctactgatgcatcttcggtcaaatccggtgaagcaggatggtgaacattctaatgtagaccaacgaccctgaggagtgacgtgaggcgtcgcaagggaccactaacgatggccacacagtaccaggaagtagtgacacgtacagtagagcactctcgccaagagaggcgatgtagtgaagtgagtcctggctgcgtgaactgagtcatggtagctattgaggagagtcgagcgatgtgcataagtcaagaatccgtgcgcaagcaaggggtccagaagtcaaccatctcttgcgcaagagatcggagaacacgtgacggtggttagtacatgggaatcccaaacgtaagagctagcaaaaggtgttcggctgtgaccttaggcgcagggagtaccaataacgcggggaaacctttccgaggaattaccaatctcacattgccgagcgaaagacaggagcggatgagtaaacggtgccgccccaggcagtggtctcaaccgataaccgaccatgcgctattggggttaccaacaagcttttcgactgagcccgccaatttagaagcacagaaaaaggccgggaccttgtatgaactgtcccccacccaaacggaatgtggctctccgataaccactgggtaaaccttaacaatcggtgtcaactgacctctataccatgtgcctttacgcaccaacgtggagctccgcggtcatgatccatttgatgtacaacccgacagttctgttaggttacggcaccgggcggggacacatctatgtatgtggcacccagaggtcatcaagagagagtgcgcgcttgcgatgagccagagtgtagcgcacttacaagatttacgcatacacatggcgataaaagaggcctataactaaacaccccttaaggaggggagattaaccctataataacctttacgcccgcgagaagagggccttaatggcgtataccgcttccccaacgcgactgaccttttacgccccaaatgtggatttaatcggtttcacaggcgagatagtcgcaatgaacttacggcgcaccgtaggcctgtgagacggataataccaacgcgaggctccaacctaaaagaccgacaccataggaaagaacgcagctggctataggccagccacgcaggacaagacgtccccaaagagggaacccaaggtgcgatacgacgggcgaacagagtaacatctgcacaacgactagcagcctacagatttaaattcatctacgaccagagggcaggggttaaaggaacccacgacgttatagggggctcatagcgcgacaccgagaccaagggagacaagccggaccaccgagtcgcgcctgcaggccgaccaatcaaaag

SEQ ID NO: 728017 - DNA, 103 bp, Homo sapiens
cgcgttgggtgtagacctgaagcactaagatcaggcaacgcttctcccaaactaaactagtcaccatcccccaaacattcccagaatgtcccttccccaagcg

SEQ ID NO: 728018 - DNA, 173 bp, Homo sapiens
attattcttgacttaactctagtccccttgttgtgctatcaaaaactggatcataaacattctgtctaactgtatttttgtactcattaaccatcccccacccccaaacctcctgtataaaaagtaccgtattttttgcccatcaaactttgtaataaaacttggccctgtta

SEQ ID NO: 728019 - DNA, 314 bp, Homo sapiens
  misc_feature (18)..(18): n is a, c, g, or t
cccgcgcaccaggctccnggcatcgtcttccacccgttgggcttcgccttcgtgcaaacgcagcaggttgttcatgccagcgcctccacggccttggggtagacccgctccttgaacggctccaggccgatgcgctgcagcgtctcgacgaagggttcgtcgctttcccggtagcgtacgaaggtggcgatgatgcgttcgatcacctcggggatttcctcggcgctgaaggacgggccgatcaccttgcccagggcactgtcacggcccttggccccgcccagggtgacctggaaccactcgctgccgttctt

SEQ ID NO: 728020 - DNA, 602 bp, Homo sapiens
cccttactttggtcttcctccaggcgaatgaagtagaggccagtggcgtgtctgctgagtcgcaggatcagactacgtgcactctgaagcaggtgcaggcccagttgtcacctctccagaacatatacccatggattctggcggtattgactctttcagattcagaggtagggatcattctgacttattaaagagctattataccagttaattccatctgtatgatgcttgacatacccttaatagacagatgagggttgaacgttagtaataggaggggtatggaggtgaaacattcaactaccttcctagttccaggtaatataagaacatggcgtgcactgtagataaatgggtctggtgggtcccgaggtcatcttatcacattaatgactaatttcacattatggaacccagtaccaaagtgttccagttagatatccccatagtattctgacagttgtacttcatttactttttaggctcttacagtctgctatcctgttgggcattctaggaaaaattggaaccaagtatgttcttcaaattaccttacccagagactgccagcctggaggaagctcccagagggtttaccagaa

SEQ ID NO: 728021 - DNA, 318 bp, Homo sapiens
cacaagaaaggtagctagtactgaagtaaaacaaacaatacctgaatactctgtagcctaaactccaaacatcctcttccatataagatccactggctggacaaactgcaccagttgctacttcaatttatacctcaattttcactgtgtccaggtagtactttggctcgttggctacattaaccttctctgtccgcagtgtgccacacgcacaacctgcaaggggcaaggcaaatagcttgggtcgcgcactcttcatggtgacactcgcagtcgggcagcacaagtgtcatgcaataccttagtgccagttatttg

SEQ ID NO: 728022 - DNA, 203 bp, Homo sapiens
ggcattcgcgggtcgtgcgtcggaataggcagggaacatctgcacggtgaatggcaattcaaacgccttgcccttctcggcggcgtcaactgctccagataccaggacttgggcgtgcgccagctggatcttccgtcggcgtgacgctggaatagccctcgatcagcgccgtcagcaattggcggcaggcgcggggtagagcg

SEQ ID NO: 728023 - DNA, 804 bp, Homo sapiens
ctcagggccggtattagccatggtctgggagggtgctgaatgtggtgaagactggcgtcgcgagtcatgctcggtggagaccaaccctgcgagactccacagcctgggcaccatccgtggagacttctgcgatacaagtccggcaggaacattatacatggcagtgattctgtggagagtgcatgagaaggtagatcggcttgtggtttcaccctgaggaactggtagattacacgagtctgtgctctaggaatctggatctatgaagtgacaggagggcagaccacagttgcttgttgcagctatccagtttcccctccttcccagtggggcagagtgagccaggctgtcacggaaatctagcttattgtacaggaacttcatcataattgtgtgcacgggaacgcgtcttggagcatgtgagttctccctgtaccgtggttgaccatccccgactcatctgacttaaatagtgcttcctcccagcataggtcaacaacatgtgaattcaaactcaagaaaaagtgatcccgggaaatgggggccttcgaaagcgtatttcacagcgctgttgagaggactgaggtcgcacgagggcttcgtgacacggtcgtcagcaaggaggcacccagggaacgcggggccctgagaccagggcagaagaggattctgcctgtcaacaaaagacccccggggagcatcgaagaccctccgagaagctcggcgtgagtgtcaaggagacactcggcttcagcacacggtgcgaaggtggtcccgagtcaagcagccgcggggtggtggatg

SEQ ID NO: 728024 - DNA, 509 bp, Homo sapiens
  misc_feature (37)..(37): n is a, c, g, or t
  misc_feature (75)..(75): n is a, c, g, or t
  misc_feature (132)..(132): n is a, c, g, or t
  misc_feature (164)..(164): n is a, c, g, or t
  misc_feature (229)..(229): n is a, c, g, or t
  misc_feature (266)..(266): n is a, c, g, or t
  misc_feature (275)..(275): n is a, c, g, or t
  misc_feature (280)..(280): n is a, c, g, or t
  misc_feature (402)..(402): n is a, c, g, or t
  misc_feature (411)..(411): n is a, c, g, or t
  misc_feature (418)..(418): n is a, c, g, or t
  misc_feature (508)..(508): n is a, c, g, or t
ttatcctgtgcagccccaaactgggaaagaagatgcnaaatttaaagtggaagacgctgaccggaaagggagatntgaagatttgaaccatttggaaccttaaccagaccaaagggtgggaagcccgaaatncaaagggaagccgttgttgggaagggaagagnagggggaaattcccccccccaccaaaccagccagaggggcttccattcttaccagtgggccaaanccagattgaaattggatgaaggaccagccagcttggntttacaagnttttnggtggtttccagttcctttccaccttggtgtttgggcttctgagaggaaggaagtggttcttaagccagtgatggacccctcccattttaccttcttttacccctgtcgctccattaatganggcctccanatatccnctcacttcttctggggaccacccatagccaatgccccccttccccttgggatgcccccattaatgtatgtctaactggttggggactgtng

SEQ ID NO: 728025 - DNA, 328 bp, Homo sapiens
cccctttttttagtgaggggggggttagggtttaaaaaaagggaatttggctcaacttcagttgagggggggccgccccgccagcttgacggttttttaatgccccaaaatgccctgggggaacccccctgggctttttaggaacccgcccctggggaaggcatgttccccaaaaggtttttgggggggcaaaccccccccgtaaaccataatggttcatgaaaaaaactgtttttttatgccaagaaatgaaaattttaaggccttgttaaaattactaatgggcgcgggggcgggcccttaaaaaaggtggttttttgggccccca

SEQ ID NO: 728026 - DNA, 705 bp, Homo sapiens
  misc_feature (65)..(65): n is a, c, g, or t
  misc_feature (145)..(145): n is a, c, g, or t
  misc_feature (201)..(201): n is a, c, g, or t
ggagacagcaagtgtcggatccgcaggcgcagccgtgcgatgttgtcctctacagccatgtatcnggtcctggcagagacttggggatggaaccgacagagccgcgggcctttgcagctgcagattttcgccctacgtttccaancggagggtactatactggcaattgcgctggagaagattttgcaatgtgtgcttctngatactcgatgtgagtgaaagggtttcccaatttcatacgcgggatagccccaaaatgttacaaatttaccagacaaaaacagtccattggatgcagccggttccatggagactgtcttacgctgacaaagattatgtggacggcaagactaaagatgtattaagcattccaataataacggccatgactacggggcgcacatttgctgcaaatggttgtctacaatccttgtattccaggggcgctttttcccatacttattgtttaccaacattcatcggtggactttgatgagaagaaggaaaaggggggcctgtataacagcttttggatcccagtagggtcttacccagagagaactcccttcaaggctggaaggcctcagcaatgtgccatggtaacagccctgtttggacaacccaggtgggtttaacagacccttgcagactgggggagcatggtccggtgtccttggcacaacaccccatgcggtggtgacagtg

SEQ ID NO: 728027 - DNA, 842 bp, Homo sapiens
ggaagaatgcagagtataagagatacctagagatgctgcttgagtaccttcaggattacacagatagagtgaaggcctctccaagatcagaatgaacttttcgggaagattcaggctgagtttgagaagaaatgggagaatgggacctttcctggatggccgaaagagacaagcgagtgccctgaccacgatgctggagcccatcttgacctctctgcgattctcgcatccatgggaggagttggcttcatctgggtgtggagcagattgaaaatcgtgctctcgttaggcttgtaggcttgaaatgtggcgggtacgcctagaagagcgagccgcagagactgattctagttaccaaaggaaagtccctggagtcgactgtgatacctcttggttggccaaaaatcccaagtcaaagggcagccaatgcgagacacctgagaaggaacaaagagattgcttttctagaagcccaggatctatgaagtatgtagagattctcggggaacagcgagatctcactcatgaaggagtgtacagcgcaagcaagccaggacaggagaagagcgagaagaatgaggaagaagagcagatcagtgagagtgacgagtgaagatgacagagaaggagatcatgtaagaagcccaaaaagctgcaattggctgggattgggagagctatgccctaatgggtgtataaagctttgtggctaaatatcaagtacaaatgtgagatttgtggaaaataacaactaccgagggccaaagcttccagagaaactttgttgatggggtcatggtcatggcatgagggttgggtcccaaaatggcacttgtatgtga

SEQ ID NO: 728028 - DNA, 281 bp, Homo sapiens
caagagttgctggaggagagcacttacgactggatgacgtcacgaaacgcatactgcagttcatgacggaaccagcaccgggggtccacccagacacgatctcgttttatgggccctggtggtaagaacaattggttgcccatgcaggccgagcggttactcgctcacactagaggcagcagtgggactatgccagggacagtgaccgtcggaacaacggggagaacaggaacgaccaatggtaagagccacacgccactggacaaaagaggagagagtaa

SEQ ID NO: 728029 - DNA, 109 bp, Homo sapiens
tcaggctcggcccagtgtgtcacgtggacttccagagggatgggcgaaaaggctccatctcagtgaatagtcgcagcacgccgttcttgtgccactggagacagcgaga

SEQ ID NO: 728030 - DNA, 133 bp, Homo sapiens
  misc_feature (1)..(1): n is a, c, g, or t
  misc_feature (124)..(124): n is a, c, g, or t
nttggaggtgtttcacacacacacacccctgccttgtatgctgtctggctgacaaaccactgctcacatagccaaccctcggagcagtaattccagacagataagtggggttcggagtcgctcntggaatgtt

SEQ ID NO: 728031 - DNA, 109 bp, Homo sapiens
gatgaaatatgtgatgctcatctggcaaatactgccatgtgagacctagtcctgcaggcttccatggatgagaacaacatgcaacaacacttgaagcaacgtgcatgtc

SEQ ID NO: 728032 - DNA, 792 bp, Homo sapiens
  misc_feature (483)..(483): n is a, c, g, or t
gagataatttgcgggtgtaaatcaggttgcctggtatcccattctactttgcagcataggccatgcacttactacgtaagcctggctggtccatgcggtttcatgctagcagtttgactgtcacaccagtccattgtgccctacatgcgacggtaacagcgggttactaaagatctttctgcatgcggagtttcgtgctgagagaagagtcacgtattgtcttgttgtacagaagaagcccatgcagtatcaccaatgtggatgaaggttttaggtgtggacacagtggtccctcgcttaatcgaatgaagcatcactgaccttgggcttcatggaagaacaggcccagctctggggctgcgtttggatttatcgttttgattgccacacttctctacttggtctcctggaagtttttaccacatgtaacagatgtcctttactatgtagctgaaaagcgactatatctgtagaaaactgtcnaggtcaaaatatgtgaacggaactgatgagcatgtagtccagtctgtggttccatggccgtttgctttgtcttggggtttatctgctattgaagagtatataccaactatgtatatccagttaactgagagaattttgatctctggtaataaaagtgcattaagtttttgattttgtagaaattagcttttgtctaggcaactagtggttatactactgctaaatagttgtaatgaatgtgtacttttttgatttttgtaataaaaattgggtgcagataaaatgtcaaatgaacaaaccagtacctcc

SEQ ID NO: 728033 - DNA, 635 bp, Homo sapiens
taatattcagtatatttgggcatgtatttgcttaggttagtgtttggaaaatcaatactacttagatcagtatacataaagcacaggctttttaagtttaggcgatatgaagttgaataaaagatgctccaagagaaactgacaggataattgacacggtactagctgttgcatttcagagaagcaatggctagattgggttgaagacatggtacctcattagtgttctaatttctgtttcctttatggacacatttttttctcatatgcaggtaaggattttatattttctgttgtctgcatatatctgttattctttgggccggtgggaatcttaaggtttgttctaagtcagcatatagagaagtcgtaattacagtttaaggggtgtgtgtgtgtgtgtgtgtgtgtgtgtgtaatatacatgtgtgtgcatacgaagagagagaaagagtgcgggggtccttgaaaggatgcgtgtgtcgtgcacagtagtacattcctaccctcttggggtaacgagcacccagttttacgtttagagaacccatgatgtgtgtgctatgtccatcctatctaggtatgttagggtgccgtcaatattggatagtggatcttcgggggcatagagatgg

SEQ ID NO: 728034 - DNA, 215 bp, Homo sapiens
gcggatcttatgaagtatgtcaaattgactgaaccagattcattgccatagaactgggcacccactcctgctgaagagctcagtgaattgaaactggggctttccagtgtaatgaagaagcactactacatctgaatatgtgataccaatatcaccagcattcctcaaggtcttcctccttaccttacggacttacatctagatggaaaaaaaaa

SEQ ID NO: 728035 - DNA, 84 bp, Homo sapiens
  misc_feature (71)..(71): n is a, c, g, or t
gagagagatgaagggtcttacgagagagatgaagggtcttactactgtgcctgtgacacccctgggggatnctctcctgggaca

SEQ ID NO: 728036 - DNA, 369 bp, Homo sapiens
agatgattgaagtgatgtttgttaggctgaggtcaggtttgattttgctgggagccttccttgattctgattgtgtcttatcatttgtttgtcttctgaaggttgtggaggaggagggaagggttcatagaaatgccctgggtgtgatcccattgttgcaggttgtaatgtctggccacgtttcctcctgcggtgtctgattggaacttccactctgatcaagcagcaggagcaataaatagctaggtctgtgcctccctttctatgtgaagctagggaaaggactttatgagctttaagcggtaacttgatggaagactttacgcctctgcacatactgtcagatgctccctcagaagagaatgacaa

SEQ ID NO: 728037 - DNA, 543 bp, Homo sapiens
ctcttgtattacattccattattaaattctggccctattcccaattgttagcatctggctgatattaaggtctttgatgtgtcacaatattctcaataaatgagacattctgaactgcctggtgatattttcaaaaagagcaattaaaatgtgtattccctctaatacagctgatagaactgttgtgttaaagcaagttggaaatttgcatgatagtgtggaaaccaatggaggtccaaaatattaatcatatctaaaatatcagaaaatatcaatactagtcttctttatgcatatttttgactttttaagagggcttatgaattcaatgtttcttctgaggcaatccttttaatgtaaatactaaatacttgcatgtcttttgacaaaggctaaactacaatctattaatatgcacatttttgataaaatataaagtaccctaattaaagaaattgtggtagaaggtgtatgtcctgaatactatacctgtttaacaataccaaatgttaaataaaaatagtttgaaattaatgtttaaaa

SEQ ID NO: 728038 - DNA, 168 bp, Homo sapiens
gtgttaaaattcggagacttcattgttctttcctcttcattaacaaattcttctacacgggccctgaccagctctgccgtctagtagcatctcattgcggttccgtgcacagacattacatcgacgtgacttgccttttctgtcattggtctctctctgaacgactct

SEQ ID NO: 728039 - DNA, 322 bp, Homo sapiens
gatagcttatagtgacgaaggaagtaccacaaatagatgaggaaagaaaaacttattcaatagtgttaaaaatttgctttatatttgaaaaataaaatcactatattttttaccttaaaccttccttaaagtaaattgaatagcacagtgttaaaagtttttagataaatccattaaaaatgtttagctttaaaggattatctggaaagagaaaaaaataagcataaagcaaagcaaacaattgcttttacaaatattagatttaaatgcacaatcattaatatttttggaatgtttagaacatctggagcaagcagaggtt

SEQ ID NO: 728040 - DNA, 134 bp, Homo sapiens
tcggaacctgcgatattcggagcacacgctctactccaggtatcttcatgaagccataccccccatgatttggatgattcatctgtcacttccacggtgctccgagccaaagattatggctgatggctggctct

SEQ ID NO: 728041 - DNA, 361 bp, Homo sapiens
atacccgtagttccttcgattgctatcagtttccactttgaatattggactcgactatgcatacgtaccgagaacataatgcgactctagtgtagacaggtatgctgttggatttgtccgaatcctgcaatgctttcattactcctttgatattggaccatatgcatagtaccgataaactagtgcgagagtattgatcaggtattgctgttagatatccccgagtccttcaatgctatcattccctttgatattggaccatatgcatagtaccgagaaactagtgcgaagtagtgatcaggtattgctgttagatatccccgattccttcaatgctatcatttcctttgatattggatca

SEQ ID NO: 728042 - DNA, 834 bp, Homo sapiens
ggccgggcacagtggctcatgcctgtaatcccagcactttgggaggccaaggcaggaggatcgctggagcccagtaggtcaacgaccagccagggcaacatgatgagaccctgtctctgtcaaaaaattttttaaactattagacctggcagtggatagcgcacgcctgtggtcccagctgctggggaggctgaagtaggaggatcatttatgcttgggaggtcgaggactgcagtgagtcatagatatgtatagactgcactccagcctgggtgacagagcaagaccctgtatcaaaaacgcaaaaacctgggaaacagtgacagtatggctgtaagatctcatggttcacgtcctagcaagaagcgagaattctgagatcctccagcaaagtccgagcagcacacacctacaacctcggggccagagtctcaggccttaccggggacctgccgagctggaactaactgtggagggctgcagcgcaaggcatccctgggcgccacagacgagacgagccaggacagggcttcggacggcacaagctcagcgcaggccaggcactgatgtggcgaggggccactaccaaggacagctggcccaagaccaagtaccagacgggaagccctgaggcagaaagagaggagagcagacggaacggcaaattgcaggaagaatgatcaagcgccaaacagagagtagcaagcgaccggggcaacccggctacacaacgatgcacggaaaccgaagagaagagggaaactcaaaaaggcgacaaacagacagaaacgccgacaaaacacatacaacacaaagaaggcaacgaggaacaca

SEQ ID NO: 728043 - DNA, 292 bp, Homo sapiens
  misc_feature (38)..(38): n is a, c, g, or t
aacagagaaataagttcaaaacttggataaggttgatnaataaaatgtgtgcacatttcctagagatggggtacacatttaatttctgagcagttaaggcaaaaacaataatagtatccataagtgaaaaacagtttagcatacttaatcctgggactaagaccagagaagaatttctcttacgtttctttttaccagagacaggataaagtagtgaactatgtcctcaacaacatttgctaagtaacaacaacaacaaaataataatgagtttccataggggtgaagtcct

SEQ ID NO: 728044 - DNA, 106 bp, Homo sapiens
tacagtcggtcctttgatttcatgtcaggcatcttgaatttgaaaggccccaaggtgaaaggtgatgtggatatttctcttcccaaacttgaaggggatctgaaag

SEQ ID NO: 728045 - DNA, 986 bp, Homo sapiens
  misc_feature (5)..(5): n is a, c, g, or t
  misc_feature (107)..(107): n is a, c, g, or t
  misc_feature (109)..(109): n is a, c, g, or t
  misc_feature (151)..(151): n is a, c, g, or t
  misc_feature (154)..(154): n is a, c, g, or t
  misc_feature (163)..(163): n is a, c, g, or t
  misc_feature (167)..(167): n is a, c, g, or t
  misc_feature (173)..(174): n is a, c, g, or t
  misc_feature (178)..(178): n is a, c, g, or t
  misc_feature (214)..(214): n is a, c, g, or t
  misc_feature (251)..(251): n is a, c, g, or t
  misc_feature (275)..(275): n is a, c, g, or t
  misc_feature (449)..(449): n is a, c, g, or t
  misc_feature (479)..(479): n is a, c, g, or t
  misc_feature (489)..(489): n is a, c, g, or t
  misc_feature (507)..(507): n is a, c, g, or t
  misc_feature (520)..(520): n is a, c, g, or t
  misc_feature (536)..(536): n is a, c, g, or t
  misc_feature (543)..(543): n is a, c, g, or t
  misc_feature (547)..(547): n is a, c, g, or t
  misc_feature (555)..(555): n is a, c, g, or t
  misc_feature (563)..(563): n is a, c, g, or t
  misc_feature (582)..(582): n is a, c, g, or t
  misc_feature (587)..(587): n is a, c, g, or t
  misc_feature (592)..(592): n is a, c, g, or t
  misc_feature (594)..(594): n is a, c, g, or t
  misc_feature (604)..(604): n is a, c, g, or t
  misc_feature (607)..(607): n is a, c, g, or t
  misc_feature (611)..(611): n is a, c, g, or t
  misc_feature (637)..(638): n is a, c, g, or t
  misc_feature (671)..(671): n is a, c, g, or t
  misc_feature (679)..(679): n is a, c, g, or t
  misc_feature (691)..(691): n is a, c, g, or t
  misc_feature (695)..(695): n is a, c, g, or t
  misc_feature (709)..(709): n is a, c, g, or t
  misc_feature (714)..(714): n is a, c, g, or t
  misc_feature (738)..(738): n is a, c, g, or t
  misc_feature (742)..(742): n is a, c, g, or t
  misc_feature (754)..(754): n is a, c, g, or t
  misc_feature (761)..(761): n is a, c, g, or t
  misc_feature (812)..(812): n is a, c, g, or t
  misc_feature (828)..(828): n is a, c, g, or t
  misc_feature (838)..(838): n is a, c, g, or t
  misc_feature (849)..(849): n is a, c, g, or t
  misc_feature (881)..(881): n is a, c, g, or t
  misc_feature (967)..(967): n is a, c, g, or t
aaggnatatgaaattgacaagacactatatcaaaaaaagatgtgttcggacttcactgatgcgatggtaggtcttttgggttacaatagatagggatgatataaaananaatcttttcctgtctattccattttagaaactggtgggtgtnctnacgtttgtntggncattgnngcantgaaaaaatacatgaattaagcaaagcatcggaaantattgacacatgagactaaaataaataagagaaacgngctgatctttataactagaaatanatggaaattactgaaaaaaattaaagtgcagaggttttcattttagcaccatgaattgtgatgaaatcccatttctctcaacataatggcaggactgtatgcagataaggaagcatagagtagatgatgatattagaaggcaaatggtagaattttttgcgttcaaaaaacagnaaggtcaatggttaatcaatttttagaaanaaatggggancaatagatgaaataaagntctggtaaaacantttccttcatgttgcntttttcnttanggcgagantatttccntgcaattgtgagggggtanatagntatgngngaaaggtacnttnattnaggtagagagaaaaatccaaagatcnntaagtccccttttggccatcgtgaaatggcgtngaaatttngcgtcaatagantccncattgccaatcatngatcnaaaggccatgaacccagggcggtncaancccaataattcntgaacgnaattcagggtttccaaatattaatttttctaggagttggcatgggcaattntcaccatacaaaatcntgcagtaggnagggtccaggncaaaggtgcagctttttcttctccgtttgaanatctcccgtgcataaggatcctaaatgcatgcttgtttgcctgctggctgttctcacagaacaatttttcttgtgtcctctttcanctcgattatctctcaaaag

SEQ ID NO: 728046 - DNA, 425 bp, Homo sapiens
ttttattcctttatttgcccacccacatcctgctgattggtgtgtttacaatcctctagctaggcagaaaagttttccaactccccacccgacccagaagcccagctggcttaaccctctcagatcctgctcagggagtttagaatgaagaaggcagaagcaggagactagccaggaaggcggaacaggccagacagttctgcaaactcacatgtaaaaaacaaggtgggaggaaagggagaaggtccaaggtaatttcccaaaaagggatgccggtcttggagatgggtggatccatattttccaaaaaccaaggtggaattctttattgccctttcaaaaatttaaggtttaaatttaggggggggagttttttcaaccaaggatacatgatccttttttgggggtaggggacaattaaagct

SEQ ID NO: 728047 - DNA, 189 bp, Homo sapiens
gtgccggtacccaacaggagaataatctggtcttaagtttgctctgttttagacaaatactttacatgactgatgtaaactgttgcatagttgggcaaaggttttctcattcattcctgaaattctccatcattcacaaacacaaattgttcaatatatggggaagtcaaagccctttgctcagaacag

SEQ ID NO: 728048 - DNA, 152 bp, Homo sapiens
tttttcaaacggattagtattagatctttctgtattagaaaacatgcccttcatcgtgtcaaatgctgtcatctgcatagtgcttttttaaagtgttcttacaatttcctttttttttttttttggaaacattcccacctggttggcgggga

SEQ ID NO: 728049 - DNA, 320 bp, Homo sapiens
gaggaggtcacatgagactaggggcacgtggttcttcaggacgagacgtgcagctgtcaagctctgtctatgcctgcgcatggtgcttgaagctgtgtttccatggagctgttaagtaggggcttggaggctgtggcttgagcccagagagaaacgtgagcctgtctgcgactcctccctgatggctgcctccaccgctccctgaggatggcacagagtgcacttcctccccatgcacagaggagagcaaggcctagagcccctgtcatgtccacagcagactgaggggagttcttgtctgggccaggcctggtgaccat

SEQ ID NO: 728050 - DNA, 1354 bp, Homo sapiens
gggctgactcctgaaggttgatggccgtcaccaaacccgtttgccttggcttccaccacagcccacctctgcttgctaggggaccttatggagactcacggggctctgggggaaggatgtagacattctgctctcccccagtccccgtcccacacacacactccttcactcagctgtgctgtgaccccacccttttctttaatctgtgttctcttctctcccttagatgatggagtttcttcagttaatgagcaaatttaaggagatgggctttgagctgaaagacattaaggaagttttgctattacacaacaatgaccaggacaatgctttggaagacctcatggctcgggcaggagccagctgagaccaggccctgcctaggccctgccgcagaaccaccatccctgggaggccctgcagagcccacctgtggggaaagagaaggggcagcttccggattttcttttgggggttagaaggtcaggtgtggagactgctcgccagtctctgtgagcctaggccctgagctggggaggtggggaagattcgggcatgtgagtgcccccagaactgtcctggctccttccgtattaaacgcatttgcattttgagaagtgtccttcccacttcagccctccggagagactaccctagtctttctggggtgtttatgtcctcagctgaagcctggcctagttgctgagaggggctggggagatggggcgggagggccagactcagtgctgctgtggagctaggtgcttcccccttcccctgagactggtggactgaactccagtcaagttgagttcaagtgaaagattcttccagggttttattttttcccctcctaacaaagtctcatagtgttaacactggttctgcaatatctctgaggtgcaaagaatgcacttttccctatggggcccagagtttgccttttctgccaggcagtcaccacgcttccctaccccagcctgtttcttttggcttggtttggaccacagtcctctgctacccagggttttagagcccctgctctaggaaacagtttaagaaatcattggccccttcccagcacattgaatgggtaagcagacaggccatgatttagttggccagcactaactccacctctgttctccttgaacagcttcccctccagcccactgctttaggatgacacaatgaataacacctagtcatagaaatcagtctctctggtttgttttgtattatgttgtacatcattaaagatctaaatacaaaggatatacagtcttgaatctaaaataatttgctaactattttgattcttcagagagaactactaataaaaatctaaaaggta

SEQ ID NO: 728051 - DNA, 218 bp, Homo sapiens
cgatttattttacaagatacctggagcccaaacttagggataagacccctgggccctagtctagtaagaggcagaaaggaggaggggcagtggagaaaatagggacacagtctgaaacttctgcctcagtagctaagggtccccaggttcctactgacactatgggctcctaggacatctacacataagcatcactggggataccttggcttgtgact

SEQ ID NO: 728052 - DNA, 210 bp, Homo sapiens
gtcagagactgtggtgggtcacgtgtgtctttggggggtcgcgcgctgaaggttccttcccgtctccaggtgtctgcggagcactccaggcacaggccctccaggtaggctctcagttgctccgcttcaggggccgcctcccatttgcgctgcgtgatctgagccgcggtgtccgccgcgacccaggacgccaggtcctcgttcagggcg

SEQ ID NO: 728053 - DNA, 4511 bp, Homo sapiens
  misc_feature (61)..(61): n is a, c, g, or t
  misc_feature (83)..(83): n is a, c, g, or t
  misc_feature (95)..(95): n is a, c, g, or t
  misc_feature (127)..(127): n is a, c, g, or t
  misc_feature (4284)..(4284): n is a, c, g, or t
  misc_feature (4311)..(4311): n is a, c, g, or t
tggaagtaggacttcaacatggcggctgcggcactggcggtggctacggtgacggcctggnccggagcgggcagaagttgganggtggtggcgtngctctccctaggggctgtcgggagctcagcgnggaccgagcctgggaggccggccggtgccagcacctttcggcttctgagacggcggcagcagcggcattcaggttctaaatggcttctaagaagttgggtgcagattttcatgggactttcagttaccttgatgatgtcccatttaagacaggagacaaattcaaaacaccagctaaagttggtctacctattggcttctccttgcctgattgtttgcaggttgtcagagaagtacagtatgacttctctttggaaaagaaaaccattgagtgggctgaagagattaagaaaatcgaagaagccgagcgggaagcagagtgcaaaattgcggaagcagaagctaaagtgaattctaagagtggcccagagggcgatagcaaaatgagcttctccaagactcacagtacagccacaatgccacctcctattaaccccatcctcgccagcttgcagcacaacagcatcctcacaccaactcgggtcagcagtagtgccacgaaacagaaagttctcagcccacctcacataaaggcggatttcaatcttgctgactttgagtgtgaagaagacccatttgataatctggagttaaaaactattgatgagaaggaagagctgagaaatattctggtaggaaccactggacccattatggctcagttattggacaataacttgcccaggggaggctctgggtctgtgttacaggatgaggaggtcctggcatccttggaacgggcaaccctagatttcaagcctcttcataaacccaatggctttataaccttaccacagttgggcaactgtgaaaagatgtcactgtcttccaaagtgtccctcccccctatacctgcagtaagcaatatcaaatccctgtctttccccaaacttgactctgatgacagcaatcagaagacagccaagctggcgagcactttccatagcacatcctgcctccgcaatggcacgttccagaattccctaaagccttccacccaaagcagtgccagtgagctcaatgggcatcacactcttgggctttcagctttgaacttggacagtggcacagagatgccagccctgacatcctcccagatgccttccctctctgttttgtctgtgtgcacagaggaatcatcacctccaaatactggtcccacggtcacccctcctaatttctcagtgtcacaagtgcccaacatgcccagctgtccccaggcctattctgaactgcagatgctgtcccccagcgagcggcagtgtgtggagacggtggtcaacatgggctactcgtacgagtgtgtcctcagagccatgaagaagaaaggagagaatattgagcagattctcgactatctctttgcacatggacagctttgtgagaagggcttcgaccctcttttagtggaagaggctctggaaatgcaccagtgttcagaagaaaagatgatggagtttcttcagttaatgagcaaatttaaggagatgggctttgagctgaaagacattaaggaagttttgctattacacaacaatgaccaggacaatgctttggaagacctcatggctcgggcaggagccagctgagaccaggccctgcctaggccctgccgcagaaccaccatccctgggaggccctgcagagcccacctgtggggaaagagaaggggcagcttccggattttcttttgggggttagaaggtcaggtgtggagactgctcgccagtctctgtgagcctaggccctgagctggggaggtggggaagattcgggcatgtgagtgcccccagaactgtcctggctccttccgtattaaacgcatttgcattttgagaagtgtccttcccacttcagccctccggagagactaccctagtctttctggggtgtttatgtcctcagctgaagcctggcctgtttcttttggcttggtttggaccacagtcctctgctacccagggttttagagcccctgctctaggaaacagtttaagaaatcattggccccttcccagcacattgaatgggtaagcagacaggccatgatttagttggccagcactaactccacctctgttctccttgaacagcttcccctccagcccactgctttaggatgacacaatgaataacacctagtcatagaaatcagtctctctggtttgttttgtattatgttgtacatcattaaagatctaaatacaaaggatatacagtcttgaatctaaaataatttgctaactattttgattcttcagagagaactactaataaaaatctaaaaggtatgtcttggtgtgataacttctttattaccaaggctgttttatgggagtgggggggccatgtggtgtataaagagatttcttgcttagatttgctggggatagaataggacctaaccgttttctatttcggagctttcttcccacttcagacctgtcctcgtttttggtttgcaaaggcaagcctagactgagtcttttaaacctggcccagctccgtctgtggaccaaggacgtaggccttcctgactgtggagttgggataggctgggccttcagggggatcacccagtaaaagaggaagaagcccttttactgtgagcagcaggcatttatgcatcatttgccacaagcagaggatgggatttaaactgtttcaccagctctcagtggtgctgttgtatatgatgatagaatagggttcattcctaaagtaagtaagtttttgtccttgaccttaatactgtgccattgtcccacttgagcttttggctagactgggtctttgaaggtttttagtgatcatgtgagggaggggccgcagtgccctgcagccgggaagcaccaataaggatgccccctggcggtcagatgaggcactgtcaggctgacaaagggtgactggaccaggctgctagtgtctcaagagagccatttaaccctcttcttgccttttaattaagccctccttttaaaaccgtaaaaagttatcctttatctgaaggaaataaaggctcacatagtaatgggcgttcggggccaggccgtgactcatgaatctccatttgacccaagagtggcttcaaagtaattggcacctggaggctactttgtcttccctgtcctgagctgcttcctgctaaaaagatacacagcaggcagaacttggctgaaggtttgtgtgtgaattctgtttcagaggcctcagactgttgaacagagcactctgttcaactgccaaggttcccaacacagacccctgagaggcagggtggctgggcagggtgaactggatgaaggccaggctaggagatggactattccatgagggggctgggtagtgaggtgtcccagataggagccaggagctgccatggaagcatgagagtatcggcatgtacagagcctttcacccgagcaaaagtcaggagaaaattgatgtgtgacacaggcaccctcttctgcctcaacactggattgcaggaagggaagggagctgtaaatataaggcctgtctcacatctgctgctgtcagtgacacatcaagtcaaggtttatgctatttacattttcaaaacgcctctgaatccccaaatcaatctccaagggctgatggggcagagctcaccccacccctgtccccctagcaccaatggttaagtttgggccagtgtttagtcttctaagttaggcacagaattcagctggtgaagcctctggtctcagcatgttgtcttctctgtcttgtgacctctgacctctaggctaccactgaccaccccatcctctgatccccaaacttagaaacttcagggttattagacccaaatatattcccacaggcaaggggttagttaatcatattctctaggcacaagggaaaggcattaggttcttcggcctggcccacccttggaggcactcctgtgcatggaactgagggacaggggcctgtccctgagggagaagctgggacctatctgaagccacgtggggctggggtgacgctagcataggcaggaccagcgtgtgggttctggtgtgtgcagggaggacctggcagaggctcctccagcctgagagcccagcacagactcctgcagggcccccaccatctcggcacagggtctggctctaagacggcactgtnccctcaggggctgcggtgggcccgtgncaggtgagatagagctgcagctggctcctcagactctgggatacccttggatttcagaaccatgattcatccagctgggtcacaaaatcttcaaaatcattagaagccagctggctcatcagcgtctcctccttgagccgagatcagccattcatccagctgttcctggtgtgtcggattgacactgttggcttgtccag

SEQ ID NO: 728054 - DNA, 1815 bp, Homo sapiens
  misc_feature (1252)..(1252): n is a, c, g, or t
  misc_feature (1377)..(1377): n is a, c, g, or t
  misc_feature (1423)..(1423): n is a, c, g, or t
  misc_feature (1762)..(1762): n is a, c, g, or t
  misc_feature (1767)..(1767): n is a, c, g, or t
cccgtgattgtgtaaagcgacagagatggaatgagactactatgaaacggattagacactgatgagaaaggccatagcaaccacagggacgagtgagagaatcgcgaagaatgcagcgtgatgcggtgaaaagacaagacataaaacaacagagcagggcgacatacgaaaaaggggcacgaagaacgtgaaagacggcgaccacaggacaaccggggcttagcacaaacagcatagcatacggctagctgacccactgagagaatagacagcgcaggaacggcatcagaccgaccaatgccacatgaagaacgagaccaaaggagagagaacagacaggatacatacacaaggttgaaccaccaaagaaagtcaaaacaaaaagcggaacaaaagaacaaagaacaacacagaatacaaagaggaagccccacaagcagaaccggcgctcgaagcgcaaaagactggcaccaaacagagacacaatagacaaaagaacgaaccaccagcacaaaagaagacagttggacgaagacgcacacaccagacgggagaacgagaggacaggagacagagtagaatacagaaagacaaaacaaagagaacgaaggacgcagaaatgagaaagataacacgaaaccaagaaagacacgggcacagaagcacaaagcaacagaacagacagacgaaaagcaaacatagaacagacaccacaaagaatcccacacaggaagagcacaacaagcacaacaataacatccgcacatagaataagaaagaagaaaatacacaacgagatgaaagcaacaatgtcaaaaaggaacaacgaatgagaaaaacagatggcgagagcaacacatacacaccaatatagaacatgcaaccacctacacgaaatagtaacatagggaagaatataagacaccaacaaggagtgaagaacaacaagacacacatgagacagaactacaagacaacaacgcgaccatacgcaccagaagctgcacacaaccaacgacacgagtcgacagagaaatgaacagcacaaagatcaacacacagcagcagcaagaaacacgaccacgcgaacaccagaaatcagataagttagcacaagatcaagctggcgaacagtgaacgacagcacagctcgagatcagctaaacataacactgaacacgacactaagaacacataggacgatcaccacgccagacacaaaagcaacaaagcatagatgggatcaacaganagatgatgacaacacacatagcagaatgacagacgacacacagctcgaagaacgacgacgacaacaatgtacagatacagcaacagacagagaagccgaatcgaggaggcgaccactacacacanacgacacgagcacccatagcgcagcactcatcatcaacagcagaancacgatgcacgaaacagcgcaagatacgatacgagagactcagtagtctgaccagaccactagcatatagtagcacatcatacagcaagacgccagaactcgcgaacgacagagaacagaaaatgaaagacagcaggaaacagagacaagacaaaccgatggaggctagagacacaggacgagacagatagatacgataaatcaccgcacaactcagacacacgagagacagcacgatacatagaatagtagatagcaacgagacagcgagacacatagagcacagcgcgagaagacctagtgtagatagcgaacaacgagcgcggtagccacagcgancaccncagaactagagagacacacacgtcaaccgacgacagagacaacacgga

SEQ ID NO: 728055 - DNA, 124 bp, Homo sapiens
atcttgaattcttgcttaattggtcagattgagcttgctgttgcccactgatgttgcttgaatgacccattgtgaccaatgaacaatgctgggtgtgcttggccccagacagctgcagctggta

SEQ ID NO: 728056 - DNA, 505 bp, Homo sapiens
caagacccttggcttggtgaaaatgcaaaaggagagtctggccaatctacaaatggagaacaagacctactcagtcatgaacaaaaaggcagacaccaacatggatctcatgggggattggatattgtaattatagagcaggaagatgacagtgatcgtcatttggcacaacatcttaacaacgaccgaaacccattatttacataaacctaccattcggtaaccatgtgaaaggatggaccaatatcaaggtgtcagttgacctcagtgaattctgtgatgtttctgagatgcagactcccgtgtagtttcagattcttggtccatggatgacaccacctgcccatgcttccttgaattctgtgatgtttctgagatgcagactcccgtgtagtttcagattcttggtccatggatgacaccacctgcccatgcttccttgaattaggctttcctaacctgaagcgccttcaaacttccaataaagagatcattttctgcttca

SEQ ID NO: 728057 - DNA, 324 bp, Homo sapiens
  misc_feature (4)..(4): n is a, c, g, or t
  misc_feature (82)..(82): n is a, c, g, or t
  misc_feature (91)..(91): n is a, c, g, or t
  misc_feature (94)..(94): n is a, c, g, or t
  misc_feature (97)..(97): n is a, c, g, or t
  misc_feature (106)..(106): n is a, c, g, or t
  misc_feature (156)..(156): n is a, c, g, or t
  misc_feature (162)..(162): n is a, c, g, or t
  misc_feature (168)..(168): n is a, c, g, or t
  misc_feature (207)..(207): n is a, c, g, or t
  misc_feature (230)..(233): n is a, c, g, or t
  misc_feature (259)..(259): n is a, c, g, or t
  misc_feature (266)..(266): n is a, c, g, or t
  misc_feature (317)..(317): n is a, c, g, or t
  misc_feature (321)..(321): n is a, c, g, or t
cttncattttttcccagtccactttcaaccatttttcccattttttcaggtacacccaggttgcggcgtattacggtcacgngtctgggtngtngcncggtaaagncccaagcccctgcctaggcagagctgtggcggttgggctgggtttaattncaattnattttntgtgtgtccatggcgggggggtgtacaggcccctggggnacggggttcccaaattctttttnnnntgctttttcggctttttgttgggcgntgttaangcctttaccggggccgggtcggtttttttaaaaggtcttctgcttgccggncttnttt

SEQ ID NO: 728058 - DNA, 1852 bp, Homo sapiens
gcccggccccagggtccacacgtgctctggcctgcaggatggcttcagccacacagcagatatacgcacgttggctgggagcagtccgtcacaactggctctgtgtggactgtggtgcctattcatgctgcctggatctgctggggtgacgctgggcctgaccctggaggatgagccgctgaccgggctgcgcttcctgcagctgcacaactgtgctggacaacagtgatgccgcgctgtgttcctggagctcacgcgctacatgcccggcctgtggggctgcacgccgccgatcacgctgccgcctcgagttccctggtggctggccgcgccctggcctgccctcagtgtcctgcccctttgctgctgcgcctgcctcagcgcgggcctctcgctgcctctgctcacctcggtgtgcctgctgctgttctgacgtgcacttcgccgtggccgaggaccgtacttggcacagggaagggcgctggcgcgtgctgcggatcggagcctgggacgcggtggctgctggtggcgctagacggaggcacggcactggtacagcctcgcccaaatgggtgccgatgaccgcagtggacccgctacgtgcgcggcagcgcgtcgcgttcactagctatcggaccaggtggtgcagctgagctccgcagccccgtgctggaggctcgctgtctcctgctttggcaaggctgccagagtagcctcgtgcagcatgacgcttgggagacattgccgactgcaagtctggggttatgtgagcctcgtgcgggaaccagcagaggacaagagagtacggtgcctcgagtgccccattggtcacggaggacagcgaaaggatacaaggccacggcaaggcaaatagtgaggtccgatataaaaatcacacaagaaacgaaaaaacacaaacacaaaacaacaagaaaacaaacaccaacgaaaaaaaacacaaggaacgcaacaaagaacaacaaaaacagaaaaaaagagacaaaaacaaacgcaaaaaaacaagcagagacgaggagcgagaagggacggacacagagggcggacacgagcgacagagagagaaagaggcggggaggagaggagccgcggcagggagaggcaaggacgacgggagcacgagcggcaggagagacgagagagaagaggcagcgagagaagagaagaagacgcgaaggaaggagacgagacagagagaggcgagaacggaggagagcaggggcgagcagaaggaggagaggtggcagagcgaaacacacgcaacggcgaaggcagaggggaggcggacgaagcaagcagagaaagcagggagcaaggtagccagcccaggcgtcggagagcagcgagacggagagagtgggcagcggagagagcagaaggaggaagcagacggaagaggaaaagggagacgagtagaagcaggcgttaagccacacggcacacaggaggggagaccaagaggagaggagagcaggacgcagaggcagagaggagcggcgaagacagagagagagaagagcagaggcgctgccccgaagagaggggagagcgcacggcaaaaaaggcgaggaagacgaacggcagcgagaggagcagacgcacagggcaacgcacaagagaggaaagaggcgcgacaggagcaagaagaaggagcgaaggacgaggcgagaggagagagacaagcaggaaagaccaacagacggacggaggaggacgtcagaggaggagggagcgcagcaacgcaaagcagcgacagaccacagagcgcggccgagcacggcgccgagagcagggcgacacggcaccatccgatccggaaggatagagaagccga

SEQ ID NO: 728059 - DNA, 2417 bp, Homo sapiens
  misc_feature (61)..(61): n is a, c, g, or t
  misc_feature (83)..(83): n is a, c, g, or t
  misc_feature (95)..(95): n is a, c, g, or t
  misc_feature (127)..(127): n is a, c, g, or t
tggaagtaggacttcaacatggcggctgcggcactggcggtggctacggtgacggcctggnccggagcgggcagaagttgganggtggtggcgtngctctccctaggggctgtcgggagctcagcgnggaccgagcctgggaggccggccggtgccagcacctttcggcttctgagacggcggcagcagcggcattcaggttctaaatggcttctaagaagttgggtgcagattttcatgggactttcagttaccttgatgatgtcccatttaagacaggagacaaattcaaaacaccagctaaagttggtctacctattggcttctccttgcctgattgtttgcaggttgtcagagaagtacagtatgacttctctttggaaaagaaaaccattgagtgggctgaagagattaagaaaatcgaagaagccgagcgggaagcagagtgcaaaattgcggaagcagaagctaaagtgaattctaagagtggcccagagggcgatagcaaaatgagcttctccaagactcacagtacagccacaatgccacctcctattaaccccatcctcgccagcttgcagcacaacagcatcctcacaccaactcgggtcagcagtagtgccacgaaacagaaagttctcagcccacctcacataaaggcggatttcaatcttgctgactttgagtgtgaagaagacccatttgataatctggagttaaaaactattgatgagaaggaagagctgagaaatattctggtaggaaccactggacccattatggctcagttattggacaataacttgcccaggggaggctctgggtctgtgttacaggatgaggaggtcctggcatccttggaacgggcaaccctagatttcaagcctcttcataaacccaatggctttataaccttaccacagttgggcaactgtgaaaagatgtcactgtcttccaaagtgtccctcccccctatacctgcagtaagcaatatcaaatccctgtctttccccaaacttgactctgatgacagcaatcagaagacagccaagctggcgagcactttccatagcacatcctgcctccgcaatggcacgttccagaattccctaaagccttccacccaaagcagtgccagtgagctcaatgggcatcacactcttgggctttcagctttgaacttggacagtggcacagagatgccagccctgacatcctcccagatgccttccctctctgttttgtctgtgtgcacagaggaatcatcacctccaaatactggtcccacggtcacccctcctaatttctcagtgtcacaagtgcccaacatgcccagctgtccccaggcctattctgaactgcagatgctgtcccccagcgagcggcagtgtgtggagacggtggtcaacatgggctactcgtacgagtgtgtcctcagagccatgaagaagaaaggagagaatattgagcagattctcgactatctctttgcacatggacagctttgtgagaagggcttcgaccctcttttagtggaagaggctctggaaatgcaccagtgttcagaagaaaagatgatggagtttcttcagttaatgagcaaatttaaggagatgggctttgagctgaaagacattaaggaagttttgctattacacaacaatgaccaggacaatgctttggaagacctcatggctcgggcaggagccagctgagaccaggccctgcctaggccctgccgcagaaccaccatccctgggaggccctgcagagcccacctgtggggaaagagaaggggcagcttccggattttcttttgggggttagaaggtcaggtgtggagactgctcgccagtctctgtgagcctaggccctgagctggggaggtggggaagattcgggcatgtgagtgcccccagaactgtcctggctccttccgtattaaacgcatttgcattttgagaagtgtccttcccacttcagccctccggagagactaccctagtctttctggggtgtttatgtcctcagctgaagcctggcctgtttcttttggcttggtttggaccacagtcctctgctacccagggttttagagcccctgctctaggaaacagtttaagaaatcattggccccttcccagcacattgaatgggtaagcagacaggccatgatttagttggccagcactaactccacctctgttctccttgaacagcttcccctccagcccactgctttaggatgacacaatgaataacacctagtcatagaaatcagtctctctggtttgttttgtattatgttgtacatcattaaagatctaaatacaaaggatatacagtcttgaatctaaaataatttgctaactattttgattcttcagagagaactactaataaaaatctaaaaggta

SEQ ID NO: 728060 - DNA, 680 bp, Homo sapiens
  misc_feature (378)..(378): n is a, c, g, or t
aagagaacagagacaaagctaagatgaggaagttctgtacagtataggaaatagaggcttcaagatgataattcgcagtgatgtgaaactggcctcccaagccctgataacaacatgggcaactgccctggacaggaccattgctgagcgtctgcaagtggcggcttttgctgcccgatgagacagatctgtgaacgagtaattggggaagctgtagccatagagcatgtgtattcgttgtgacgctcagattgtctatccaggcgaggttcgccagtaagggagctccattctaatggagtttattcgcacagggaaccgaacacgtcactttgtggacaacattgacgcttttccagatggctctatatggcgccnccattggcgttgatcactacacggtgattggtcgacaattccacttcaatcgtgagcgcggaagttaatccaacagacgcattgagttagaccatggtttgtgtatttcagagatgttgcatatccaggttgttgacacatcctggcacaggacagtcctctctggccaagactcatccggagattgcgttgaagaaattgcttggggacgacaaccgtgtggttctgacccatgtcaatcaatcggttgagaaaacgccagatggcctttggggaagatacacatactgacacgacaattc

SEQ ID NO: 728061 - DNA, 2607 bp, Homo sapiens
  misc_feature (61)..(61): n is a, c, g, or t
  misc_feature (83)..(83): n is a, c, g, or t
  misc_feature (95)..(95): n is a, c, g, or t
  misc_feature (127)..(127): n is a, c, g, or t
  misc_feature (2562)..(2562): n is a, c, g, or t
tggaagtaggacttcaacatggcggctgcggcactggcggtggctacggtgacggcctggnccggagcgggcagaagttgganggtggtggcgtngctctccctaggggctgtcgggagctcagcgnggaccgagcctgggaggccggccggtgccagcacctttcggcttctgagacggcggcagcagcggcattcaggttctaaatggcttctaagaagttgggtgcagattttcatgggactttcagttaccttgatgatgtcccatttaagacaggagacaaattcaaaacaccagctaaagttggtctacctattggcttctccttgcctgattgtttgcaggttgtcagagaagtacagtatgacttctctttggaaaagaaaaccattgagtgggctgaagagattaagaaaatcgaagaagccgagcgggaagcagagtgcaaaattgcggaagcagaagctaaagtgaattctaagagtggcccagagggcgatagcaaaatgagcttctccaagactcacagtacagccacaatgccacctcctattaaccccatcctcgccagcttgcagcacaacagcatcctcacaccaactcgggtcagcagtagtgccacgaaacagaaagttctcagcccacctcacataaaggcggatttcaatcttgctgactttgagtgtgaagaagacccatttgataatctggagttaaaaactattgatgagaaggaagagctgagaaatattctggtaggaaccactggacccattatggctcagttattggacaataacttgcccaggggaggctctgggtctgtgttacaggatgaggaggtcctggcatccttggaacgggcaaccctagatttcaagcctcttcataaacccaatggctttataaccttaccacagttgggcaactgtgaaaagatgtcactgtcttccaaagtgtccctcccccctatacctgcagtaagcaatatcaaatccctgtctttccccaaacttgactctgatgacagcaatcagaagacagccaagctggcgagcactttccatagcacatcctgcctccgcaatggcacgttccagaattccctaaagccttccacccaaagcagtgccagtgagctcaatgggcatcacactcttgggctttcagctttgaacttggacagtggcacagagatgccagccctgacatcctcccagatgccttccctctctgttttgtctgtgtgcacagaggaatcatcacctccaaatactggtcccacggtcacccctcctaatttctcagtgtcacaagtgcccaacatgcccagctgtccccaggcctattctgaactgcagatgctgtcccccagcgagcggcagtgtgtggagacggtggtcaacatgggctactcgtacgagtgtgtcctcagagccatgaagaagaaaggagagaatattgagcagattctcgactatctctttgcacatggacagctttgtgagaagggcttcgaccctcttttagtggaagaggctctggaaatgcaccagtgttcagaagaaaagatgatggagtttcttcagttaatgagcaaatttaaggagatgggctttgagctgaaagacattaaggaagttttgctattacacaacaatgaccaggacaatgctttggaagacctcatggctcgggcaggagccagctgagaccaggccctgcctaggccctgccgcagaaccaccatccctgggaggccctgcagagcccacctgtggggaaagagaaggggcagcttccggattttcttttgggggttagaaggtcaggtgtggagactgctcgccagtctctgtgagcctaggccctgagctggggaggtggggaagattcgggcatgtgagtgcccccagaactgtcctggctccttccgtattaaacgcatttgcattttgagaagtgtccttcccacttcagccctccggagagactaccctagtctttctggggtgtttatgtcctcagctgaagcctggcctgtttcttttggcttggtttggaccacagtcctctgctacccagggttttagagcccctgctctaggaaacagtttaagaaatcattggccccttcccagcacattgaatgggtaagcagacaggccatgatttagttggccagcactaactccacctctgttctccttgaacagcttcccctccagcccactgctttaggatgacacaatgaataacacctagtcatagaaatcagtctctctggtttgttttgtattatgttgtacatcattaaagatctaaatacaaaggatatacagtcttgaatctaaaataatttgctaactattttgattcttcagagagaactactaataaaaatctaaaaggtaaaacaacaacaccataaccaagaaagacacagaaacaagaaactccgggggggggccgggaccctggccccatatggggggggaacacaccccggggcggcgttcgtctgaatggacaaccggcgtaccaattaatcgcttgagnaatccccttggcagtgggataggagagcgacgagccatggggcgc

SEQ ID NO: 728062 - DNA, 995 bp, Homo sapiens
  misc_feature (61)..(61): n is a, c, g, or t
  misc_feature (83)..(83): n is a, c, g, or t
  misc_feature (95)..(95): n is a, c, g, or t
  misc_feature (127)..(127): n is a, c, g, or t
tggaagtaggacttcaacatggcggctgcggcactggcggtggctacggtgacggcctggnccggagcgggcagaagttgganggtggtggcgtngctctccctaggggctgtcgggagctcagcgnggaccgagcctgggaggccggccggtgccagcacctttcggcttctgagacggcggcagcagcggcattcaggttctaaatggcttctaagaagttgggtgcagattttcatgggactttcagttaccttgatgatgtcccatttaagacaggagacaaattcaaaacaccagctaaagttggtctacctattggcttctccttgcctgattgtttgcaggttgtcagagaagtacagtatgacttctctttggaaaagaaaaccattgagtgggctgaagagattaagaaaatcgaagaagccgagcgggaagcagagtgcaaaattgcggaagcagaagctaaagtgaattctaagagtggcccagagggcgatagcaaaatgagcttctccaagactcacagtacagccacaatgccacctcctattaaccccatcctcgccagcttgcagcacaacagcatcctcacaccaactcgggtcagcagtagtgccacgaaacagaaagttctcagcccacctcacataaaggcggatttcaatcttgctgactttgagtgtgaagaagacccatttgataatctggagttaaaaactattgatgagaaggaagagctgagaaatattctggtaggaaccactggacccattatggctcagttattggacaataacttgcccaggggaggctctgggtctgtgttacaggatgaggaggtcctgttattctggcaacgagaaggcttacattgaatgtcccttaataaacccagagggtgcaatagcttactacgagaggcctcttgtcaagctctgactttgaatttcaaatagttcatcaccactctacatgtaatgtgcataacc

SEQ ID NO: 728063 - DNA, 1858 bp, Homo sapiens
  misc_feature (1631)..(1631): n is a, c, g, or t
  misc_feature (1658)..(1658): n is a, c, g, or t
tcacggttggtcaagagagcatttaaccctcttctggacttttaattaagccctccttttaaaaccgtaaaaagttatcctttatctgaaggaaataaaggctcacatagtaatgggcgttcgggccaaggccgtgactcatgaatctccatttgacccagagtggctttaaagtaatagggttcattcctaaagtaagtaagtttttgtccttgaccttaatactgtgccattgtcccacttgagcttttggctagactgggtctttgaaggtttttagtgatcatgtgagggaggggccgcagtgccctgcagccgggaagcaccaataaggatgccccctggcggtcagatgaggcactgtcaggctgacaaagggtgactggaccaggctgctagtgtctcaagagagccatttaaccctcttcttgccttttaattaagccctccttttaaaaccgtaaaaagttatcctttatctgaaggaaataaaggctcacatagtaatgggcgttcggggccaggccgtgactcatgaatctccatttgacccaagagtggcttcaaagtaattggcacctggaggctactttgtcttccctgtcctgagctgcttcctgctaaaaagatacacagcaggcagaacttggctgaaggtttgtgtgtgaattctgtttcagaggcctcagactgttgaacagagcactctgttcaactgccaaggttcccaacacagacccctgagaggcagggtggctgggcagggtgaactggatgaaggccaggctaggagatggactattccatgagggggctgggtagtgaggtgtcccagataggagccaggagctgccatggaagcatgagagtatcggcatgtacagagcctttcacccgagcaaaagtcaggagaaaattgatgtgtgacacaggcaccctcttctgcctcaacactggattgcaggaagggaagggagctgtaaatataaggcctgtctcacatctgctgctgtcagtgacacatcaagtcaaggtttatgctatttacattttcaaaacgcctctgaatccccaaatcaatctccaagggctgatggggcagagctcaccccacccctgtccccctagcaccaatggttaagtttgggccagtgtttagtcttctaagttaggcacagaattcagctggtgaagcctctggtctcagcatgttgtcttctctgtcttgtgacctctgacctctaggctaccactgaccaccccatcctctgatccccaaacttagaaacttcagggttattagacccaaatatattcccacaggcaaggggttagttaatcatattctctaggcacaagggaaaggcattaggttcttcggcctggcccacccttggaggcactcctgtgcatggaactgagggacaggggcctgtccctgagggagaagctgggacctatctgaagccacgtggggctggggtgacgctagcataggcaggaccagcgtgtgggttctggtgtgtgcagggaggacctggcagaggctcctccagcctgagagcccagcacagactcctgcagggcccccaccatctcggcacagggtctggctctaagacggcactgtnccctcaggggctgcggtgggcccgtgncaggtgagatagagctgcagctggctcctcagactctgggatacccttggatttcagaaccatgattcatccagctgggtcacaaaatcttcaaaatcattagaagccagctggctcatcagcgtctcctccttgagccgagatcagccattcatccagctgttcctggtgtgtcggattgacactgttggcttgtccag

SEQ ID NO: 728064 - DNA, 1352 bp, Homo sapiens
tactttgccagtgaaatttaagttttaaatatactttcagaatgtattattaactactgcaagttttatggtcgtttacaaatgtcaaggtagcatcgtctctcttttctcgtctgtcatctttcgtgttgtctctctccaggtatattcttatctttgttaactttccattatgggctaaagaaatccatattagtttatgaaaacatcttggttccttgctttactttcgtttcataatagctgtacatttacttcctctttttctaggcgacctgtagtgttaacggtgatagtactatgtccctaaagatctattttactgtgaaaatttcaattgggtaacctgttttcacgcttcgtgatgtgtgtctacagaattcactgctggtgggtgaactgactcccatatgtaatcgtcttgtcgaagacgaaagaaagaacagcgctgtctacacttgtgtggcctttgtgacacctccgtgtttatgacacctttatgtgtcccaggagtaagtatgttacttgtaagagaaagcaatgcggatgccccgtgtgtggttacacaatgcaaagtacagtgggtgtggtcaactttgcgaaactgtggggaagctgagtggacagtattctaccacccgtgggtttttgtaggacaaacccccccattttttaacccacggttcctcctgtggcacaatggcggtgcgaagggctatgtcgtcgacggcattaaacacaagacgatgtgtcgctgtcacacagctgaaagcatgcgaagtggcattgtgtctctacgcagaaaacattacgcgcgccctttgtaccactaaataattgacggggggaaattctatggtgggaaatgtgggctacccccaaagtgtgggcgtctttaacaccatcaggtgttttggtgattaccccggttttaggggacttagaagaaaattgagggtcataaaggcacaagtaaattgcagcgagggagtggatatgaggttcaaagggcaaaaagttaattgtgagtaaccattgaattttttccgcaggcaattttaacggacaattgtgtgccagcacaacaatctgtggtgtaaccaccagattgttagtggactccacacagaaataagtgttgaaagacatttgcttgaagaaaacgacagtggttaacaaacaaggaataggtagagaaggttataaaataacggtttcacaggaaaaaaattgtcgccacattccccaggtggtattctgcacacgtgcacacttacattagatagagggtacgcacccgatgacaatggttttagcatacatagttatatcaggtgaagcagcccagtatg

SEQ ID NO: 728065 - DNA, 83 bp, Homo sapiens
gcacgagcttttattacctggaaaccatggaaaaagaaacctaagtgctctggcccagacctggggctctgggaggctcacgc

SEQ ID NO: 728066 - DNA, 416 bp, Homo sapiens
taattagaatttccaaataaaacagtttccataaggtgtcagcaacagcactaaaaatctcaaatcacactgaaccctaaatgtcattgcaagaaataaaaatttaagaattaaattgctgccctgtgtataatctcttgagatctttttaaagctagcaagacctctatttggatcagaactacattattacaaaacaaaatgaacacttgaccaaaaaaccacattaatttaaatggagcctttcattattttcagatagcggggtcctttccatttatagagaatgatgtaactgccaggacacttttgtgtttgcccaggactcctagtaagaattgaatcttgagggagtaatgataacaaaaggtttcttgtgactggtaacatcaggacagacagagtttttggtgaga

SEQ ID NO: 728067 - DNA, 411 bp, Homo sapiens
cccgtaagagccagtttctttgttcttgattcctttttgctgtctttcttacaggtcggggctgccttattaaaccccatccttgggttaggtatgtgttctccttgcatctcagctcctcagggagctccccgggtggcccacttgcttccttggctgtctctgccctgccttgagggagcatgcgtgatgatgcaaccagaaacacgtttaggagagctcttcccccctccatatgtcgtatataatagggagcttggagtcatgcccttcaggtctctaacatctttgaacactaccttctcacagtcagtggttcctgggtctgactgcattagtataatctgagataatctgagatccttgttaaaaatatagacatctggggtgtgcttccagagggactgaatc

SEQ ID NO: 728068 - DNA, 117 bp, Homo sapiens
  misc_feature (34)..(34): n is a, c, g, or t
tgaggctgggagcagagcgttggcttatgtttgnaatcccagcactttggaaggccgaggtgggtggttcacctaaggtcaggggttcaagacccagcctggggcaatacggaaacc

SEQ ID NO: 728069 - DNA, 248 bp, Homo sapiens
  misc_feature (183)..(183): n is a, c, g, or t
gggatcatcacttcctgggtcagcaattctcctgcctcagcctatgagtaggtgggattacaggcgctcgccaccatgcccagctaatttttgtatttttagtagagatggggtttcaccatgttggtcaggctggtctcgaactccgtgatctcgctgatctgccctgtcttggcctcccanaagtgctgcggattacgaggcgtgagccacgtgctccgcagcctctggttttatttgtttggttt

SEQ ID NO: 728070 - DNA, 332 bp, Homo sapiens
ttaagggaatgggagagcggcccatagaggtggacggcgggcacgattgtattaaagcggaccctgtgtaggtatagagttgagtcaagtggagtcactgtctgtgtacctctggtcatcgtgatggccagaggcctgggggcaccccactgggtggccgtgggactgctgacctgtgcgaccttggggcttctggtggcagcactcgggggtcatgactacctgaacgaccatctgaactaggactatccatggctcaagccacaggcactcacatgaagatttccaccatggtcaacgaacatgcccatggtcatggccacactgacgag

SEQ ID NO: 728071 - DNA, 1332 bp, Homo sapiens
gtggccagataccgcccacgtgaccccatcattgctgtgacccgtgaatccccagacagctcgtcaggcccaccatgtaccgtggacatcttcccatgctgctgtgcaaggacccagatccaggaggccatggagctgagcgacgatgagaccatccgaggactgaagcattgaccatgaaatgattagagcacaggcaccgcaggcatatcttcacagaacgggagcatgatgagtacattcgttgacagaccaggcatggcagccacatggactccaggctatcacacaagcacccagtgcagtagtagtatccatgtgcccgtagataggaccaccaagagacacactacacatcagaagaacacacaagaaacaaataaacaaagtaacacacacaaaacacagcaaatagacaacacatcacaacatcaaagacacaacacaaacatacacaggacacaacgaaaacacgcagacacacgacaacactgagagagacacaacgacaagaagacaccagagagcgacaggaggccagagaatagaaagacgaagcggaagacccaagacgagcaagacgagaaaagagaagaaaacaaggagaacaccgcaccaccaccacgagagagagcgacaccccaacacacgaacaggaacacagaacgagaaagaaacaccacccgagcgggcaaggacgccaacgagaacggcaaaaaggacacaaagacaaggatacccagagcaccagggaaccggaaggaaggagcagagaagggaaacgaggagacgagaagagataacgacggaggaaagaacaaggggaggacagacgcgaacgcccagcaccacgagagagcgcgcgaaacagagacaaaagaaacgaacacaaaaaaggacagcagaaaggagacgcgaccagagaaagcgacagcagaacacaagagcacagacgacacagagcggccagaagaagaagcgagcacacaaccgacagaagcacgacaacaaaccgagaagacataaagaaaaaacagaaagcgcaaatggcaagcaacagcaaggcaaggacacaaacataaaccacatgaccacacaacgacagaaagacaaaaaaacgtaggagacacgagaccgtgacacggacgggcgcagatgagcacggagggaaatgagaagagagccgagcagccgcgaaggagcagaacaaagaaatacaagaacagaggggaaagagagaagagaagaacgcacggagagacgaacgcgagaagagaaacaagagagacacaagcaacgcaaagcaccgacggaacaggataagtagcagaa

SEQ ID NO: 728072 - DNA, 527 bp, Homo sapiens
taaggatccccggccaccagctgggatgatgctagaatgcgtggagaagaacagagatcgtattgtgagcacaaagacttatatggctacactaagaatgactgggaagccaagtcagctcaagagattttgattattctggttccagaagattgttgtcgacacaagtgttactaacactggacagataatatatggatgtagaatctccctcctggcctatggtgtgtaccccaatgtatgctatcataaggaaaagaggaagatcctcaacactgaagggcgtaatgcacttatccacaaatcatctgttaattgtccttttagtagccaagacatgaagtacccatctcccttctttgtatttggtgaaaagattcgaactcgagccatctctgctaaaggcatgactatagtccaccccctgcagttgcttctctttgcctccaagaaagtccaatctgatgggcagattgtgctagtagatgactggattaaatagcaatatctcatgaagctgctgctgt

SEQ ID NO: 728073 - DNA, 232 bp, Homo sapiens
gcccagggccgggcacagcaccttggtgaccagagggtgatggctaacagggagggcaggaagccagcttgtggaggggtgtgaggggggtcccgcacagtccaggttcctggtttcaatcccagggcgtttcaggtggccccccagggcattgcacccagaggcagtcttttagaaaagggaggatgcaggcctgtatataacccttgagaataatgcaacatgggcggcc

SEQ ID NO: 728074 - DNA, 83 bp, Homo sapiens
tattactgttgatccaagtttgtaggtaatttaacaattgaggtctctctttgggaagcgggtgccttatagggccttttttt

SEQ ID NO: 728075 - DNA, 605 bp, Homo sapiens
  misc_feature (4)..(4): n is a, c, g, or t
  misc_feature (137)..(138): n is a, c, g, or t
  misc_feature (154)..(154): n is a, c, g, or t
  misc_feature (156)..(156): n is a, c, g, or t
  misc_feature (177)..(177): n is a, c, g, or t
  misc_feature (195)..(195): n is a, c, g, or t
  misc_feature (200)..(202): n is a, c, g, or t
  misc_feature (247)..(247): n is a, c, g, or t
  misc_feature (258)..(258): n is a, c, g, or t
  misc_feature (269)..(270): n is a, c, g, or t
  misc_feature (277)..(277): n is a, c, g, or t
  misc_feature (283)..(283): n is a, c, g, or t
  misc_feature (339)..(339): n is a, c, g, or t
  misc_feature (345)..(346): n is a, c, g, or t
  misc_feature (358)..(358): n is a, c, g, or t
  misc_feature (382)..(382): n is a, c, g, or t
  misc_feature (384)..(384): n is a, c, g, or t
  misc_feature (397)..(397): n is a, c, g, or t
  misc_feature (413)..(413): n is a, c, g, or t
  misc_feature (429)..(429): n is a, c, g, or t
  misc_feature (465)..(465): n is a, c, g, or t
  misc_feature (481)..(481): n is a, c, g, or t
  misc_feature (527)..(527): n is a, c, g, or t
  misc_feature (544)..(544): n is a, c, g, or t
  misc_feature (574)..(574): n is a, c, g, or t
gganacgccgggccccgcgccgcgccgcgccatgtacgagtgaacatggacgagctgaggcaaaaggtcatgataaaccagttcgtgctggcagagggctgcgcggccgaccaggcgaagagaatgctgcaggaggnncactggcagttcgtanancgcgctgagcaacgattcttncaaaaaaccaacattccnaaaannnaccaacaacacctagatgatgtgaactcccagcaacacccatgcnacgccgcccancttccccgttnngatggcnatgttnttcaagcttcgtgcctacgagggaatgcagagcagcaacagccccatgacagccgnagactnntccccacctacnaacttcagcaccttatgggcctcntncccgataagacancaggggtcctggcgcncgccctcctcccccancaccttccaccacctccacagcacacagccaacgtngcccacagaagcacancagggaggagcccacagaaaagccatggagccatggacggccaganatgagaatggacgccgnagggcgctgggctggagctaaggggcagcncagggttgtggggaaacaggagggccaggga

SEQ ID NO: 728076 - DNA, 208 bp, Homo sapiens
taacacctggcaaaaaacatcatcgatcccttttcataaagataaaatgttcattagttcctctggagctacacactatcacaagatgcagtggccatctgcctcagggctgcctttgtcttgttaacacgctgtaataggaaagctatgccacagcgaccaggtgacacatagagctcccagagagtgtacaggctgtccttccctt

SEQ ID NO: 728077 - DNA, 382 bp, Homo sapiens
cgaatgaaagcacagaaggaagggtaggtgactgaccagtaccagacataaatatagaatcctaaatcttaacctgattaatacatacattatctacccaagagtggattaaatggtttgccaggatcctctcccactgagaagccacagccgaaacagcaaaagcagccacagactgcatcctctccaggggctggggctggcaggaggccctgtggatgaggtacacgtgctccatgtactccgtgatccgctgcaaagaagctcagaggctcgttgaaggcgattggcatcgtggtcttggacagctccaggccaacacacttcttcaggatggtccacacgctgaagtcgcttctgctgaacatgggagccggcagcg

SEQ ID NO: 728078 - DNA, 114 bp, Homo sapiens
cagctctggggacgggtgtatcctgtaccatcagaagtcccctcctcggcctggcaaagacaggcagcattcccatccgcgaccccttcttcaggagcgcccagaggtggatcg

SEQ ID NO: 728079 - DNA, 128 bp, Homo sapiens
ctagaggtatccccggtagcacagatctcgtggggtgtaaggcctgtgcaaaatatatttgagtattaaatattattggccgggtgtgttgactcatgcctgtaatcccttgctactttgggagagcc

SEQ ID NO: 728080 - DNA, 94 bp, Homo sapiens
gtcgacaagaaaaagaggccatgaatttgagaaggagttgggagaaggcatatgggggattggaagaaggagggagagtgatgtgattatattt

SEQ ID NO: 728081 - DNA, 243 bp, Homo sapiens
gggaagcggagatgagtgagccaagattgcgccactgcactccagcctgggtgacggagcaagactccatctcaaaaaaaaaaaaacccgggttttggatccattagcctatttagtaggccatagtgccggcctgacttttagaaaacggtagatacttcaggcatactattatggttctaaaaaaaaactatgtgggagggagggctgggatcaattgggtgcccggtgaagaaactccaa

SEQ ID NO: 728082 - DNA, 423 bp, Homo sapiens
ttccacacaaatgttgtatatcttgtaaattgatgtctaaagatagttttgttcttatagaaagtgttgactgccaggttgcttatagcactttaaattattctgaagatgaaattaccagccaagtatgttggcttaagtagttttagttatataactcttaaaaatacctagttcttttgggaacagtttagataattatctaaagaaaacatactattaatcagaatctctggtgttgtatgacgcgctgttgctaaagatgaatagaaacggcatcgtttcctcgtctgtgtaaagctctcattacaagttaggtaatagtgtctaggttagaggtttataatataatataaggaactgtaaataaatgtacccttcctattagtcttccacagcagtattattgtctttgtggaggtg

SEQ ID NO: 728083 - DNA, 1429 bp, Homo sapiens
aagtagatcgcggatgctgcgtttcattggttcataagctgaggagaccgaggtacccgggcgacagacagtcggtggacaggtcgtacaggaagctccaggaggacttgcagggatgcacaatgtcagtgcctgcgtggttgcgaagccgggactgggggagctggggataggagatgagtaaggttcagagaaaccgctcgttgagaatctgtaagcttcgttgcaagggacatgattgtggtgcctcgagttctatctagacgggtcaataaagtaagtgggtacatcgtataaagacgctgcactgaggagtcaagaacagaacttcagtgaatgacacgtgattgtcattctcatgtgtggatctagtcacccctggaaaaggtatgagttggtagattggaggacgcgaaggacacacagtactcaccttagggacattggggtcccatggtaaattagccctgacacttgtgaggtcgagcaggctttcgactgtgttacgtttactcttgcacgcgacactcggtagattggctagggtccatgctcagtactactcctatattgaggtaaggcttgggcccttcattggtttcgcccgcgccttcgtttctcgcgaggtgttccgcaagcaatactcgatgtatcataaaccagttacttcgatgagttgcggagtagagtccccaaccgaaaacttgcaactaatgcaactctaatttgtacccacgaagcctagaggaatgactacctggaaccacttattccatggtgtgggtaatgcatgatccatgtgcaatagatcacctgttggaagtgagcagattgggggtggacatctgtgcatccagcaagcatgggagttatgcattgatccgggtccgggcggcaaaattgggcaattaagtggtgcgagccccatgctgggacccagggtggggccccggaataagcgaaggcatcggagcatggtgcaagttactgccggtccaggggaaaagtccccaggaggaattgggtggtaccaggacccatggtctgggacatcgattcaggggcccaaggagcccggaaggcgccaaccaccagccgcaggggtaacacgtaagaaaccggacgtgagagaaccatttggtaagaaaaaggtccacagagtcctgccaaaaaaccctgggacgatctagaaggggcccaacaagaaacggttgacatgcggcgcccagtatgagccaaagtccctagtactgaagcatacaggcatattatcagaacacacaacaaacagggggctacatatacagccagcacacgagataaggcagctgaaacaaaatacgcgacagcagcgaagaagtgacgattaattacacctctctgttgttcttttttttctctatgcatgtcacagagagaaaagaaaaga

SEQ ID NO: 728084 - DNA, 151 bp, Homo sapiens
atcccttagactagccgacagcaaacagcaattagcagccttagcccctgatataacaaactcagagctagcttaataggggggataagggcaggaggaggagggggtgtaactatatggccctagcggagagcctagtacgggctaagta

SEQ ID NO: 728085 - DNA, 521 bp, Homo sapiens
  misc_feature (435)..(435): n is a, c, g, or t
cagaaaggccgtctgattgcaacgcagcctgcattgtcctcgctgaacgcctggtcctgtcccacctgcaccggacagcaactgcttcccctccagggcggcccccatcgtcccccaggtgctgcaagagcagtgagacttacccaagacaagtcagaggctttggagctctcgggggcggtggcttctcccaggagccccgtatctgtcagtccccccataaggggaggggagttggcaaggctcctccttgctcccagcgtgaggattgcccctacttttccggcccccacttgccccctccacctgcccttttccctccgggaagccctggaggttttccaagaactctgcgggtcgagggggcagcctatgtggggtggcggggggcctcctgcttgttggatgcccagacgcctacacctttcaccctgnggtccagtcggctgatggccatgagagagaagctgagagcaaccagagcccacagctccatgctggtcccccatctgcaaacgctg

SEQ ID NO: 728086 - DNA, 256 bp, Homo sapiens
  misc_feature (1)..(1): n is a, c, g, or t
  misc_feature (80)..(80): n is a, c, g, or t
  misc_feature (99)..(99): n is a, c, g, or t
  misc_feature (101)..(101): n is a, c, g, or t
  misc_feature (145)..(145): n is a, c, g, or t
  misc_feature (221)..(221): n is a, c, g, or t
  misc_feature (239)..(239): n is a, c, g, or t
  misc_feature (247)..(247): n is a, c, g, or t
ncaagccgccctcgccatggccgcgcgcccagggctcaatctcggtgttctcgagttcccaggagctgggtgcggcgtanagctggctggcccagcgcnanatgctgctggcaggggccgcgccgtttcgcgctcggctgtcggngggactcgtctcgatgctagccgcgagctacccgccgccgtcgccctgccgggcagctagcttagcgcgctggacntgggcttctgcgacgaangcctcgtngccttcgat

SEQ ID NO: 728087 - DNA, 148 bp, Homo sapiens
ggcttcccgatccacctctgcttgggtcatactctctaccctggcaggtgggccaacaagatgaggcatgcttactttttctttggacctggctgacaccccacaggcctgggagatgagtgagcgatctctctgttcacgccactat

SEQ ID NO: 728088 - DNA, 592 bp, Homo sapiens
gccactccagtgcccaccagccttgtcctaataaaattaggtgtatcatttaaaaaaaaaaaaaaacaaaaaaaaaaaaaaacaaacaaaaaacaaaaaaaaaaaaaacaaaaaaaaaaaagggacaaaaaaacacaaacaaacacaacaacacacacacaaacaacgggcgcggcggcggcgcgcgcgcgcgcgcgccgcccggagagagcggaggcgacgacaacaacaaacaacgtgcgatgagaggagccgcgcgcgggcgccgacagagatgagagaaaagaacagaagagacgagagaacgataaagaagggagtccacatgagaagcaagactacgcgcgggcgaacaaaaaagcagagaggcgagagggatgacataccaaccaacacgaaaaaaaaacagagccgcgcgcgcgggaggcacaaccacgaacgcgcgcagaaaagacaacacaacaccacacgaggaggagaacatggctagagaggagataatagaggagggggcggattacactaacaacggagagggaggtgcaacaaaagaggcgaaagcgaccccgaacaaaaaaaaaaagaaccacca

SEQ ID NO: 728089 - DNA, 444 bp, Homo sapiens
cccgtgttggctgttagtgtatttgaaattctgcctgtctccccatggttgaaatttgtttgaaggatagccgcctaatctcttggctgtttatacttttttaaactttcctgtgttgtaaatattgtatacttttggtggttccaggtatgtaacctctttgctctttaaggtggttatttgtatatagcaacatggccccgtgatattatatagtttcccaatgggggggtttttgggtaacccttgcctttgttttaaccctacccggaggatgttgggccaacttttaaccctcaattttgtttgttttcccaattgtacttattactgcttttggtactgttttacgtgcccatagtttcccaatcacctagccggcaagggattttttttactttttgaacccctgtaatatttaataaaaaatgttaccatctgtta

SEQ ID NO: 728090 - DNA, 836 bp, Homo sapiens
tcaaaattttctttttcctagaaagaatattccctttttattggtaacatatctcacaccgccctttgtttaaacagccggcccaatttttctttctcccaaccccggggggtaatattaaacattggtatagtgcccccatgcccccctcgctcacctattaagtccacgcggacgatcacgagtggggcaaactaaagccatggttttagtgaactatcgtacacattccactgatgacgacatctgtttaaacacctcgtgatactgctctcgccccacgcgggttgttaccccctatggtcttcttttcacgccaccgaaggacgacgaccgcttggatgttttctgccaaataattgaggaagtagggaacacaatgtatgttataaaatcattttggggctagtctccccgaggatacaaatgtgcgtaacaaggaatcgttgccacacagatacaccacgagtagtgcaccccactactgtttaaacacacaaaccagtttatgttgcagaaggacacaccactagggtacaagtatatacaagtgctacaccccaagaaagatcacaaatagattctactacgttagattgacctttccccgatagacgagagcaattatgactcccccgaccccaagaggcggaccatgaataaatcctatctatcagtacctatacaccgcggagtgtactatatatgataaagaagtggaaggttcttgatcttggaccctttagccgccccagagtgcttgtatgcacgcgctattagtctttcgctaacgtcgtacgattggaaccaccacaggttcccccccccacatgaca

SEQ ID NO: 728091 - DNA, 173 bp, Homo sapiens
ccttagctggctcctgtgtgcagtcccgccaaaaaacacgagctgcccggcattctggaagcttctggtcgaggaggttctcccatgccattcttttgcctgccgtccttcattttatcctctattaagctgtcatctttaacagtctgcacagtttccaaagctctactact

SEQ ID NO: 728092 - DNA, 781 bp, Homo sapiens
  misc_feature (72)..(72): n is a, c, g, or t
  misc_feature (97)..(97): n is a, c, g, or t
  misc_feature (561)..(561): n is a, c, g, or t
  misc_feature (688)..(688): n is a, c, g, or t
gtgggaggactagctaggtacgaggctggtgtgaatcggccgagggagagactagtctcgagtttttttttnttttggcatcccgactctggggttnatccaacacaattcttccactctacacaacaatagtacaaacacaaggtcatctaaaaggctacaagggtataaaactcaaaagagaaatttatagtactgacgggtacaatggaaagcaaaaaagaaaaaaaataaaagcaaggtacagtgtggccaagataaccgtgaaagaccaccagtgaacggcgaggcacaaccagtggcgtgcgtgagtgacctccgcagagcgggcctctccacctcactcgccaattttcagagtacaggtgggtggggctgcgggtgtgtgcactcgggtgcacggacagacagaaccacgagcagcaactaccagtgggttgagaggactcttggagggggtgtgaccctgtgagactcagaagaggccctcgagaggccaggcctaacagggtgggcagctgcactaaagccgggggcagcctccctttccaaagggacacngcccagcaacagcaagggcacggccgggccaccatcccaggtcatcggggaggggaaaagtgtgcccccaggtaagcagggtcaaaccacccccaagagcctcacttttccctggtggctctgccantgaactggactcttagaacccggaaacggatgagcttctagccagaaaaccgggagggatcttgcggggcaccagtcccaaccaaagaattcg

SEQ ID NO: 728093 - DNA, 493 bp, Homo sapiens
ggatagttgcctagttcctctttcccatctggaaactagctactttcagccagaggagcaaatccttcaggaactgaacaagatttctctagacccagagcttaaaattggaggaagcagatatgacctcacatccttggtaccagggaatctgcagccagggacagagactggaaatcatgaagtggaagatgctcaatccctggatgatcttgatgccttcactcaggaaacactggacagaatgaattgtcattggtcaagaacgcaagttttaccaaataacatttcgggatggagaaaccagagggggaaactgaagtgacaggacctcaggatttctaaataacttcaggaccgaaaataatgccactatccaaaaagctaaaatatgatatctgggaaagatggtcatcagaagcagcattcatcccatgtagccattccatggataaaataaacaaagtggacatggttcacagaaatgttaaag

SEQ ID NO: 728094 - DNA, 429 bp, Homo sapiens
  misc_feature (86)..(86): n is a, c, g, or t
  misc_feature (89)..(89): n is a, c, g, or t
tttaattccttggtcaacccaattaggctatgctaaacatatgggtttgatccttggaaaaaggcatggggcctgcccagcaaggnagngggtgtttggaggacactgctgaagaaacacctttcgtatctttgtccctggagcccttgagttccctgcttttgttcctgtgggtctcattaaacggaaacagaggatgttgaataatccacatgcctcaagcagactcggtcccagatcggctcaaattctccacgtatttaaggatttgaaacatgcaatcataggatacatagttttatgtcccattggattaaggttttttttttttaatgtttcaaaacataagttttatggtagtccttttgggaaaaatccagtattatctaaaattattggcaaagttaaatgtattttacatacctggaa

SEQ ID NO: 728095 - DNA, 384 bp, Homo sapiens
  misc_feature (144)..(144): n is a, c, g, or t
  misc_feature (175)..(175): n is a, c, g, or t
  misc_feature (201)..(201): n is a, c, g, or t
  misc_feature (339)..(339): n is a, c, g, or t
ttagctgggtagggtggcgcacacctgtaatcccagctacacgggaagctgaggcaggagaatcgcttgaacctggcaggtggaggttgcagtgagccgagatcgcaccattgcactccagcctgggcaacaagcacaaaactntctcaaaaaatagtaataaaaattttaaaanttagctaggtgtggtggcgcatgctntagcctcagctactcaggaggctaaggcaagaggttcactcaagcccaggagtttgaggctgcagtgagctaggattgcgccactgcactccagccttggtgataaagtgagaccctgtctctaagaagagcacaganagagagagaacctagttctgactgcagaatccctggagcacagat

SEQ ID NO: 728096 - DNA, 87 bp, Homo sapiens
agctctgtgactgccgcggacacggccgtgtattactgtgcgagtatggatcaccagctgactagaaactactggggccagggaacc

SEQ ID NO: 728097 - DNA, 153 bp, Homo sapiens
actgtgagctatggtacgttcattcctcatcagcccattcctctcttctaaggatttctttagcacatctcctatgatgtctttgctccaaaagtcaagagagaaatacattaataacctgggctagtcacaacaagaacatcagtgactacc

SEQ ID NO: 728098 - DNA, 891 bp, Homo sapiens
gatgtggtacccaggatcgcagtcccggacacagcgtgtagtgagcctgggagagttctcacaggcgctgcaggagccttgcaacaagagtctgggcctacgctcgcgacattcgtaccacgtcgaggcaggagggcgaggtccgggccagcgcggtgtccctggagtgacagatgcactcgaagtgagccgtcggtgtttggtacagatgcctgctctggcaaagggtcctcctcgctgcactcgatcaacgtcgaggcaaatgagtgctccgcggggtaccctgggtcggtagccagtggtgcacaagtacatgtgcaaaggagccgtcagtgttgacggcactctgccgatgagggaagcagaaatccgccctcacaggcaactcgtacacgatctgcgcagtggccccgggcctgacccgacaggcgcccaggtaggcctggacagcgcagcttcagtgtaaatggagccttcggtgtagagtagcaagtggccgtggggacccacatgtagaatgtggggcaccccgaaaacatttgcattacgttcgccttcagaagcctggggccgtggacaagactacggtgccgctcggaatagccacatgataacatgagatgcagagcaccgaggaccgggacccggggcacacacagacagagtcaattagcaggtttcgagcaggatcggagaggatagcagagcaagccgagaccagtaggaagaccactaagtggaagaccaggagtcgaaagcaaagacgagcagagcaggactgaaataaggaactagacaaacacgatcgtatgggaccaaaagtagcagaaatgacacataacaaaaggacagacgacacagacgtccacaaagtaaagcatgagacaaaag

SEQ ID NO: 728099 - DNA, 461 bp, Homo sapiens
aagtagtgaatcagctgggcgcagtgggctcagcctgtaatcccagcacttttgggaggccaagggcgggtgaatcacaagctcaggagttcgagaccagcctgaccaacatggtgaaaccctgtctctaaaaatagaaaaattagccaggcgttgtggcacacgcctgtaatcccagctactcatgagtgctgaggcaggagaactgcttgaacccaggcagcggaggttgcagtgagctgagatcacgtcactgcactccagcctgggtcacagagcaggactccatcttaaactaataaaagaaaagaatgaagagcaaaaaaccagtagtgaagtcgatggtctccatgttctatgtctacgccactctccatgcagaaacttggcaattttagaactgacattaactccttctgacagaatcttcagctaaaaatcttcactatatcacacagcac

SEQ ID NO: 728100 - DNA, 103 bp, Homo sapiens
ttgtgggcctgccttccctccctcctcccccccgggccggactgtacaaagccctgctgcggggtgttaggaatgacctggaattgtcaataaacaaatgccc

SEQ ID NO: 728101 - DNA, 857 bp, Homo sapiens
ggaaagtccgaattttggagatttccccaaaaatgcacaaagctcccctatgcccgggagatgaaaaatttacttcccccccaaaggttgttaggaagggaaggtaaagggccccccatgctccctaaaggcccaccatctggccttcttccgtgttttgctctgaacatcgcccaagaattcaaagtggacacccctgtcctatccattgggataccgcaaagaaattttggtgagattgtggtctgagcagtcagccaaagataaccacccatttgaacagaagccagctaagcttgaggagaaatatgaaaaggattattgctgcatactcgtgccaagggcaaaagtgagcagggaaagacggccctggcaggccaacaggctcaaagaagaagaacgaaccagaagatgcggcgcaggtggaggcagcagaagatgaagatgggagggagaggatgaagatgaagaataatgcttaccctttatgagcggtgtggatgtgtgtgtgtgctcggccaattttttgctaagaagtaaaatccaggggcagctcattacttgcttccgtttaaaaactgtacagatttttgtatagccgataagattccctgtagaggaaatacttttaaaaaatgcaggttgtagctttttgatgggctactcatacagttagattttacagcttctgatgttgaatgttcctaaatatttaatggtttttttaatttcttgtgtatggtagcacagcaaacttgtaggaattagtatcaatagtaaattttgggttttttaggatgttgcatttcgtttttttaaaaaaaattttgtaataaaattatgtatattaaaaaaaa

SEQ ID NO: 728102 - DNA, 867 bp, Homo sapiens
gccctggtgcggtttggagagcatgtgttgcatcttcccgttgcctcgcttggcgcccgtcttgaccttggtgttcttctgcctgtgttgccctggctatgcctctgatgtcccccgcttgtccccccggcttgttgctccgggtcatcctagggcgcctgcttctgtctccctggcgcctgtttactgcctcttgtttgttggcgccgaccattgttatcccccggtcggtgatgtttgtctcgtcgactcttacgccccccgtaggggcctgcccggggtacctacgccctgaggtggtgcaaccgtgcccatacctttgtgtctgtagtatcggccccggttgttcctcccctgcatggcggttcttggctggctcggactcctcgggtgctgggtactccacgcctgcggatcccatgtgcgctctctcgtcaaggaggtctcaagaatgcttggatctcccctctatgggctgtttgagttgggcattttttcccggacgctcttgtaaggctggcgcgtgtcccccccgttgtgcctccccgggtgataagttgcttcgctggatacacccggctttcgcgggccatagatcttgttttcgctagtacacgagggtccctagttaattagtgcccgcgcccttatatgcgcggtctgacaaggttttgcccccacgccaactagggggtttacgtctttcgctccgctccgcacgtggacctacacacatatacgccagctgggtctctgcacgccgtggagtcacctcgtctcgttgttttagatccgctccttgccccccatttctccccttttcccccacccccgcactttaccggtgttttcccctgtaaacataac

SEQ ID NO: 728103 - DNA, 1063 bp, Homo sapiens
ctttggtaccacactggacattcaacctacattctggccaaccgcctctacccagagtctgcccgggactggtttaccatggagtcgcctcgtagatggtccagagacaatgtgtgttccgtgcgagcaacttgcaaggctttcccaggtctcagggaccatgttctaatccttccattgctagtatgtcagtcagcctgagcaagaatgggtaggtctcctcgttggacctggacgtcagcccgattatcctctatggtcaagatgtgaatgtctattcagggatcatgtccagaaatcctaggcatgttgaatggataagatggggggagcagatggtcttctcttatcagacccagacgaactgatgccaagtccttcattcttcccaccgtagtaattctgtggtgtggagcctgcctcatgctccccgtgttcaatgcatcattcggtgcttcatacttactgtccgtgcgcagtgagtaactcagggcattctactggaatcaatggaatgccggcgtggttggctgtaaccagcatagggtcccccactattctctggtgtcctccatgactcggtgtgattccgcttgtgaccagaggtgcggggttgagggtgggatcggtgtgcgtggtagctgctgtctcacccgggcagactctctggattgagtaggttccctctttcgtattgcagaattgcactggtgcgctctcctcagtccctttcttgattcgctcttctgaccgtgtgcatgagtcttagcttgggatgtccccatctctctcaaacatggtgtacatgttcttgggtagatgtgtagagccattctgacttcccgggtgccacgctgtggattgcgttaggggctgaagtctagcgttttcttctccttgatagtgccgggggtacttcgtcctggctgtgggggggggttcgggggaagaggtccgtccctaggagagggcccagtcgggggtgggccccccaaggtgcgcggggcgctcttgggagtgttggccaagaacgggtttgggggggagaggcccccgcgggtgt

SEQ ID NO: 728104 - DNA, 155 bp, Homo sapiens
tgagcattgtgactgtggactggaaacaccgagtgatacatctttcgtcatactgctgagccctccccgacctcccagaactatacaggagggtagcagtagaacatgcctatcatcctccagatataaaatccgccgtcggcgatacttcctat

SEQ ID NO: 728105 - DNA, 81 bp, Homo sapiens
agccccaaccagacctctctgtacttctgtgccagcagtttagggtccccgggactaggaaacaccggggagctgtttttt

SEQ ID NO: 728106 - DNA, 767 bp, Homo sapiens
  misc_feature (154)..(154): n is a, c, g, or t
  misc_feature (277)..(277): n is a, c, g, or t
  misc_feature (280)..(281): n is a, c, g, or t
  misc_feature (291)..(291): n is a, c, g, or t
  misc_feature (300)..(300): n is a, c, g, or t
gtgtcttttatgaattgggatcccgatgatcagctccatgcctcctgcctttccctggccactgctcccagccttacgaccttaagcttttacggggattccatctccataatctccctgcagagtctcctgcagcacctcatcggcgtgaacncatctgacgccacgtgctgtatcctgtccgcctggagattatgaggacatccatggtaccctccccctggagaggcttgcctatctgcatcccaggctcagggagttgctgtgtgagttgggncgnncccagcatgntctggcttngtgcccaccctgtcctcactgtggggaccagaaccttctatgacccggagccccatcctgtgccccctgtttcatgcctaattagctgggtgccacaatatccaaatgcgttcacttctgcataacttggacccttaagcccggatgtgcaatgcatcttgaagccaccaagcacgccacccgtttcagaccaaatgttccgtgtgagtgacggaaaacaactgttcacgtgaggaaaaaacacttcagaccaatgttcacgtgaggaaaaaaaggggaaagttgggggtaggcacgatgttgaacttgaggagttaatgtgatctttggggagatacatcttatagagttagaaatagaatctgaattttctaaagggagattctggcttgggaagtacctgtaggagttaatccctgtgtagactgttgtaaagaaactgttgaaaataaagagaagccatgtga

SEQ ID NO: 728107 - DNA, 210 bp, Homo sapiens
tacatttccaggtctgagcaatcttcaggtattccaacatagcattatcttggagcatcccacggtgttccgcatgccacacctggatccagtcctcgcacgggtcccgggtgaagtttgtgctggtccatcactctttgagggatcagccgctcagagctgaggtacccagactggtgcacttctttgttgtagtccccaaactggggc

SEQ ID NO: 728108 - DNA, 99 bp, Homo sapiens
  misc_feature (27)..(27): n is a, c, g, or t
tgcacggaaaggagcgggtaacgtctncgcgccaaagtgggccgcagtagggcgaggcagcaggtgctggactgccacggaagagcaagatctgcctct

SEQ ID NO: 728109 - DNA, 313 bp, Homo sapiens
tctagaaggtacatgtcgtattcaatgcacaagactgatttcttcatacttaatctgatatctttgagttttcctatatctgagagaagaactccaaaggtatgcctgcctcataatctgccctggacttgtcattcccgacaggacacctcattggacactgccccaccccattaagactctgaagcgtagggtcccattgctttgcttccgaaatccaaggggaacaagaagtacccatctcttacaaaaataagcatgtcaacattgttcagtacatttttctacacatattgggtactacgctttggca

SEQ ID NO: 728110 - DNA, 358 bp, Homo sapiens
ccaaaatctgttccgctgtaacagaactgaatttggaccccgagcacaagttgtcacgcctgtaatcccagcaactttggcaggccaaggtggaaggatcacttagagctaggagtttgagaccagcctgggcaatatagcaagacccctcactacaaaaataaaacatcaaaaacaaaaacaattagctgggcatgatggcacacacctgtagtccgagccacttgggaggctgaggtgggaggatcggttgagcccaggagttcgaagctgcagggacctctgattgcaccactgcactccaggctgggtaacagaatgagaccttatctcaaaaataaacaaactaataaaaagc

SEQ ID NO: 728111 - DNA, 340 bp, Homo sapiens
tgagctcgaccgagtcctccgggacgtatggctgcgcggtgaccggggtggacgggccggctccggtgacttcgggggggcggatcgagcgtcagcagggtcgtcaggtgcttgatggcttcgggcaccagcgcgaattcgaggtcggtgaagaagaagcggccttggctgaccatgatgttctcgtggtgcaggtcgctcgcgcccgccagcatcagtgcggcgatggcccggcccaggtcgccgaagacccgtccggcctctgcggagtcgatcacgtgatcctgggccgagctgtgcggcaggaactgcacgtagccatagtccacgtcctcatggg

SEQ ID NO: 728112 - DNA, 92 bp, Homo sapiens
ctcgaattcaagcttctaacgatgtacggggacatggtattccccttcgatccaaagttgtgtattaggaggagagagaggaaaaaaagagg

SEQ ID NO: 728113 - DNA, 148 bp, Homo sapiens
ggtcagccccaggaaccgactcagccatactaatctgtcttaaatgctccagaatagcaggtttagttcaacacactaaactctccgccgggaaatcttgccacttcttttttttttttttcttattaattccccggaaaatggtggg

SEQ ID NO: 728114 - DNA, 611 bp, Homo sapiens
  misc_feature (76)..(76): n is a, c, g, or t
  misc_feature (137)..(137): n is a, c, g, or t
  misc_feature (144)..(144): n is a, c, g, or t
  misc_feature (146)..(147): n is a, c, g, or t
  misc_feature (478)..(478): n is a, c, g, or t
agaacatggtgcttctttcaaacagattgttggagaccaagctctaatgaggcctacaacattctgaaatcacgtngctgccattttatataaaaagtgggtacaaacgtaattgtatagcattaaataaagctgcngtaactntnngaaaataagaaaagttttttgtaaggaggaggcttaaatccttgggcctggggatttaacccccataaaggtttcccggacgggggcccaaaggaattggggaccgtgccccctcccctcctgaagagattaaacgaaacagagaaagaagaacctttgcttttaaaacaaccggaaagatggcttttttggggggccccccccaaaaaaggaaagcctttataaaaaaaaatttttttgaagaaagcgcggaaaattccaaactcccggggggcgccccaaaaaaaaaacccctaaaaaaaaaaagaggggggttttttaaaaggaaaanaaaaaaaaaaaacatggtgggggcgcagaacacccaccccccctcttccctttttatttttttcatattgggggggggggggttatattaatataaaatatttttttttaggaaccctcttttttttttttcc

SEQ ID NO: 728115 - DNA, 252 bp, Homo sapiens
ggtcccctaggtagactaacccaggtccaggtagaatagcaagaaaactataattagaagtggaccctggaagacagaactcaactgctacaatctcatgataaaatttgaacaaatgaggagttgcattttatggatgagcaaaggaagtggtttcctggagacagaatctactcctgggtgaagatgctggtgaacattattggaaattattacacaaagatttagcaatattacactaaactttattgg

SEQ ID NO: 728116 - DNA, 430 bp, Homo sapiens
agaacacaaccaaaattactacaccaaaaccaacaatataaacaagggggaaacacaggacattaacgggaacccccataaaacaacaaaggggacaaacacactaaaaaagcccaccccacaaaacaaaacaaaaaagacaaaaccaaaaatagagatcaacaccataacaaaaaaaccacccaccacacataacaccaaaaacgaaagaaaaaccataaaacccccacaataacactaacacaaatcaaaacacaacacgaacaaaatacccatacaaaaaccatcacaatcaaccgaatacaaacaaaacccaacccaacacacaatctcaaaaaaccaaaacccaaccaacaacacaactagaacaagccatacacaccaaaagccaaacataacaaaccacacaaacacataaccacaacaactc

SEQ ID NO: 728117 - DNA, 146 bp, Homo sapiens
ggcgcaaagatcttcgccggcgatcagtaacaagccgcctatagtgaaggatcgacacagcaacatcgcgccccggccagtgcttgggtacaattgccggccaacttgatcgagtaacaggacctttacatgatcgcttgcctgcg

SEQ ID NO: 728118 - DNA, 116 bp, Homo sapiens
tggaaacggagtcctgctctgtcacccaggctggggtatggtggcgcaatcttgagctcactgcaacctctctctctggggttcaagccaacctcccaccaaagccacggccaacg

SEQ ID NO: 728119 - DNA, 345 bp, Homo sapiens
ctcaccactctgctcagctatataccgcatcttcagcaaacctgatgaaggtacaagtagcgcagtaccacgtaagacgttaggtcaaggtggtagccattggggtggcaggaatgggctacattttctaacccagaaaactacgatatgcctttatgaaaacttaagggtcgaacggtggatttaggcagtaaacttggagagtagagggcttaggttgaacagggccccttgaagcgcgtacacaccggccggtcacctccctcaagtatacttcaaaggacatttaacttaaaaccctacgcatttatattagaggagacaagtcgcaactggtacggcggg

SEQ ID NO: 728120 - DNA, 171 bp, Homo sapiens
  misc_feature (14)..(14): n is a, c, g, or t
  misc_feature (42)..(42): n is a, c, g, or t
ttttatttatttancccgccattgtgtgtttttaagtatttnctttttttaagggaaaggaaaagcttgtcacaatctaactggctatgtattattattaaatttatgttttgcaacttagaaaccaactacagtatggcccacttaataaaacacctgaaacaaaaaaaa

SEQ ID NO: 728121 - DNA, 125 bp, Homo sapiens
tccgacgtgttcaagatgcatctctcagaagtctatgtggtcacctttgttttttttgtttgtttcttttttgagatggagtctcactccgtcacccaggctggagcgcagtggcacgatctcag

SEQ ID NO: 728122 - DNA, 135 bp, Homo sapiens
agtgctacctccacacaggtccttcttgtggaggaagaggatgatggatgtgtcgtgtgaacccacttgtgtgttgcagcatgctatcgaatcaacttcatgctctcactgcatggcagttcatctacctcgtcc

SEQ ID NO: 728123 - DNA, 298 bp, Homo sapiens
cagagatgatgccactgcactccagcctgggcgacagagcaagactccatctcaaaaaaaaaaaaaaaggctgttgaattcgggcagcgcttttaaaatcccgggcccgggtgatttgcgtaactcgggggcgcccgggatagtgcctttcatagggccctgcaattaccctcttcctcattttagcattgggccaaggtctctaacattctctttaccaggtttaacaggggccgtgtaaaaggctttcacccattggaacaggtacaacctggcgggggggggggttcctcataga

SEQ ID NO: 728124 - DNA, 147 bp, Homo sapiens
ggtgtttgagatcagaaagaaggaagaaagaaaagaagaaaagttgtttgggacatgagcagtaagtgggctgaggcattatgagagcctgaatgaagatagcaaatgtgggaatagagaaaagcagatagataagggagatattac

SEQ ID NO: 728125 - DNA, 559 bp, Homo sapiens
taaaaagcttttttgttagcacacagaaacacttcatggtggttttggggggaaggggcatatgtcactaatatattgtctccaaagccgtggattgatgtggagcaaaacacctttcccttctagtttggagagaacttccatctgggctcccaggaaggagggatccccgtgacttgtgacacaacatgtggccaccttgtggcacaaaagcctgtggtggtattagaaaaaccaaatttggttttaagtgtcctctttctccctttccatcttatcagcattagacttaattcccttataagcccagaaacttcgtgtgtgagaaccgtgaccccttagttacctgggctatacacaggtgtgtgtctcgggcacatctggggacttttccagaggtagtgccgcacgtgggaagagttggcccctggttctaaagagaaccaaggggggtcccaattttcctagaaatgggggggaaatctttcagccaatacagatttcgtggccatttatcatttcccgtctcctgaacagtcaggggttcggctgtttgacc

SEQ ID NO: 728126 - DNA, 415 bp, Homo sapiens
gcgtcttagatgtatggagtggctgatcactcattaacgatgcatgctgcctatgcagcatctgtttaacaaacgcacatcttgcaccgcccttcactccatttaaccctcagtgagacacagcacatgtttcagagagctcaggtttgggggctaaggtcatagctctttcgtgatgtcaaagcagaagaatttttcttagtacagaacaaaatgaaaagtctcccatgtctacttctttctacacagacacagcaaccatccgatttctcaatcttttccacacatttcccccttttctattccacaaaaccgccattgtcatcatggcccgttctcaatgagctgttgggtacacctcccagacggggtggtggccgggcagaggggctcctcacagcccagagagccggaa

SEQ ID NO: 728127 - DNA, 402 bp, Homo sapiens
  misc_feature (49)..(49): n is a, c, g, or t
  misc_feature (74)..(74): n is a, c, g, or t
  misc_feature (85)..(85): n is a, c, g, or t
  misc_feature (100)..(100): n is a, c, g, or t
  misc_feature (107)..(107): n is a, c, g, or t
  misc_feature (129)..(129): n is a, c, g, or t
  misc_feature (316)..(316): n is a, c, g, or t
  misc_feature (318)..(319): n is a, c, g, or t
gtcgacgtgaggactcccccgatgaatgcgcgttcggtggtctgcatgntcttcatgatgaagctcctcaccangaagtcctcanaccagatgtgctcgnagaccangttcacctcatagatctggtanagattggagccttcatccggccagtagtgctagcactgccggacgccgttctccgcgaggggtgtcagtcatgacgatcaccacgcagccgctctcccacaccttctgtcaaaagtcagccacggtggcgggcagcggtctctgggtggcgatgtacgcggggttcctcgggtcgtgatccatgatngnnctagcgttgatgtagtctgagtggctgtggctgttctccgccttcagcaggacccgggagtggtcataggtcagcacggccag

SEQ ID NO: 728128 - DNA, 115 bp, Homo sapiens
gtccctaaaaattttcctttttagggggcaaaaacctatttttaaaaaaatgttgggggaaacccgtaaatgttggacatgtttctggtttcaaaattaaaaaaattcaaagtta

SEQ ID NO: 728129 - DNA, 897 bp, Homo sapiens
gaacgtcagtttgagttctgtgttctccccgccgtgtccgccgacccgtgcccgcgatgctggcgctggctgacgggctcccggtggtcggcctgctctccgtcccggctccgtgcggtgcgcttccccggggcctggtctggaggggctccggcgaccgtcgtcttcctcctcctccggtaacccgctcgctgtacctggacgtgacgccaacggaaagccgctcggccgcgttggttgctgtagctgaaggcagatgtcgtcccaaagacagctgagaacttcagagccctgtgcactggtgagaagggcttcggctacaaaaggctccatccttccacagggttgaatccctttcctttcattgttgccaacgcgggcgatttacgacccaaccacaagttggcacaggccgggaatgtccaatctaacgtaaagcccgtttccctgacgagaacctttcacacgtggaagcactgttggggccagggtgttcctgctcccattggctaatggctggttccctaaacaacccaaacgggttccccagttgctttcaatcttgcaccatataagaccaggacgtggcttgcggatagagccaaggccattggtcgttgttgcgggtccacgtgcacacagagcgcattggacgtcgtgacagacacatagaatccttcgcggttctaacgagtgggagggcatccaggaaggcttggtcctcaccagactgtggccatgttgaggctaatcttgtggccactggtggcttgggcattgttttgccacctgcaaatgttcctgcccccaagggggcgccgtttgcgtgtagaccaaaggcctaaacaatagtgtggccctcccatgtcacattgccctcaaagcatctcgggcttc

SEQ ID NO: 728130 - DNA, 771 bp, Homo sapiens
tcccaagaacagagttttgctctgttgcccaagctggattgaaggggtacaatcgggctcaatgcagcctccgcctccgcgggttcaagcgattttcccgcctaagcttcctgagtagctgggaattacgggcgcgttatcaccatacccagtgtaatttgtggtatttatagtagaagagcgggttcaccagtgtttgcccaggagggtctcgaactctgtggcctcaagtgatccaccggcctcggcctcccaaagttgctgggatgacaggcatgaatcactgtgctcagaccaccatctgggagttttaaaagggctcccatgtgagtccctgtgatggccaggccaggggacccctgccagttctctgtggaagcaaggcgggggtctggggtccctgtatggtggaagcttgggtgacgccaggacagggctggttcctcttgcccccggtgacgcttcctttgccgtgggttgggatgtcttggcggcagtcttctctctggctcaggtgtgggtgggagggcgccacaggaagctcagccttctcctccaaggttgtgagtccctccaagagggcagtgggtggcaggcccgggagcttgtgggtgaccagccattcaagaggaactttgctggtcccttgcagaatcttcaggttggggaactggcagtgtccccttgatggggaaaccagggtgtgtgtgtctctgaaggttgagtgcggagaggaggtgtttcccaacaccgggcccgagatgtgtgtga

SEQ ID NO: 728131 - DNA, 390 bp, Homo sapiens
ggttgcttcatctcagcaagaaagtgatctcaatacagagagggcacatagccctgcgggtatcatcacgaaccaagtatagccaacagtaactgtagaaataccatcttgtaccatgtacaaataagttctttataagataacctaacacctactacaaatagtctcctaagttatactagaaaaacaaattacacacatagcatagtagcatagtagcacacacacgcacacctagtatgcatatctatggggcctttaaaaaaaatcaatctatggatttatctgtgtatctcttccttctatttcttttttcatgaaattacacaatggtagaaaaatgagtgtctctgttaatagcaatctatttgtattcttggtctagataag

SEQ ID NO: 728132 - DNA, 1616 bp, Homo sapiens
ggtacatttcaagttggtcgcggcttgggctccgctcttgcgtcgaggggcagcaggtttagtatcactggcatctctgaatacccaggccccctccaccatggccatgccggggttaggcgctggccaggggttacgtggctcggtggccaagtcagaccctatcacacgctgccagcgcccgtaggagccatatcggcaacagggcgatagctcacggcccccactcaatccccaacctctagcaaaccctatacttagccaatctactttccacctaccaccttacgccgaggcatccctgtcctcagggcttgccctcttggccgcccctcctagtgccgccagtgcataatggaggcacattcatagatctccttgcactcaatccctgcacagcgccttactagaaactctcaactctacccctcacctcccctatagtcaccgtcacaacattcttaccccccccttcgaaccctcactccaccttacccccgatctcccccctctccactggctcccctccccccccatctagcttcaccccacttcgtttgtcccaacccccccttccacactaaaccccacctaacccattcctcctcacattccaaccacaatccgcctacccactcgcctccccccccccaccttcctgacacctacaattcagctcaccccattcccctcaaaattccgtgcgcatatcctccccctctcaccctatctgctccccacgtcccgcgcatccgctactcacccgctcgacgagctcggccctccccctccctctcgagcaggcgaaccttccgcccgcgcacactctcgggctttgacgcctttagggcgcgctaccaacctagtgccatccgcttgtcacatctgccgcgcccacttgtctctgccctaccctcccctacacctattacgccgtctcacgtccccataatcactctccatcttccatcccttcccccctctttcatctgtcctacacccccatagctttaccgtattcacatcaccacgatatttcaaccaacgcccaacgctccaacacccaccctctcaactccactcaccatcccctcccatcactaatactccgactaatcacactctcactcctccccatcaccccccacctccccctcccctcatccacaccactcttctcctccactcccccaccctatctcctatactcacccctctttcacccaatcccaactctacccatcccctctcccctccctcccaccatcctcacctctcattcactccatcacatacctccacctcttccttccatccccctccaccccacccatcctcaaaacttatcgtcgaccaataccaatactaccgcctaacatcctactaactcacactcacttctcccaccattcctcacctcgcgcttcttcctctctctactccctttgcatatcctacccacacaacctccctccactccatccatctcattctaccaactatcatcgatacaatccctcccaccacattcaatcctcatctcgtccccactccattcccacccacctcaccacccgccttacctcaaactacccaagatacatcataattgactt

SEQ ID NO: 728133 - DNA, 177 bp, Homo sapiens
ttttttttggatacaaagtctcactctgtggcccagggtatagaacagcgcataatctaggctcactgaaacctctgccacgtggttataaattaactctcatgcttcaagcctcccaaatagctggaattacagttgcccaccaccacgcctgtgcttatttttgtgtattttaag

SEQ ID NO: 728134 - DNA, 670 bp, Homo sapiens
  misc_feature (524)..(524): n is a, c, g, or t
  misc_feature (670)..(670): n is a, c, g, or t
actggactttctatctcttgtactacactgtaatttacctctcactgttctaatatattttattgggatctatacatgttattttttttatggtggtttgaatatgtctttttggatcgtttgaatttcacatcttgctcgcttgcttttctctcgttgtgcttcttcacttttcttttttgtactatatgtttggtttttttttatgtttattttgttcctatctctttcttctatctttttttattttttagttgctccttcgtttgtttcctgctatcttttgtttgcttatctatttatttttttttttttttttttttttttttttttttttttttgttttttattttttttttctttccttctttctcttcttttttgttccttttttttatgttcttttttttttctatttttgcctctctatcttttaccaccctcagttcccttctttctttctattactttttcctttttttactttcttctttctttctcttttcttccttatttgctcccantctctctcacgtctttttcgtctttgttgtttatttcatatttgtttgatatcttttttatctttttctttgttcattatctttctccttctactttctctttttcttttcctctctctttctttgttctttctttttctgtcttn

SEQ ID NO: 728135 - DNA, 140 bp, Homo sapiens
aggggcgactccacacaaggccttgaacacccttctctcagcccaggacgctcatcagcgtcctgggcctgcttcagttctgcccggaggacctgtaacttgtttgtctgagagaggacatgcccactatggctggagct

SEQ ID NO: 728136 - DNA, 1499 bp, Homo sapiens
ggttcgctgtggccgggcgcctgggccgccggtctgttgtaacttcggctatccgctggacccatagtgatctttgcagtgacccagctagcatcactcgtttcttgcgcgtgtgaagataacccaagggaattgaggaagtcgctgagaacggagtcgtgctggagattgcgactacggagtagactattgaatacgtgacgacgagttaccagcgcaaggggtctgctaggctttgccaagaaggaaaggtcgaaactatcactgcgagtcatgatacacactatgcacttgacctacacgtttaaccgctgcgaagggcctatagggacgtgcgcaccattcgaaggggttcgcctattcgcaccatacgcgcggtaaactaccaccttattccttttataaggttacccaatttggaatttggcccctttacattgggccactctggggcaccttgggaccccccacaacggccgcatatatctacacaagaaagtcgaacccaagtactgatgctccgtggcaccattactctctgtgcggcagaatgaccgcccacaagcaaagacggcggacagcgcaaaggtacaaggcaacaaacagaagaaaaagcacaggcacgtgcatcggacagggcaaaggccagaacgccattgccataaggcaatgacccaacacccgaagggccaacaccgaagcgccaaagaggcgaaggcaaggacagaggtcccaagccaaacgcccaggacacgcccacagtaccatgacagaggcccagggaggaatgcacacaggacaaggggccaagcacaaagagccaagcagccacggggatatggagactaaggccctggagccacgccctcgggattgcacgaaggaccaagggtccaacgacccggagatagccacgatatggacctacggatgtaaccattaaagccaaagcaattgatggcctagaagatgctgccgctatcggacagcgggaacgcaggaacggaggaactgaaacccacaaaaccccatagtcttttacgattaattcgccaccgagataccgtaacacacgtgtatacgctcttcccgtttccgacacactagaagcttttgtcccacgcccctcgatattgcgtcccacgagggtggccacagcaggcggagagcgattaccccaagtacttctggataggacttacacgccggtttaacaagcagaagtctccagactttcgtggaataccatgtcacctgcgaagttggcacaaaccaacccagacgagttgtgagagctttagcgcacattggccgcagcgacacaggtatgcacacaatagacccattgtgaacggggagggacagccacatgttagaacgtttagcgcagaagcagttcatagtggtaaaggctcccaggaacggtgaggaatatacagggcagaagacacaacagaaattccagtgagctatataggcccaagcgcaacgatatcgca

SEQ ID NO: 728137 - DNA, 104 bp, Homo sapiens
gacagcatcctaaccaggacgctctaaccagacaggaaacttttgactgctgggctgcgtgccttccagcaggaaggcattgccaacatcacttgcctcaaaga

SEQ ID NO: 728138 - DNA, 334 bp, Homo sapiens
caaatatggtcccttgtttcccctgaagggtcaggctaattttattcgtttttgcaaaaatgttgaacccaaatccaagtttgaattaccagcttatcagcttttctttcaagtaaaaatgatatttcatgaaagtgtcccgttgtttggaataccaattatcccaaatgcttttccttgagacaactgctgtaccttggtatgcaaaaaaggtttgtgtagtattcccccctttgtcccatgaaatattgaaaaaatgtgtactcaaaggttaggatgtcccagtgtatgagattaatctcttcaggttaataaattttttttgccttgtcca

SEQ ID NO: 728139 - DNA, 316 bp, Homo sapiens
aagtcgagttggatcgagtcattccccaaagcttcacaatgtggccgaggacttcgattgcacattgttgtttatttaagtagtcattccaaatatcacatgcattgttacacggaagtcccttgccatcctaaaagccaccccacttctctctaaggagaatggcccagtcctctcccaagtccacacaggggaggtgatagcattgctctcgtgtaaattatgtcatgcaaaatttttttaatcttcgccttaatacttttatattttgttttattttgaatgatgagccttcgtgcccccccttccccctttt

SEQ ID NO: 728140 - DNA, 619 bp, Homo sapiens
  misc_feature (166)..(166): n is a, c, g, or t
  misc_feature (232)..(232): n is a, c, g, or t
  misc_feature (297)..(297): n is a, c, g, or t
tgtctctagaggatacacaactcaggggcgagctgtaactcaggggcgagctgctaactcaggggcgagctgctaactcaggagcgagctgccctagtgaatcagtaaagtgagcaatcagatgatgaacttctgacactttccagtccgcatggcaatgccaatngtgacaagcctcatggagtcaagaagcccagcaaaaagcagcaggagccagcagcccctccacccnctgaggatgtggaccttttgggcctggaagggtctgcaatgagtaacagcttctctccgccagcngctcctcccaccaattctgaactactgagtgacctgtttgggggtggaggtgcagctggtcccacccaggctggacagtcaggagtggaagatgtgtttcatcctagtggacctgcgtctacccagtcaacaccacgccgctctgccacctccacctctgcgtctccaaccctaagagtgggagaaggtgccacctttgacccatttggagcaccttctaaaccatcaggtcaggatttgctgggttcttttctgaacacatccagtgcttcctacgccctttctccatccagccaccgtttcgcctgatggtaccgagctc

SEQ ID NO: 728141 - DNA, 243 bp, Homo sapiens
tgttagtggcttgcagaaacccttcgctgaaccaggagctgttctcatatgctatccaggaatctggcttgcttgaagctatggctctcttttgtatgatgcttgctctcttgattttgtctgccatgtaacaaattactgctagagatgttggcatcatattaattacggatgtactgctgtttatcttactgtgactccaaaaattgtattattggtgtcaggagaatgttcgttattaac

SEQ ID NO: 728142 - DNA, 438 bp, Homo sapiens
tataagagccagcgatatagatactgggcgatgaggtcagtaaagatcagcaggacccacatcatgtgagccctgtggctgtgacagccattttggattgtattaccaagtctcatgagaagccaaggataggttttgaacaggggaatgataggatctgattttgtatcttataagttgtacctcctgcagtcagcagacatcaaatgatgggtgggtgggcaaagcacgggcagccagcagagcagccagttgaggctatttcagtcaatctcaggcagcagcaacatcaagagttgcttcacagtcaggcatgctggagctggacaggtggtgcagcacagggcccggaagccatgcatcatcttttgcaaggtcgcagcaaaatgcagcatcgctgatggctttgcagttggccacgtgcaaggcaaagtgcac

SEQ ID NO: 728143 - DNA, 82 bp, Homo sapiens
  misc_feature (7)..(7): n is a, c, g, or t
aaatcanggcagatttcaaaggaaaggaaattaaaaaaaaaatcagggaacccgttgttataaagtaatttaaaaatgaaga

SEQ ID NO: 728144 - DNA, 636 bp, Homo sapiens
ggagaatcgcttgaactggggaggtggatgtttggtgagctgagaacacgccattgcactccagcctgggcaacaagaacgaaactccgtctcaaaaaaaaaaaaaagtttatttggcaaataaaaaataaaatttttttggaagataaaaaccatgtcttgagctgggtgccctggtgtgtgcctatttccctagattctcaagagttgagacaggaggatcacttgagcccaggagttcaagtccaactggggcaacatgacaagacccttgtctctttaaaaaagcaacccaaaccatgtcttgaaaagctatttaagggtcagacacgatggctcacgcctgtaatcccagcacttggggaggccgaggcaggcggatcacttgaggtcaggagttcaagaccagccgggccaacatggcaaaacccagtctctactgaagtgaaaatacaaaaaattagctggcctagcagtgggtggtggcaggtgcctgtagtcccagctacttgggaggctgaggcaggagaatcgcttgaattggggaggcggaggttacagtgaacccacttggcgccattgctccagctgggtgatagagtgagactctatctcaaaaaaaaaaaccacaggggc

SEQ ID NO: 728145 - DNA, 307 bp, Homo sapiens
gggattagtgcagacgtgtggtaggctatatcatgactgctgtcccagccaacagtggcgaagagcgtgaagaacatgagctggtcggaatccatggtagtgctggaagaggctggctccataagtgaccgtggcccatgtgtgatccatcacaaaatgccactgtcactgggatggcaatggcttggttggtcacggtggctggagaaggtcagggtagtggacagagtgcccttggctgccagccgcggggtccgagacgccgaccgtgtaatgtgatgaagctgggccacctaaaaatccccgt

SEQ ID NO: 728146 - DNA, 643 bp, Homo sapiens
  misc_feature (527)..(527): n is a, c, g, or t
cggacgcgtgggcaaaaaaaaaaaaaaaaaaaaaaaaaaaaattagctgggcatggtggcacacacctgtagtcccagctacttgggaggctcattcgagcccaggagtttgaggctgcagtgagctgtgatcacaccactgcattctagcctggacaacagactgagaccctgtctcaaaaaacttatccaaaaaacaaagacatggcagcagttgactttatcttttgcatatccctgttaagatggaagcctggctactgtagttttgtgctttagtttggtggaatccttagggactgttgaaatatgtgtggttacattggctttgccaccgaatctcctcattctgtaattgttacctgatactttagtttcatggcctcttttgtcttaatgttggtgcattgattggcaaagcaaggactgttaggtggctttttcaccccagagtctgttgcctggcggatttcttggtccttggttattgtaaagtagaattgacatttgtcagaaagaattggatntatagttgtgtacaccattctggggggtgggctttattctttatagaagaatgaaaattctgtgttcctttaaaaagctcaaattcagtgaccttgattccccagtggctgataca

SEQ ID NO: 728147 - DNA, 423 bp, Homo sapiens
tactgaatactgatattgcgatctatgggcaggtcagctagctacatagagatgaatatcacatgctatacggtcatgtcaggggctaaagagcctagttccacgtatagtttaggtcctctaccccacatcactgatgtgttccatgtgatcttcagttacaatgcaactaaaggaaaccacacaactgagtcagatataccacagaatcaagtttgcgctttttatctgagaactgcgacagcactgaattctggctgacaaattacaggtctaaacccacacccacacagttttgatgtaagctagctttaccatacaagtgttaggtgctgcactgtaatttcattgtccgaaatgtgatgacagaatgtccacggaataaaagtacatacaagtcacccagttagattatattgcttg

SEQ ID NO: 728148 - DNA, 260 bp, Homo sapiens
ttctcgagtagctgggattacaggcgcctgccaccacgcctggctaattttgtatttttacaagagacagggtttcaccatgctggccaggctggtctcgaactcgcgactcaggcaatccgccatctcggctcccaaagtgctgggattacaggcgtgagccaccggagcttgctaaaatggagttttattactcctttgaaaaggaatactagatcaagatgactgagagattgactcgtggatttggcgaggggccg

SEQ ID NO: 728149 - DNA, 341 bp, Homo sapiens
cagcattcctgtgcatctcacacaacattttattttttatctcattgaccagatcttaatcaaatggccacacctcactgcaagggaagatgaaaaatgtggtctttttcccgggtacataagtgaaatgtgaattttcctacaaagagaaaagggatagtagattttgagcaggaacctagcagtctctgctgcaggctgacacctttgtgagtgaggtatataaattacagctatgccaaaaactaaattatgtaaatagaagaaatttaaaataattatttgggtctcttgcagactgtgtaaagctgctttctctcacaagtattaaaaaaaaaaaa

SEQ ID NO: 728150 - DNA, 913 bp, Homo sapiens
tacaaaccagaacgacatggatcactatagctatattcggcgcatgagctggagtcctaggcagcagctctaaacctccttatgcgagccgagctgggagagtcaggcaaacttctaggtaacgagcacatctacaacgatatcgtcacagcccatgcattgtaataatcttcttcatagtaatacccatcataatcgcgaggcttgggctattgactagcttcccctaataatcggtgcccccgatatggcgttatccccgcgatataatacaacataggctttctgactcttacctgcctctctcctacttcctgctcgcatctgcttatagtggaggccggagcacggaacaggttgaacagtctatcctcccttagacagggaactactcccaccctggagcctcgccgtataaccgttaaactcattctggcttccttatcatcctagacaggtgtgtcctacctatgctgtaggggccatcaaatttcatcatcaaacaattatcattagtaaaacgcccctggcataaccgcaatagcaaacgcgcctctggcggctgatccgtcctagtcagagtagtcctacttgctgctatgctcttcccagtcctagctgctggggatcactatactactaacgagacccgaagcttaacaccacttcttcgacccgcggaggaaggagaaccccattctaataccaaaaagctattctgatttttcggtcaccctggaagtttatattcttatctagccaaggttcggaataatctcccctattgtaggttactaatccgggaaagaagaaaccccttggtgccctacggtctgggggggccagaaatcacgggcgtcccaagagaacgggtgaagccacaaattcggctggtggagggaacccaggtttt

SEQ ID NO: 728151 - DNA, 303 bp, Homo sapiens
  misc_feature (26)..(26): n is a, c, g, or t
  misc_feature (261)..(261): n is a, c, g, or t
acatcccagaatatctgggacacacntaaagcagtgataagagggaagtttacagccctaaatgcccacatcaaaaagttagaaagatctcaaataaacaacctgacatcccaactagaggaactagagaaacaagagaagaccaaccccaaagctagcagaagatagaaataaccaaaatcagagctgaactgaaggaaattgagatgcaaaaaaagccatacaaaagatcagcaaatctaaggaattggttttttgaanggaattaagtaacgatacggtagactgctagctagactaata

SEQ ID NO: 728152 - DNA, 102 bp, Homo sapiens
  misc_feature (99)..(99): n is a, c, g, or t
  misc_feature (101)..(101): n is a, c, g, or t
agaagcggtcttggaggtattgatttaggtggttggattttttccgtggctctatcaattcacaattcaaattaaaaagaaaaattcccctccggtcgncnc

SEQ ID NO: 728153 - DNA, 926 bp, Homo sapiens
ggtctggctccgtgacctgctattaggttcttacagtacgtcgtgcgtagccacttaggtgggttcgtgcgccttctacctcgctgtgtcggtgttcctgagctcctcggaccttttactcctcgctgttgtcagcttgggaacggagctgaagcgcgaagctgggtacttggctttacctgtctcctgaaagaagtttaacagcaaaacattggactatcagaccacatgtcattacaagtttagtatcaaccatattatgagatgacaagaattactaacggggagcgacattgaagaggatccctaatatgcccttgtttactcagtttgggtcatgtggtggacactttgctggctttaaacgaccatagaatgatgacgcgcgggcaaggcctttgtcatattttaaaggacactggcgctcatccaacaaaattgccttgaagacacgctacaagggatttccatgttgcatggtaaagccaagtggcggaactaaccggtattgcaaaaaaacagattcggatactatatcaagagaattgcgtgggaaccttttcgctcgccgaagaaacagggacaacacgagtggacaaaaagccaaagactgtggaagagactgcaaggaacacaaacaaaaagcctggccagggaactccaaattcaggctaatacccagggaaattcaacaccaaatctcagggtgcctgattactctccacatatatttattccttaataacttaccaagagagactactgcgatgatggcatccagggttactagtgcccggctcaagaagtcgcggtaccagggaggcggacctcgtttggcgagtttcaatgtggcagcgtgctcacaggtctttcggattagagcccggctgtttggaaaccttcccaaaaatagggatgtttaaagg

SEQ ID NO: 728154 - DNA, 843 bp, Homo sapiens
tgatatttatggattactgagcaatgaatatatgctaacattcttctatgaactagaaatggatcaacttatgtaattatcccaatcatgtgaaataggtactactattattgctattttcaaatgagaaaatcaagcaaagagaggttaaacatttctccaagtcacacatttacaaagtggtacagactaattcaaatccagtttcactcccaaggccctcttttaaacactgagagcttcatggtgtttggccatgaagagagagaatcatgataactcaggaaaagagtactatgaaagagtggacagaagatgtaggaaaaggacactcagaggactgcaaagacttgaagagtgggggtatcaagagctaagacgcagcaaacatgggcaagacagaggagaacagcaacaaaatggaaagctccaggcagtggttcagtctgaatggtttataaatcaggaggaatttgtaaaccaaacactgaatctgaaagttgcttctgcttccatcatgaatcatcaattttattaattttgaataatacaaaaaaagatcttgaatctaagaaatttagtaatttaaagaaagaacactaacatagctaaagaaattaaatgagagacaaaagtttgaaaaatgcttagtctttttttttttattagataaaatggacctcactgcaatgatactgcagaaaaaaccaggtggatatgtcataaatgtctgcattacttttccatctgtcattcaggggagataggtacctacaaatatatatgctgttagtcaagaaatttattttggtattaagaaggactaagggctatgagtacaaa

SEQ ID NO: 728155 - DNA, 561 bp, Homo sapiens
  misc_feature (1)..(1): n is a, c, g, or t
  misc_feature (3)..(3): n is a, c, g, or t
  misc_feature (37)..(37): n is a, c, g, or t
nanagtttgggctccaaaaagtttgaccctccccaangtggctcctaaagatacccttactattgtaaaccctaatgtgagtttctggggtgctagttaagttggtctcccctgtgtgagacacccatgggaagccatggcggcctctgaggagaaaagtctccttattgccttcatgtctttatgccccgagagcataactcttcagcagcattccatgggttgctcagggagatcacactcccttgaagcagtggagcataatcaaacatcttggctcctcctgaaacccgcagccacccgtttcagttaagttaaagatcttaagtagtttagacacacgcctttgttcaaggaaattcacagaaacggccagtgctttacatcttatggaatgactcacgagttctcctttactgattaatccttttcctgatcgcttcctccccctccaatcagccataagaacaaagagcttgtaaaccaataaactgggtggagcccaagagctctgggccgccaggaagcctccaatgctctggccacctggacccgcctttt

SEQ ID NO: 728156 - DNA, 110 bp, Homo sapiens
gctgcgcaatcaccttgcctcttagatgagggtggcttcacccgtgatttcaccaaggctgacgggcctgtcacgacggtgtacgacgcctcggtgaattaccgcgagca

SEQ ID NO: 728157 - DNA, 339 bp, Homo sapiens
ccccctttttttttctcccccttaacccaccccgcccccccggacacccatgggggggggggtcccccctttttcccccccatgggggggaaatttcggtgggcccttcccctgccccctcccccccttacaagggggccccccccggttggggggggggccccccccctttaatttgggcctggggctttttttgcccccccgggatcccctttttggttttttcggaattccccccgggaaccccggtttttttttaggggttttttattttttccttatttcccataatttttggggaaacttaaaaaacactaaccattaagttggagggccgga

SEQ ID NO: 728158 - DNA, 424 bp, Homo sapiens
  misc_feature (132)..(132): n is a, c, g, or t
  misc_feature (283)..(283): n is a, c, g, or t
  misc_feature (300)..(300): n is a, c, g, or t
taagaaactttttagtaaaattttagaaagcaatgatttgtgaacttttcttactttgtgggacacaaaatatttccaaaatgtgaacatcaatgttgggtctttgtaggtggagggtagaagattggaccngtcttcacagaccatcatcccatgtgtagaagcctccatggccagccaggcttcctgcctggaggacagctgctcccctggctcagtgcagttccgcaaatgtaagtcctccttggtgaagcacagctctatctggccaacggtctgcacngctctctcccctgttcntggcataaggcactggattttaggcaccacaccatagattctgggtaagtgcatctttgaaatctgcaagctggtagtagttgatgggatggcttgatccccaaatttttgtagcacactgttg

SEQ ID NO: 728159 - DNA, 219 bp, Homo sapiens
cgtcagtggtccacacatctagctgcctcgggcctggtcaggtgagcagaggggaggggaaaggagaccccctcactcagtgcggagccatgctggctccgcctccagagcctggagccccgtcccctcgggctccttccctgcaggatttggcggagcctgaggcgacagaagtgagactccgatctcaaagaaaagtaaaaataaaagataaagtaa

SEQ ID NO: 728160 - DNA, 108 bp, Homo sapiens
  misc_feature (96)..(96): n is a, c, g, or t
tgttaagcagattacttcccaccagtattgagccaggagttgaggtggaagttcccattgcaaatgcttaagtccactattttaaaaaattgatgncccggttggtta

SEQ ID NO: 728161 - DNA, 357 bp, Homo sapiens
gtaccccagatggcatgatttacattccaggcccctgctaaataaagcaggctccaatgccagctgatactgtacacttttactatgaggggaagagttacttgtctatcagaatactgcagtaaggtacctggatctgttacatgctcatgtgttccggaagaacatataaaatatcatcccacggatgacgatacagacccctgcttcaagccactactagatcaagatagtgtccaatgaaccccatactccttcccagcacaaagatgccattgagggctccaatgtcaatatattcatcagcttcctcccgagtaaaggaaccacaacttctaaggttaagggggatcctct

SEQ ID NO: 728162 - DNA, 182 bp, Homo sapiens
gagagctggcatcagagaggatgtctgggaggagcgggctgtgagctgagcggaggtgcccccgtgactggaggcttgagagctccaacgggaagatggcttcacggacggtcagacagagacaggaggcctggcgatgatcttgaaccctgtctccctgtcgctcgtgccacaaggggatc

SEQ ID NO: 728163 - DNA, 1024 bp, Homo sapiens
tagcggaactcctcctccaaggttgggccccctaaggccaaccctacgatttgccacaaacgccacataccgacgccttcctctcggaagacctctctggtccggcgaactcgccctagaaagggcgaacgacgtacttcgaaatcggaaaggcgttccaaaaagggcttcgcttggaaaagtgcgcggccctttgcggggagccaaaccggggctaccccaatgggggcccacgccaacacccctaatgggttggccaccgtatggcccgcggcccccccaccttcaaacccctaaagacaagaacatcgggctctaccccttaaccccaaggaaccgccgagaagggaactggcgtgagagggaaagggttcaatgccatttgggcgcgcgccattagaagcccacgcttacctcgctagacacgtgctatggccaagggaagccaagcaacgccatgggagtaagggcgctacgcgcaaaacaaggtgcgttaaacgggttcacaaaggggaactctgtggctccttaccctttggaggggaaagcctttctgtagtaaattggcgccttaacctcacccatgggaaagggggccccccggccgttgtcgccccaaggagtaagaccggttggcaaggccgccaacccaccattgcaccacgcttcgatgcatggcccatcttctggtaccctaatgagcttgttcactataggccacgcaactccatgcccaccccgcaccagctggaggacccagcacgtcacaagtgtcgtctctcttgtgccagacacaagcggccacgatggggggtggggggcagggagtgtacacacacagggccattgtctcacctcccaaagggaccgcctgcccccagctcatcccagagcgtacactgactgcaaccctgacagccgtctcaccaggccgcgttccccaacatccccgccccagcctccctcattaccccagaaaggtcaggtatgacctcaaaagcgaggaagtcccaccggccatgta

SEQ ID NO: 728164 - DNA, 192 bp, Homo sapiens
ccagcatcaagaggggggcttgagagggaaagatcattgtagatgaactgaagcatgaagttatcagtaccagcagcaaggcccaggcaccccagtgcacctacctggactgccctgtggacggagacactctgcaggctgcctacacgcacattcagaagcttggaacttgcctgaccctcgctccactca

SEQ ID NO: 728165 - DNA, 1032 bp, Homo sapiens
gctggaagtagaccgtgaggcagagaagaagcgtgagggtaagcagcgagctaaggaagctcaggagcgggaactgcggaagcgggagcaaggcggaagagaaggagcgccggagaaaggagtatgatgccctcaaagcagccaagcgggagcaggagaagaaacctacagaaggaagcaaatcaggccccgaaatctaattctggctcccgtccccgcaagccacacccggaagcagactcgttcctgggctgtgctgaagctgctgctgctgctgctgatatatggtgtggcgggagggctggttgcattgtcgggtgacagagctgcagcaggcagaaccctctgcacaggggtgaaacacatctatgacaatgcggtcacagggtcattacgcacgcatgagatcctccagtggggtcctccagacgcgaactctcagaagtgagcttgttccccagacaccatgctgcctcccagacttggagtaaggatacctatggaattgggttctgctggacacaaacctctttctaggcatcagacctacctgcatcatcacatggctgagatctggatacatgagactcctctacagtaggacttctgcattacttagatcagggttcctgaaacgaatgacggcggaacatgggaggaggcgggggcgccaatggaggggcagccacactgcatgcctaacgacagtatgggcctggaggtcgaggacaagaggaaaccaatagcctgtcatgattgctctactaacgctgtgttagagcaccggactgtaaactatagggacagcggctcacacttataatccgaatgcccaggaccattattactcctgaaacgcgaaacacgagaactgaggaacacacaagacgaaaccaagcaaacaaggagccgcctcgataacaagacaacattctgagccaaaactataaatcgcaacacacagaaaagcagacgtgtcaggaacaaagaagaaaagaacaaaatatgtaacactgagaagactaacgatag

SEQ ID NO: 728166 - DNA, 237 bp, Homo sapiens
tcttctggccacgcccaagacagcggcgctaggggctcatatcgtcgatcggatcagagagttgctcggcgagaatgggttatctattgccgagctgacggagcggagccgccctctcccaacggattgattcaatcgttgacgctcctcctgtccggatccgggttttcgcacgctgatcaacagagttacagcgcgcaacgcctgtagtgggcatcaggggatgggtggcaatca

SEQ ID NO: 728167 - DNA, 331 bp, Homo sapiens
ggttgactgtgctttgactacatatttaacattcatatttttcctttgatataaatggccttctttttatcttaagttgaattgctgtgtgaagtaattatgctgttatatcgcagagtacaagttggttgattttctgcttttacaattaagtgtggttggcataaatcctaatggctcaacccttcattgaaaagaatgataaaattaaaatgaactattaatgttatgtttaaaatccaattattatatataatgtatcagatatattacaatggcatatggtagatttgtatccttttcaagtcttttaagtaaaatattacgtatc

SEQ ID NO: 728168 - DNA, 452 bp, Homo sapiens
  misc_feature (3)..(3): n is a, c, g, or t
  misc_feature (19)..(19): n is a, c, g, or t
  misc_feature (400)..(400): n is a, c, g, or t
aantcccatttaacttaanttcctccccctttaccctactccaaggacattgttcccaaaaattattttgtttcttctgtatcacccagtttttcttcctactgagtcattccccacagtatcacaaacatactgttatttttcccttaaaataaaaagtcccctggtcaggcatggtggctcatgcctataatcccagcactttgcggggcagaggcgggcagtttgcttgagcccaggggtttgagaccagcctgggcaacaaggcaaaactctgtctttacaacgaatacaaaaattagctgggtgtggtggtgcacgcctgtaatctcagctgctagggaggctgaggtgggagaattgcttgagcctgggaggttgaggctgcagtaagctgtgnagttgccacagcactctggcctggcaacagaacaagatcctgtcaaaaaaaa

SEQ ID NO: 728169 - DNA, 339 bp, Homo sapiens
ggtggctcatgcctgatcccagcacgggaggccgaggcgggcggatcatgaggtcaggagatcgagaccatcctggctaacatggtgaaaccccgtccctactaaaaatttaaaaaattagccgggcgtggtggcaggcgcctgtagtccccactacttgggaggccaagacaggagaatggtgtgaacgggggaggcggagcttgcattgagctgagatcgtgccactgcactccagcctgggcgacagagcaagactctgtctcaaaaaaaataaaaataaataaattagtaaataaattcttcctcatagaaagacacaaagtacagagtcctaac

SEQ ID NO: 728170 - DNA, 335 bp, Homo sapiens
  misc_feature (316)..(316): n is a, c, g, or t
ccatgcactaacattcattgcacagacacataagccatgcacaactatcaatgctgagacaacaaacacgcatgaaatgccaatctatatacttcgcacatacatgagctcacaaacgatcgcttagtcactcattttttcagctgcacccagaacagagatgccctcatctagggcacggagatctccgtgattccaactgtgcagaccagatatacccctcactgctgcaccctattacctggcctctaggaggcttccctccaggaagccaggatcaatgcaacaagcgtactgcagctgacatagtcccgangatactagatgaacatgaa

SEQ ID NO: 728171 - DNA, 394 bp, Homo sapiens
  misc_feature (191)..(191): n is a, c, g, or t
ggtctgtatctctgaagtgtagagaaaatagtgtctgctgggtgggatcgttatgaatgttgaatcaatagggtgattgtgaggaggcccaagcggtgctgtgcacgcagtgactggcaggaggacaccttcccagctggcggctgtgccaacaactcctctctctgtcccgccagccggtgtttgccccncatgcttcagagcaacccaagcatgctgacgtcgggcagccatccccaggccatcgtgtcatcctctacccctcagtacccttctgcagagcagcctaccccccaaagcccttttatggtgagtcctgcgcctggtcccttctgctctgggctgtgtgccaagcccccttctggtgtgctcagcactggttctcccttctttc

SEQ ID NO: 728172 - DNA, 986 bp, Homo sapiens
agcgggaagctgagctggctggtcggcggcggcggtcagtgagcccggtgatggcgtgacgcgggaggcggcggcggcgcgcggagacgcagcagcggctgctggcagtgatgtcgggccggtcggagcgtctagctccctgccgcctcccgtaagcccgcacgtgtccttcccaggcagccctcggggtcaccccgtgcgccggcggccccagaaatccttgcgggagctactcgggtgccttctttcttgcctgtgagatgttctgattgcggcggtgtcttgttcgtgcgatctttgagttgccatccatcacaactgctttaccacgtaactcttcttagttaccagaaggactggggctcactgatttgttgtccggtgacgcacggcgctgtgtgtgcctgtgttgcggcctaccgtcttgttccttggtgcacttgttcgcgtcctcgttggcagtggcgtggcttcagagaacgttcgacgtgcgttaaacttgagaaacctttcgccttgggactttatatgctcgatatgcaagtatttgaacaggggtgacttgtgcgtccttccctaacttgtctgtcggaccgacgcttgatacataactttgggacaatggcagagcaatgcccagacaattctcccttgcaagttggagttttggccagtttggcacagtaacaaagccaatacaccgtggtcagaccaacattcactgaagttgaataacgcatgtgataacgatacacactgatagtcacgccctcaaatgttttttgccattttagtgacctgactaggcttttgttcattggtgtgcgagtatatgcggtcatggcttttaccagaagataggtcgaccacgtaagcactcccttgagacaactgtgtgcagtcagtagtttggtcaggttttcaccatatagtcctacgtgttaatattggtctggatcacattttgggataccaatttttgtcca

SEQ ID NO: 728173 - DNA, 401 bp, Homo sapiens
gcacacacctgtgatcccagctacttgaggctgaggcacgagaattgcctataccacagaggcagaggttgctgtgagccacgatggcgccactgtacttcagcctgggcgacagagtgagactccgtactccatctcaaaaaaaaaaggaactttatctttgaaaaggaacaacattctgagagtgagggagatctagaagattctaattttatccagataagcccagaaattatttagaatgattcaacctaatgggcgatgtggtcagcatgtgcctgtcatgttccaaaagcatgagtgatggttgctgggttttggggctttaaatttaaaggactttaataaaaaaatatttccttttatataaaaaaaggggcaacgggggggcgcgcccccac

SEQ ID NO: 728174 - DNA, 163 bp, Homo sapiens
caaaggcaggcttcaaagctcccccagccatcaatgccagggtgccctttaacttttttttcccgtttgtttgacaatgctcaaatgcatcagttccttaataaacccgtgaaatttgaaaactggacattcggtgagattaaattttatatccccctagcca

SEQ ID NO: 728175 - DNA, 127 bp, Homo sapiens
tcggtacactattcacggttggtcactcctagaagatgtttgtttacaagagggtagagggatgagaggagctggaagaccacgctgaggagccacgtggctctgatcccaagcactgagtgccctc

SEQ ID NO: 728176 - DNA, 122 bp, Homo sapiens
ttcattaacctgaaaataggtcacgagctctttcattccagtaaagggaggacggaaaaaaactccaattcaagagatccggccatagatagaggacacaacgtcgtgacaaggcaaaccgc

SEQ ID NO: 728177 - DNA, 722 bp, Homo sapiens
aggagccggttccctgtgtgtgtgtccgctcgccctctggtccgtcctgcgggtgccactgggctcctacggtccaccatgggcctgctgcactccgggcgcgtctccccgggatctgccgccgcttccacccgggcctcgcctgccgctgtgctctgccagagccagctcctgtgtgttgacccatgtgtgaaatgtggacctccagatcccattcttgggagtcactgaagcctttaagagtggacaccaatatgcaaaaatgatgaatctgggagtttgtgtgcctaccgggatgataactggagaagccttacgtgctgcctagcgtcctgcaaggcagaggcccagattggcgcaaaaaatttgtgacaaggaatacctgcccattgggggactggctgaatttttgcaaggcatctgcagaactagccctgtggttgatgaacagcgaagtcttgaagagtggccggtttgtcactgtgcatgaccatttcttggaacttggagccttaaggatcggagccagttttctgcaaagattttttacagttcagccgagatgtctttctgcccaaaccaacctgggtgaaaccacacaccatcttcagggatgctggcatgccgtacaaggttatcggtattatgacccccagactgcggtttgacttcacaggcgctgtgaggttttccaaatccgagccaggtctctctgtgccgga

SEQ ID NO: 728178 - DNA, 147 bp, Homo sapiens
tcatcgaagcactgtctcagagtctcagtgggatcaccttcatttgctggaaccagcagcctcctcctctgagacctttcagcttctgccggttccagcagtatgctctgcactccccgggggtacaacatgtagacaccgtgttgg

SEQ ID NO: 728179 - DNA, 349 bp, Homo sapiens
gttcttgtcacactggtccttcatacgcaggctgcccgtggagttgtggcggatctcccggcacacagggcggtcattttcaacttcttgtatgaatctctgttggcgggtgctggaaggccgggctatggaagaggatgtccatggcctgctgagcctcgtgtatcatctcaaggaagggctggaacatggcgtggaagttcaagggctcttacggagagaaaggcatcaagctgcggacgatgcgggacttgggaaaaaagaattgaggccttctggtggggcagctgcaaggccgtaatggtaggtattctggggctccctcggtgaagaaccagttccgaaaaac

SEQ ID NO: 728180 - DNA, 509 bp, Homo sapiens
  misc_feature (430)..(430): n is a, c, g, or t
  misc_feature (466)..(466): n is a, c, g, or t
  misc_feature (499)..(499): n is a, c, g, or t
acccggacgcatccttccaacatagcactctgacatgtgcagtactcgtctccttcgtacgatatcttctcgttccgtttgagctctcagaggatctgttcttcccgttcgaggaatgaattcaggagtcaagaacctgcgttccggttccacggggcggcgcgtgtccacgatgcccggtttcggcggcgggtggagcgctccgggctcggaaggcccagtgctctgcggcgggacaggccccgcgtggaccctgcaggcgatagaggccgccgggggcagcagagtcctggcggcttggaaaccccggcctaggcccattccagcccagtgcgccgctccaatgcaggccgccatgccagctcgtgtcgaattcctgcagtcgggggcctccgctagttctagagcggccgcccctccggtggagctnctaagggtcttccaaatctcggcggcgcgcctcctnccgctccgaccgcgctccgcgaacatcccgcgngcgcgctccg

SEQ ID NO: 728181 - DNA, 1377 bp, Homo sapiens
  misc_feature (572)..(572): n is a, c, g, or t
taggaaaagaacaaaaaaaaaaaaaactccatggcttttattagagtttggaatactggtgaaatttttcaaaagaaaagtaattggattcaccatttttggctggcttaattaacgatggagctggtggtccattaagctggtgtcaccccaactctggcatttccagaatagtccctaacccaattggcagcggggcatgtttttggagtgtgggtgtggcattctccatgttgtgcttgtgaatttggctccttagaaactgtggcaacgagggcctgtgcccttacctgtgcagcccctgtgggttgtggtggccctgtgttggcgttcaccaatgtggtgatttgtggcgacacccccggcgttctctataggggccatatattataattctcagcgccagagaaccttggagacacccttggaccacaagggcgcaggaaagcgcaattcaattcagagagcgcatataagagcgcttagacagagaacacgattgtgatgtggaccagcggggacaccccaccagaggggcccttctccgagaatctctgtggaagagtggccanacacagaggtgaacacgagagagagccttctccaaaggggccatctcagaaagagggtgtggtggggagagacgcaatgcacaacagagttcactctccaagaaaggagagtgtgagagagacagcggttgtggagacgccctgtgcctgtggggacgaagacgcagagggcctctgtgggccccaaaagtgcggcctaagtgtgtcaccgtgggggaaaatatcccggtgtggcaagacaaaggccccttccctagtgtggtgtctccccagcgttttggtgcgtttccccccgcaaaatatttaagcgaggaatcttcctcttgtgaactctttggagagcaccccaagtcttgtgaaaggtggggaggctccctacttaagctctacttttttacctaaatgcggggggggctttgtgggggcccactctgttggggcctgtacggataatcctcgttaggggcgccaaaagtgtttcctgggacaaccttttggatattgtggtcttttgaaaccaccctcgttgtgttcccaaaaacggttgtggtgtgggtcccctcccggtggtgagccctccttaaagagaaatggggggggttcgaaaacaagtgtccgagaaatgacccatatcacaataaagagtcactcacaaggggagagaattttaaaaccccgggggggaaatataaaaaggcgcataaccgagaaataataatgtggggccccccttttaaagtgggagaccccacaaccaaaaattgtggggggggcgcaaataaaaatatggagggtgagaaaatcc

SEQ ID NO: 728182 - DNA, 818 bp, Homo sapiens
ggtaggtcatagttccttatacacagacacctgcatcatcgaaggtctttttttcctaaaaaaaaaaaatgggatttagtcttatctgtgataatatcctcctcatataatactattcttttggacaccattggaaggaaccaatattgggaccttatttggaggtttgtctgtctcgaagaaaaagaaaataacaatgtataggcagggttccttcaatgtggcattttccccagaatttgtgagccaaagcctatagtaatgtgcagacagcaaatgattccaggatctctaaaaaggtctctcagatgaaaagggagtaaccgggaaaaaaacgaggtcaaccactgtgttctgataatgtacttgagttccatgtgtgctttagtgtgatcttataacaaaatgtttacactctgcagatggatttttttttaaagaacatggggttcactttccctatttttttgaacacaactgataatctttgggtcaacatgtgtcgtgggaatataacccctttattttttaaggaaaaccttgaagtgtgtgtaatagggaagtataacattcaggttaatcgcatctggggacgagcaattcaggcactacttatataagtaatcgggggggacactaatttaatgcaatgacccttttaaacccttgtgatttggttatttccccactagaagggaagggatcattcactgaagtattttaataggcaatttttgtataacaggaacctcggggtggggtgacaagcactattatttcgaactgtggcaaaaaatggcccttgggaagtggtttcc

SEQ ID NO: 728183 - DNA, 428 bp, Homo sapiens
gcgtattcccttgggccctaagttctcatctagactagacgaagcacctttacccagtgcacctggtggctgctgcaaatggactatggcagcttctagtatctgctcctcaaagttcaaggactcatctgcctcctatgggtttggcccggggctatcagctgctctagctttttggctgcagcctcaatggcggctgcaagctcccaggagctcatactacagcaataactagtaggtgttctctgggtctacccatatctgtacccttacaataggcttcagcagcctggatgagctcagtgacggaaccagccacacgcttagaatgtcctgtcaactgctagtacagttactagggctatggcttactagcagggtccagcagtacatggtccagcaattccaggtagccattgcactccgga

SEQ ID NO: 728184 - DNA, 382 bp, Homo sapiens
gttccccctgtttttgggatgtggccctttaactgggggggctccttgggtggattaaaaaactggcccagctgcaagccccttagtttcctgcgagggtgcccaaaatggagcttggccttagggggtttttcaaccctggcccccccagtccccaaaggcccccaggagcccttccttttattggaccgggtggggggtggtgggaggggcccccctaatttagctttttttgcccttttttttttttttaaattccaggttattggagggggccccccctttgcccaaatggttttatgctccttttaacaggaaaccagggttttggggggcaatttttttttttactttttttaaataaaaagtttcccccccccca

SEQ ID NO: 728185 - DNA, 417 bp, Homo sapiens
gtgttctcccggacgagggatctgatgcgggccggggtgttgaaagagaagccactgtggtatgacatatataaggcctttccacccctgagagagcctgtcttccgaagccccgcttgcgatacggcaaagcaaagctgacatccaggacatcttttaccaggaggatcagattcgagcgaaattctttgcaacctatggatctggtcagaaagcttttgatctcttcaacccaaacttcaagtctacctgtcagcggtttgtggagaagtacacagagcttcagaatcttggagaaacagatgaagagaagttatttgtagaaacggggaaggctctgttgggcaagaaggcatcattttaaagaagagttcgagaagccaaggactgtcagcgtgagactccaagcttcatcag

SEQ ID NO: 728186 - DNA, 680 bp, Homo sapiens
  misc_feature (245)..(245): n is a, c, g, or t
ctccaaactgcatgggcagaccgggcacgcaattttgtccacttctcagcgcaaacggaaacctgtgaagaaccgcttacatacgggggcctggaaccagtattggttgtgcatcaattcaacgccattatgtgccaaagtctccaagtggtcaacatattcattggtgacaagggcaacagcttcagaacctgggaaagtgaatataacaagtgttcacacagatgtactaaacagaacgttcncggtcgatgcagaactatgcgcactttggcacatgcagagcagttcattaaccaggtggcacttgttcagctggtgcaactcaagctggagacgacaatggcgcaattaggacctgttaggaatcacgttggagctctagtaaaaaagtctctatggacttaatctcagtagacaggctctcaataggagaggaacaacttcgctgcttcaaggcagccagcctgggtgtaaacgcttcacagttcgaagcataacagcttgccttgtttataggacttaatctgtgcagatcgatagcgtattcttctgattgtacaatgggctggtgtagatccaacttccttgtaagagcaacataacttcctgtaaccatcccgcctcagtttttatgcggatcattaaataacaactggcatgtctctaaaccttttgtt

SEQ ID NO: 728187 - DNA, 705 bp, Homo sapiens
cataatgtgagcatccagtgttagtattgcactacatctcagttggtgggtgttaagctagaatgggctgtgtgataggaaacaaatgcctatcagatgtgcctaggtgttctgtttacatagtgtcttactctgttatctggatctgaagactagtaataaactaggacactaactgggttccatgtgattgccctctcatatgatcttctaagttgatttttttcctcccaagtcttttttagagaaagtatactgtattttaccaaccccctctcttttctaatagatcctctgtggtgaattaaacgtacttgagttaaaatatctcgatttttttttttttttaatggaaagtcctgcataacaacactgggccttcttaactaaaatgctcaccacttagcctgtttttttatcccttttttaaaatgacagatgattttgttcaggaattttgctgtttttcctaagggctaataccttgcctcttattcctgctacagcagggtggtaatattggcattctgattaaatcgtgtgccttaacaaactgggagtttaaaaatgcccaagtccttacaatgatgaaggaattcatttatttagaaggtctttttcttagaaagccaaaatgtttgtttttttaagattctgaaatgtgttgtgccaccaatgacctatttatgataataaatctttttt

SEQ ID NO: 728188 - DNA, 665 bp, Homo sapiens
  misc_feature (25)..(25): n is a, c, g, or t
  misc_feature (88)..(88): n is a, c, g, or t
  misc_feature (162)..(162): n is a, c, g, or t
  misc_feature (164)..(166): n is a, c, g, or t
  misc_feature (199)..(199): n is a, c, g, or t
  misc_feature (264)..(264): n is a, c, g, or t
  misc_feature (269)..(269): n is a, c, g, or t
  misc_feature (304)..(304): n is a, c, g, or t
  misc_feature (320)..(320): n is a, c, g, or t
  misc_feature (442)..(442): n is a, c, g, or t
  misc_feature (470)..(470): n is a, c, g, or t
  misc_feature (477)..(477): n is a, c, g, or t
  misc_feature (479)..(479): n is a, c, g, or t
  misc_feature (543)..(543): n is a, c, g, or t
  misc_feature (556)..(556): n is a, c, g, or t
  misc_feature (592)..(592): n is a, c, g, or t
  misc_feature (659)..(659): n is a, c, g, or t
ggggcgacggcccggcgcagaggcnccgggagcgaggaacgcgttcaccaagcgggagggcggcaaggaagaagcggcggaacagcgncagcagcgggaagggcagggaacggggaaagcccagcccgcgccggggcaagcggcgggggcgggcggcgcggngnnnagccggggcgggaaggggggggcacggcggcgngggggggcgaaggagaggcaggacccaagaaaaagggccccagcgcgcatgcgtgaaggaaacgncattnagcggccagcgggcgcggggcgaaagggcattagnaacggagagagaagtngccttattcagggggggaaaaagcccggccaagggaaggactcttcgacccaggaccggggggagggaggcccaacacagggcagcggggtcgggaggataaacacaatctctgatcaagtncggggaggcggagtgtctgtacggcctngtccttntnctccctgatgcaaagtgagcttcctcagccgtgctgccttctcacacagaagcattcacctgtnatgggcctgagtnacctatcacatccccaaaaccaccaccttcctagtncttctccacaacgccaagaactcacttactcaccagattggtgaaatagtagccatcctctccagtnatcagt

SEQ ID NO: 728189 - DNA, 322 bp, Homo sapiens
cgtctcgatcatcctgaatctcaagatgatccacctgcctcagactcccaacagtgtatcggattacaatctatgcaccctctagcctggccattgctgattctttgttttgttttgtcgtgttgtttgcgacccagtcttgctctgtcgcccaggctgtcagtgcagtggcgcaatctcggctcactgcatgtccacctcctgaattcacaccattctcttgcctcagcctccccagtagctcggactactggcctccgccaccatgcctggctagttttttgtattttttagtagagacggggtttcaccatgttggcca

SEQ ID NO: 728190 - DNA, 755 bp, Homo sapiens
agcggatcggagtgatccaggcgatgcgaagtcccgggcgctaggcgaacttcgcaaccggttcttggctcctctcctctaggccgcgcttggggtctctcatctctatcgtcgttcgccaaggtgttggacggagaaggccagcagtccttcagggaagatgggaggcgaggagaagccgattggtgctggtgaacgacgaagcaaaatggaacggaggcaaataagaagaacaaagaaggactctggcagatggaggtcgagctgagttgaatcctgtgggctgaatatatttacacacgtcttgagatgtataagtatactaaaagcagaagcatgattccatatctggcacgcaaaaggcagagccaagatagcaagccaattaaacgtcacttagcctgatggtcaacaggtagatgcggaatcttggaaaactacaccatatcaacattgcctgtggaattagtcaaggcctggccgacaacgcaccgcttacttgcctaagaggtacactaactgttcgtgctgaggacccttgggaacagaccgtctgggaacagaccggcaattggtaccgttgggagaccttcttcaagactttgacgggaatgagcgacaagcttcagagccggtgctcacttagggcacctctaacattgccttcagcatacatggcctgaaagccaatgagagaaggagtcctaatgggtggcactgtctcaatgactacgggacccggcgaaataacaaac

SEQ ID NO: 728191 - DNA, 390 bp, Homo sapiens
atctattgaacctgcaagcactaccaaccactgtgacctacaagaatgatgattctaaaaagttttcctgaagaaatgaaaaagtattattgcagtcccttttcctttaatgatgttctttcacccttttctgtttgctaagtgaggatgaaaaaattacactgttctgcaataaggggagagtaaaccctgttctaatgaagcctgtgtctcatgagagtagagtcactggaacactaatgaggaaactgcactgttttattttaattcagttgttattgtgtcttaatgtgtgcaattttttttcttactaatatccatggtttgcaggttctgttaggccctttccttctccttacttattatccccaattctctaaccagtcctct

SEQ ID NO: 728192 - DNA, 282 bp, Homo sapiens
  misc_feature (34)..(34): n is a, c, g, or t
  misc_feature (65)..(65): n is a, c, g, or t
  misc_feature (113)..(113): n is a, c, g, or t
acagaagtaggtccagaatgtggataaaacaaancttcatggtgaaggagcacatttgtacccanggtaaggaagctaagaatcataaaacaatacaggagctgaagacaaanatagccagtatagagaggaacataatcgacctgacagagttaaaaaaattcactacgaggacttcacaatacaatcacaagtattaataccagaatagaccaaacaagaaaaaatctcagagcttgaagactgtctttctgaaataagagaggcagacaaaaaatagag

SEQ ID NO: 728193 - DNA, 156 bp, Homo sapiens
agaggcaacagaaattcaaaagcactttctttttcttctgtcagattccttagcagtaagatccatcttcgtcacgtgagaaatcattaatagggagaccttcaagcaatacttccaggtcttattcttgattacaacagggaatgagtagatgga

SEQ ID NO: 728194 - DNA, 812 bp, Homo sapiens
ggctcctcgtgagcaagcttggagggagacgggggaacagtgacagggactctgcaagagcatggtggatcctgctggtgaggggaaggaggtcctgtgtgagttctgccttgatgacaccagaagagtgaaggcgagtgaagtcctgtactaacctgcatggtgaattactgtgaaggagcacttgcagcgcgatcaggtagaagatcaaactgcaaagccactgctgaccgagccagtgaaggaccacaacgtggcgatactgcccttgcaccaccacagcccacttgtcctgccttcgttgctgccctgatcgagcagtgcatctagccaggacttgtgccaggagcacagtggccacaccatagtctccctggatgcagcccgcaggccaaggaggctagaactccagtgcacgccagttagacttggacgcggaaactcagcgttgccttgacaaatgccatctccaggctccaggggtaaaccaacaagtctgttctgctagtccggtgtcagaggtcaaagcggtggctgaaattggcagctaggcggaaatcattgcggctgtgaggaaggccaggccaaatgtgatgctcctgcttacgagggagagcgagcaaggctgcgctcgagccaggccaagggtcccaaggccacctgggagaacaggcagtgccgagatgcacacgagcccgcagagctggagacgaaaggcggcaccagcaaatggcccccactggccggcgccaagttagaccggagacacacctcccagggcactcccgcacccaacccggcacccacctcac

SEQ ID NO: 728195 - DNA, 1117 bp, Homo sapiens
  misc_feature (73)..(73): n is a, c, g, or t
  misc_feature (98)..(98): n is a, c, g, or t
  misc_feature (180)..(181): n is a, c, g, or t
  misc_feature (230)..(230): n is a, c, g, or t
  misc_feature (323)..(323): n is a, c, g, or t
  misc_feature (355)..(355): n is a, c, g, or t
  misc_feature (376)..(376): n is a, c, g, or t
  misc_feature (394)..(394): n is a, c, g, or t
  misc_feature (429)..(430): n is a, c, g, or t
  misc_feature (465)..(465): n is a, c, g, or t
  misc_feature (518)..(518): n is a, c, g, or t
  misc_feature (523)..(524): n is a, c, g, or t
  misc_feature (536)..(536): n is a, c, g, or t
  misc_feature (542)..(542): n is a, c, g, or t
  misc_feature (577)..(578): n is a, c, g, or t
  misc_feature (651)..(652): n is a, c, g, or t
  misc_feature (746)..(746): n is a, c, g, or t
  misc_feature (789)..(789): n is a, c, g, or t
  misc_feature (851)..(851): n is a, c, g, or t
  misc_feature (1068)..(1068): n is a, c, g, or t
  misc_feature (1110)..(1110): n is a, c, g, or t
attgcctgatattgtaagctcccattgtttagcctaatacagtttctgtgcgaggtcccgtcccgccttttcnaggtaggcacttttaaatttgagcnaactgcgagaagagagtggtgtctcccaggcttcaatgattgcaaatatgtttgcccagaggttttgtgtgttgcttcagtnncagtcaggttcatcgaacacttgcatgaacggctagagctttatgcatntgtcatgcattctcaaactactttctgcattccatcatgctgactgacctgaccaggttgtctggaatacgaccagcactgtagtaagcagtngcacaagctcgaggtgtgcctgtgcatctcanaagtatgggacttcatcagtntcatatgtgcactcttcntacgcctgctacggtacattttagcatcacagaanncagggccagctaggtcatcttattttcacataganactgtagagctttttagtctctagagctttttcgtgcaaggtcacgcagctantatanngtagagcctganccggancctatgtttgttgaccagcactgggtccttctcannaatgccactagtatgtcagtagtgaagttgacttggcatgaatatgctgcttgattaaagcttagaagcctannagcttaaataccagtctatgaagcattttcatagcatagttacttatttagtaagtttgtttccggctgggctggatggctcaaacctacaacnccagaactttgggtggccaaggcagtaggatctcctgagaccnagagttcaagaccagcctgggcaacataatgagacccacatccctataaaaattagaattanaattaaaaattagctgggctgtatggcaagcacctgtggttccagctacttgagaggctgaggtgagaggattgcttgcaccctggagggcgaggccatggtgaaccgtgatcacaccactgcacaccagcctgagcgacagagcaagaccctatctctttaatttaattttacaatgacattaaattaggccgagcatggtggctcacgccttgtntgagaattatgtgcttgttcctcgtgccgaattcctgcagcncggggga

SEQ ID NO: 728196 - DNA, 304 bp, Homo sapiens
tcggcttctaccttgtctggagacaaggtcttactcgtgtcactctagcctggactgacagagtgagactccgtctgagaaaaaaaaaaattaacggggggtggtgacagacgcctgtaatcccagctacttgagaggctgaggcaggagaatcacttgaacctgggagatagaggttgcagtgagccaaaacgatgccacggcactccagccggggcaacagagcgagagtccatctcaacaacaacaacaacaaaatttagtcatagaacattttccaggtcaggaccgatgagaagagctg

SEQ ID NO: 728197 - DNA, 203 bp, Homo sapiens
gtcaaggctgcagtgagccaagatcacaccactgtactccaacctgggcaatagagcaagaccctatctcaaaaaaacagtagaaaatttaatctggctggatgcagtggttcatgcatgtatcagtacttaattcctttttctttctgtcttaaaaaaaaaaaggaaagaaaaagaaattatgtatatgaacacaccagcgg

SEQ ID NO: 728198 - DNA, 382 bp, Homo sapiens
aaatcaacccataacttagaaactgatgatattcatagattccagccattgtatagaagaacattgtgaaattccctgccctgctctgtttctctctgaccaccggtgcatgcagcccctgtcacgtaccgcctgcctgctcaaatcaatcacaaccctttcatgtgaaaaccttagcgttgtgagcccttaaaagggacagaaattgcgcactcggggagatcggattttaaggcagtagcttgccgatgctcccagctgaataaagcccttctacaactcggtgtctgagaggttttgtctgtggcttgtcctgctacaagctgagattgcatcacatacccctgcactccagctagggagacagagtgagaccctatcc

SEQ ID NO: 728199 - DNA, 227 bp, Homo sapiens
caccatagcattatcccagttcacacatcaccagtgtttcatcacacagtgccaatgtatcatttcccttccccgtgtgccatcatgttcccatcattccaagtcattgcagcaatgccccagtcaacttcactcatcagccagcattcaacttttacaacacactgcccccagcacatttgctacgcacatttcaggtaccttccacacatgttttcacacatgtg

SEQ ID NO: 728200 - DNA, 415 bp, Homo sapiens
  misc_feature (231)..(231): n is a, c, g, or t
tctagcggatcttatgcaggagagaactgtggcatctgcgtatggcattaacggatgcgccctgactgcaagtgccgggacgatgccgctgtgtggggcagtgctcccactgcttccacatgcattgcatcctcaagtggctgcacgcacagcaggtgcagcagcagtgccccatgtgccgccagggaatggcaagttcaacggagtgaggcccgacctggctctcgctgnaaggggcatcctgagactccttcctcatgctggcgccgatggctgttggggacagggcccctaagctgcaacaaggtgaaaacaagggctggaaggtgcgtttggttttgccatcactatgtttgacactttaatccaataagtgaaaattcattaaagtattcaaatcttggaacaaaggggt

SEQ ID NO: 728201 - DNA, 312 bp, Homo sapiens
atcctattgtagctgactgctattgtcaccagaagctcctgcggcacgctgatcataatttcagtgtctgcagaacttgagcaggtacctatattcatgacagatacagacatcccaatggcgggtcctggtgcagtctataacattaggttcccaatccagacttccatattctctcctgatactgaggagcggtgcttagatgtgagccatgaggctggtggacagttgcagggagagacaatatctaagaacattctaagttctgctcagtccatggagactgtcatccggagctgtctctgtactgtg

SEQ ID NO: 728202 - DNA, 389 bp, Homo sapiens
agtatcagtgtagctcctggggacttcatacggcataaagtcagtccattcccatgaagatacaggggcttcggaacgacggtcctactagttggcactagcaaacacgaggccaaaaccatgagaccagtacggggacgggggatgccataggaccagacgtcgctctgaaccgtgtagaccaccagtcaaagatgctctctctgtctagccccaaagagcctggtttgctcagtatcagtgtagctccggtgggacttcataggcatacagtcagtccatttccatgaagataaggggatcaggaaagaaggttctactagttgggcatagcaaacatgaggccaacacgcatgagaacagtaggggagggggatgcataggaccag

SEQ ID NO: 728203 - DNA, 214 bp, Homo sapiens
acgtggctcccttggcggcagaaccatgttggacttcgcgatctttgtccttacccttttgctggcgttggttggagccgtgctctacccctatccggctttcagacaagctgcagggatttcagggattactccccactgaagaaaatggacccttttgaaaccatgctgaagttattattaaggtatcaatctggtggtggcagtttgagtt

SEQ ID NO: 728204 - DNA, 750 bp, Homo sapiens
  misc_feature (8)..(8): n is a, c, g, or t
  misc_feature (35)..(35): n is a, c, g, or t
  misc_feature (80)..(80): n is a, c, g, or t
  misc_feature (91)..(91): n is a, c, g, or t
  misc_feature (98)..(98): n is a, c, g, or t
  misc_feature (105)..(106): n is a, c, g, or t
  misc_feature (110)..(110): n is a, c, g, or t
  misc_feature (130)..(130): n is a, c, g, or t
  misc_feature (182)..(182): n is a, c, g, or t
  misc_feature (188)..(188): n is a, c, g, or t
  misc_feature (240)..(240): n is a, c, g, or t
aggttggnttttccacccttgttttggaaattttnccctccagttggtggtggatgccattttggttggcccttatggcnccaaatttggnttttccncaatggnncaanctggctttattcccccattnccctgaatcagggtttgctggtttggaacggattctggcaaaatgcctgtgntaaatnataaccaagcagtgacagcagcatgggaagcccagccgatattgactgaatncctgctttatgccaagttttatgttaaccctttccatgtattcattctcatgacaatcctatgatgggggttactatttttattctagaggtcatccaagtctgacaagacctcacaggctgttttgaaaggaaaatctgtagaaaagaggctatgatccctgcatttttctctgctctgctttctggctatcaaaatcaagactcttgaatgtgggttgccaagtgggcagtataaatgcatacagagctgccctaattgggtttctttgcacaggtgaggccagctgggatgcaggcccaggagctggctcagaaaactgcggatcccctgatcccaggtctcatacccaaaggaagagaaagttggggaaaggtcaaatggagggctgaacattggaggcatgcttattttctctcattaaagccattgtatttcattcatcagcccattcacttattcagcaaacccttagccctactataccaaacatttgctcgtgccgaattc

SEQ ID NO: 728205 - DNA, 234 bp, Homo sapiens
gcagattttggtttctaatacaatttttcaataaaaggaacaaggactccttggagaaatgagttgattactacaactagggcagaccataaggcaagttgaacatgaattcattatatagtaccaaaagtaaggaggtgttaaaataaataaataaggagttaaaaatctacaatgatgccaaaggacagaggagcaagtgccgagctctacgcccaaggaaggtatttcaca

SEQ ID NO: 728206 - DNA, 734 bp, Homo sapiens
  misc_feature (448)..(448): n is a, c, g, or t
aagttaaagaccagcgtggtcaacatagcgaaaccctgtctctacaaaaaatttgccaggcatagtagtgcatgcctgtaatccttgctactcggcaggctgaagcaggaggatcacatgaggctgtagtgagccatgatcacaccaccgtacttcagcctgggcacagagagagacccccgaactcttaaaaaaaaaaaaaaagtagctttgaaaagggaaaattgcgggccagtatcagtcttaattaatgatataaaaatccagaaacaaaacagacaagtgcaattccagttcagaaatcccaataggtagtgtttggggattatgggcttatatgattttgggaacttcacaagactgattctaaaggtttatacaagacttgcaaaagggcgcaagaagatcaaagagactcttaaagaacaataagacagggagggctaantctatatggcaagacttaataataagcaaagtataatactaaatgtaatttaagtcagggataaataaattcatgcatgtatgcttgaacctatgacacaggtagtatggctgaataagtaagagggggaaacgggaaatttacacggaaaatgggtcctgggaaagggaaatggtgttatcagtatagacaataagaaatatgccacggaataaagggtcccaatttggaaagggtttgaacaattgaattatatccagttcggagtcttggcgtgtacccagaa

SEQ ID NO: 728207 - DNA, 148 bp, Homo sapiens
tgattttatccaagaagttttttgggcgaaaatcatgctacataaaaatgatccaatgattttctgcccaaaaaacttcttggataaaatctaaaaaatactatttgcaatttgcgtctcttgaatgaacactcgtggtacctgagct

SEQ ID NO: 728208 - DNA, 1158 bp, Homo sapiens
aatcaacagagctcccggttaccggatatagcgtggaagtgattgaatcaggagattgaaataagtcattaaagagactagggagaaaagtgaagatcaactatataccgcaagatattccagatgtggcatcgtgctccaccacccaccttgtacagagaagtagcagcacgcgcagcattgacacacagacgcctgagtggggcagacaaggggaagcaacaacagcagccgtacgccagatccgtgatccccaacatcgaacctcaccatataccaatgaaggtagcgaggagagtccttgctcagcggatgaccagccttgtagaatcccagagataaagagcaatgggaacaacatatctccatttgccacaaatatgcaacaaatcaaacaaaacctaacaacagactatatgttcaaaagggaacctcctgagggctgtagaacagggtcacaagatctttgcaggaatgctcgccaaaaacaaggcttcatgaaatcccagaattataaatatgtcctgaccaacaaaaccaaggaggaaaaacaaaacactaaaaagtggcaatacagcataacaagcactccgacaaagcaatcacatccaaagcacaatcacatataacaaaaaccacaggaatcaaccacatcaaagagaaccaagaggaccacagagaaggagcagaacagaccaaatgagcacattggaacaaaaccactaccagcaagacagacataaacgaaaagaggagacatccccagtcaaaccaaaacacaagagacacagaccgcaaaacactcagaacaaaacacgaacaaggacacagccaaacagacaacacaaacatacacaaacacagccagaagcacaacgaaaggaaagcagcaggcataaggaaaacaaggacaacggagaccgaggacagggcaaaaaagagaacacaaccaagaaaacagacaaaaacaggagaaagagagagacaccgacaacgaaggaaccgcacaaaccagcacgaaaaacaagagagaagaaaggaaaaaaagaaacacaaaaaaacgaaagaagaaaaaagaacacacaaaaaaacgaaaaaaaaccagaagagaagaagaaaggaagacaaaacaccaccaaaaaaaaacgaaacaaaaac

SEQ ID NO: 728209 - DNA, 319 bp, Homo sapiens
gacagccgttacagcatgtaacaaacattttcaaagcagaatatctggcctcagcattgtttttcagaaaataagactggtctgttagcatgtttctgaaattcccgccaacatatggtatttataagtatattaagtattagaagagtcaaaaacggacatacagcccctttaaacgtacatgatgggcaaagtcttgtcagtttgagggtcccggactgtgtatttgtctacagtattaacattaactcatgaatattcctgttttgctgaaatggtattaatcaaccctgcgaaaataaaaacccatccaatgtga

SEQ ID NO: 728210 - DNA, 211 bp, Homo sapiens
atctacggatccttacagacagaaaaagaggcctctaagtggctaggtcttcagggctggtgccagaagaaaaaccgagttgtagaaagacctggggagtaggctcagagaatgtcctgaagatggggagatcaccccaggaagccttggcacaagggattggtaaggtaaggacactataaagagttaggcagagacaaagatcatataa

SEQ ID NO: 728211 - DNA, 101 bp, Homo sapiens
gtacacattgctaatataatgacttgttcgacgacacctattatttctcttctggcttaacatgaagagcaaagagaaataatggtggcattcgatgaaca

SEQ ID NO: 728212 - DNA, 389 bp, Homo sapiens
cagaacactttttttttcaagtccaaaacacaaatttctctttttttttaacagaccggattatttttactgcctgaatttttagggttttttttttcacaagtccggtttattactaaacttttgggtaagttaccttccctccccctcctgtttggattttatagccctttgtaattgagttttatgcttaaaattccaattaggcttaatacatatttgtgagtttcatctttacccgatactgaaatttcatgccttgctttgtgcatgtggcaccccatgtaagatgggccatttgtgctctggatgtcttttcttgacttttttttaaacttaatatttttttttttttttataaggggggttttactttttttgccccagtt

SEQ ID NO: 728213 - DNA, 210 bp, Homo sapiens
ggccccccccccgccccccgagggggtttgggccaagagggttggctttgggggggctggggccttttttgggggcccttgcccccccccccccgcccccaaaaagggcccttgggggggaaccaaacctttttccgggggggggccaaggggcccccccccagggggggggttttttaaaaaaaattttttttaattaaccccacccca

SEQ ID NO: 728214 - DNA, 127 bp, Homo sapiens
taaagcactgaccgcgctgataagttttgtttatcgagagactgtttgggatactccagaaaggtttgcaagcgccagcaccattgcgacgtagcatcggcccgtggccgtagacggggcacaggtg

SEQ ID NO: 728215 - DNA, 115 bp, Homo sapiens
ttctcctgcaccttttggagaacccactctggtggcccagaggagtcatcgggctgtccctgaagagcacctgtcacaacaggaaatgcagacgtgggagtcactattgttacca

SEQ ID NO: 728216 - DNA, 386 bp, Homo sapiens
catatatgttttaccagcagtatgaagaattgagaagatcgagatacttatctagacgcaagtacgttagctagagaccttctacgggccatggcaaatagatacttaagaagagcattctacactccaaggtacagtgtaaaaagagaaaatagctctcttgtatcttatgacttgtatcagtaatttaaaagtgtgacaaaaaaaaaatatttccacacctcacatccactgtattattcgactcatggtcaaagacttcaaatgcctctttgatttttttgcttgtgccgctgcagcgaaccaagcaattgggaccacttaagcaattgggaccaccatgcctgggcttggacagcctctaagatggacagggatctcataag

SEQ ID NO: 728217 - DNA, 190 bp, Homo sapiens
aaccttgaaaaatcaagatgtgaccctactgaatgaacaaattaaatctcaactaattgacaataaagaaatacaggtttctggctgggtgcggtggtcacgcttgtaatcacagcactttgagaggccgaggtaggcagatcatttgaggccaggagttcaaaatcagtttgccaacatggtgaaatac

SEQ ID NO: 728218 - DNA, 519 bp, Homo sapiens
agataggcttctctggccgtctaggtaaagagtcagtggatcaggctcctgagacgtcgccagggccttcagtaaacagacggactatgttagaagtgaagtagtacaacgtgctgatggctggaaagatgtagtacctttgtgattcctgataaggaacaatgccgtgctgactggctaaggggaggtttgccagccctgcagccattgactgccacatcagcaggattggaaagataccttgaaaagcttagcagtgccggatacaggataaatacaactcacagggccttacataagtgtcactgaaaataaacaacatagagttattttcctgaaacttggttttggtagaaaggtacgaaaataacttttcattgtccacaaaaacttcctcctcttgactttgtctaccctgagccttcttagcccctggaattgtaatggctaggtcagcacagcccagtgccaatgccagccaacaccagcctgcacggacagcttctcttcaccctgttt

SEQ ID NO: 728219 - DNA, 189 bp, Homo sapiens
caaatatgtggactcaatgcgggacacgcctgtggatacattttggaacattatcctgggtggtctggtgctagatgttcaagtgaaacagaaagccaggaaggatctgtgctatattccatcagttctagcaatttactatcacttagaaatttaacaacaccaatacatgtttgtatatcctaccag

SEQ ID NO: 728220 - DNA, 445 bp, Homo sapiens
  misc_feature (11)..(11): n is a, c, g, or t
  misc_feature (105)..(105): n is a, c, g, or t
  misc_feature (289)..(289): n is a, c, g, or t
attaaggaggntaggcctgggccattggtggcttcatgccttgtaatcccgagcacttttaggaaggccaaaggccaggttagatttgcttgtgcccagcagttnaagaccaagccttggggcaactggcaaaaccttgtctctacaaaaaaacaacagaaacaaaaaattagccaggagtggtggtgcatgtctgtagtcccagctactctggtggctgaggtgggaggatcacttgagctcaagggtttgagatcagcctgggcgacatggttgaaactctgctccnagaaaaattagccagtgtgagcctctggtcccagttgcttgggaggctgaggtgggaggattgcccttgagcccagcaggtggaggttgcaatgagctgtgatcacaccactgcaatccagcctcggcgacaaagtaagagcctgtctcaaaaaaa

SEQ ID NO: 728221 - DNA, 679 bp, Homo sapiens
  misc_feature (153)..(153): n is a, c, g, or t
  misc_feature (519)..(519): n is a, c, g, or t
  misc_feature (582)..(582): n is a, c, g, or t
  misc_feature (620)..(620): n is a, c, g, or t
  misc_feature (651)..(651): n is a, c, g, or t
gacgcatttatacaaccagagcaggggcggctcctgaggcgttatcctaacctttacgaaaccgtgtctcttgtttacctatgagatagatagaccttaatacaactactcaaaaaatatggtccgtagatgacttacacactgcctcccggntaacttttaacaaagcttttataggttaagggcctgagaaacatattgaggaattagactcatagcatcttgaacgaaatcttagagtttttctaaaacatgaacgacgtatgaatgaaggttctataaaaagaaaaaacgtatgaacgacgaaattgaagactccactctaccgtattcctgttaaatccccctagaaggccttcgagtttttgttaaaatggaagcgacctaaactgcttgcctcttaaaccaacagttgcacgaaaatgcaattttttctaaggccactttttctaaagtaaataaatcgggaggttcttaaaggatctttgattcctataacgcaagcacgaatagcggcgnttaaaggaataaataaacgcctttactgaaatgcttccctatataaaaaaacactaattttgnaatacgttggataataacactgtatggagaatttccgnccctcccaaaattgaaaacagcgccgcgcgnagatgtgccgatatatcataaaaaacca

SEQ ID NO: 728222 - DNA, 384 bp, Homo sapiens
  misc_feature (53)..(53): n is a, c, g, or t
  misc_feature (166)..(166): n is a, c, g, or t
  misc_feature (217)..(217): n is a, c, g, or t
  misc_feature (227)..(227): n is a, c, g, or t
  misc_feature (236)..(236): n is a, c, g, or t
  misc_feature (238)..(238): n is a, c, g, or t
  misc_feature (242)..(242): n is a, c, g, or t
  misc_feature (245)..(245): n is a, c, g, or t
  misc_feature (248)..(249): n is a, c, g, or t
  misc_feature (251)..(251): n is a, c, g, or t
  misc_feature (255)..(255): n is a, c, g, or t
  misc_feature (276)..(276): n is a, c, g, or t
actcgacctggggaaacggcccaccaaggacagctacacgctgacggaggagntagctgagtatgctgaaatccgggtcaagtgaaggagctgggggcagcctgcgtggctgacccccctcaggaccctcgctggcccccactggctgtgggctcccttcctcccnaaagtatcgggggctggggcaggaggggagtgaggcaggtgacagtgaggncctggggctnacctccccntncttnccngtnncncctncgtgccagcacccccacgccntcatcggctcctctctaacctcctttaccctcatctgtctggaggggagctctgtctgtccgtgttattattgctacttcctgcataatctcctggccccacacctgg

SEQ ID NO: 728223 - DNA, 528 bp, Homo sapiens
ccacgcgtcggtcttgctctgtcgcccagactagagtgcggtggtgcgatctcagctcactgcaacctctgcctcctggattcaagcaattctcctgcctcagcctcccagtgtataggatgtacaggatgaaaagatcccaagtgaggaccccaatcaggaggctgataaggaatgttaatctggattgggaagattccatggcactaggctgtaccacagtcatagaaagaggaactttaagaagactaaagagagcaacactgaacactttcctggacagtcctgtacatgttttattggtgatgcccaagcttatccctgaacactgggaaaagtgggaagatgtcaagagataaaagacagaggatgacagatctgagagggaccgagtgactaactttcctctgcaagctcaaagcaagaagttgactgctttttcatttgaactctgccccagcatcaacaaatcaccactctgggtttatgcaacttgtttcctaattgaataaaataagcctgaatatg

SEQ ID NO: 728224 - DNA, 117 bp, Homo sapiens
taggggccaggggcccttcccagaaaaacaggtgggttcctgtaacctgttccccatccccagggcctttgtggactaaccaaggctgtgagggccaaaataaacaactgctcccca

SEQ ID NO: 728225 - DNA, 132 bp, Homo sapiens
gacttggtgcggtgtcccgagagttaccttgatcctgctctgggttcttcttttctgcatgtgcgtgattgttcacctccttgtccaaatatgtacttctgtaagagaagaactgtcatttgctcgctcatt

SEQ ID NO: 728226 - DNA, 176 bp, Homo sapiens
tttacaagggcctttttttttcccctgaagaacataaacgggttttttcccttttccaaacccgccagaaattttttagggccagaaaaattcccttgaaaaattgggggggaacatggggaaggggaaatgtttttcatgggttttaccaatgggaaaaaaaatttaattttgga

SEQ ID NO: 728227 - DNA, 229 bp, Homo sapiens
tctgagtcgtctggggatcccagtcatccgtgcgtccacgtcgaccgtgcggcctggccatctgtgcggccacgtcgtccatgcatccacgtagtccgtgcgtccacgtcatctgttgcgccacgtgatctgtgcgtccgcgtcgtctgtgcgtccgcgtcgtgctgaggaccgcgcatctgagtcatctgtggatgagccatccgtgtgtctacgtagtccgagcatg

SEQ ID NO: 728228 - DNA, 1194 bp, Homo sapiens
  misc_feature (206)..(206): n is a, c, g, or t
  misc_feature (1194)..(1194): n is a, c, g, or t
agcgggcacgccactgcttacactgaacgagggaggacgggagaggagtgtgtgtgtgtgtgtgtgtgtgtgtgtgtgtgtatgtatgtgtgtgcgctatctcatggccctgtccgcgtcgtgtgggtgataggacacggggaggaggagctatgctatggacgacggcttgcgaacgacgctggacaagagctacaagaccatantcggcgccgtggaacgtcgccgagaatgagtaagatgcgtgaccaatgacacggagagggggttcgcctcgacggcaagcctccgctaatgtcccatgaacattcgtctcctggtcgtgtggtacgtaggcgtacatacgcgacatatggccaccgctaggacagagaagctagtagccgagacatactaatcgttcagactactttctccctaagcaaactagtctgtggtactctgacgtgtggtcgaacttggagacgttagtgaagcaggccgagtgccctcgagggatgttactctgcggctctcgagactcccgagagctggacattagctgtggcgagcgaacaagtacgttggcagagcttaacgatatgccctcactaccatatgtcaatccaaccatcgatcggctcgacaatagcccacatcgataacgagagtggccctgcgcacgaatgggggaacgcaagccacagagggagaggagagagaagcgaaaggcaccacaagagtcttatagcgacccaacccaagacaagatcgacggctcaccgcgcacgcctcgaagagcaccgccacggtacatcattaccaaccggaaaggaggggaactccgcgcccccctggacacacagcgactcgggtgtgacgaagcaaactcaattaaaacaagaaatagaccaaagctaacggcgtacgataggcagggagacggaacgcaaagatccaagaaagcctatagcgataaagtcacgcgcgaaaacggaagcgctatcgccgcacccaaacgtgcagggcggccaatatcaggccgtcgacacgacccacccatagacgaacacacgccacacagccggaaaacgacaaccaacttggcacacccgtaggtgcaaccgagaacgaggagggaggttcagcaccgcgcaccgggcgccagcccacacccactgcctggcacattaagggcgagtcgacatccacccn

SEQ ID NO: 728229 - DNA, 407 bp, Homo sapiens
agatgatccgagatcagatacatttttaatattttttaaagaagaacaagtacctaccctgtgacttgcatctttcacagtacaaatgacttgtatggatcctactcaaaagatgatttataatacacctatcggattttgacagcgctgctctcactgcaagattccattaactctggagattatgactattgcactaaatgcagtactcatgacgaactgaactgttcatgattatcactcaaaacaagagaacagaatggattgaactaatagaaaacaagtattatttttaaccttgttgcttgaaactgtggaagatccttgctttgatattctgagtcaaggatgcttattttgaactatttaaagcctttaataattgagtaaactatatgcctgtgaac

SEQ ID NO: 728230 - DNA, 1309 bp, Homo sapiens
cacgaggatttctagtagagacagtgtttctccatgtacggtcaggctggtctcaaactcctaacctcaggtgatccgcctgcctcagcctcccaaattgttgggattgtgagtgcatcgccccacagcctatccaacatctttttaaacatcatttccatgctcagtgcatgctagttcctatttcatttgtaatagctgcttagtatttgcattatatgcttgctaccataatgtattctgatccatttgcctcccagagctttctcactcacacactactgcacatcaataactatcgctctatatattgctgcctttccatatcaactgcttctctacacttcccagggctgatccactctacagtactcaacctgcatcaccataacattctcacgctctcacactctacttctggccctgttgcgctcccagctctcacagatcacaatcttctgtcacaagcaccctatgactcaacaaacttcactttgacacacatttactacaaggccccatctcgtcctacatgagctctaatatccaccatgtgtactcactaacagcctgctccatgccccctcaacctcttaacaccaatgactaactcagttcacataccatatatcagggctactcagctggtacccttctcaactccatggccattctgtcaaatccacacataccatttgcatccaaccaacacattatctcatccaaccctgactacactgtcggcccccttgcatacacgtctgagctcaattcggctagacccgcactcccttaccaccccacttgtactaacactactatcctcaggcgctacacaacgccgctgcgcagaaccccccaccaccagcgccacaccttccaaccaaacacacccaagacccaacgtatccagaccacccccacaccctcaccacactaacgacccaccactctcgccgccgcactccccacaccgcacagccacacacacgcaagaccatacaaccagcctcgcaacccccaccaccacaccacaccccggcgccacaccacctaccacaacaagacagccagacccaagcacccaccccctcaacaccagacaggcggcgaaacctgcaagcacccaaccaccaagcaacagtcaaacaccgcaccgcccacaccaggcccaacacgagcgacaacagcaccgacaccgcctaccgtccctccatcaaagcagcgtgccacaaaacgcgacgaccaccgtttgcagacaaacagccgcatctcacaccaaccgacaccactgaccgaacaccacata

SEQ ID NO: 728231 - DNA, 82 bp, Homo sapiens
ggatttgctggtgcagtacaactaggcttaatagggacatggataaaggttggggaggttgtgcattccagaaaggaaaaaa

SEQ ID NO: 728232 - DNA, 351 bp, Homo sapiens
gaacaaaccctcccccacgcatggtcctgcattacccgggggtgtcccctgttagacacttcctctctcttaacaccctgcactgttgcagtactgacctacttgcagattcttgaatctgcaatactcccctctttgttgctttgtgcatggtgcaatctccgccgcaaacacctttctgttggttaacaccttttcagacctcaagactcagtcaagatgtaacttccagaaagccttgactcagcctacgactagttcagatcagtaacacttctctggttttctcttttctcacagctctctgtgagtacttgatcataatacttatcacataggattgtagctatt

SEQ ID NO: 728233 - DNA, 206 bp, Homo sapiens
ttctgagtctggggccctctacaatgagcacaagagctgtgcggcgaagtcagtgcagaacaccagcatccgcgtggcgggctttggcaatgccacatttgaccatgagcaccacgccaccattgtgggcgacccgtcactatcacccgcctgaggtgctccttgagctgtggctgggctcagcccattgccgtctggagcattgg

SEQ ID NO: 728234 - DNA, 712 bp, Homo sapiens
tctctctctctctctctctctctcgctctctctctgtatctgtacaagtacatatacactagaaacaacacaaaacaaaaagtaagcagagacgcaaaagtcgaagacacaggcacacacacacacacacacatatacgccacagcacactcaatagcactcccgggtatacaactaggaaaaaacacaagagagaaaaagatcgggatccatataccctacaaaatcaagcgcacaccatcacgcacatgagaatgtgagagagtcagagaaagagaaaaaacacgaggcggggcccgagaccgacatcgcgctatagagagagctataaaaagacagagagcgcagaactacacaaccgtgagtacgaaaacgccagcgagagacatcgcaaaagccccgaggaacataccgccatatagagagatagcgatagagatcacacgcacgcagatagccctgctcaacacgcgcgcacactcaatcgcgaaagcgaaagcgtgagcgccaatatagaggcaaaaatcgcgcgaaaataaggtggaaaaacatcatactatatccgccaaggtcaaaaaagcgagacacccatatatatatcgatacaagaccgcgcaaaagggttggagtatataaacactggaacacacgttcacaccgccggtccctagaccaggaacctcaaccccataaataaagcttcgggggggcg

SEQ ID NO: 728235 - DNA, 486 bp, Homo sapiens
agaggatcctccacgggcaggtgtactcgtgttcgtaattacaagtatgctccatgtctctatatattaggttgaccataggacattgcagtttttggttatcacatgattctgcctaagaaatagattgtggcccggcgcagtggctcacgcctgtggtcccagcactttgggaggccgaggcgggcggatcacagagtcaggggatggggaccatcctggccaacactgtgaagccccatttctgctgaaggtggaaaaagttagccaggcatggtggcatgcgcctgtagtcccagctactcgggaggctgagccaggagaatcgcttgagcctggaaggcggaggttgcagtgagctgagatcgtgccactgcactccagcctggatgacagagcaagaccccgtctcaaaaaaacgaaaaaaaaaaggaattagagtggtttcatttttttttaaatcagcagtacaacctgccggtgggg

SEQ ID NO: 728236 - DNA, 229 bp, Homo sapiens
  misc_feature (21)..(21): n is a, c, g, or t
  misc_feature (27)..(27): n is a, c, g, or t
  misc_feature (54)..(54): n is a, c, g, or t
  misc_feature (90)..(90): n is a, c, g, or t
  misc_feature (185)..(185): n is a, c, g, or t
  misc_feature (219)..(219): n is a, c, g, or t
tcacagggcggttttctgcanccaggnggccccagtgttggagcagtttcggcnccctgcagtacttgggcatggctatccagcccccgnctgagtttttcagggtcagcggctggcactttggttctccggagcgccacctaaccccgccccacccgggctcgccgcctgcctcacgtgacgtnccgtggagtctcgtcacgtatccggggagagagnctgagagcgt

SEQ ID NO: 728237 - DNA, 446 bp, Homo sapiens
cgtggggcctggaatgggcatctggctgcagatcagtcactgggagcattgcctggcggctgccgtccattggcaccgagaacaccgaggtagaatccggcgcttctaccgccagttgctgctgacggctgacgaccgcgtgaacccctgcattgggggtgtcatcctcttccatgagacagctctaccagaaggcggatgatgggcggtccttcccccaatgttatcaaatccaagggcggtgttgtgggcatcaaggtatacaagggcgtggtccccctggcagggacgatagtggcgagacttcctacccaaggtgttggatgggctgtcttatcgctgtgcccagtacatggaaggacggagcttgcttcgcccagtggcgttgtgtgctgaagattggggaacataccccctcagccctcgccatcatggaaaatgccaat

SEQ ID NO: 728238 - DNA, 397 bp, Homo sapiens
acagtgctgtctagtggtgggatacgcggtaggacagtcgaattacaccaatgatcaccgtcttggtgtgatattacactacagttttaaaaaatattaccacggggtaactgataaaagtatgcaagatgtttatctgtactgtttcttataatgacatgcaaatcaacctacagttcaatcagtatttcaaaaaccccaaaaccagcaaggcacagtagctcacaactgtaatctcagcacttggggaggccgagccgggtggatctccggaggttaggagtttgagaccagcctggccaacgtggcgaaaccccgactctactaaaaatatgaaacttagcctgtagtcccagctactcaggagactgaggcaggagaatggctggttccgctg

SEQ ID NO: 728239 - DNA, 744 bp, Homo sapiens
atacctaatgcgatacctgaacgaaaaatactagtgctatatacaactacgcaaaggcccaacgatgtaggcccctacgtggctactacaaccctatcgctgcactgccataaaactactatacaccaaagagcccctaaaacccgccacatactaccatacaccctactacatacacctgccccgaccttagctactacaccatacgctctatctaactatagaacccccctaccccatacccaaacccctgtgtacaacctcaacctaggcctcctatattatatctaagccacactactaagcctagcctgtaatactacaatcctactagatcagtggtgagcatacaaactacaaactaacagccctagatacggctgcactagcgaaccacgtagcccaaaacaatactacataatagaaatgacacccctagccaatcatatactatctatcaatcattactaataagtaggctccttataaaccactaccgcccttatcacaacaccaagaacaactcatgataactacctgccactcatgacccatgggcgcataaatatgatataatactccacacctagcagtagaccaaccgcaacccccctacgacctttgcacctgatgggtggagtccgaaactaggtctccagggcttacacaattcgcataacgccgcaggcccctaacgccctaaattctacacaagcgtatacaacacacaataatatagttaac

SEQ ID NO: 728240 - DNA, 771 bp, Homo sapiens
  misc_feature (30)..(30): n is a, c, g, or t
  misc_feature (139)..(139): n is a, c, g, or t
  misc_feature (141)..(141): n is a, c, g, or t
  misc_feature (375)..(375): n is a, c, g, or t
  misc_feature (409)..(409): n is a, c, g, or t
  misc_feature (457)..(457): n is a, c, g, or t
  misc_feature (461)..(462): n is a, c, g, or t
  misc_feature (479)..(479): n is a, c, g, or t
  misc_feature (484)..(484): n is a, c, g, or t
  misc_feature (488)..(488): n is a, c, g, or t
  misc_feature (490)..(490): n is a, c, g, or t
  misc_feature (492)..(492): n is a, c, g, or t
  misc_feature (525)..(525): n is a, c, g, or t
  misc_feature (557)..(557): n is a, c, g, or t
  misc_feature (565)..(565): n is a, c, g, or t
  misc_feature (568)..(568): n is a, c, g, or t
  misc_feature (577)..(578): n is a, c, g, or t
  misc_feature (580)..(581): n is a, c, g, or t
  misc_feature (584)..(584): n is a, c, g, or t
  misc_feature (593)..(593): n is a, c, g, or t
  misc_feature (596)..(597): n is a, c, g, or t
  misc_feature (602)..(602): n is a, c, g, or t
  misc_feature (604)..(604): n is a, c, g, or t
  misc_feature (619)..(619): n is a, c, g, or t
  misc_feature (621)..(621): n is a, c, g, or t
  misc_feature (623)..(623): n is a, c, g, or t
  misc_feature (625)..(626): n is a, c, g, or t
  misc_feature (629)..(629): n is a, c, g, or t
  misc_feature (634)..(634): n is a, c, g, or t
  misc_feature (639)..(639): n is a, c, g, or t
  misc_feature (656)..(656): n is a, c, g, or t
  misc_feature (662)..(662): n is a, c, g, or t
  misc_feature (696)..(696): n is a, c, g, or t
  misc_feature (771)..(771): n is a, c, g, or t
tggtgatatagttgtgaacaatagcttttncttcccctataaactcgagttataggaagcgtttcagagagaggataacacatttgaatctattttttaaaaatcatcctgaaagctagcagtattgttgtcgtttaanangttcctcatatactcttaccctcagccaacccaccatgtttatcaattcaaattctagaactttcttgacccaagagattttgtaggaaaaatttctcttttcagatattcagcacgcaaggatcatttttcttggttttgttgctgatcttgctgaactttccatcaatggctgagggaggaagcttgcatgattcttatgagttcttctgaggcactttgactgtgacagtnttcacttcagtgtatgcctgcagcccgtactcgnccaactcccggccactccccgacatcttgtagccaccaaagggtgacngggnnccaaacacatcatagcngttgncccncncngtgcccgcctggcggggctggggcgggtaattngccttgtccaaatcctttgtcaagacagctgnggacagcncgnacgtggaanngnnggntctcccaanaanntcctntntggtcttgaacttcncncncnncancactngcccnaacctctcctccttggngatggncatgccatcctgcacatctccaaacacagtgggntggatgaagtaaccacggtcagcagcaatgcccccaccacacagcagcttcgccccctcttgcttccccgtgttn

SEQ ID NO: 728241 - DNA, 1543 bp, Homo sapiens
  misc_feature (578)..(578): n is a, c, g, or t
  misc_feature (1302)..(1302): n is a, c, g, or t
tggtaaaaatggggtctctcactggcgttgcccaggctgctcgggaactccgggcctcaagtgctggggatccaggcgttgaccccccacgcccggcgtgagaagtgttcccttttctccgtgggaactgtgactcaacacaaaactcctgtggaggccgtgggtggtggggtggtgttccctctctgtggggcagaattcctcaacgtgggagacacatcttctctgtgcccccaaggggaacaccattttctcaacacatctccgtgaggaacatttctccggaggtgtgtctcatctcaccaggtgtgtgtgcaccccgcccgtgtgtgttgtgttcccctgtgcacacaccgcactactgtggccaccctctcgcgcggaatatagagacgccccgagggagagcgcgcgtgtctctcaactatctcgcgctggccagcggagagaagcgtgtcaccgcgctcccgaggcgatctccctataggagaacgaggctctccgaggcgcagggctgatagagaaaggagccaagcactgtgaccgtgtggctgtggcgcctgtgcactgtgtggcgnccctgtgtctcctgtggagacacacacccccctgtgtgcgagacaccccgaggtgtgcccacccgaggggagaagtggtgggcctccgtggtgggggtgtgtgacggtgaatttctctgtgggggggccaaatgtgagggacacacagcggagacacccccaaaggtgtggcgtgcggtgtgcccacatgtctcccccgtgtaaaagagacggatgtgggcttctctcacaaaggctgtgaaaagaaaggccccccgggggggaggatataaatatccatctccagtggagaatgaaggggctgtgtggcaacacacgctgtgtggtgaggaaacttagatcttttatcaccttccggaaagaaaaacctgtggtggggttcaccccccacatggtggggtcggggggaaactacccctggggggttgaaaacatctcctatacttacaatatgtgggaacacgcggagaggcgaaaacacacttctccgctagggaacaattacttgcgggggggacaccccccaacaaaaaaggaagccggggttgctccgagaaagaaaaccccactacaagggggagcccccgagggggggaaaaaatttcataaaatacaggcaggggggcagaaaacccacgacgagaaaaccacacggagtggatgagtatgcacaaacaaagagacgacagagggggatccccccagataattaatagtaggcacnccaaatgatggactcaaaattgatgccaacgcaggaagggggggggcaaccaaccaaagtaaaaaggcatggtgggtgggcccccccaacaattaattagaagaacacacattcttctccaccaaaggaggcaactgtgcgtcttagcacaccaactgtggtgcacacgaaggtggaagaaaccgccctatcctgatgataacgatgcgcgtgagccgaaacacaatacgggtgcaagcac

SEQ ID NO: 728242 - DNA, 629 bp, Homo sapiens
cacgctaaaaccacccgttgatttaaaaattgggaaaaccggccaccccgggacgcctttaaaggtcctccccagaaaatttgggttcccaatccattccttattaaaagcccaacatccgtaactttaatttccctttttttgggaaaggcgcggccccctcctttttaacgagggcgaaactttatctacattctcgggccccgggttttggggcaacctcttccgtggtaaaaaattcccctccaccgggggtgggggaggaaaaaaaaccacacatataggttaaccggccccattggcccgtgccacttaccccggcccataagggccaagtcccgggtccccaaaacaagggggcggtcccggagaaaaaaaaaaaaggctggcccagatccggggcctggcggaaagaagggacaatgtggttcctggtgagaaagggaggcccgcctcacaatcgcctggaggccctttatcttttgggggcttggggctccacccaaaacccccttggacttttccaccgggaaacacggggtaaaagccttaaccggggagacgggggataaaaaaacttcacccgattcctcggtttttggccgaacccccctccccttggaacaccg

SEQ ID NO: 728243 - DNA, 1293 bp, Homo sapiens
  misc_feature (392)..(392): n is a, c, g, or t
  misc_feature (438)..(438): n is a, c, g, or t
gcttcgttcgcgacgtggtctggcggctagaagactagagtgtcggtggaaaattgatgctccgtagaacatggccaagatagggaagaggtaatagaggaatatgcataagatatgtgggtcattcgtgacaccgctaagatttcaggaggcaagtgcatgctatatagctggactagtgctcgagtcttatcaagatgatcggtgcgctgttcgtagaataacgaagcgatagataatcgatttgtggatgactgtgagtgtttagcctcgtacgtatggaggtatacaaggggttcgtttgtagagctcattagggtaggatgctcattgcgtatcacaagatgcataagcgtggaggcagtggaatctgtaaggaatacctcccaatntggactatcgtcgcattggtggggctaatcttgggggaatctcatncaagtttactggtaatttgattgcattcatactactagtgcggtactaggtcacccaaacgcgtgaaaagcaaagaacgaaacggtgtatgagtacccattgggaggaaaccacgtcgaattgtaaaccccaggtgtggcaccttttttcgtgctaagtggcaatggaacctccggtaagaaccgtcggtcccactcggaattattggctttccgacgtggacctttgaagttgggtggggtgcttgtaaactctgtgcgccatagcgactttggaagagtggttccattccctacgagtacaccatggcggggcaacgccaatctcccgggagttcagaatctgttgactgccattttcctggggtttattaccaatctaccggtggcaggagtttcgaaacattgctttaaacattggaatctcgtttcccgcgttgtgttttgagaacccagaacatacctggggtagttaactccgaacgtagacaaatgtcctcgcaaaagccacccttaaaggatgtttccaagggacacgtatgcacctaagttgtatccgcgcataggaattagatatcaaatgtggagaggggatacaggatggtaggctctcaaaagagttttagggagataagagaaattgtggcgtttgaagccaaagatcggaactgaacccaattacagtataggccattgattgggttggccaaaatatttgaccgggggagatttgaagagataattgtggcttgtaccaaacgagacgatgggaataggtaggagaggcagagatgtgtgggctatagagagtattttgaccgttttgggcaattgagaagtgggggagagtggggag

SEQ ID NO: 728244 - DNA, 371 bp, Homo sapiens
atgggtctcttcaccatttcttgcccacacagcatggtcatttctatggtcagcagtttcatggccaccagcctgtagtctagacatcacataaggtagagccacattatagtcttagcattaacatctacaaacgactaatttattgatttgctaattgttcctccttgttgtgtacaggtatcattaggaaaaacaaatacatttaggcttcagtgactaaaatttcctgctttgtgcttattgaatttcactgagactggttctataatttttgacgattcatgatgagtgtctaggcccgcagtgagtgagcgaattaactgattcgttcttgtagagagcagagaggttgcttaaaatgtgcaaaa

SEQ ID NO: 728245 - DNA, 596 bp, Homo sapiens
ttccaataaagaaagagagaaagaaataaacaatgatgataagtaaaagccagtccacaagtgtctgaatttcctctcgaggtagcagcatacccatgaaaacccttgggatagacggttcaaaaaatatatatatatatccggacaatgggatgtcaattgggtggaaaattaaatatagcctaatctcctcaaaatattcctaggtcacgggaaggcagaggtgtgtaatttcacatgataaaaagcacatttgaacacaacttctatgggtgttccctttccaaataataaacaagatggaccctgggaagtcaacctgatcttggccagtcccctactaaccctttttctatggtttctgaaatccattctctgaaactctggaaattccattatgaacaaactaactctcagagggagtacattacattgtttaaaagcatggacttgaatcaggcagacctggattcaaaatttagctctattatctaagtaccctgtgtgtgctatggaccagttaacttctggacaccctagtttccttagctgtaaaatctctcatttgtccttagctgcttctctggcagctgaaa

SEQ ID NO: 728246 - DNA, 844 bp, Homo sapiens
  misc_feature (186)..(186): n is a, c, g, or t
gatgttggtcccagcggtgtcagctgaggtaggtgatcgtgtccatgtatggccggaatgttaccgagtcatgtgcgtagtctgcgtggatgaggaggtacggatcctgacgagacggaggcacttgtcctggaaacttggttgttcccaattgtagcaacgaaccagcatatagttgtagtgagngcaggacacatatgtctaggctctcgtgctggcgcaagaatccccagattcaccaaattctaatcagccgagagttagttatgaagagtggcttgggggaagaaaaactactgtctggaactaataattctatgagcagtagcaagcaatgatggtgaaaaaagtaggtagacgaggtgcattttgttagaattgagactttgggggtgaagcgagagtgactgctggggtaggagaatgccttagactggttcagccccaaagggctgtgaagaagggatctgtatggaagagcagtgtgggcatgaggagaggtctagtgaataagcgggggttggctcatcatagctgtggtatcaaggtggaagtgcatcgagttgggccctctttacgaaggctgtagttggagcaatgttttgaaagttggcgacaaagagaaggggtggtacacattctctggaattctatcaggttagcagtgggttgaagaaggaaccaagctgaggaatttatggcgaatgaagtcggcattgtgtgtcaatggtggggatagctgtaatggtaaatgaaggggtttggaatgccttcgaatgtttaaggaggaaggtgaattcttgataattctttgaactggggataattcattataagctgaatg

SEQ ID NO: 728247 - DNA, 141 bp, Homo sapiens
cgaaggtactactaacagagtatgtgcgtgcatttctctgatttctcttcagaacgttctagaatgtcttcctcaaggacctgccatggagcaattccaccagaggagttcagcaagagaagggatttaagaaaagactgt

SEQ ID NO: 728248 - DNA, 129 bp, Homo sapiens
tcgatacgacttttttttcttctctttctctttttcttccttttctcctttctttttcttcttatctttcttctttttgtccccttctgtcgtcttataagcagccgtatagtagtagtaggcggccgc

SEQ ID NO: 728249 - DNA, 578 bp, Homo sapiens
  misc_feature (5)..(5): n is a, c, g, or t
  misc_feature (17)..(17): n is a, c, g, or t
  misc_feature (51)..(51): n is a, c, g, or t
  misc_feature (79)..(79): n is a, c, g, or t
  misc_feature (81)..(81): n is a, c, g, or t
  misc_feature (118)..(118): n is a, c, g, or t
  misc_feature (252)..(252): n is a, c, g, or t
  misc_feature (309)..(309): n is a, c, g, or t
  misc_feature (367)..(367): n is a, c, g, or t
  misc_feature (369)..(369): n is a, c, g, or t
ggggntttcattaaagnttgaccaaaccaaaccttgaacaaggccttcacnacctgaaaaaaaacaaaaaaatttttangngaaaatttgcccagcaattccctgtccaatgtccaantggcaacatccttgttatgatccttgtagccaaggataatttttttcaaaacaatcatttttgctttaaaaaccgttgtcttccttgacttccctgtatatgcacatagtttaactgtggcacttgtatttctnattgcaatgcctacttcctgaataaaacatcatttttcttttcagagagtctccctnttctgttattttaggtgacaaggatatgccaagaagtagcttggatatagcagttaantntgcctttaggatatgtgtatggggatataagagttaactaaaagctgacctttgagttggtccttgaataaaagaagaatagattccaaaaataagaggaataaataatgatcctgagctaggagagtacattttgcagacctttggtttccatattaagaaattcagatttttatgtacaataaagaagttctggaattcaaaaaaac

SEQ ID NO: 728250 - DNA, 401 bp, Homo sapiens
actctgcgcggcctcatcacggacacggttatccatcgtggaagatcctgtttcaaagccggtcatggcgcgctcgcatccagacgatcacgcagatgccgcagggtgcggatcatatacttttccaccatgtttttagacagccccaggcgtgtggcgatttcctgctgggtgagcccttcgatcttttgccagatgaaaatcctgcgacagttgagcggcaactcggccagcgcccgctcgatggcgtcggccaactggatcgcgtgcatgtaatgctccgggtcgctacttgtgaggcgtgctgtgatcagccgcctgcagcgtcaacgcctcgcggcggtcttcgcggcggtaggcatccaccgcaatattgcgcgcggtttgatgcaggtaggcgc

SEQ ID NO: 728251 - DNA, 1080 bp, Homo sapiens
agcgggccatcccccgtcctccatctttgagccactaggcgttcgtcacagtctcccaccccgccctgctcgcggagcctgccaggcctcggcctcatggcggtgctctgagtgcatggggcctggagggcttggtacctgaccgacccactgaatgcgttctggtggcggtaccctggtcacagaaatgcacgtgaccctggtgcgatgggctgacctgtgcggactctgtgcatacagctgacatggggaccactggtgcagagctgtctacttatgtgctacacaatgcgaggtgaagcggccatctcttgaacctatcacagacgcaatgtcatggtacgccaagcaccggactcagacgtcactgacacggaccggtgacgtgctgaccgctaagttgcctatccgcctctgtggcaaccctctgactacccctctgcctttggcgcggtcactcctaaccaactaacatggcggtacccacacctgcctggggtgcttggccgtgtgctccacaaattcctcgcctaaggcaaccatgcctccgttgccgcgacgcgcacagaggcacctccaccaacacacgcacggaacccctcatagcctgactcgacgtcctgcgcaactcggcgcctggcaacaccgtagcgccgctcgcggaacacggcacttttcaaccccatagttgcacacggtctagccgccgcgtcgatctaccccttgtcacaaccccgcgttcctctgccactaacggtatactgactccctcctatagatgcttcctaccggtgcgccttcggtcaatctccgcggactttccaccagagcaccccatggggttttcaccgagggccccccctttggtggttagtcgaccaccactacaacccgacttctaaggatggctcgccgacaaacgccatgcagcggtgcccactttcgtcccctctgcacttcccatgtccgaaacgcgtagttagttatacacccgaaatacttacacgatcgttcactcgtgccgctacatgccgattcatcactcgtaagacttacgtcagaagtctagccgatggactc

SEQ ID NO: 728252 - DNA, 329 bp, Homo sapiens
tacgtggcccagtgagaagctggccagttgcggaggcgctacctgtgtgccccagtgctcgctgccagtgtgtggcttgtgatgagagcaatggccaagctgatcatcggacgtgcgttgactgcttgctctatcaatgcatgtacgttgcctgctgagatgctggtgtcctgcaaccgtgcattaagttgagacttgggacaaggtgttgtatagttggaaacattacgagagcataaggtgacgttgtacaggactgagtgaaggaatgagagatgatgtaggaagagatgaagaaaagagaaaaatgaaaaagtgaatgatgggag

SEQ ID NO: 728253 - DNA, 150 bp, Homo sapiens
actctagaggatctcactcctaccacggagcatcgtcttctgacccagaatgtagattacgacagttgacatgtgctgaaaagtcacagacatgctgctgtgaaagcagcgggacagagggctgtaccctgcaaagccacagggacagag

SEQ ID NO: 728254 - DNA, 242 bp, Homo sapiens
tcgtctgcttccgttaggtgagctttgtttgctcgtgccccgtttccccgatggatacgactgccaggtgtagagcacgaaagtcggtcgccctacacggtcgatccattcaccacgggagagagggcacagcaaacgaggtccccaccttctcttttaccagaactgaagcttctgacaatctggccctggatgtaccgtgtatttccacacttgcccagggtaccgaagctcgacattcg

SEQ ID NO: 728255 - DNA, 944 bp, Homo sapiens
  misc_feature (226)..(226): n is a, c, g, or t
  misc_feature (228)..(228): n is a, c, g, or t
gatgaaaattctatacgctgagaagaaagctgaatgacgttcatatgcttctctgcatacgcctcaaactacgtacacattggtgaaggacgcttgagcggatagtatagaacgcacaatagatgaatcactggaggaaagcgactaccacgaactctgtgtagtcggttggttcaagctacggtggtaggcagaagagctcttgagtagtctgtatgacctcaanancgggtctgctaacagggcacgtagaataggtcgacgctctgtggaagacctacaaaactaaggaatctcatgtatgtgcctccaggacgctaggtctaccaatcgttcacagacgtacgacgaacttgagaggcgcacatggcgtggtgctgtgccaagggcgttgtccgaagccttgaatcctggtgagttgacatggctatggaaagcgctcgcaccgtggggccactgcatgaaaccctccgcggtgagtcaatgaaacaagtagcactatggcttccaatcattgacacagcatgagttgtcctgggagcatgaagactaactgacattcatttgttggctcgagaaatcgctctataactcgtgagtagtagctacgcacatttgtcctgacatggtttaaaggcatcggaggcacgggaaggacctcttgtgagtgaccccctggggctgttctcatcgattgaagtctccgtggtatacctctgaggtcaatccatgcgcatcgactctaagatgtgcaggttgtgatccgtgtaagattattgcatggtctccaacaccaagagtgaaacgagtcagagtcgcaagaagtccatgtgtacgtggccctcagccgaattccttgggcagccaaagatgggtagcaggcctggccgaagttgttcttggtgggattcgtaatgcaggccttactttgggggaaattcctg

SEQ ID NO: 728256 - DNA, 216 bp, Homo sapiens
  misc_feature (159)..(159): n is a, c, g, or t
gatcgatcgagccggaccctttatccttacggctgagtagtattccactttatggataataccacattttatatatctattcatcagtgagggacatttgattatttccacctttgcttattttgagtagtacttctctgaacattgcatacaagtttnggtctgaacatctgatgaatagatatataaaatgtggtattatccataaaatggaat

SEQ ID NO: 728257 - DNA, 275 bp, Homo sapiens
gggattagaggcatgagccacggtgcctggcctcggtaatggtgctttgaagttattgggctgtgtcgggctgcgatggctcggcagtcctcatgcgtacctgggaatcctggcaaggggagaagatctaacttactaatggttttcagatgtcatgaaacatttcagaatccggcactgaacaattagtagagtccacatgatgtttccctgggcagacatttaattaaaatggtatggattttcagtctggtagttttactttggtattggcg

SEQ ID NO: 728258 - DNA, 373 bp, Homo sapiens
tgggcgtatggagcatatcatcattatagtcagatggcgagacggtcaggatgcagtttgtgccatacagtggcacaaagcaaagagaatagatccctgtcataagtcctgtgtttgaacttaacagcactactaagcagagagcttgggttccatactcgaaagctagacctttcagggatttaccaatatagtagaaaaaagatcagataggacaacccacatgtacttaaaaactacaaactactcagtcattctcccattacaagccacatatccccaatcacaactcacatccaaaaatctcaaagcatagctaaagtccagtcattatgcacccccattcattttcaatattcatcagttccatcag

SEQ ID NO: 728259 - DNA, 278 bp, Homo sapiens
tgctgaaagcacacccgcctgggaaccgcaccccagaggggccacagtcagcgtgaagcagttattttctacgctacctgtgcgccataaggaatttcaaaggaatattaagaaggtacagtaaattaatcttggttttcaagagtattggttaatgcacatgagcaaaagatttactaaagatgtttattcttcagttgattctcttgccataatctattgagaaatgctttatttgcatttctcgttaaagacttaacattaaagacttaacttta

SEQ ID NO: 728260 - DNA, 875 bp, Homo sapiens
tataaacatctgcatataacaaagcattgaagcctatttatctgtgtaaaacattcaagaacgtgctgacgtactgatgtgaggtagagttataaaatcttgacatgatagcgggagtgttggagatggattaatgaggtatttgtgtcgcttttagtacgtttagtgcgcaggattgttctataagtctaagatgatattaaacaggtattgtagatcatagagaatatacataagacatgaaccaaagtgaaaggattacttcctggtaggatcttgtctattgtaacctggtaatgttagggaaatatctagtgatgttcttctaaagtagtgatggtaaaaagcttctttcataaattaccttcttgcctcagacctgccttgaccagagaactcaagtgtaagctgtgatgaaaactacatgctttcccacggtagtatttggctaggtatgtgtgtaactctctcgagattacacaggctgacagtacgatatgtagtatgacatacctgttaatggtcggattcagttccacatttgtcaaccatgttctatgagccaggcctgaagggacggtcagcattgtggaaaaaaccaggtaagtgtcgatcctacctactctccagaactacggtgtccagagaagaaaaggtgttgagccttaccgaggtagtgactgctcagtaatatggtccaacgcacgtttggttcccaatgtgacccattgagctaggtatgcatttgtgtatattcataaacattgtttgtataaatgccctaaataaattagccttccaaaatattccgtgtacgatcttaaaaaaaaatacggtggacactaacaaaaaaaaaaataatgtggtgggcgcag

SEQ ID NO: 728261 - DNA, 278 bp, Homo sapiens
actgggggaaactccccagacaccaaaacttctttaaagaacagtttactatgtagaatttagtacctgcaaacatgggcttaaacacaaaccggagactgaagtggaatgatacttcgtttggccctccactctccccattttgcactacttctcttccctacagaaatatctatataatcatgacactttactcatctacacaagacttagacctattcggatggcactctacaaccagtcctggagccctcagacaggagaatatactcccacgt

SEQ ID NO: 728262 - DNA, 125 bp, Homo sapiens
gtgattaaggatcccaagacgaactcttgggaataggttatgtgataggagtagggtaggatgagttggaagaagaaacgagaggagtaaagtttaattatgtgcttttgggttgagagtgatga

SEQ ID NO: 728263 - DNA, 455 bp, Homo sapiens
cccgggttcgagtgaagctaatttgccaaacccatatctctcctatcctcaatacctccctctactacccattattctgttctggatctcaaacatgcttatttttatactattcctttgcacccttcatcccagcctctctttgctttcacttagactgaccctgacaccagtaggctcagcaaattacctgggctgtactgctgcaaggcttcacagacagcccccattacttcaatcaagccaaaatttcatcctcatctgttacctatctcagcataattctcataaaaacacatgtgctctccctgctgatcgtgtccgattaatctcccaaacctcaatcccttacaaagcaactcctttccttcctaggcatggttagtgcggtcagaattcttacacaagagccaggaccgcaccctgtagcctttctgtccaaacaacttgacctt

SEQ ID NO: 728264 - DNA, 329 bp, Homo sapiens
gtttttgctgtttatggaggattgccatacacatgaatgaaaagctaatttttttactaatctttgaaatgttaatttcttttgagaaacaactagaacctcaagttatgtttttgatgctggtttttgaggaaataaatatctttactagtattgatacttaatttcatcttttatctttctacataagtatttttcatgttttataactgaggatcatgtaaggttttttctcattgtattccaatttcatgtgatcgtcattccatcttaggaactctttgcagttagtctgaagtaagtttatgtttgactattttatgatgcct

SEQ ID NO: 728265 - DNA, 148 bp, Homo sapiens
tttttagggccctttttttttaaattaaattcccaaccaaaggggaaattgtttcccaaaaaaggccctttttttttaacccctgttttgggaggttcccccccgtttagggaaaggaaaaaaaaagggggaaccttttttttcccca

SEQ ID NO: 728266 - DNA, 517 bp, Homo sapiens
cactgtgttgccaggctgtctcaatctcctggtctcagcctcgtgctcccaaatgtgctgggattactggaatgagccactctgcccaccccgtatttaactattctaagtacctctcatacagatggaagcatgcaatatttgtccttttgtgtctggcttacttcatttagcacaatgtcttcaagctccatctatgttgtagaatgtatcagaatttcattccttttggaggctgaataatattatgctgtgtagatagatacatcacatttttgcttatccactcatccatctatggacagttaggtttgcttccaccttttggctattatgaataatgctattacaaacatgggtatacaaatatctgttcaaatccctgctttcagttcttttaaatagatactcagaagtggaactgctggatcaaatggtaatcctgtttaattttgaagaaccatcataccattttccacagtggctataacatttcacattcccagcaggaatgcac

SEQ ID NO: 728267 - DNA, 222 bp, Homo sapiens
tcagaggattccaagaagatataaaaagtaattaggtagaatagtcagaaacattttctaaaggtaatttaggcacctgtaatcccacaactttgggaggccgagatgggagaatcatttggagccaggagttcgagatcagcctgaccaatatggcaaaaccccatctctactaaaaatacaaaaattagctgggcgcaatgtcacacgcatgtgcggtaa

SEQ ID NO: 728268 - DNA, 262 bp, Homo sapiens
cctcagcagccccccccctccttggcctttgcttggcccgggggcccttgcctggcttgttggttggtttcaccccagcaggagccctggggcccagcccgccaccaaacccgcccatgtgcctgcccggcctaaggcaggacagggtgtttggggctgggaggtgcggggacggggggtcggggggtatccctgttttttttgttgaattggggatgggccccagcgatatccaggctttttctgaacattgcttttctcc

SEQ ID NO: 728269 - DNA, 951 bp, Homo sapiens
  misc_feature (14)..(14): n is a, c, g, or t
  misc_feature (83)..(83): n is a, c, g, or t
  misc_feature (183)..(183): n is a, c, g, or t
  misc_feature (263)..(263): n is a, c, g, or t
  misc_feature (325)..(325): n is a, c, g, or t
  misc_feature (327)..(327): n is a, c, g, or t
  misc_feature (343)..(343): n is a, c, g, or t
  misc_feature (346)..(346): n is a, c, g, or t
  misc_feature (365)..(366): n is a, c, g, or t
  misc_feature (402)..(402): n is a, c, g, or t
  misc_feature (406)..(406): n is a, c, g, or t
  misc_feature (475)..(475): n is a, c, g, or t
  misc_feature (586)..(586): n is a, c, g, or t
  misc_feature (590)..(590): n is a, c, g, or t
  misc_feature (624)..(624): n is a, c, g, or t
  misc_feature (633)..(633): n is a, c, g, or t
  misc_feature (637)..(637): n is a, c, g, or t
  misc_feature (639)..(639): n is a, c, g, or t
  misc_feature (651)..(651): n is a, c, g, or t
  misc_feature (676)..(676): n is a, c, g, or t
  misc_feature (700)..(700): n is a, c, g, or t
  misc_feature (706)..(706): n is a, c, g, or t
  misc_feature (722)..(722): n is a, c, g, or t
  misc_feature (756)..(756): n is a, c, g, or t
  misc_feature (764)..(764): n is a, c, g, or t
  misc_feature (772)..(772): n is a, c, g, or t
  misc_feature (806)..(806): n is a, c, g, or t
  misc_feature (829)..(829): n is a, c, g, or t
  misc_feature (832)..(832): n is a, c, g, or t
  misc_feature (934)..(934): n is a, c, g, or t
tgacctcgctcccnttctccccagtagacccgccccacccccttctgtgtgcgctgggcttcaggacaaggggcaagagaggnaaccagggagacaaagggcgaagtgtctcggggacagggggccacaggcagttgtggccacatggtgagccccagggccgacgcagggccgacgggcaanaggctgtgatctccagcctggcgcttccgggcctttcttgaggccaccatgaggaatgtgatgtgtgacacaggggctangagagaaaaagacacgacgcaactcgggatcggcgcgtccgagacaggggcagggaaaccanangccctacaaagccctnccnataaaacaatacccagaannactcagatccctcagtgcctaaagaaaacaggacantaangcctgggcgagtgtaggggacgggggtcaggagagctggggcagggcccgtaagaggtggagggtgggnagagggagggaggggtgactgtatggtggtgctgcctctgaagcaccctccccttcgcccagtccccagccctatggtgatttaaaggggctgaaaagccaagaggcagcnggcncatgggaagcagggagacctgggggtggcgaggnaggccactnacancncagcagcaccangcgcagggcgatgcggttgtaccangctacaggcaggatgcgcacatancgagcnaggatgggcgtctcanacaagttcttcttgtgggagtggttgtcccagtngccagggnaagatctnactgctgccagttctggggtcctggtactcagtncagttcgcactgtcatttctgtnggnaccttgtcggatgccacaaactggacagagccaaagttacgggcccctggggtgatgatgctgtgactccttcgagagcccaggtcacctggcagcacttancgttacgtagctcccgc

SEQ ID NO: 728270 - DNA, 109 bp, Homo sapiens
aacagcagagccagaggcatattcatggagtctgaaggcttgaaaacccggagttcttatgtcaaaggcaggagaagacggggtgtccaactccagaagacagcaaatt

SEQ ID NO: 728271 - DNA, 762 bp, Homo sapiens
tgggtccattcaacggcttttatttaaagccccttttctcttacaaggccccctctttcaaccctttaatgaacaaccaggtatttcttttcggccaagtagttccccctgtacatgattcctcccccctcgcctttggccccactctctacaagtgagtttacaaacatctttctataccactagtttcctcgggagccctttccacattgtaccacccatagacctaaaaaattagcagaaaattggatcccaccccctccatgggttggacaaacctctccacacatggtgacaacccacgaacataccccttagaaagttccctcacatgagccgccaataccaacataattttgtcccacacaaatcacacacacattgagggccatcagtgcgcagtttttttatgttcccaccaagcctcttccggttggacacacgccaactaggcagtacccacaacactcgttgttaccgtacatattcttttcttttaccaactcctatgtttaactcacccaaatgcttccaaatttcacgcccgtatctgtggatggtttaccacacagcaggccccttcctaccacgcgagggtcggagaaagccacccctttctatcccctggtgacggaacagcgccctgatcttggccttttcgggccagcatccatggctttgtactgaaagctacattccggagacgtccacccccttgttacttctttgtaatattcattatactaacacctgacatgacgc

SEQ ID NO: 728272 - DNA, 222 bp, Homo sapiens
ttccctcatttgaccaactccatctaagtttagatgtgcagaagggcttagatatatccagagtaagccacatgcaacatgttacttgatcaattttctaaaataaggttttaggacttcattcccccatgttttcttcccttatcttactgtcattgtcctaattactatacatgcatatttttttgacagtagggagaaaccttttacagataagttaca

SEQ ID NO: 728273 - DNA, 894 bp, Homo sapiens
gtagtatcctgctcaggcaagatctgcctaagattatgattcaggagcatttggtgctgttaaaagctggagccgaatttagaagttcccttaaaaagaaacacattaagacttaccaatggaggcatgtgaatggttgcagtggagcttgaggtatacacatcatcacagtgtgttcagacgcggcggtcgagtatgtaaattggatgtgtccacgcgtgagataactgcgagtattggtaaccatcctgtgagagtagattgttctagtagtggctggaactattcagaggttacatctctctggaagtaatctgtaatttacttgcatcaaagacccctctgtgttctccatcatctttaatagcaactggagaccactttgcgtcatgggtaaagcgggttggatactcctcacaaaggggttttatgggacttcctcagtgcgggacgagcttctgagaaccacaggcgacgcgatggaacaaagactactaggcactttctgctttctgaaacccccttaatgccgatccttgcatgtcttgctgggcttactcttctgctggcacagtaccattttgggtctgtgtcccagagtggaacaaaatgtggcctgtcccattctagatatacttcaagaattctgaggagctagaagtcaactgttggcactaaagtgttcaccatctgtctaagcccctatgtacgtggaggcaactcttggaataatgtgttgaaatctcttgctattatcataatcttggggagaagaacccattttcggtgagaatccttccggtaagattttggttttgggccccttgttccgagaactgtgtggaccctttgagttgggggcctggtccgcctaagggggagaatcaatgtgag

SEQ ID NO: 728274 - DNA, 336 bp, Homo sapiens
  misc_feature (79)..(79): n is a, c, g, or t
  misc_feature (286)..(286): n is a, c, g, or t
aaacaacgaaatttatatacgatatcgcattgcggcgttcgccggcgttcgcccagccaagtccccgcgcggtttttgngcggagcgtaacatttgcatcaataatgttacaccggcgcgtcccagtattagatccagccagtttgaacccaacagattatttaggtattacgtttcatgttcacgtttaataacttggtcgacccccagaccgttgcggtagctacagcggcagccccatgaagtagtaggctcggcgctagccggtgcgcataaaacccgccgngcacatgctcaatatttatattattgtattgcacgcgtttgccgtggttt

SEQ ID NO: 728275 - DNA, 118 bp, Homo sapiens
gcgagcggctcttcattcttctgacattgccttctgcttgtttgcccttcagctgtatctggagcagtagttcaaacccagccacggtgccgtgccttgggggtccttcttatcagcc

SEQ ID NO: 728276 - DNA, 544 bp, Homo sapiens
ataatttcttgtcacagatattgcctgtgattggtaaattggtctaattctgtcattcagctaattggcccattagctgaatggtcacactaagttgcatcctccaactcaatttgatcagtaataaaagtttcatcctgccccctgtctgctacttaattttttatcgtttagatggggggaaattaagtagcagacatggcctgccccctgtctgctacttaattttttatcgtttagatggggggaaattgtgctatttatttggggcccttcagagaacccaatatgaacatgatttatctatttattcagtttttatgtccttcaggacagataaatgtatgtatacacacatatacatgtgttaatatatgtaagtatatacatatgtttaaatgtatgtgtatgtgtatactgatcttgctcttttcctgtgaaatgtattaatagtcacttcaaagatttggttgctattgtgaaagaaattaagttacctttcactttgaaactaatagagtaaagaaaaacaaaaatacctaaa

SEQ ID NO: 728277 - DNA, 1085 bp, Homo sapiens
agcagcctgccttggcctcccaaagtgcctgagagtgcagcctctgacccgcgcaccccgtctgggaagtgaggagcgtctctgcctggcctgaccatcgtctgggatgtgaggagcccctctgcctggctgcccagtctggaaagtgaggagcgtctctgcccagacgccaccccatctaggaagtgaggagcgcctcttacccagccgctattccatctaggaagtgaggagcgtctctgcccggtcgcccgtctaactgaggagaccctctgcctggcaacctgcctgtctgagaagtgaggagccccgtccgacccagacagccgacccgatctgacaagctgacggagcccactccgccacggcagaacaccccggcgctggcaagctgagcgacgcgctactccgcccggcagcgagccccagtcggggagcgacgacagcaccgcggcgctcaagaccgcaaccggccccagacacagaccggccccacgagcccagccaacccccgcaggcgccgcacacgcacacaggccagccgcgcgacaagccaccccacatcacgaacgcaagcacagcccgaccgggcagcacccccctcggcctgccgggccggcgcaggcgcgccggggcgccagtcccgcaacgcgtcggcgagggagcaagccagcggggaggcgcgccagtcacaggcgaggccggagcggcgcgacaggggcaaacggccgaccacgcaactcagcgagcccgcaccgcaccaacccgacagaccgggacgggggacggccagagaaggcggccagcaggaggaccgagaggcgcagacccggagacgggacgcgaagagcacggggaggccacggagagaggcgacggagtagtcccatcaccgcgcgtcagcgcagcggcgagcagctcgaggggtgagcgcggcaaagcagcggctcagctaacacacagccagacgccgagtagaccgacggcccgcagcaggaagcacggcaccccaagccagcgcacggtgaacagacccagcaataggactgtcgaagggcgcgtgcagaggcacggccagggcccag

SEQ ID NO: 728278 - DNA, 196 bp, Homo sapiens
tggacacgcgcaaacagggtcaggcatgtttctggtggtgtttgctcagtatggaagcaaatcagctacaacttcctgttcttctatgccggctgcaatccattccccgttcgttgatcgaagccgcagccatcgacggtgcatggccgaattcgtcgccttctttaagatctgcgctgccgccttaatcgccccc

SEQ ID NO: 728279 - DNA, 481 bp, Homo sapiens
catgtaagaccttgactttgccataattgtgaggcctcctcagccacgtggaactggtctcactctgtacccaggctggagtgcagtagagcaatcacggctcactgtagcctcaatctctggggttcaagcaatcctcccatctcagcctcctgagtagctgggaatgcagcaacatggaagcagctggaggctactatcctgaatgaaatactgcagaaacagaaaagcaaatatcacatgttctcacttataagtgggagataaccttgagtacacaaggacttaaagatgggaacaatagacactggggactccagaagacgggaagatgggaggaggaaggaaagggctggaaaactgcccatcttgtactactattatctggatgacgggatcaatagatgcccaaacgtcagcatctctcaatatatccttgtaacaaatctgcacatgcaccccctgaatctaaaattaaaat

SEQ ID NO: 728280 - DNA, 170 bp, Homo sapiens
gatcgttaagggagttcgggtatggggagaaatgggacaggaacaagggcaggaattgagccggagttaaggtggagtgggtcgaaggctaagtggtggcctgggaaatcggttcctgggaggactggaggcggggtggtgtggttggttgcttgggaattttgattggg

SEQ ID NO: 728281 - DNA, 259 bp, Homo sapiens
tgccatcatcgtggatagacacagacgtggcaggagctgtgcaaggcctttggccaggccgaagcacctagaccaacagaccatcattgccaagaccttcaacgggccgaagggatcacggagggtagaaagataaggagctcttgagcactgggcaagccccgtcccgcaaagaacgatggcctgcagccagcatcagtccagggaggaatctacgaggccacgagtccacgagccaaaaagagcaaggagtccgtgg

SEQ ID NO: 728282 - DNA, 346 bp, Homo sapiens
tatgctattgtattttaataatttcaattttaccgtcttactttccatgcttataggtacagcttgtcaggaaatgatactgaataaggtgatctctcaccacattaaaaaaaaaaaactacggaatataaaaaatgttttggtttcctttttaaatgacaaatcctacagtatgctagatatacaagggttattacttcccttcaagtaattgacattcaaaaaaaagttaaatcagtacagtgtaaatatcggaaagtctttttttctggtggcaggaagactagtatagggtagttattttctacatttaagcacaattatgtgtgggtctccggcgtgtgca

SEQ ID NO: 728283 - DNA, 106 bp, Homo sapiens
gttggacctgtcagctctccttgatgcgtcttggagctgcataaatcattttgctcttaaggggcgcagactcgggtgccagaagataaacaccagatctccttct

SEQ ID NO: 728284 - DNA, 350 bp, Homo sapiens
atcggtgtgaatcttgtagccttcacctcctaatccccaccattgtgtggcaggtgtgtttgcctctttctaattgttgagccggaccagttattgggtggaggagatagttcaagttggtggtggtggacttgtttgggggtcctcccaccacaaacgtgggatccgtgcacgttaacgattactaggactatgcagtatcctgttgttttttcttcaacttccttttttttttttcttttttttctttcttttgttctttttttttttttcttttttttcttcttcttttgttttttccttttctttctcttttttgttttttctttttctttttctctttttttctt

SEQ ID NO: 728285 - DNA, 2532 bp, Homo sapiens
ctcagcctcccaagtggctgggactgcaggttctaaatggcttctaagaagttgggtgcagattttcatgggactttcagttaccttgatgatgtcccatttaagacaggagacaaattcaaaacaccagctaaagttggtctacctattggcttctccttgcctgattgtttgcaggttgtcagagaagtacagtatgacttctctttggaaaagaaaaccattgagtgggctgaagagattaagaaaatcgaagaagccgagcgggaagcagagtgcaaaattgcggaagcagaagctaaagtgaattctaagagtggcccagagggcgatagcaaaatgagcttctccaagactcacagtacagccacaatgccacctcctattaaccccatcctcgccagcttgcagcacaacagcatcctcacaccaactcgggtcagcagtagtgccacgaaacagaaagttctcagcccacctcacataaaggcggatttcaatcttgctgactttgagtgtgaagaagacccatttgataatctggagttaaaaactattgatgagaaggaagagctgagaaatattctggtaggaaccactggacccattatggctcagttattggacaataacttgcccaggggaggctctgggtctgtgttacaggatgaggaggtcctggcatccttggaacgggcaaccctagatttcaagcctcttcataaacccaatggctttataaccttaccacagttgggcaactgtgaaaagatgtcactgtcttccaaagtgtccctcccccctatacctgcagtaagcaatatcaaatccctgtctttccccaaacttgactctgatgacagcaatcagaagacagccaagctggcgagcactttccatagcacatcctgcctccgcaatggcacgttccagaattccctaaagccttccacccaaagcagtgccagtgagctcaatgggcatcacactcttgggctttcagctttgaacttggacagtggcacagagatgccagccctgacatcctcccagatgccttccctctctgttttgtctgtgtgcacagaggaatcatcacctccaaatactggtcccacggtcacccctcctaatttctcagtgtcacaagtgcccaacatgcccagctgtccccaggcctattctgaactgcagatgctgtcccccagcgagcggcagtgtgtggagacggtggtcaacatgggctactcgtacgagtgtgtcctcagagccatgaagaagaaaggagagaatattgagcagattctcgactatctctttgcacatggacagctttgtgagaagggcttcgaccctcttttagtggaagaggctctggaaatgcaccagtgttcagaagaaaagatgatggagtttcttcagttaatgagcaaatttaaggagatgggctttgagctgaaagacattaaggaagttttgctattacacaacaatgaccaggacaatgctttggaagacctcatggctcgggcaggagccagctgagaccaggccctgcctaggccctgccgcagaaccaccatccctgggaggccctgcagagcccacctgtggggaaagagaaggggcagcttccggattttcttttgggggttagaaggtcaggtgtggagactgctcgccagtctctgtgagcctaggccctgagctggggaggtggggaagattcgggcatgtgagtgcccccagaactgtcctggctccttccgtattaaacgcatttgcattttgagaagtgtccttcccacttcagccctccggagagactaccctagtctttctggggtgtttatgtcctcagctgaagcctggcctagttgctgagaggggctggggagatggggcgggagggccagactcagtgctgctgtggagctaggtgcttcccccttcccctgagactggtggactgaactccagtcaagttgagttcaagtgaaagattcttccagggttttattttttcccctcctaacaaagtctcatagtgttaacactggttctgcaatatctctgaggtgcaaagaatgcacttttccctatggggcccagagtttgccttttctgccaggcagtcaccacgcttccctaccccagcctgtttcttttggcttggtttggaccacagtcctctgctacccagggttttagagcccctgctctaggaaacagtttaagaaatcattggccccttcccagcacattgaatgggtaagcagacaggccatgatttagttggccagcactaactccacctctgttctccttgaacagcttcccctccagcccactgctttaggatgacacaatgaataacacctagtcatagaaatcagtctctctggtttgttttgtattatgttgtacatcattaaagatctaaatacaaaggatatacagtcttgaatctaaaataatttgctaactattttgattcttcagagagaactactaataaaaatctaaaaggta

SEQ ID NO: 728286 - DNA, 334 bp, Homo sapiens
aaagaaaacgtctctggtgattttaaaaaggaggcatcaagagaccattgctggctggctgccgtggctcacgcctgtaatcccagcactttgggaggccgaggcaggcagatcacttgaggtcaggggttcaagaccagcctgggcaacatggtgaaaccccgtctctactaaaaatacaaaaaaaattagccaggtgtagtagcggacacctgtagtcccagctactccagaggctgaggcacgggaattgcttgaacccaggaagcagaggtttcagtgagctgagactgcacccctgcactccagcctgggtgacagagcaaaactccgc

SEQ ID NO: 728287 - DNA, 457 bp, Homo sapiens
  misc_feature (370)..(370): n is a, c, g, or t
gggcttccgttccttccctcctcccttctttcgttccacttttacttccttggccaggagcttctcttagaagctcaccgttctgtggtagatgaagagtttcctatcctggtctccgagagttccactctagattttaccattaagccgaactggatccggattccaaatctggaactaaaaagactccagttaacttatggttaccttaattagtattaatccatttgggtatctggtgggcaccattctttggttaggtggctaatataagctgtaaagggcattctctcccaggaactttaaattattatcactggtaacagcaaagttaacaatgttattttccccttaaaagagtccggtgttncaggaaaacacactccgtggcagtgttacccttttaactggatcttggaaactggtcctgttggaacagtagggtaccgaactcgaa

SEQ ID NO: 728288 - DNA, 162 bp, Homo sapiens
gaggagaggggggatgtgggctatgcagcccccagggaagatgctgcctgtggacagtctgtggacctgggggaaaggcgcagctgtaggcaggctctgggtaggagctctagggaggctgagctggctctggagtgggcatgtgtcacccgatggaggggg

SEQ ID NO: 728289 - DNA, 1214 bp, Homo sapiens
  misc_feature (13)..(13): n is a, c, g, or t
  misc_feature (25)..(25): n is a, c, g, or t
  misc_feature (395)..(395): n is a, c, g, or t
  misc_feature (415)..(415): n is a, c, g, or t
  misc_feature (965)..(965): n is a, c, g, or t
  misc_feature (984)..(984): n is a, c, g, or t
  misc_feature (1214)..(1214): n is a, c, g, or t
cccatttaattangaccaaccgganaagccgcccgcccatttggtggtctgaggtaccacaggcgtcaatgtcggtgactcatacattgggctccggtggttgatacttttatacttcattatttagtgtggagcatgagcttcgcccttctgtgggctacccccgcgcggtgctctgcctctttctcctctcctcacatgtgctctagcgtacttttcatggtagctgccccataacgcgtataggatactgtcgagggtggcctcttgtgcgtattgtttgcgtgatgcatggatgggaagtgtaaagatggagtaacgctctatcactcgcgcctgtatcaagattacgagtaagagcgagaggacgacatgtgagaaagcgcatactcatnaaataggagaattattattntttgtattgtgttgtgatgttagttgtgatgggaggttttctgggttggtgggacgagggtaaggtgaaccggccatcgacaggaacatacgctacacacaacagatcaccgctaatacccgcaaagactccgatagataaatgtcaacaaggagacacgcagaccgaagcgcaccccaccacactactgaagggggtatttgctcgctatgctttgtgaacgggtgggtgtggactgtgggaggttggggttcggccgtttattaccgattgtgcctatccggtgctcatgctagttttgaggggttgtatttgacgcgttccgtgacctcggcgtcatcctcaccgctctccgtccgacctcctcgaaacgtcatatggtgcaacatgagctgtcacggagaggagacgagtaactacgggggagtaatgtcaaacgacgggacggaacgaacttcgtgcgatggtaagggacgaaacaatgcctacgcctacatatctgtgtagtcttggagtgcgctgctcgctatcctgcacattgtagacatgnaagatccacacttcttgtntgctgctcaccaacgattatactcccagctttgaagcatgatcgcttagtagtatgcatgttagaagatgttctgctataccctcatttatttagttatatctagtactgtaataatatgagaagttatccatgcagacacctacacataatacataatcttagatatgtcaaatgtaggtgtagtataatagagagttcaatggacgagtaatctaactttgcatcacn

SEQ ID NO: 728290 - DNA, 392 bp, Homo sapiens
  misc_feature (10)..(10): n is a, c, g, or t
  misc_feature (136)..(136): n is a, c, g, or t
ccatacaagncacaaatcaaatcctatccagtatctgacggcctgggtggggcggagaacggacttcacacactagtttgttgaggtctcttggaaagcacagcaaagagcagcagtaggtgctaaaccccttgtntcttttcttagattctcgactatctctttgcacatggacagctttgtgagaagggcttcgaccctcttttagtggaagaggctctggaaatgcaccagtgttcagaagaaaaggtgggaatcttcatgtttcttgggaaccctctggaaaaggagggaccaagtatccatcctggttttctcccttggcccacacacaacctttttgctttgccagtgactacaggtacaagtatttgaagggcagaatctcccaa

SEQ ID NO: 728291 - DNA, 187 bp, Homo sapiens
  misc_feature (174)..(174): n is a, c, g, or t
aagtattcccagtttcttaaagagttaaacatccatgcaccatacaacccattgacttcactcctaggcatttacccaaaaaaaggaaagcatatgtccacacaacgacttgtagacagatgttcacagcagctttatttgtgacagccccaaactacaaacaactcaaatggntccatgaaaacct

SEQ ID NO: 728292 - DNA, 260 bp, Homo sapiens
acgcgtccggcggtgcgaggcgtgcgggttgtcggaagctcaccgggtctcttgctggggagagggatgcgggccttcctgctactgctgtggcttgcagcccgcggaagcgcgctgtatttccacatcggagaaacagaaaagaatgcttcattgaggagattccggacgagaccatggtcatcggaaattaccggacgcagctgtatgacaaacagcgggaggagtaccagccagccacccctgggcttggcatgttc

SEQ ID NO: 728293 - DNA, 2702 bp, Homo sapiens
  misc_feature (61)..(61): n is a, c, g, or t
  misc_feature (83)..(83): n is a, c, g, or t
  misc_feature (95)..(95): n is a, c, g, or t
  misc_feature (127)..(127): n is a, c, g, or t
tggaagtaggacttcaacatggcggctgcggcactggcggtggctacggtgacggcctggnccggagcgggcagaagttgganggtggtggcgtngctctccctaggggctgtcgggagctcagcgnggaccgagcctgggaggccggccggtgccagcacctttcggcttctgagacggcggcagcagcggcattcaggttctaaatggcttctaagaagttgggtgcagattttcatgggactttcagttaccttgatgatgtcccatttaagacaggagacaaattcaaaacaccagctaaagttggtctacctattggcttctccttgcctgattgtttgcaggttgtcagagaagtacagtatgacttctctttggaaaagaaaaccattgagtgggctgaagagattaagaaaatcgaagaagccgagcgggaagcagagtgcaaaattgcggaagcagaagctaaagtgaattctaagagtggcccagagggcgatagcaaaatgagcttctccaagactcacagtacagccacaatgccacctcctattaaccccatcctcgccagcttgcagcacaacagcatcctcacaccaactcgggtcagcagtagtgccacgaaacagaaagttctcagcccacctcacataaaggcggatttcaatcttgctgactttgagtgtgaagaagacccatttgataatctggagttaaaaactattgatgagaaggaagagctgagaaatattctggtaggaaccactggacccattatggctcagttattggacaataacttgcccaggggaggctctgggtctgtgttacaggatgaggaggtcctggcatccttggaacgggcaaccctagatttcaagcctcttcataaacccaatggctttataaccttaccacagttgggcaactgtgaaaagatgtcactgtcttccaaagtgtccctcccccctatacctgcagtaagcaatatcaaatccctgtctttccccaaacttgactctgatgacagcaatcagaagacagccaagctggcgagcactttccatagcacatcctgcctccgcaatggcacgttccagaattccctaaagccttccacccaaagcagtgccagtgagctcaatgggcatcacactcttgggctttcagctttgaacttggacagtggcacagagatgccagccctgacatcctcccagatgccttccctctctgttttgtctgtgtgcacagaggaatcatcacctccaaatactggtcccacggtcacccctcctaatttctcagtgtcacaagtgcccaacatgcccagctgtccccaggcctattctgaactgcagatgctgtcccccagcgagcggcagtgtgtggagacggtggtcaacatgggctactcgtacgagtgtgtcctcagagccatgaagaagaaaggagagaatattgagcagattctcgactatctctttgcacatggacagctttgtgagaagggcttcgaccctcttttagtggaagaggctctggaaatgcaccagtgttcagaagaaaagatgatggagtttcttcagttaatgagcaaatttaaggagatgggctttgagctgaaagacattaaggaagttttgctattacacaacaatgaccaggacaatgctttggaagacctcatggctcgggcaggagccagctgagaccaggccctgcctaggccctgccgcagaaccaccatccctgggaggccctgcagagcccacctgtggggaaagagaaggggcagcttccggattttcttttgggggttagaaggtcaggtgtggagactgctcgccagtctctgtgagcctaggccctgagctggggaggtggggaagattcgggcatgtgagtgcccccagaactgtcctggctccttccgtattaaacgcatttgcattttgagaagtgtccttcccacttcagccctccggagagactaccctagtctttctggggtgtttatgtcctcagctgaagcctggcctagttgctgagaggggctggggagatggggcgggagggccagactcagtgctgctgtggagctaggtgcttcccccttcccctgagactggtggactgaactccagtcaagttgagttcaagtgaaagattcttccagggttttattttttcccctcctaacaaagtctcatagtgttaacactggttctgcaatatctctgaggtgcaaagaatgcacttttccctatggggcccagagtttgccttttctgccaggcagtcaccacgcttccctaccccagcctgtttcttttggcttggtttggaccacagtcctctgctacccagggttttagagcccctgctctaggaaacagtttaagaaatcattggccccttcccagcacattgaatgggtaagcagacaggccatgatttagttggccagcactaactccacctctgttctccttgaacagcttcccctccagcccactgctttaggatgacacaatgaataacacctagtcatagaaatcagtctctctggtttgttttgtattatgttgtacatcattaaagatctaaatacaaaggatatacagtcttgaatctaaaataatttgctaactattttgattcttcagagagaactactaataaaaatctaaaaggta

SEQ ID NO: 728294 - DNA, 399 bp, Homo sapiens
gagtatccccttggcaggcactagtgccgagcaaagggggaagagccccttataaatctaacacatcttgtgagaatgcactcactatcactgagaaaaggatgggggaaccacccccatgattcaattatctccacctcatctctccttgacacctggggattgtgagtcaagatgaggtgtgggtgtggacacaaagcctatccatatcacaaagggtgctagggggcgtccattttcttcttaccaatctacaatatttaattttttcataataaacatacatttcatttcatatttaaaatgttccatatttatttatttagagacagggtctcactatgttgcccaggcaggagtgtagtggtgcaatcaaagctcactgcagcctcgaactcc

SEQ ID NO: 728295 - DNA, 351 bp, Homo sapiens
ggaaacctggatcgttcacttgggaaaccgacaggttaagtcgtcatttcagaatagtaaatattagaacgatacaatactcggcattcctcaaaggtcagtacatccaatgtgctcgcacacatctgatgacgtcagaagaagcagctctgcccagaatcaggtatcagtaccatgcacatgctctaaaaagtactcatgccatgttatctgctcatttctgccagccttagaaacagtcgtcagaaaaatagcatccagagaggcaacttcgccttttaactgagctgtcttctgaccaatcagcagggcccagccaaaaagagcgtgacaatactcgacactagttct

SEQ ID NO: 728296 - DNA, 1080 bp, Homo sapiens
  misc_feature (17)..(17): n is a, c, g, or t
  misc_feature (102)..(102): n is a, c, g, or t
  misc_feature (398)..(398): n is a, c, g, or t
  misc_feature (512)..(512): n is a, c, g, or t
  misc_feature (515)..(515): n is a, c, g, or t
  misc_feature (811)..(811): n is a, c, g, or t
  misc_feature (888)..(888): n is a, c, g, or t
  misc_feature (960)..(960): n is a, c, g, or t
  misc_feature (976)..(976): n is a, c, g, or t
  misc_feature (996)..(996): n is a, c, g, or t
  misc_feature (1009)..(1009): n is a, c, g, or t
  misc_feature (1013)..(1013): n is a, c, g, or t
  misc_feature (1016)..(1017): n is a, c, g, or t
  misc_feature (1020)..(1020): n is a, c, g, or t
  misc_feature (1079)..(1079): n is a, c, g, or t
ccctcctccaccctctnccccccattccaaccttccaccctcccacctccccacaaaaaaaattacttattttcttcccccatacataccttcaccccaccnaaaaaattaaattttaaccatcacccaaatcctccacatccaccctcctcactctcccaaccacatccctcccaacttctcccacctcatcactcatcaacatcccatccaccccacccccacctaccacccccacacccacctccacctccaccccatctctctctactacaatcaacccacacctcccaaatatcttcctcctcccatcctcctccatctacaacctcccaccatccactctcttccctcacctccttttccccacatctttacaccacacaactttctatttnctcactctcccccacctaacaactcccccaaacccactacacacaccccccccacctccttcattctctcctccatctcctacccaaccacccacacacctctcactccctccnccncttccacctcacccactcactccccccccccacaccctctccaatccccactctccttatcaccaacatcccacaacaataccctcatcccatcatcaataccttcactctcctcccttcacccaaactctctcacaccctcctccacccctacaatcccaccctctccctccatcacttcctacacaatactcatcacacctattccattcacaaccaccccctctatcatatctccttccccactctcaacctcaccacaccaacctacccccatctcaaccaccttctctcanccaccatcacttctctcaacacctccctccctttccctccccacctcaatcctcacctccccaacttcccactcaanatcctccccttccccacctctccatttctttatccctcccttttcccctcttcaccacccctccaaccaacnctatccactctcacantccccactcacccaccactnttccatccaaaanatantcnntcntttaaccccccacccccaaactcacctcctcttttttccctctccattcataaacactnc

SEQ ID NO: 728297 - DNA, 2676 bp, Homo sapiens
  misc_feature (3)..(3): n is a, c, g, or t
aanaatcatgctggccccttacagtatttcttacatgtttggggctatcattccctagcatgggatttgtttaggacattgtgctagataatagagatccaggagggtctgtagccaggttgctgcccacaagaggcttgtgggaacatagtttggttaaatcttacaaggacattggaagccttactctttttaagtggggatcatcccacacgccttaaatgctgccttgtcccggttatccctcttgcccccaggagtgaggaaggagtgaattgggtggtggggtaaagatggccaccctggttcacacccccttcctctgctatatctttgcagtatgacttctctttggaaaagaaaaccattgagtgggctgaagagattaagaaaatcgaagaagccgagcgggaagcagagtgcaaaattgcggaagcagaagctaaagtgaattctaagagtggcccagagggcgatagcaaaatgagcttctccaagactcacagtacagccacaatgccacctcctattaaccccatcctcgccagcttgcagcacaacagcatcctcacaccaactcgggtcagcagtagtgccacgaaacagaaagttctcagcccacctcacataaaggcggatttcaatcttgctgactttgagtgtgaagaagacccatttgataatctggagttaaaaactattgatgagaaggaagagctgagaaatattctggtaggaaccactggacccattatggctcagttattggacaataacttgcccaggggaggctctgggtctgtgttacaggatgaggaggtcctggcatccttggaacgggcaaccctagatttcaagcctcttcataaacccaatggctttataaccttaccacagttgggcaactgtgaaaagatgtcactgtcttccaaagtgtccctcccccctatacctgcagtaagcaatatcaaatccctgtctttccccaaacttgactctgatgacagcaatcagaagacagccaagctggcgagcactttccatagcacatcctgcctccgcaatggcacgttccagaattccctaaagccttccacccaaagcagtgccagtgagctcaatgggcatcacactcttgggctttcagctttgaacttggacagtggcacagagatgccagccctgacatcctcccagatgccttccctctctgttttgtctgtgtgcacagaggaatcatcacctccaaatactggtcccacggtcacccctcctaatttctcagtgtcacaagtgcccaacatgcccagctgtccccaggcctattctgaactgcagatgctgtcccccagcgagcggcagtgtgtggagacggtggtcaacatgggctactcgtacgagtgtgtcctcagagccatgaagaagaaaggagagaatattgagcagattctcgactatctctttgcacatggacagctttgtgagaagggcttcgaccctcttttagtggaagaggctctggaaatgcaccagtgttcagaagaaaagatgatggagtttcttcagttaatgagcaaatttaaggagatgggctttgagctgaaagacattaaggaagttttgctattacacaacaatgaccaggacaatgctttggaagacctcatggctcgggcaggagccagctgagaccaggccctgcctaggccctgccgcagaaccaccatccctgggaggccctgcagagcccacctgtggggaaagagaaggggcagcttccggattttcttttgggggttagaaggtcaggtgtggagactgctcgccagtctctgtgagcctaggccctgagctggggaggtggggaagattcgggcatgtgagtgcccccagaactgtcctggctccttccgtattaaacgcatttgcattttgagaagtgtccttcccacttcagccctccggagagactaccctagtctttctggggtgtttatgtcctcagctgaagcctggcctagttgctgagaggggctggggagatggggcgggagggccagactcagtgctgctgtggagctaggtgcttcccccttcccctgagactggtggactgaactccagtcaagttgagttcaagtgaaagattcttccagggttttattttttcccctcctaacaaagtctcatagtgttaacactggttctgcaatatctctgaggtgcaaagaatgcacttttccctatggggcccagagtttgccttttctgccaggcagtcaccacgcttccctaccccagcctgtttcttttggcttggtttggaccacagtcctctgctacccagggttttagagcccctgctctaggaaacagtttaagaaatcattggccccttcccagcacattgaatgggtaagcagacaggccatgatttagttggccagcactaactccacctctgttctccttgaacagcttcccctccagcccactgctttaggatgacacaatgaataacacctagtcatagaaatcagtctctctggtttgttttgtattatgttgtacatcattaaagatctaaatacaaaggatatacagtcttgaatctaaaataatttgctaactattttgattcttcagagagaactactaataaaaatctaaaaggta

SEQ ID NO: 728298 - DNA, 1339 bp, Homo sapiens
  misc_feature (873)..(873): n is a, c, g, or t
  misc_feature (906)..(906): n is a, c, g, or t
  misc_feature (946)..(946): n is a, c, g, or t
  misc_feature (957)..(957): n is a, c, g, or t
  misc_feature (987)..(987): n is a, c, g, or t
  misc_feature (991)..(991): n is a, c, g, or t
  misc_feature (1011)..(1011): n is a, c, g, or t
gatgcactgatctgcacagatgacttcattgccaaagttgttcaaagatgtatgtccatccctgtgacgatgagggctattcggaggaaagctgaaaccattcaagccgacaccccagcactgtccctcattgcagagacagttgaagacatggtgaaaaagaacctgcccccggctagcagcccagggtatggcatgaccacaggcaacaacccaatgagtggtaccactacaccaaccaacacctttccggggggtcccattaccaccttgtttaatatgagcatgagcatcaaagatcggcatgagtcggtgggccatggggaggacttcagcaaggtgtctcagaacccaattcttaccagtttgttgcaaatcacagggaacggggggtctaccattggctcgagtccgacccctcctcatcacacgccgccacctgtctcttcgatggccggcaacaccaagaaccacccgatgctcatgaaccttcttaaagataatcctgcccaggatttctcaaccctttatggaagcagccctttagaaaggcagaactcctcttccggctcaccccgcatggaaatatgctcggggagcaacaagaccaagaaaaagaagtcatcaagattaccacctgagaaaccaaagcaccagactgaagatgactttcagagggagctattttcaatggatgttgactcacagaaccctatctttgatgtcaacatgacagctgacacgctggatacgccacacatcactccagctccaagccagtgtagcactcccccaacaacttacccacaaccagtacctcacccccaacccagtattcaaaggatggtccgactatccagttcagacagcatnggcccagatgtaactgacatcctttcagacatngcagaagaagcttctaaacttcccagcactagtgatgatngcccagccatnggcacccctcttcgagattcttcaagctcngggnattctcagagtaccctgtangactctgatgtctttcaaactaacaataatgaaaatccatacactgatccagctgatcttattgcagatgctgctggaagccccagtagtgactctcctaccaaatcattttttctcatgcatggagtagatttcaatcctgatttattgaacagccagagccaaagtggtttggagaaagaatattttgatgaaaagcagcaaagtggggataatgatgatttccacaggatttgcctccccaggcccctaatactttgggggtgccaatgctgccaggggacaccgggcacaccagtttagggcaataccaagcggaaagtgatcc

SEQ ID NO: 728299 - DNA, 2579 bp, Homo sapiens
  misc_feature (61)..(61): n is a, c, g, or t
  misc_feature (83)..(83): n is a, c, g, or t
  misc_feature (95)..(95): n is a, c, g, or t
  misc_feature (127)..(127): n is a, c, g, or t
tggaagtaggacttcaacatggcggctgcggcactggcggtggctacggtgacggcctggnccggagcgggcagaagttgganggtggtggcgtngctctccctaggggctgtcgggagctcagcgnggaccgagcctgggaggccggccggtgccagcacctttcggcttctgagacggcggcagcagcggcattcaggttctaaatggcttctaagaagttgggtgcagattttcatcagtatgacttctctttggaaaagaaaaccattgagtgggctgaagagattaagaaaatcgaagaagccgagcgggaagcagagtgcaaaattgcggaagcagaagctaaagtgaattctaagagtggcccagagggcgatagcaaaatgagcttctccaagactcacagtacagccacaatgccacctcctattaaccccatcctcgccagcttgcagcacaacagcatcctcacaccaactcgggtcagcagtagtgccacgaaacagaaagttctcagcccacctcacataaaggcggatttcaatcttgctgactttgagtgtgaagaagacccatttgataatctggagttaaaaactattgatgagaaggaagagctgagaaatattctggtaggaaccactggacccattatggctcagttattggacaataacttgcccaggggaggctctgggtctgtgttacaggatgaggaggtcctggcatccttggaacgggcaaccctagatttcaagcctcttcataaacccaatggctttataaccttaccacagttgggcaactgtgaaaagatgtcactgtcttccaaagtgtccctcccccctatacctgcagtaagcaatatcaaatccctgtctttccccaaacttgactctgatgacagcaatcagaagacagccaagctggcgagcactttccatagcacatcctgcctccgcaatggcacgttccagaattccctaaagccttccacccaaagcagtgccagtgagctcaatgggcatcacactcttgggctttcagctttgaacttggacagtggcacagagatgccagccctgacatcctcccagatgccttccctctctgttttgtctgtgtgcacagaggaatcatcacctccaaatactggtcccacggtcacccctcctaatttctcagtgtcacaagtgcccaacatgcccagctgtccccaggcctattctgaactgcagatgctgtcccccagcgagcggcagtgtgtggagacggtggtcaacatgggctactcgtacgagtgtgtcctcagagccatgaagaagaaaggagagaatattgagcagattctcgactatctctttgcacatggacagctttgtgagaagggcttcgaccctcttttagtggaagaggctctggaaatgcaccagtgttcagaagaaaagatgatggagtttcttcagttaatgagcaaatttaaggagatgggctttgagctgaaagacattaaggaagttttgctattacacaacaatgaccaggacaatgctttggaagacctcatggctcgggcaggagccagctgagaccaggccctgcctaggccctgccgcagaaccaccatccctgggaggccctgcagagcccacctgtggggaaagagaaggggcagcttccggattttcttttgggggttagaaggtcaggtgtggagactgctcgccagtctctgtgagcctaggccctgagctggggaggtggggaagattcgggcatgtgagtgcccccagaactgtcctggctccttccgtattaaacgcatttgcattttgagaagtgtccttcccacttcagccctccggagagactaccctagtctttctggggtgtttatgtcctcagctgaagcctggcctagttgctgagaggggctggggagatggggcgggagggccagactcagtgctgctgtggagctaggtgcttcccccttcccctgagactggtggactgaactccagtcaagttgagttcaagtgaaagattcttccagggttttattttttcccctcctaacaaagtctcatagtgttaacactggttctgcaatatctctgaggtgcaaagaatgcacttttccctatggggcccagagtttgccttttctgccaggcagtcaccacgcttccctaccccagcctgtttcttttggcttggtttggaccacagtcctctgctacccagggttttagagcccctgctctaggaaacagtttaagaaatcattggccccttcccagcacattgaatgggtaagcagacaggccatgatttagttggccagcactaactccacctctgttctccttgaacagcttcccctccagcccactgctttaggatgacacaatgaataacacctagtcatagaaatcagtctctctggtttgttttgtattatgttgtacatcattaaagatctaaatacaaaggatatacagtcttgaatctaaaataatttgctaactattttgattcttcagagagaactactaataaaaatctaaaaggta

SEQ ID NO: 728300 - DNA, 1322 bp, Homo sapiens
  misc_feature (856)..(856): n is a, c, g, or t
  misc_feature (889)..(889): n is a, c, g, or t
  misc_feature (929)..(929): n is a, c, g, or t
  misc_feature (940)..(940): n is a, c, g, or t
  misc_feature (970)..(970): n is a, c, g, or t
  misc_feature (974)..(974): n is a, c, g, or t
  misc_feature (994)..(994): n is a, c, g, or t
ctctagaggatctcgtgctccttccgggtgcatccttccgggttgtgcatccggtagtcggtggagcaggaaagctgaaaccattcaagccgacaccccagcactgtccctcattgcagagacagttgaagacatggtgaaaaagaacctgcccccggctagcagcccagggtatggcatgaccacaggcaacaacccaatgagtggtaccactacaccaaccaacacctttccggggggtcccattaccaccttgtttaatatgagcatgagcatcaaagatcggcatgagtcggtgggccatggggaggacttcagcaaggtgtctcagaacccaattcttaccagtttgttgcaaatcacagggaacggggggtctaccattggctcgagtccgacccctcctcatcacacgccgccacctgtctcttcgatggccggcaacaccaagaaccacccgatgctcatgaaccttcttaaagataatcctgcccaggatttctcaaccctttatggaagcagccctttagaaaggcagaactcctcttccggctcaccccgcatggaaatatgctcggggagcaacaagaccaagaaaaagaagtcatcaagattaccacctgagaaaccaaagcaccagactgaagatgactttcagagggagctattttcaatggatgttgactcacagaaccctatctttgatgtcaacatgacagctgacacgctggatacgccacacatcactccagctccaagccagtgtagcactcccccaacaacttacccacaaccagtacctcacccccaacccagtattcaaaggatggtccgactatccagttcagacagcatnggcccagatgtaactgacatcctttcagacatngcagaagaagcttctaaacttcccagcactagtgatgatngcccagccatnggcacccctcttcgagattcttcaagctcngggnattctcagagtaccctgtangactctgatgtctttcaaactaacaataatgaaaatccatacactgatccagctgatcttattgcagatgctgctggaagccccagtagtgactctcctaccaaatcattttttctcatgcatggagtagatttcaatcctgatttattgaacagccagagccaaagtggtttggagaaagaatattttgatgaaaagcagcaaagtggggataatgatgatttccacaggatttgcctccccaggcccctaatactttgggggtgccaatgctgccaggggacaccgggcacaccagtttagggcaataccaagcggaaagtgatcc

SEQ ID NO: 728301 - DNA, 3391 bp, Homo sapiens
  misc_feature (61)..(61): n is a, c, g, or t
  misc_feature (83)..(83): n is a, c, g, or t
  misc_feature (95)..(95): n is a, c, g, or t
  misc_feature (127)..(127): n is a, c, g, or t
  misc_feature (3391)..(3391): n is a, c, g, or t
tggaagtaggacttcaacatggcggctgcggcactggcggtggctacggtgacggcctggnccggagcgggcagaagttgganggtggtggcgtngctctccctaggggctgtcgggagctcagcgnggaccgagcctgggaggccggccggtgccagcacctttcggcttctgagacggcggcagcagcggcattcaggttctaaatggcttctaagaagttgggtgcagattttcatgggactttcagttaccttgatgatgtcccatttaagacaggagacaaattcaaaacaccagctaaagttggtctacctattggcttctccttgcctgattgtttgcaggttgtcagagaagtacagtatgacttctctttggaaaagaaaaccattgagtgggctgaagagattaagaaaatcgaagaagccgagcgggaagcagagtgcaaaattgcggaagcagaagctaaagtgaattctaagagtggcccagagggcgatagcaaaatgagcttctccaagactcacagtacagccacaatgccacctcctattaaccccatcctcgccagcttgcagcacaacagcatcctcacaccaactcgggtcagcagtagtgccacgaaacagaaagttctcagcccacctcacataaaggcggatttcaatcttgctgactttgagtgtgaagaagacccatttgataatctggagttaaaaactattgatgagaaggaagagctgagaaatattctggtaggaaccactggacccattatggctcagttattggacaataacttgcccaggggaggctctgggtctgtgttacaggatgaggaggtcctggcatccttggaacgggcaaccctagatttcaagcctcttcataaacccaatggctttataaccttaccacagttgggcaactgtgaaaagatgtcactgtcttccaaagtgtccctcccccctatacctgcagtaagcaatatcaaatccctgtctttccccaaacttgactctgatgacagcaatcagaagacagccaagctggcgagcactttccatagcacatcctgcctccgcaatggcacgttccagaattccctaaagccttccacccaaagcagtgccagtgagctcaatgggcatcacactcttgggctttcagctttgaacttggacagtggcacagagatgccagccctgacatcctcccagatgccttccctctctgttttgtctgtgtgcacagaggaatcatcacctccaaatactggtcccacggtcacccctcctaatttctcagtgtcacaagtgcccaacatgcccagctgtccccaggcctattctgaactgcagatgctgtcccccagcgagcggcagtgtgtggagacggtggtcaacatgggctactcgtacgagtgtgtcctcagagccatgaagaagaaaggagagaatattgagcagattctcgactatctctttgcacatggacagctttgtgagaagggcttcgaccctcttttagtggaagaggctctggaaatgcaccagtgttcagaagaaaagatgatggagtttcttcagttaatgagcaaatttaaggagatgggctttgagctgaaagacattaaggaagttttgctattacacaacaatgaccaggacaatgctttggaagacctcatggctcgggcaggagccagctgagaccaggccctgcctaggccctgccgcagaaccaccatccctgggaggccctgcagagcccacctgtggggaaagagaaggggcagcttccggattttcttttgggggttagaaggtcaggtgtggagactgctcgccagtctctgtgagcctaggccctgagctggggaggtggggaagattcgggcatgtgagtgcccccagaactgtcctggctccttccgtattaaacgcatttgcattttgagaagtgtccttcccacttcagccctccggagagactaccctagtctttctggggtgtttatgtcctcagctgaagcctggcctagttgctgagaggggctggggagatggggcgggagggccagactcagtgctgctgtggagctaggtgcttcccccttcccctgagactggtggactgaactccagtcaagttgagttcaagtgaaagattcttccagggttttattttttcccctcctaacaaagtctcatagtgttaacactggttctgcaatatctctgaggtgcaaagaatgcacttttccctatggggcccagagtttgccttttctgccaggcagtcaccacgcttccctaccccagcctgtttcttttggcttggtttggaccacagtcctctgctacccagggttttagagcccctgctctaggaaacagtttaagaaatcattggccccttcccagcacattgaatgggtaagcagacaggccatgatttagttggccagcactaactccacctctgttctccttgaacagcttcccctccagcccactgctttaggatgacacaatgaataacacctagtcatagaaatcagtctctctggtttgttttgtattatgttgtacatcattaaagatctaaatacaaaggatatacagtcttgaatctaaaataatttgctaactattttgattcttcagagagaactactaataaaaatctaaaaggtaaaaaaaaaaaaaaaaaaaaaaaaaaaaaagagggggggcggcgatcgcgcgcgaactcatagaaaccatgaggggcgccatattcatctatatagtataaaacccccgagcccacagtggacccctataaagagagggggccccctctctcgagacccctctctctataagggaacccgcgcggcccaagcccgagggtgatttctacactctcacacactccaacataagcgccctcctcaatatacaaggagggccatactaaaacacaaaacactataaaccatatattacccaaggagagtgggcgccgaagcgtctacacgagcggaagaaaagccaccaattaccacaggggcacacaacaagaaaaccacgcgtggtccccaaaaagggggccttgcgaaaaaaggaggagataaactcctatatattgtatttataacccttcaaaaagaaagtgtttttattaccatctttacacgaaaggaggaagttattatctggaaaacgcctttttgttagccaccttccaacggcacatatagacgccaatattaaacccccagcaaaatattaagaggaaggggcgcattgtgagtggcccccacaaaaaggaggagtattaacccccccggtgtaaaaaatttctcccctttaaagaaacggttccacattatcgtgataan

SEQ ID NO: 728302 - DNA, 4796 bp, Homo sapiens
  misc_feature (61)..(61): n is a, c, g, or t
  misc_feature (83)..(83): n is a, c, g, or t
  misc_feature (95)..(95): n is a, c, g, or t
  misc_feature (127)..(127): n is a, c, g, or t
  misc_feature (4569)..(4569): n is a, c, g, or t
  misc_feature (4596)..(4596): n is a, c, g, or t
tggaagtaggacttcaacatggcggctgcggcactggcggtggctacggtgacggcctggnccggagcgggcagaagttgganggtggtggcgtngctctccctaggggctgtcgggagctcagcgnggaccgagcctgggaggccggccggtgccagcacctttcggcttctgagacggcggcagcagcggcattcaggttctaaatggcttctaagaagttgggtgcagattttcatgggactttcagttaccttgatgatgtcccatttaagacaggagacaaattcaaaacaccagctaaagttggtctacctattggcttctccttgcctgattgtttgcaggttgtcagagaagtacagtatgacttctctttggaaaagaaaaccattgagtgggctgaagagattaagaaaatcgaagaagccgagcgggaagcagagtgcaaaattgcggaagcagaagctaaagtgaattctaagagtggcccagagggcgatagcaaaatgagcttctccaagactcacagtacagccacaatgccacctcctattaaccccatcctcgccagcttgcagcacaacagcatcctcacaccaactcgggtcagcagtagtgccacgaaacagaaagttctcagcccacctcacataaaggcggatttcaatcttgctgactttgagtgtgaagaagacccatttgataatctggagttaaaaactattgatgagaaggaagagctgagaaatattctggtaggaaccactggacccattatggctcagttattggacaataacttgcccaggggaggctctgggtctgtgttacaggatgaggaggtcctggcatccttggaacgggcaaccctagatttcaagcctcttcataaacccaatggctttataaccttaccacagttgggcaactgtgaaaagatgtcactgtcttccaaagtgtccctcccccctatacctgcagtaagcaatatcaaatccctgtctttccccaaacttgactctgatgacagcaatcagaagacagccaagctggcgagcactttccatagcacatcctgcctccgcaatggcacgttccagaattccctaaagccttccacccaaagcagtgccagtgagctcaatgggcatcacactcttgggctttcagctttgaacttggacagtggcacagagatgccagccctgacatcctcccagatgccttccctctctgttttgtctgtgtgcacagaggaatcatcacctccaaatactggtcccacggtcacccctcctaatttctcagtgtcacaagtgcccaacatgcccagctgtccccaggcctattctgaactgcagatgctgtcccccagcgagcggcagtgtgtggagacggtggtcaacatgggctactcgtacgagtgtgtcctcagagccatgaagaagaaaggagagaatattgagcagattctcgactatctctttgcacatggacagctttgtgagaagggcttcgaccctcttttagtggaagaggctctggaaatgcaccagtgttcagaagaaaagatgatggagtttcttcagttaatgagcaaatttaaggagatgggctttgagctgaaagacattaaggaagttttgctattacacaacaatgaccaggacaatgctttggaagacctcatggctcgggcaggagccagctgagaccaggccctgcctaggccctgccgcagaaccaccatccctgggaggccctgcagagcccacctgtggggaaagagaaggggcagcttccggattttcttttgggggttagaaggtcaggtgtggagactgctcgccagtctctgtgagcctaggccctgagctggggaggtggggaagattcgggcatgtgagtgcccccagaactgtcctggctccttccgtattaaacgcatttgcattttgagaagtgtccttcccacttcagccctccggagagactaccctagtctttctggggtgtttatgtcctcagctgaagcctggcctagttgctgagaggggctggggagatggggcgggagggccagactcagtgctgctgtggagctaggtgcttcccccttcccctgagactggtggactgaactccagtcaagttgagttcaagtgaaagattcttccagggttttattttttcccctcctaacaaagtctcatagtgttaacactggttctgcaatatctctgaggtgcaaagaatgcacttttccctatggggcccagagtttgccttttctgccaggcagtcaccacgcttccctaccccagcctgtttcttttggcttggtttggaccacagtcctctgctacccagggttttagagcccctgctctaggaaacagtttaagaaatcattggccccttcccagcacattgaatgggtaagcagacaggccatgatttagttggccagcactaactccacctctgttctccttgaacagcttcccctccagcccactgctttaggatgacacaatgaataacacctagtcatagaaatcagtctctctggtttgttttgtattatgttgtacatcattaaagatctaaatacaaaggatatacagtcttgaatctaaaataatttgctaactattttgattcttcagagagaactactaataaaaatctaaaaggtatgtcttggtgtgataacttctttattaccaaggctgttttatgggagtgggggggccatgtggtgtataaagagatttcttgcttagatttgctggggatagaataggacctaaccgttttctatttcggagctttcttcccacttcagacctgtcctcgtttttggtttgcaaaggcaagcctagactgagtcttttaaacctggcccagctccgtctgtggaccaaggacgtaggccttcctgactgtggagttgggataggctgggccttcagggggatcacccagtaaaagaggaagaagcccttttactgtgagcagcaggcatttatgcatcatttgccacaagcagaggatgggatttaaactgtttcaccagctctcagtggtgctgttgtatatgatgatagaatagggttcattcctaaagtaagtaagtttttgtccttgaccttaatactgtgccattgtcccacttgagcttttggctagactgggtctttgaaggtttttagtgatcatgtgagggaggggccgcagtgccctgcagccgggaagcaccaataaggatgccccctggcggtcagatgaggcactgtcaggctgacaaagggtgactggaccaggctgctagtgtctcaagagagccatttaaccctcttcttgccttttaattaagccctccttttaaaaccgtaaaaagttatcctttatctgaaggaaataaaggctcacatagtaatgggcgttcggggccaggccgtgactcatgaatctccatttgacccaagagtggcttcaaagtaattggcacctggaggctactttgtcttccctgtcctgagctgcttcctgctaaaaagatacacagcaggcagaacttggctgaaggtttgtgtgtgaattctgtttcagaggcctcagactgttgaacagagcactctgttcaactgccaaggttcccaacacagacccctgagaggcagggtggctgggcagggtgaactggatgaaggccaggctaggagatggactattccatgagggggctgggtagtgaggtgtcccagataggagccaggagctgccatggaagcatgagagtatcggcatgtacagagcctttcacccgagcaaaagtcaggagaaaattgatgtgtgacacaggcaccctcttctgcctcaacactggattgcaggaagggaagggagctgtaaatataaggcctgtctcacatctgctgctgtcagtgacacatcaagtcaaggtttatgctatttacattttcaaaacgcctctgaatccccaaatcaatctccaagggctgatggggcagagctcaccccacccctgtccccctagcaccaatggttaagtttgggccagtgtttagtcttctaagttaggcacagaattcagctggtgaagcctctggtctcagcatgttgtcttctctgtcttgtgacctctgacctctaggctaccactgaccaccccatcctctgatccccaaacttagaaacttcagggttattagacccaaatatattcccacaggcaaggggttagttaatcatattctctaggcacaagggaaaggcattaggttcttcggcctggcccacccttggaggcactcctgtgcatggaactgagggacaggggcctgtccctgagggagaagctgggacctatctgaagccacgtggggctggggtgacgctagcataggcaggaccagcgtgtgggttctggtgtgtgcagggaggacctggcagaggctcctccagcctgagagcccagcacagactcctgcagggcccccaccatctcggcacagggtctggctctaagacggcactgtnccctcaggggctgcggtgggcccgtgncaggtgagatagagctgcagctggctcctcagactctgggatacccttggatttcagaaccatgattcatccagctgggtcacaaaatcttcaaaatcattagaagccagctggctcatcagcgtctcctccttgagccgagatcagccattcatccagctgttcctggtgtgtcggattgacactgttggcttgtccag

SEQ ID NO: 728303 - DNA, 269 bp, Homo sapiens
cgccgaaaatgaatagaggcaggattttgaacaaattatacttatttttgatagagtctcgctctgcaccaagctagggtgcagggatgatctcagctcagtggaacctccacctccggagtccaagcgactctcccaccccagcctcctaagtagctgggaccacaggagtgtgccaccacgccggactaactttggcattttcagcagagagggggcttcaccacgctggccaggctggcttcgaactcccgacctcaggtgatcca

SEQ ID NO: 728304 - DNA, 4711 bp, Homo sapiens
  misc_feature (61)..(61): n is a, c, g, or t
  misc_feature (83)..(83): n is a, c, g, or t
  misc_feature (95)..(95): n is a, c, g, or t
  misc_feature (127)..(127): n is a, c, g, or t
  misc_feature (4569)..(4569): n is a, c, g, or t
  misc_feature (4596)..(4596): n is a, c, g, or t
tggaagtaggacttcaacatggcggctgcggcactggcggtggctacggtgacggcctggnccggagcgggcagaagttgganggtggtggcgtngctctccctaggggctgtcgggagctcagcgnggaccgagcctgggaggccggccggtgccagcacctttcggcttctgagacggcggcagcagcggcattcaggttctaaatggcttctaagaagttgggtgcagattttcatgggactttcagttaccttgatgatgtcccatttaagacaggagacaaattcaaaacaccagctaaagttggtctacctattggcttctccttgcctgattgtttgcaggttgtcagagaagtacagtatgacttctctttggaaaagaaaaccattgagtgggctgaagagattaagaaaatcgaagaagccgagcgggaagcagagtgcaaaattgcggaagcagaagctaaagtgaattctaagagtggcccagagggcgatagcaaaatgagcttctccaagactcacagtacagccacaatgccacctcctattaaccccatcctcgccagcttgcagcacaacagcatcctcacaccaactcgggtcagcagtagtgccacgaaacagaaagttctcagcccacctcacataaaggcggatttcaatcttgctgactttgagtgtgaagaagacccatttgataatctggagttaaaaactattgatgagaaggaagagctgagaaatattctggtaggaaccactggacccattatggctcagttattggacaataacttgcccaggggaggctctgggtctgtgttacaggatgaggaggtcctggcatccttggaacgggcaaccctagatttcaagcctcttcataaacccaatggctttataaccttaccacagttgggcaactgtgaaaagatgtcactgtcttccaaagtgtccctcccccctatacctgcagtaagcaatatcaaatccctgtctttccccaaacttgactctgatgacagcaatcagaagacagccaagctggcgagcactttccatagcacatcctgcctccgcaatggcacgttccagaattccctaaagccttccacccaaagcagtgccagtgagctcaatgggcatcacactcttgggctttcagctttgaacttggacagtggcacagagatgccagccctgacatcctcccagatgccttccctctctgttttgtctgtgtgcacagaggaatcatcacctccaaatactggtcccacggtcacccctcctaatttctcagtgtcacaagtgcccaacatgcccagctgtccccaggcctattctgaactgcagatgctgtcccccagcgagcggcagtgtgtggagacggtggtcaacatgggctactcgtacgagtgtgtcctcagagccatgaagaagaaaggagagaatattgagcagattctcgactatctctttgcacatggacagctttgtgagaagggcttcgaccctcttttagtggaagaggctctggaaatgcaccagtgttcagaagaaaagatgatggagtttcttcagttaatgagcaaatttaaggagatgggctttgagctgaaagacattaaggaagttttgctattacacaacaatgaccaggacaatgctttggaagacctcatggctcgggcaggagccagctgagaccaggccctgcctaggccctgccgcagaaccaccatccctgggaggccctgcagagcccacctgtggggaaagagaaggggcagcttccggattttcttttgggggttagaaggtcaggtgtggagactgctcgccagtctctgtgagcctaggccctgagctggggaggtggggaagattcgggcatgtgagtgcccccagaactgtcctggctccttccgtattaaacgcatttgcattttgagaagtgtccttcccacttcagccctccggagagactaccctagtctttctggggtgtttatgtcctcagctgaagcctggcctagttgctgagaggggctggggagatggggcgggagggccagactcagtgctgctgtggagctaggtgcttcccccttcccctgagactggtggactgaactccagtcaagttgagttcaagtgaaagattcttccagggttttattttttcccctcctaacaaagtctcatagtgttaacactggttctgcaatatctctgaggtgcaaagaatgcacttttccctatggggcccagagtttgccttttctgccaggcagtcaccacgcttccctaccccagcctgtttcttttggcttggtttggaccacagtcctctgctacccagggttttagagcccctgctctaggaaacagtttaagaaatcattggccccttcccagcacattgaatgggtaagcagacaggccatgatttagttggccagcactaactccacctctgttctccttgaacagcttcccctccagcccactgctttaggatgacacaatgaataacacctagtcatagaaatcagtctctctggtttgttttgtattatgttgtacatcattaaagatctaaatacaaaggatatacagtcttgaatctaaaataatttgctaactattttgattcttcagagagaactactaataaaaatctaaaaggtatgtcttggtgtgataacttctttattaccaaggctgttttatgggagtgggggggccatgtggtgtataaagagatttcttgcttagatttgctggggatagaataggacctaaccgttttctatttcggagctttcttcccacttcagacctgtcctcgtttttggtttgcaaaggcaagcctagactgagtcttttaaacctggcccagctccgtctgtggaccaaggacgtaggccttcctgactgtggagttgggataggctgggccttcagggggatcacccagtaaaagaggaagaagcccttttactgtgagcagcaggcatttatgcatcatttgccacaagcagaggatgggatttaaactgtttcaccagctctcagtggtgctgttgtatatgatgatagaatagggttcattcctaaagtaagtaagtttttgtccttgaccttaatactgtgccattgtcccacttgagcttttggctagactgggtctttgaaggtttttagtgatcatgtgagggaggggccgcagtgccctgcagccgggaagcaccaataaggatgccccctggcggtcagatgaggcactgtcaggctgacaaagggtgactggaccaggctgctagtgtctcaagagagccatttaaccctcttcttgccttttaattaagccctccttttaaaaccgtaaaaagttatcctttatctgaaggaaataaaggctcacatagtaatgggcgttcggggccaggccgtgactcatgaatctccatttgacccaagagtggcttcaaagtaattggcacctggaggctactttgtcttccctgtcctgagctgcttcctgctaaaaagatacacagcaggcagaacttggctgaaggtttgtgtgtgaattctgtttcagaggcctcagactgttgaacagagcactctgttcaactgccaaggttcccaacacagacccctgagaggcagggtggctgggcagggtgaactggatgaaggccaggctaggagatggactattccatgagggggctgggtagtgaggtgtcccagataggagccaggagctgccatggaagcatgagagtatcggcatgtacagagcctttcacccgagcaaaagtcaggagaaaattgatgtgtgacacaggcaccctcttctgcctcaacactggattgcaggaagggaagggagctgtaaatataaggcctgtctcacatctgctgctgtcagtgacacatcaagtcaaggtttatgctatttacattttcaaaacgcctctgaatccccaaatcaatctccaagggctgatggggcagagctcaccccacccctgtccccctagcaccaatggttaagtttgggccagtgtttagtcttctaagttaggcacagaattcagctggtgaagcctctggtctcagcatgttgtcttctctgtcttgtgacctctgacctctaggctaccactgaccaccccatcctctgatccccaaacttagaaacttcagggttattagacccaaatatattcccacaggcaaggggttagttaatcatattctctaggcacaagggaaaggcattaggttcttcggcctggcccacccttggaggcactcctgtgcatggaactgagggacaggggcctgtccctgagggagaagctgggacctatctgaagccacgtggggctggggtgacgctagcataggcaggaccagcgtgtgggttctggtgtgtgcagggaggacctggcagaggctcctccagcctgagagcccagcacagactcctgcagggcccccaccatctcggcacagggtctggctctaagacggcactgtnccctcaggggctgcggtgggcccgtgncaggtgagaggcaaccaactcaggagtcagatcctctggtccagatctaataagctgaacattcaggctgtaatttggggttttaaagaaatgttttaggagggttgtgtttaca

SEQ ID NO: 728305 - DNA, 2652 bp, Homo sapiens
  misc_feature (61)..(61): n is a, c, g, or t
  misc_feature (83)..(83): n is a, c, g, or t
  misc_feature (95)..(95): n is a, c, g, or t
  misc_feature (127)..(127): n is a, c, g, or t
tggaagtaggacttcaacatggcggctgcggcactggcggtggctacggtgacggcctggnccggagcgggcagaagttgganggtggtggcgtngctctccctaggggctgtcgggagctcagcgnggaccgagcctgggaggccggccggtgccagcacctttcggcttctgagacggcggcagcagcggcattcaggttctaaatggcttctaagaagttgggtgcagattttcatgggactttcagttaccttgatgatgtcccatttaagacaggagacaaattcaaaacaccagctaaagttggtctacctattggcttctccttgcctgattgtttgcaggttgtcagagaagtacagtatgacttctctttggaaaagaaaaccattgagtgggctgaagagattaagaaaatcgaagaagccgagcgggaagcagagtgcaaaattgcggaagcagaagctaaagtgaattctaagagtggcccagagggcgatagcaaaatgagcttctccaagactcacagtacagccacaatgccacctcctattaaccccatcctcgccagcttgcagcacaacagcatcctcacaccaactcgggtcagcagtagtgccacgaaacagaaagttctcagcccacctcacataaaggcggatttcaatcttgctgactttgagtgtgaagaagacccatttgataatctggagttaaaaactattgatgagaaggaagagctgagaaatattctggtaggaaccactggacccattatggctcagttattggacaataacttgcccaggggaggctctgggtctgtgttacaggatgaggaggtcctggcatccttggaacgggcaaccctagatttcaagcctcttcataaacccaatggctttataaccttaccacagttgggcaactgtgaaaagatgtcactgtcttccaaagtgtccctcccccctatacctgcagtaagcaatatcaaatccctgtctttccccaaacttgactctgatgacagcaatcagaagacagccaagctggcgagcactttccatagcacatcctgcctccgcaatggcacgttccagaattccctaaagccttccacccaaagcagtgccagtgagctcaatgggcatcacactcttgggctttcagctttgaacttggacagtggcacagagatgccagccctgacatcctcccagatgccttccctctctgttttgtctgtgtgcacagaggaatcatcacctccaaatactggtcccacggtcacccctcctaatttctcagtgtcacaagtgcccaacatgcccagctgtccccaggcctattctgaactgcagatgctgtcccccagcgagcggcagtgtgtggagacggtggtcaacatgggctactcgtacgagtgtgtcctcagagccatgaagaagaaaggagagaatattgagcagattctcgactatctctttgcacatggacagctttgtgagaagggcttcgaccctcttttagtggaagaggctctggaaatgcaccagtgttcagaagaaagagctgaaagacattaaggaagttttgctattacacaacaatgaccaggacaatgctttggaagacctcatggctcgggcaggagccagctgagaccaggccctgcctaggccctgccgcagaaccaccatccctgggaggccctgcagagcccacctgtggggaaagagaaggggcagcttccggattttcttttgggggttagaaggtcaggtgtggagactgctcgccagtctctgtgagcctaggccctgagctggggaggtggggaagattcgggcatgtgagtgcccccagaactgtcctggctccttccgtattaaacgcatttgcattttgagaagtgtccttcccacttcagccctccggagagactaccctagtctttctggggtgtttatgtcctcagctgaagcctggcctagttgctgagaggggctggggagatggggcgggagggccagactcagtgctgctgtggagctaggtgcttcccccttcccctgagactggtggactgaactccagtcaagttgagttcaagtgaaagattcttccagggttttattttttcccctcctaacaaagtctcatagtgttaacactggttctgcaatatctctgaggtgcaaagaatgcacttttccctatggggcccagagtttgccttttctgccaggcagtcaccacgcttccctaccccagcctgtttcttttggcttggtttggaccacagtcctctgctacccagggttttagagcccctgctctaggaaacagtttaagaaatcattggccccttcccagcacattgaatgggtaagcagacaggccatgatttagttggccagcactaactccacctctgttctccttgaacagcttcccctccagcccactgctttaggatgacacaatgaataacacctagtcatagaaatcagtctctctggtttgttttgtattatgttgtacatcattaaagatctaaatacaaaggatatacagtcttgaatctaaaataatttgctaactattttgattcttcagagagaactactaataaaaatctaaaaggta

SEQ ID NO: 728306 - DNA, 1664 bp, Homo sapiens
cggccgaaactcaggaaacaggcagtgacggattcaatatacgaatcgttcaaaagagcacaattcaagcaccagagcggaagcgtatgatataataaacaccactaggcgggcactgttacatacattaccatgccctgaatgtccttctgttcctcaaactgccagccctgacatcctcccagatgccttccctctctgttttgtctgtgtgcacagaggaatcatcacctccaaatactggtcccacggtcacccctcctaatttctcagtgtcacaagtgcccaacatgcccagctgtccccaggcctattctgaactgcagatgctgtcccccagcgagcggcagtgtgtggagacggtggtcaacatgggctactcgtacgagtgtgtcctcagagccatgaagaagaaaggagagaatattgagcagattctcgactatctctttgcacatggacagctttgtgagaagggcttcgaccctcttttagtggaagaggctctggaaatgcaccagtgttcagaagaaaagatgatggagtttcttcagttaatgagcaaatttaaggagatgggctttgagctgaaagacattaaggaagttttgctattacacaacaatgaccaggacaatgctttggaagacctcatggctcgggcaggagccagctgagaccaggccctgcctaggccctgccgcagaaccaccatccctgggaggccctgcagagcccacctgtggggaaagagaaggggcagcttccggattttcttttgggggttagaaggtcaggtgtggagactgctcgccagtctctgtgagcctaggccctgagctggggaggtggggaagattcgggcatgtgagtgcccccagaactgtcctggctccttccgtattaaacgcatttgcattttgagaagtgtccttcccacttcagccctccggagagactaccctagtctttctggggtgtttatgtcctcagctgaagcctggcctagttgctgagaggggctggggagatggggcgggagggccagactcagtgctgctgtggagctaggtgcttcccccttcccctgagactggtggactgaactccagtcaagttgagttcaagtgaaagattcttccagggttttattttttcccctcctaacaaagtctcatagtgttaacactggttctgcaatatctctgaggtgcaaagaatgcacttttccctatggggcccagagtttgccttttctgccaggcagtcaccacgcttccctaccccagcctgtttcttttggcttggtttggaccacagtcctctgctacccagggttttagagcccctgctctaggaaacagtttaagaaatcattggccccttcccagcacattgaatgggtaagcagacaggccatgatttagttggccagcactaactccacctctgttctccttgaacagcttcccctccagcccactgctttaggatgacacaatgaataacacctagtcatagaaatcagtctctctggtttgttttgtattatgttgtacatcattaaagatctaaatacaaaggatatacagtcttgaatctaaaataatttgctaactattttgattcttcagagagaactactaataaaaatctaaaaggta

SEQ ID NO: 728307 - DNA, 441 bp, Homo sapiens; identical to SEQ ID NO: 404193

SEQ ID NO: 728308 - DNA, 722 bp, Homo sapiens; identical to SEQ ID NO: 265030

SEQ ID NO: 728309 - DNA, 417 bp, Homo sapiens
ttcctttcacctggggaaggatttggctttggggaggtaagagcttgaaacatgggatgagagaggagtcactgctacctctgatttgctcaaagccatgggagttgtttagaattctctacctctactgtcacctaacaggcaggcttcatctgcaggccttccaagtagtggaagttcacaggtagaaaatttaggtccctgaatccgtgggttcgctgtctcagcccattcagaacaattctttaggtactggcctcactggagaaagaagtgatccagaagaacagtctagtgaccaggagatctgagggtagggtgggagtgacgctagagcaccaaggggggctttacagctgtgttctcatggaggacaggcttctgctcattctggctttcccactcttgtggttccca

SEQ ID NO: 728310 - DNA, 663 bp, Homo sapiens
gcttcacaattggtttcatgttctgatcccccatcttactaaacatgtaatctgggacaagccactggctctctcagaacctgtttcttcatctgtgaaatgggaatgcaaacaccagtttcaccagctgtcttaaacccaaatgagataatgcataactacaaaatgatacacaaatgaggttgactgtactattcttattccttgatggcattaaaggttttttttttcataattagtactttttctttgaatgtgtgagtggtagatgcaattggaacccttttgcaactcttcttggttggaaagttatctaaagttgctaatcagaccctctgctaatgtaaattctatatactgagacactgctaaacacccattaattttaactttctcattaaaaaggatgacatagaaacccttctttgtagtcaatatagatgtattttctcaaagtgaatcattaaacttaagggctttgtcatgtgaggcctctgaaaattgtacaatattagaaacatcaatgtctgtgtttaataaacttactggtagctttactgtgttgaatgtctccacctaattttgtttgtttaaaaccttgcttttggaaatttagcccttcaacttttctttaacaaaatcttggaatgaacttctgattta

SEQ ID NO: 728311 - DNA, 289 bp, Homo sapiens; identical to SEQ ID NO: 264196

SEQ ID NO: 728312 - DNA, 464 bp, Homo sapiens; identical to SEQ ID NO: 264197
  misc_feature (406)..(406): n is a, c, g, or t
  misc_feature (415)..(415): n is a, c, g, or t
  misc_feature (440)..(440): n is a, c, g, or t

SEQ ID NO: 728313 - DNA, 308 bp, Homo sapiens
  misc_feature (250)..(250): n is a, c, g, or t
  misc_feature (259)..(259): n is a, c, g, or t
  misc_feature (284)..(284): n is a, c, g, or t
gccggcccgccgccggagccggccgagcttagagaagcgcccggagccaggcgcgcggggccgccagcgaggacctcccccgtctcctccccgaggccgccgcagccccctgctctccttaagggtctttcccagatgtgaaggtccctcccaggctctactgaggtcagaccaattcccagtggcttgggtaccctcgttcactccagcaccagcccctgccctccttcttcccgggccaagcaggggnctgtccatngaagaacgctccttggagttgcagnctggaggggcgagccccggcagcc

SEQ ID NO: 728314 - DNA, 535 bp, Homo sapiens
attggtttcagtgtgactttcatttctctgatgattcactgttttctttcactttcttgagccataccagctcatctttcatctcttcctgttctcttgccatattttttcaaagctctttgtctttgctttaagattttttttttttggaggaattgttttattgagtggtgttaaattgtgacagtatccttggtcataatttttatttgctctgtggcaacatttttctgctgagttttctttcactgccatgtgtcccctacctttgctctctgctgattattacttatatttgaatatcttgagttcttcttggactagctatttgctagtccagatatacaaaagggaaaggtcacaatcatgtccccgaccagcaggaaataacccaatttacttaagactcagggttacatgttgagttactttaggttttattagtacacataaacagagatcagaaactttaggggtgcttggagtgtagagtgctgtgcccatagtctttttttgaaaatacagtgcacctgta

SEQ ID NO: 728315 - DNA, 711 bp, Homo sapiens
taaagtaaatttgagacattatgtcatttcataactccatatgcatttaaaaagtaaggacattttcttatacaactatatgccatcatcatctctaacaaaatcattaacaaattattgataccatctaacagccagtctatgttcaaatttccctggtaaatttggcttcttaaccttatcatcacataaaaaggggttcttcctgttttttaaaaaagctataaagtatttttttaatctcaccagaggctttgatggcagaatttttttttctacctgttaatttggcaagagagtttcctttatgcaggagcacagattattaatcttgggtctgaattctagctgtgtttctgcttctaatttacgtatccttaggggactcattcaaccctcctcagcttcccacctgcatcctccttcggcctaataactgtatacgttaagctaccagcctgctggattcatgagggcatttgcaatgtgaaatggcccttcctgtgtgttttccacggccatcttctgggtagggaggctgaagactacttcagggtctggaggaaggagctgtgtaccaggtaaaggtggcactgagccggcaggggaagggagcagagatgaggcagagaagcgaccagaggcaaaattggaggatctcaggccagactccatccccatctctttcattaaaaatacaaaccaaacaaa

SEQ ID NO: 728316 - DNA, 849 bp, Homo sapiens
ggcgggcagatcatgagttcaggagatcgagaccatcctggccaacatggtgaaaccctgtctctactaaaaatacaaaaattagccgggtgtggtggcgcgtgcctgtgatcctagctacttaggagactgaggcaggagaatggcttgaacctgggaggcggaggctgcagtgagccgagattgcgcctctgcactccagcctgggcgacagagcaagtgtctgtctcaaaaacaaaacaaaacaaaacaaaaaacagtggagctaggactggaaaccaggtctcccaaatccaagtccagattaaaccaagctgctactttttcagccttctttgaatttttcagttttgtgttatattacctgagttgtattgcaaggaacagaaaccaactctagctgacttagccaaagggaagtgaatggaaggatggaggaagtttgcagaatcaaaggaaaagccaaaatgtcagaaatcagaagaatgtcacaaatctggataggaaaaaccaagggatagcaaggctccattgtcacgatggttgatgtgggctgtaaacgtaggccatccctgaacactctcaccactcagatcccgggaaggagtcggctctgctgggcacgtgactctgctcggccagcccctggtcgggaagatggggcctctgaattgagactcacaaaagaaaacatggaaccagaggaaatggtttctcagagaaagccagcaccaaaagaagggaaagtgagatgttgccaggcaaaaaaaaaagatgtcatggataaggaaactacatttttccaactgaaaattggggtagaagcacgtgtaataccattgcttgttc

SEQ ID NO: 728317 - DNA, 810 bp, Homo sapiens
cgaggagtgccgaccagagaggcagttcatgtagcctcattagtaaagcccccaggggctgtgactgtcctgcgcgggcttccaagtccacctgagagttctgatgctgtgctgaccccatggcacatcaggggcagcgagcctgctgtccacactggctgggagaagcagcagccaggcaagagaacaacaaacaggggcaggcagccacccaccaagaggacatgtggaaccaggcagcacgccatttggaaagcaagtctatatgggagtggtcactatcatggaaaggaaaaagaatgggaaaacctgagatttaagaaagacccaatgctgttctagaagcatcttcagaaagagcaataaagcttctttggggaagtcacaggacacagactctccagggtggaagggatcttgaagagcacagaggccaagtcctcatccatctctcgacttccttcatgactcatctgaagacggctggattggtctatgtctgtaccctaccctcaccccacaatcccagtccaccctatctcagaacaatttcaaatgcaggggaggatcagagatgaagatgttactccaaaagtatacatgcaaagatgttctggaagtgctacttcttaacttgtctggtcttatagtctgtggttgaagtgagtttctccacttctagaacgctttaggtcttgtttcctgtcctctttgaaaagttttattaataattacgtgctgcccttctattactcctactttccataccctggaaagtatacacggttctagaatattccattaggaggg

SEQ ID NO: 728318 - DNA, 906 bp, Homo sapiens
cgaggagtgccgaccagagaggcagttcatgtagcctcattagtaaagcccccaggggctgtgactgtcctgcgcgggcttccaagtccacctgagagttctgatgctgtgctgaccccatggcacatcaggggcagcgagcctgctgtccacactggctgggagaagcagcagccaggcaagagaacaacaaacaggggcaggcagccacccaccaagaggacatgtggaaccaggcagcacgccatttggaaagcaagtctatatgggagtggtcactatcatggaaaggaaaaagaatgggaaaacctgagatttaagaaagacccaatgctgttctagaagcatcttcagaaagagcaataaagcttctttggggaagtcacaggacacagactctccagggtggaagggatcttgaagagcacagaggccaagtcctcatccatctctcgacttccttcatgactcatctgaagacggctggattggtctatgtctgtaccctaccctcaccccacaatcccagtccaccctatctcagaacaatttcaaatgcaggggaggatcagagatgaagatgttactccaaaagtatacatgcaaagatgttctggaagtgctacttcttaacttgtctggtcttatagtctgtggttgaaagagtcctccatggagaagtctactgccgaagtccactgattttcactgccgtatgatattccatcgtgtggcacgtggaacaatcaggatcatatttcaacatgagatccccacgttgatgtctcagtcttgggtagacatggtagggctggtaggaagtggtctaatgacttccattcctctgttggaacatttgggttgcttttgggtgttttgttattaaaaacactgctgctgctatca

SEQ ID NO: 728319 - DNA, 144 bp, Homo sapiens
  misc_feature (117)..(117): n is a, c, g, or t
  misc_feature (119)..(119): n is a, c, g, or t
agcatgccatgccaggcacagggactcaggagcacaagagctcttgctagttgactttcccaggaccagaggtaggggaacctccagatgttgccgaggcccacagagaagccaatntnggccaggatgtactgcagcttactg

SEQ ID NO: 728320 - DNA, 470 bp, Homo sapiens; identical to SEQ ID NO: 163192

SEQ ID NO: 728321 - DNA, 278 bp, Homo sapiens
aaattccatggaattatagttggtctactctgcaatgtctctatttaaaagcccaagtgaggacagacaagatgaacgtagaacatgagagatatctgcaagccaacaacaaagaattcaacagtatttttggatatccgaaaaggcatcaaagtgacgatcgagtcaacaaccagcctgttctgctactggtgaatggcaagataaaggaggacaaatggatgaatgttcaagtgggagatataataaaactagaaaataatcagcctgtcatggtg

SEQ ID NO: 728322 - DNA, 354 bp, Homo sapiens
actaatcaaacatgacgctgccatcgtaaggggtggctgagagtttctgtttatgaacgtgggacagtaagtggggcacggagcgggggtgcagggaggtgccagctggtgatcattgtgcagaaagctgaagaatgtggcttaacaagattctgactcctcccagtttattacctagcatggatttccttcaaaatacagatttcgtgtgaaaagtccaactgccacaaactgcttgggaagggtggatgctgacaggcagggcttttgtgaaagacgggaatgaaccctgacctgtcgctaataggagttgtgccaaactcatcacatacattaaaaaatagaaaaggattt

SEQ ID NO: 728323 - DNA, 590 bp, Homo sapiens
cacatatttatatgtatttttaaagataaagaatatctaaaatgtgtttttttcttagctttttagttgtctagaacatttagagaaagagtatgaatatattaaatccacaaacacactatatacttcctcaccactgactattttatcaaatttgccttaaaataatgaaaaagaaaagtatagttaatggtttcaaatatgctaagaaattgactctgcggaggggatcttaaaatgcctgtttactcatgttttcgtatttttcttgtctctaatacttttgtctttgtctgccttgtgtgttcttttctgaatttcatttcagcaatttatgctgctaaatagaatcccgcatgtctgcattcatttacattcaacttattgtaaattttgagattttatttagaaatgaattgtctaattaatttatgtagagtccttttttccaaagagctcaaaacactacatccacattattgacttttggaaaccaaccaaattacttaagaaatggaaaagtagtcacagagaaatttagtaatttgcaaaagccacaacagtagtggaagaattaaaattcataaagt

SEQ ID NO: 728324 - DNA, 562 bp, Homo sapiens
aaagcaaaggtttgtttagagacataaaaagtgaaacatattatctccattgcactcaatagggtaagctttattgaaattcactttataatgtattatctttaaaacaaagtctaactgtaatgcatacacacagtattcctaacgtatttgtagcttcatgtcattaaggaattttgcatattccttaaaaatggaagaaaaaggcattagaaaggtgttaccttacgctctgtcttgaactaactaaactatttaagtaacaaaaatatttatgtgttaggaggagcatgccagagactcatatctggataatttttctttagcttgtcattttttcttatttgccatgagagtatgatgacaataaaaaattcccaaccctggtcactaaagtaattaaagactatattctaactgacaactgtatttctttattgcagaataaatcattcggaagtaaatttggtaaccttattgtttaaaaaactttgttttcatgctctaaacttaggataaattatattgtgtcactgaaaaacttactttctatgtttctgta

SEQ ID NO: 728325 - DNA, 662 bp, Homo sapiens
gatgtggaaatattactgcatatacaccacatatgtgcagaatttaaaggttaaacatttctatctcctattaaaatgttatgtaattaaatgctgaaatttaaaaagctgatttttgtttaaaatacacatgttctaaatttagaaattctaaaataaaatgttactacctcattagtatttttcaatttaaattaattttttggtgctttttagcttttaggttcagggatacatgtttaagtttgttacatatgtgactttcaaactctaacttcaggaagtcattacttccagtaggttatgttctggtcattcattcctctatcactattaccacccacagagctcatatgagctatgctggccctcaacatttctgatggaagagaataaatacacggttttgttgctctcttttacaaaatcaaatgttactttacactagaccaatgtttcctaagcctaactgtgtaccacaaagcacacttggagagatttttagtttgtttcgtttgtttgttaactgtaaatttccagattctatttcaaatctaatgaaaaggaatctctatatgtggaattcagggagatatatatatatatatatatatatatatttttttttttttaagcacgtcttctagtgtttctaatgccac

SEQ ID NO: 728326 - DNA, 2824 bp, Homo sapiens; identical to SEQ ID NO: 288696

SEQ ID NO: 728327 - DNA, 656 bp, Homo sapiens
ctttttagtatactataattcgtatgtcatcaatatcagttaaataaacagatataaatagcctaactgctctctcagagctgcagttattacctaatgctatcccagaatgagttagaatatgcaggtcctctgcttttgtagagtcctgtgatatagccccagaccaggagttagaagatctggctctgccttaactaacaatgggcaggttgcttcagctctctagtcttcagtttcctcccctgtaaaattagagagggctggacataattatctgcaaggtcactttcactttctatgatcattcaagacaagcattaagatgcaaggacaaaatgtgctcattgtaagcctgcctgtcctatagacaaaggcattctcagtacactaaacacttgttaagagtgttgttaagagccagagtgagtatcatgtaagacacagaccctttcttcctaaaggctttgtggcatcagacacataaagggtatatgtagtgtggagcactaaccatggcagggtaatttattccaggcacagagtcataattctggaaacatctagactcactgcattaacagagcattttgtttctaaagtagacctcttatgtcatccagatttcactcattctgaccacagccaggaagctg

SEQ ID NO: 728328 - DNA, 574 bp, Homo sapiens
aggacctgcatggtggggtgggccctctcctggctctgtggaggagggaaaaggcttatggagctggaggccccgtctcccagccccactcagcccacagaggcaggagaaacccacttgcccctgatagctgctgctgctgctgtgagccaccgcactactgccttgttcccagcctgtgtgtgcagattcttttctggcacaatgccttacatgttttatttgtaacagaagtgggggatcaaatgcaaaaaagaaaactgctctccataagaatgtcatccagacttcacctttctccatccagcaagcaataatgatgatgatggtgattattgtctcattactcacttgtaacacatctggaatctattccagtatacaggatgaaatagggatcctagccatactttcccctcattggttgggggccccagtgagtagcctcctcctccaatggtgtaaaatgctactttccccataatgtcagtgcttataaggaacacatctgggactatttctggactttctattctgtctcatccacagtgggatgctaggacctgtgcacact

SEQ ID NO: 728329 - DNA, 666 bp, Homo sapiens
agggggatggcttgagcctgggaggttgaggctgcagtaaaccgagattacgccactgtactctagcctaggtaacaaagtgagaccatgtctccaagaaaaaaataaaagaaaacaaaaaaacttgaatccgtaatttaaagatcttcccatgaagaaaataccaggtctagatggttttgcagaagttcaagtaagggtaactctttaaaaaaaattattattattattttttttagaaatggagttttgctgtattgcccaggctagtctcaaactcttgggctcaagagatcttcctgccttagtctcttgagtaactgggactataggcatacagcactgtgcctggttagtaattctaattttataaaaactctctctgagaatggaaaaaatgaaaacattaactctttccatgaggccagtgtaaccttaatatctaaacaagacaagtacaggaagagaaagcaatattagaggccagtttcactcatgactataaatgcaacagttataagaaaaatactggtaaatcaaatccggcagtgtaaaaaccaaaaggcatcacattctagttgggtttatctcaggtttgcaaggatggtttaacaacgaagaaatgtctataaacattatttattatgttggtaatagtagactttg

SEQ ID NO: 728330 - DNA, 1267 bp, Homo sapiens
ccctgggatactcccctcccagggtgtctggtggcaggcctgtgcctatccctgctgtccccagggtgggccccgggggtcaggagctccagaagggccagctgggcatattctgagattggccatcagcccccatttctgctgcaaacctggtcagagccagtgttccctccatgggacctaaagacagtgccaagtgcctgcaccgtggaccacagccgagccactgggcagccggtgatggtcccacgcaggagcgctgtggaccccgctctctgggcagccctgtcctaggcctggacacctgcagagcctgggaccacgtggatgggcagatcctgggccagctgcggcccctgacagaggaggaagaggaggagggcgccggggccaccttgtccagggggcctgccttccccggcatgggctctgaggagttgcgtctggcctccttctatgactggccgctgactgctgaggtgccacccgagctgctggctgctgccggcttcttccacacaggccatcaggacaaggtgaggtgcttcttctgctatgggggcctgcagagctggaagcgcggggacgacccctggacggagcatgccaagtggttccccagctgtcagttcctgctccggtcaaaaggaagagactttgtccacagtgtgcaggagactcactcccagctgctgggctcctgggacccgtgggaagaaccggaagacgcagcccctgtggccccctccgtccctgcctctgggtaccctgagctgcccacacccaggagagaggtccagtctgaaagtgcccaggagccaggagccagggatgtggaggcgcagctgcggcggctgcaggaggagaggacgtgcaaggtgtgcctggaccgcgccgtgtccatcgtctttgtgccgtgcggccacctggtctgtgctgagtgtgcccccggcctgcagctgtgccccatctgcagagcccccgtccgcagccgcgtgcgcaccttcctgtcctaggccaggtgccatggccggccaggtgggctgcagagtgggctccctgcccctctctgcctgttctggactgtgttctgggcctgctgaggatggcagagctggtgtccatccagcactgaccagccctgattccccgaccaccgcccagggtggagaaggaggcccttgcttggcgtgggggatggcttaactgtacctgtttggatgcttctgaatagaaataaagtgggttttccctggaggtacccagc

SEQ ID NO: 728331 - DNA, 1319 bp, Homo sapiens
ccctgggatactcccctcccagggtgtctggtggcaggcctgtgcctatccctgctgtccccagggtgggccccgggggtcaggagctccagaagggccagctgggcatattctgagattggccatcagcccccatttctgctgcaaacctggtcagagccagtgttccctccatgggacctaaagacagtgccaagtgcctgcaccgtggaccacagccgagccactgggcagccggtgatggtcccacgcaggagcgctgtggaccccgctctctgggcagccctgtcctaggcctggacacctgcagagcctgggaccacgtggatgggcagatcctgggccagctgcggcccctgacagaggaggaagaggaggagggcgccggggccaccttgtccagggggcctgccttccccggcatgggctctgaggagttgcgtctggcctccttctatgactggccgctgactgctgaggtgccacccgagctgctggctgctgccggcttcttccacacaggccatcaggacaaggtgaggtgcttcttctgctatgggggcctgcagagctggaagcgcggggacgacccctggacggagcatgccaagtggttccccagctgtcagttcctgctccggtcaaaaggaagagactttgtccacagtgtgcaggagactcactcccagctgctgggctcctgggacccgtgggaagaaccggaagacgcagcccctgtggccccctccgtccctgcctctgggtaccctgagctgcccacacccaggagagaggtccagtctgaaagtgcccaggagccaggaggggtcagtccagccgaggcccagagggcgtggtgggttcttgagcccccgagccagggatgtggaggcgcagctgcggcggctgcaggaggagaggacgtgcaaggtgtgcctggaccgcgccgtgtccatcgtctttgtgccgtgcggccacctggtctgtgctgagtgtgcccccggcctgcagctgtgccccatctgcagagcccccgtccgcagccgcgtgcgcaccttcctgtcctaggccaggtgccatggccggccaggtgggctgcagagtgggctccctgcccctctctgcctgttctggactgtgttctgggcctgctgaggatggcagagctggtgtccatccagcactgaccagccctgattccccgaccaccgcccagggtggagaaggaggcccttgcttggcgtgggggatggcttaactgtacctgtttggatgcttctgaatagaaataaagtgggttttccctggaggtacccagc

SEQ ID NO: 728332 - DNA, 832 bp, Homo sapiens
tgcctctcccatgggactaccctgaagccccatggaggcgtctccacagcagccctcctcgcccatgcccacgggcactgcagggtggcgggaggagggggcccaaccctgacccccggggatccaagggcttgaagcagacagtgggggccctgaaccccaacctacatctctggggcatctgcagctgtcagttcctgctccggtcaaaaggaagagactttgtccacagtgtgcaggagactcactcccagctgctgggctcctgggacccgtgggaagaaccggaagacgcagcccctgtggccccctccgtccctgcctctgggtaccctgagctgcccacacccaggagagaggtccagtctgaaagtgcccaggagccaggagccagggatgtggaggcgcagctgcggcggctgcaggaggagaggacgtgcaaggtgtgcctggaccgcgccgtgtccatcgtctttgtgccgtgcggccacctggtctgtgctgagtgtgcccccggcctgcagctgtgccccatctgcagagcccccgtccgcagccgcgtgcgcaccttcctgtcctaggccaggtgccatggccggccaggtgggctgcagagtgggctccctgcccctctctgcctgttctggactgtgttctgggcctgctgaggatggcagagctggtgtccatccagcactgaccagccctgattccccgaccaccgcccagggtggagaaggaggcccttgcttggcgtgggggatggcttaactgtacctgtttggatgcttctgaatagaaataaagtgggttttccctggaggtacccagc

SEQ ID NO: 728333 - DNA, 650 bp, Homo sapiens
cggacgcgtgggtagatcgcgatctagaactagagagactttgtccacagtgtgcaggagactcactcccagctgctgggctcctgggacccgtgggaagaaccggaagacgcagcccctgtggccccctccgtccctgcctctgggtaccctgagctgcccacacccaggagagaggtccagtctgaaagtgcccaggagccaggagccagggatgtggaggcgcagctgcggcggctgcaggaggagaggacgtgcaaggtgtgcctggaccgcgccgtgtccatcgtctttgtgccgtgcggccacctggtctgtgctgagtgtgcccccggcctgcagctgtgccccatctgcagagcccccgtccgcagccgcgtgcgcaccttcctgtcctaggccaggtgccatggccggccaggtgggctgcagagtgggctccctgcccctctctgcctgttctggactgtgttctgggcctgctgaggatggcagagctggtgtccatccagcactgaccagccctgattccccgaccaccgcccagggtggagaaggaggcccttgcttggcgtgggggatggcttaactgtacctgtttggatgcttctgaatagaaataaagtgggttttccctggaggtacccagc

SEQ ID NO: 728334 - DNA, 884 bp, Homo sapiens
tgcctctcccatgggactaccctgaagccccatggaggcgtctccacagcagccctcctcgcccatgcccacgggcactgcagggtggcgggaggagggggcccaaccctgacccccggggatccaagggcttgaagcagacagtgggggccctgaaccccaacctacatctctggggcatctgcagctgtcagttcctgctccggtcaaaaggaagagactttgtccacagtgtgcaggagactcactcccagctgctgggctcctgggacccgtgggaagaaccggaagacgcagcccctgtggccccctccgtccctgcctctgggtaccctgagctgcccacacccaggagagaggtccagtctgaaagtgcccaggagccaggaggggtcagtccagccgaggcccagagggcgtggtgggttcttgagcccccgagccagggatgtggaggcgcagctgcggcggctgcaggaggagaggacgtgcaaggtgtgcctggaccgcgccgtgtccatcgtctttgtgccgtgcggccacctggtctgtgctgagtgtgcccccggcctgcagctgtgccccatctgcagagcccccgtccgcagccgcgtgcgcaccttcctgtcctaggccaggtgccatggccggccaggtgggctgcagagtgggctccctgcccctctctgcctgttctggactgtgttctgggcctgctgaggatggcagagctggtgtccatccagcactgaccagccctgattccccgaccaccgcccagggtggagaaggaggcccttgcttggcgtgggggatggcttaactgtacctgtttggatgcttctgaatagaaataaagtgggttttccctggaggtacccagc

SEQ ID NO: 728335 - DNA, 702 bp, Homo sapiens
cggacgcgtgggtagatcgcgatctagaactagagagactttgtccacagtgtgcaggagactcactcccagctgctgggctcctgggacccgtgggaagaaccggaagacgcagcccctgtggccccctccgtccctgcctctgggtaccctgagctgcccacacccaggagagaggtccagtctgaaagtgcccaggagccaggaggggtcagtccagccgaggcccagagggcgtggtgggttcttgagcccccgagccagggatgtggaggcgcagctgcggcggctgcaggaggagaggacgtgcaaggtgtgcctggaccgcgccgtgtccatcgtctttgtgccgtgcggccacctggtctgtgctgagtgtgcccccggcctgcagctgtgccccatctgcagagcccccgtccgcagccgcgtgcgcaccttcctgtcctaggccaggtgccatggccggccaggtgggctgcagagtgggctccctgcccctctctgcctgttctggactgtgttctgggcctgctgaggatggcagagctggtgtccatccagcactgaccagccctgattccccgaccaccgcccagggtggagaaggaggcccttgcttggcgtgggggatggcttaactgtacctgtttggatgcttctgaatagaaataaagtgggttttccctggaggtacccagc

SEQ ID NO: 728336 - DNA, 685 bp, Homo sapiens
tttttttgtagagacgaggtttcaccatgttgaccaggctgatctcaaacatctgacctcaggaagtcagaggcaccaatgtgaggttccacctgctttccagcacattcttggtttcctcacttctgctagacaacgtttgatcagaaggaacagggaacgagaaggagctgctggatgacaataagcctgggaaagggaggctgggtgagcagagacagaaaagaaacacctacctgctgtgacctcacaaacacccaggctgagttttgataagacaggttgaatcacactggggtgacagcctcatccctccagatgctggtcaacctctggggcccaaagaagaccatcagcttcctgggatgctctgtccagctcttcatcttcctgtccctggggaccactgagtgcatcctcctgacagtgatggcctttgaccgatacgtggctgtctgccagcccctccactatgccaccatcatccacccccgcctgtgctggcagctggcatctgtggcctgggttatgagtctggttcaatcgatagtccagacaccatccaccctccacttgcccttctgtccccaccagcagatagatgactttttatgtgaggtcccatctctgattcgactctcctgtggagatacctcctacaatgaaatccagttggctgtgtcca

SEQ ID NO: 728337 - DNA, 357 bp, Homo sapiens; identical to SEQ ID NO: 57922

SEQ ID NO: 728338 - DNA, 357 bp, Homo sapiens
gtgggttggtttatttttgttcacgggtgttcatgtgcattcccaaacaaaatgagggtgaagagagaggaagtgtggaaaagataatggctttcagatttccacagcaccttttgcctggaccacttttcagcatttagtggtggggtttcagtttctaatacacagagcaatcacccaggcttttcccacagctaaggctttgagagatgaagtgacgtccaagcacagtatataatcaagtggtcaaggctgacacatggagtaaagctgtgattcagtctttccacctaaaattgtatgacccaactctccaacttaaatagacctttgaatatatctccagagaataagtga

SEQ ID NO: 728339 - DNA, 1461 bp, Homo sapiens
cgggatacgggtgtacacagcagcggcgtcgcggcccgcagccccgcggcggcggaaaggtaaccgacccgccctggggtgctgcgtgcgctgcctgctcccgcctgaggaaaacactgcccatggcgcaaggccgggagcgcgacgaaggcccccactccgccggcggcgcgtccttgtccgtgagatgggtgcaaggattccctaagcagaatgttcattttgtcaacgacaacaccatttgctacccttgtgggaattatgtaatatttattaatattgaaaccaagaaaaagactgtactgcagtgtagtaatggaattgtgggcgtcatggcaactaacatcccctgtgaagttgtggctttttctgaccggaagctaaaacctctcatctacgtatacagctttccaggattgaccagaaggaccaaattgaaaggcaacattctcctggactacactttactttcattcagttactgtggcacctacctggctagttactcctctctcccagaatttgaactggccctttggaactgggaatcgagtatcattttgtgtaagaaatcacagcctggaatggatgtgaaccaaatgtcttttaaccccatgaactggcgccagctgtgcttatcaagtccaagtacagtgagcgtgtggaccattgaaagaagtaaccaggagcattgtttcagagcaaggtcggtgaaattacctctagaagatgggtcattttttaatgaaacggatgtcgttttcccccagtcgttgccgaaagatctcatctatggtcccgtgctgccactgtcagccattgccgggctggtaggcaaagaggcagagactttccggccgaaagatgatctatatcctttgcttcacccgactatgcattgctggactccaacaagtgacttgtacattggctgtgaagagggtcatcttttaatgattaatggagacaccttgcaagtgactgtacttaataagatagaagaggaatcgccattggaagacagaagaaattttatcagtccagtaaccttggtatatcagaaggagggcgtgctggcttctggaattgatggctttgtgtattcttttattattaaagatagaagttacatgatcgaggattttcttgagattgaaagacctgtagaacatatgacattttctcccaattatacagtgttgctgattcaaacagacaaggtatgttggatggtaatttcttgatatgtgattttcagatagtattattatcatcattacatgacaggaatgaggagcagagtatgctgcacagtggtactctacttgtcaagactctaggttgtaaatgaaaaaatacccaatttaaaaggcctaaattacaaagagctattggtttatttttgtgcatgtaactgaaagggcaaggagtgaatctgaataaaagagctatcatgatgcc

SEQ ID NO: 728340 - DNA, 2938 bp, Homo sapiens
  misc_feature (1704)..(1704): n is a, c, g, or t
  misc_feature (2438)..(2438): n is a, c, g, or t
cgggatacgggtgtacacagcagcggcgtcgcggcccgcagccccgcggcggcggaaaggtaaccgacccgccctggggtgctgcgtgcgctgcctgctcccgcctgaggaaaacactgcccatggcgcaaggccgggagcgcgacgaaggcccccactccgccggcggcgcgtccttgtccgtgagatgggtgcaaggattccctaagcagaatgttcattttgtcaacgacaacaccatttgctacccttgtgggaattatgtaatatttattaatattgaaaccaagaaaaagactgtactgcagtgtagtaatggaattgtgggcgtcatggcaactaacatcccctgtgaagttgtggctttttctgaccggaagctaaaacctctcatctacgtatacagctttccaggattgaccagaaggaccaaattgaaaggcaacattctcctggactacactttactttcattcagttactgtggcacctacctggctagttactcctctctcccagaatttgaactggccctttggaactgggaatcgagtatcattttgtgtaagaaatcacagcctggaatggatgtgaaccaaatgtcttttaaccccatgaactggcgccagctgtgcttatcaagtccaagtacagtgagcgtgtggaccattgaaagaagtaaccaggagcattgtttcagagcaaggtcggtgaaattacctctagaagatgggtcattttttaatgaaacggatgtcgttttcccccagtcgttgccgaaagatctcatctatggtcccgtgctgccactgtcagccattgccgggctggtaggcaaagaggcagagactttccggccgaaagatgatctatatcctttgcttcacccgactatgcattgctggactccaacaagtgacttgtacattggctgtgaagagggtcatcttttaatgattaatggagacaccttgcaagtgactgtacttaataagatagaagaggaatcgccattggaagacagaagaaattttatcagtccagtaaccttggtatatcagaaggagggcgtgctggcttctggaattgatggctttgtgtattcttttattattaaagatagaagttacatgatcgaggattttcttgagattgaaagacctgtagaacatatgacattttctcccaattatacagtgttgctgattcaaacagacaagggatctgtttatatctacacttttggtaaggagccaaccttaaataaagtcctagatgcttgtgatgggaaatttcaggcaattgactttatcacacctggaacccaatacttcatgacacttacatattcaggggaaatttgtgtttggtggctggaggattgtgcttgtgtaagcaagatttatctgaataccctagcaacggttctggcttgctgtccatcctccctctctgcagccgtgggcacggaggatggctcggtctacttcatcagcgtatatgataaggaatcccctcaggtcgtgcacaaggcctttctctcggaatcgtccgtgcagcacgtcgtgtaagtcctttctgcctccaggagcggctccgtgtcacacccgtctgttgaaaattctagtgaagccatcctttcttttaattttaagttttacgtgtttcatttgttttgaatgttaatatattcacacagttcancactcaaaaggtacagagggctgtgtagtaaagtaccccccatacccaggtctgtccttgcaggcagcctggtaccaatttctcatgtctctcctgagatgttttatccatgaacaagcaaaacataataagcacttctttttacttgtatcaatggccatcatgtgtgtatagtgtgccaggcacttctgctgtattaactccatgaggtaaacactcttgttgtctctatttgacaggtgaggaagataaggcacaaggattttaaataacttgctcaatagtacacagatagtgaatggcaaatgttgggatttgaacccaggtagttgggctgcagagtcactgcctttgctcttaaaaggagaaaactatgtacaatgcctcatttcttttttcacttaatcgtatatcttggagaatgttttatatccacacataaagaccagcctgattatttgtatagccacatagtattccattatatgaatatactatcattttttaaaaacggtatattaatgaacatttagagtatttcaaaacttttgaagcaatacttttaagatgataatatagagacattagatttggacttgtaggtgctatcattattactgtttctttttaatttattatattattaggtattaataagaacagacatttgtattctgctttacagcttgagatcactgtagcttgtggcatgtgatcctcaaaacaccagtcanaaaggtgttattcttatccctattagacaaattagggaattcagggttagagaggtgaggaaaagcattgtccaagattacacattacacagctagcacactgaggagctggccctgccactgtggactgcccagctccaccaccctagctcagtggggaaggatggataacctccttccatttaccccctgcctttctgcactgtcatttttttgtgcctttcctttctcagatcctcttattctaatttacatcttcccactttttctaatttgataaagttgtagacatgtttcactacattcttcctcccactgccaggtaccagacacagggtaatgaaatgtcacacccaccactaatttgagaattgcttatttgcgcttgaaacatcaagaaagctctaccgacagacatgtttcattcacttatgatgaaccaactgcccatctttactgaatcttcttgactgtatttattaaagttgcaatttggaaat

SEQ ID NO: 728341 - DNA, 1688 bp, Homo sapiens
cgggatacgggtgtacacagcagcggcgtcgcggcccgcagccccgcggcggcggaaaggtaaccgacccgccctggggtgctgcgtgcgctgcctgctcccgcctgaggaaaacactgcccatggcgcaaggccgggagcgcgacgaaggcccccactccgccggcggcgcgtccttgtccgtgagatgggtgcaaggattccctaagcagaatgttcattttgtcaacgacaacaccatttgctacccttgtgggaattatgtaatatttattaatattgaaaccaagaaaaagactgtactgcagtgtagtaatggaattgtgggcgtcatggcaactaacatcccctgtgaagttgtggctttttctgaccggaagctaaaacctctcatctacgtatacagctttccaggattgaccagaaggaccaaattgaaaggcaacattctcctggactacactttactttcattcagttactgtggcacctacctggctagttactcctctctcccagaatttgaactggccctttggaactgggaatcgagtatcattttgtgtaagaaatcacagcctggaatggatgtgaaccaaatgtcttttaaccccatgaactggcgccagctgtgcttatcaagtccaagtacagtgagcgtgtggaccattgaaagaagtaaccaggagcattgtttcagagcaaggtcggtgaaattacctctagaagatgggtcattttttaatgaaacggatgtcgttttcccccagtcgttgccgaaagatctcatctatggtcccgtgctgccactgtcagccattgccgggctggtaggcaaagaggcagagactttccggccgaaagatgatctatatcctttgcttcacccgactatgcattgctggactccaacaagtgacttgtacattggctgtgaagagggtcatcttttaatgattaatggagacaccttgcaagtgactgtacttaataagatagaagaggaatcgccattggaagacagaagaaattttatcagtccagtaaccttggtatatcagaaggagggcgtgctggcttctggaattgatggctttgtgtattcttttattattaaagatagaagttacatgatcgaggattttcttgagattgaaagacctgtagaacatatgacattttctcccaattatacagtgttgctgattcaaacagacaagggatctgtttatatctacacttttggtaaggagccaaccttaaataaagtcctagatgcttgtgatgggaaatttcaggcaattgactttatcacacctggaacccaatacttcatgacacttacatattcaggggaaatttgtgtttggtggctggaggattgtgcttgtgtaagcaagatttatctgaataccctagcaacggttctggcttgctgtccatcctccctctctgcagccgtgggcacggaggatggctcggtctacttcatcagcgtatatgataaggaatcccctcaggtcgtgcacaaggcctttctctcggaatcgtccgtgcagcacgtcgtttatgatcagcaaggaatatttctgttagttggaacagcagaaggaaaagtctttattatcaatgccaactcctcaagctcatttcagattattggattcacaggtacaacatagaatgct

SEQ ID NO: 728342 - DNA, 284 bp, Homo sapiens
aacagcctgggcccagggctccggatccctctctctgccaccacaacctccagccaaggtttttaaacactcgaggaagtgcctggctaagaggggacaggaaaaaaggaagaactggtgattttccaaggaaaacagggccaaaggcaaagaagaaagagaagtcctggaagctctgaagagaacaggtcctgcctgagtcccgatccccatataggatcttggaaacagcaagcagatgaccccaactgggattcctatgctaccactatgaggactgcatt

SEQ ID NO: 728343 - DNA, 106 bp, Homo sapiens
aacagcctgggcccagggctccggatccctctctctgccaccacaacctccagccaacagatgaccccaactgggattcctatgctaccactatgaggactgcatt

SEQ ID NO: 728344 - DNA, 546 bp, Homo sapiens
ttcggcacaggcgggccagcagcgattggaatttcaaatgccttggaaagaggaatcagaatttacaaagcaggataaggctgccagagtcattcagcaggcctggaaaagtttccttaatgtcgctatatttcaacactttaaaagtctgattgatttaagaagacaaggagaaccacgtcagatagtgaaatatattaatcccaaagaggttaaatttccacctgatatatactataagatttttactcacagacctattgaagatctctgtgctaacagccctagaaattatgcaaaacttccagcaaagcatacatctcataataaaaatgatcatcttcaggaagaggatcatagtggctggtatcatcgtatagaaaacaatggctggaggccagtttctgatacattttggctatctactgatggtatggtggtggaagacaaaaaggaaagtgaattccatttctctaaactgaagagaaggcaagatttggaaaagaaaagaaaacttagaaaaatagagtggatgaggcaaatgta

SEQ ID NO: 728345 - DNA, 827 bp, Homo sapiens
tgcgcgtccgctcccgccgttgcgacggacgggtaggggaggcgaccccggcgttctgctccgcactgtggaggaggtggggaggtgttgggccagggctgaggtaggagggagtctgtccctcgacgcctcctgcgacgccagcccctgagcgatgatgcgaacgtgcgtcctactctccgcggtgctctggtgcctcacaggagacaaaatatatgtagagttacatcaaaatagtccagtccttatctgtatggattttaagctttctaaaaaagaaatagtggaccccacctacttatggattgggcctaatgaaaagacgttaacaggaaataatagaataaatataactgaaactggacagctgatggtgaaagattttttggagcctttgtctggactttacacatgtactctttcttataagactgttaaagcagaaactcaagaagaaaaaacagtcaaaaagagatatgactttatggtctttgcctatcgggaacctgattattcatatcagatggctgtacgttttaccacaaggtcttgtatagggagatacaatgatgtattctttagagtgctgaagaaaatcttggatagtctaatttctgatttgtcatgccatgtcatagagccatcatataaatgccattctgttgaaattccagaacatggcctcatacatgagctatttatagcatttcaagttaatccttttgcgccggggtggaaaggtgcttgcaatggatctgttgactgtgaagataccactaatcataatatcctccaggtgagaatttcatggtaaggaagaagtattt

SEQ ID NO: 728346 - DNA, 893 bp, Homo sapiens
tgcgcgtccgctcccgccgttgcgacggacgggtaggggaggcgaccccggcgttctgctccgcactgtggaggaggtggggaggtgttgggccagggctgaggtaggagggagtctgtccctcgacgcctcctgcgacgccagcccctgagcgatgatgcgaacgtgcgtcctactctccgcggtgctctggtgcctcacaggagtccaatgcccgcgttttaccttattcaataagaagggcttcatttatggcaagacaggacagccagacaaaatatatgtagagttacatcaaaatagtccagtccttatctgtatggattttaagctttctaaaaaagaaatagtggaccccacctacttatggattgggcctaatgaaaagacgttaacaggaaataatagaataaatataactgaaactggacagctgatggtgaaagattttttggagcctttgtctggactttacacatgtactctttcttataagactgttaaagcagaaactcaagaagaaaaaacagtcaaaaagagatatgactttatggtctttgcctatcgggaacctgattattcatatcagatggctgtacgttttaccacaaggtcttgtatagggagatacaatgatgtattctttagagtgctgaagaaaatcttggatagtctaatttctgatttgtcatgccatgtcatagagccatcatataaatgccattctgttgaaattccagaacatggcctcatacatgagctatttatagcatttcaagttaatccttttgcgccggggtggaaaggtgcttgcaatggatctgttgactgtgaagataccactaatcataatatcctccaggtgagaatttcatggtaaggaagaagtattt

SEQ ID NO: 728347 - DNA, 438 bp, Homo sapiens
gcaaggtgtgcaactccttcccagtggggaagcgactgttccaagagccagttttggaattgtaggcacaaacacaggagaatgtggtcagtgtttcagccagtgcttgctgctgaggcaggagagaataattgtgtaaagagggggctcccgcagtgcaggacaggaagccaccatgtgagcaccacatccacgtgcaggtcgcaggcttcatcatgtcctgaataccatgccttagcattttatggaaactgaatagtggaagagctgccttttagctggtgttacgcagaaagaaatgcaaaagtgaaaactagcaagatgtatgggaattcagatttctgtggtattttgattacatcatcaaaatgtggccagaaatttatatactaaaaattatgataatatggaaagaaatattaaggtgcaacaatagtt

SEQ ID NO: 728348 - DNA, 535 bp, Homo sapiens
ggggaaagccagctgccatcaggtggggacactagaggagccccagggagctcccatatggcaaggaactgagacctgctgccaacacccaggaccaatttgccatccatgagagtgggccgtctcgaaagtgggagaatgtggtcagtgtttcagccagtgcttgctgctgaggcaggagagaataattgtgtaaagagggggctcccgcagtgcaggacaggaagccaccatgtgagcaccacatccacgtgcaggtcgcaggcttcatcatgtcctgaataccatgccttagcattttatttagatgagatcatgtgactggatccctcatgatgagatgagtgcccccaaaagaagacaccagagagcttgcttctcattccacacgcatgctccaaagaaaggccatggcagagcacagagagaaggagagctcccaccagaacctggcaaagtgtgctgctggcatgcttgtctcataattctgccctccaggactgtgagaaaataagtttctgttgcttaaaccacc

SEQ ID NO: 728349 - DNA, 438 bp, Homo sapiens
ggggaaagccagctgccatcaggtggggacactagaggagccccagggagctcccatatggcaaggaactgagacctgctgccaacacccaggaccaatttgccatccatgagagtgggccgtctcgaaagtgggagaatgtggtcagtgtttcagccagtgcttgctgctgaggcaggagagaataattgtgtaaagagggggctcccgcagtgcaggacaggaagccaccatgtgagcaccacatccacgtgcaggtcgcaggcttcatcatgtcctgaataccatgccttagcattttatgtgagtaatcttagatcattcatcaaagaacaggttatgtttacaaatataatggttttaaggaatattataattcagcatcttgaccactggtactggtacgacatgttataatatactgtgcttttaagtatt

SEQ ID NO: 728350 - DNA, 495 bp, Homo sapiens
ggggaaagccagctgccatcaggtggggacactagaggagccccagggagctcccatatggcaaggaactgagacctgctgccaacacccaggaccaatttgccatccatgagagtgggccgtctcgaaagtgggagaatgtggtcagtgtttcagccagtgcttgctgctgaggcaggagagaataattgtgtaaagagggggctcccgcagtgcaggacaggaagccaccatgtgagcaccacatccacgtgcaggtcgcaggcttcatcatgtcctgaataccatgccttagcattttatggaaactgaatagtggaagagctgccttttagctggtgttacgcagaaagaaatgcaaaagtgaaaactagcaagatgtatgggaattcagatttctgtggtattttgattacatcatcaaaatgtggccagaaatttatatactaaaaattatgataatatggaaagaaatattaaggtgcaacaatagtt

SEQ ID NO: 728351 - DNA, 381 bp, Homo sapiens
gcaaggtgtgcaactccttcccagtggggaagcgactgttccaagagccagttttggaattgtaggcacaaacacaggagaatgtggtcagtgtttcagccagtgcttgctgctgaggcaggagagaataattgtgtaaagagggggctcccgcagtgcaggacaggaagccaccatgtgagcaccacatccacgtgcaggtcgcaggcttcatcatgtcctgaataccatgccttagcattttatgtgagtaatcttagatcattcatcaaagaacaggttatgtttacaaatataatggttttaaggaatattataattcagcatcttgaccactggtactggtacgacatgttataatatactgtgcttttaagtatt

SEQ ID NO: 728352 - DNA, 478 bp, Homo sapiens
gcaaggtgtgcaactccttcccagtggggaagcgactgttccaagagccagttttggaattgtaggcacaaacacaggagaatgtggtcagtgtttcagccagtgcttgctgctgaggcaggagagaataattgtgtaaagagggggctcccgcagtgcaggacaggaagccaccatgtgagcaccacatccacgtgcaggtcgcaggcttcatcatgtcctgaataccatgccttagcattttatttagatgagatcatgtgactggatccctcatgatgagatgagtgcccccaaaagaagacaccagagagcttgcttctcattccacacgcatgctccaaagaaaggccatggcagagcacagagagaaggagagctcccaccagaacctggcaaagtgtgctgctggcatgcttgtctcataattctgccctccaggactgtgagaaaataagtttctgttgcttaaaccacc

SEQ ID NO: 728353 - DNA, 343 bp, Homo sapiens
  misc_feature (293)..(293): n is a, c, g, or t
  misc_feature (326)..(326): n is a, c, g, or t
  misc_feature (337)..(337): n is a, c, g, or t
cccggcagctatccgcggccatccggcggtggtgacgcgagaggctggggtctccagcctttagtctgcctgcgcgttcacatgcacccacttacttcttgaagtctactcctcacaagtaagggctatggtgcggggtgcccgattcctgagaaatctgaagatgtggaagtttattttttcttcccaaaatcagcagtagagggactcaggtgaggagaccaaagtacaacacacagctcttttattgccagtagaaacattaaacatagagagacctgaaccatctctanagatagtccgaactgggatggattttggtgctntttcatggatntgtcca

SEQ ID NO: 728354 - DNA, 800 bp, Homo sapiens
cccggcagctatccgcggccatccggcggtggtgacgcgagaggctggggtctccagcctttagtctgcctgcgcgttcacatgcacccacttacttcttgaagtctactcctcacaagtaagggctatggtgcggggtgcccgattcctgagaaatctgaagatgtggaagtttattttttcttcccaaaatcagcagtagagggactcaggaccaactcctcttcatcttcgtcttcctcagcctgctcaatgtgaagcccctgatcatgattcacttccacttaataaataaagtgtttacaaatcagaataacttttagacaatattaaggtggtaatcatgaacagaaaagattttgtagttcttccatggggaaaacctggaaattctgtaaagctaaaatatagaaatgctcaagaactgcgaatggagaaagtacagttagagtttgagaaccaagagatggagaagaaactgcaagaattccgatccacaagaaacaaagaaaaggaagatagagagtcaagcgagtattactggaaatctggaaaagtgggcaaattggtcaatcaatcatatatgatgtcacaaaataacaggaaatgttgttaagttttctgctggaaaagtgaaattaaaattgctgaaggaacagattcaagagccagtgaaaccaacagtttaattataaatggcaaattcttcagaatgtgaaaaacccaagataaatgggaaagtttgtggacccaggtgagaacaaaaggtggtcttactggaatgcctgaatgtggcgaca

SEQ ID NO: 728355 - DNA, 630 bp, Homo sapiens
agccaccgctctccaaggactctcgagcagctccatctacagattcacatggagaagaattaagggttcctgccaatcaccagcaccactttgccagccttgtaagtgggccaccttggaattggagcctccagttcctactgacatctgactgcaacatcatgagagaccctgagtttgaaccacccagctgagctgcttctgagctaacccactgaaaccgtgaaagtacctgaatgaaacaacacccagtagccactagcacacctagctcccagatctgtttttgatgccattcttcagtaaaaggaagcaaggctgcttggagaaattgctatcaaggactggggtagaaaatatacaagatgaaattggagcatcttgtagtgcttgaaaacagttggcatctgtgtgaagatgtgaatggaggaggcagagtaggcagtgagtgccgcagccacagcttgtgttctctgcagccctggcacagaagataggaacactcatgggggatgcggccactgtgatgtcttcccacacaagaagtgccaagtgcttttctcatgcttttctggattgtcccatggtggacgagtcagcaggagtgagatggagcagcacagtagaggg

SEQ ID NO: 728356 - DNA, 755 bp, Homo sapiens
actcacctaaggatgcgagctagcaggtcttgcagcggctatcacgcccctcacgccgctatctctgtgcagccgactgaggatccctagtcgcataaggctgtgcctggcctgttggcgtccctggcagttgttgggttctggcggttgttgggtccctggcagttgttggcggttgttgggttccttcattgaaactgcactaactgggcttccagtcagcgtcagtcagcggatccttgggccgtggggcagccgcaggtcggttaggccaccagggcggctctcgtgccagtgaggcccctgagagccctttggtcagacagaggctaaatctgaacagtcaggcggtgagattaagcatagtcagggagttcgccaggagccagcgttcctcagcctccaccacgtcagtcacctggtcagccagagggcagctggggcgacatccatctaccaagaaggtgaacaggccttcacgatgaccagagacagaagcccctgacttggctaaagatacttctgctctccccatccccacatcctctttcagttacgcatcacctcactccttctgaaccatatggttctgatgtcagagccagtgtagtaaagagcttctgctgttcctgagaactgttgctgctggaagtgatgcttccactgctacagctgggaagagtcttggtgccaggctcgggaagggtgacaggggctacatggggaaaggaatgggcggcttcctgtctccttca

SEQ ID NO: 728357 - DNA, 830 bp, Homo sapiens
aatggactttggaacacaacgtgctacctcaaggctccacctggccacacagcaggcactgaggctgggagacagcccccagacagatgagtgtccgcgcctctctgagaggtgaatgagcccggacggtccctacctaccaagtcctgaggagcagcggcaccaacgacgcaggcccgccccagcccgccagtgagccgcccatgccctctgctagcccggcccgcccgggcccccgccatgctgatcaccgtgtactgcgtgcggagggacctctccgaggtcaccttctctctccaggtcagccccgactttgagctccgaaacttcaaggtcctctgcgaagcggagtccagagtccccgtcgaagagatccagatcatccacatggagcgactcctcatcgaggaccactgttccctgggctcctacggcctcaaagatggcgatatcgtggttttactgcagaaggacaatgtgggacctcgggctccagggcgtgccccgaaccagcctcgtgtagacttcagtggcattgcggtgcctgggacgtccagctcccgtccacagcaccctggacagcagcagcagcgcacacccgctgcccagcggtcacagggcttggcgtcaggagagaaggtggccggcctgcaaggtctgggcagccccgccctgatccgcagcatgctgctctccaaaccccacgatctgtccctgctcaaggaacgcaaccctcccttggcggaagccctgctcagcggaagccttgagaccttttctcaggtgctgatggagcagcaaagggaaaaggcttgagagagcaagagagg

SEQ ID NO: 728358 - DNA, 805 bp, Homo sapiens
gaggtcacagccaacattcagaggcctcccagggccccctctccctggataaaccacttcagctgccccccatttttctcgagggagaaaaaggggaatcctctgtccagaatgagcaggaaggagagccaagcctacagtcacccagcttagagctccagtcccctgcgtggccacgccatgcaggagtggctcaggagcccctgaaagtgtccagcagctacctcagtgacacccagagcagcgagagtcatgtttccagcgtgcagcacccgaggccagaggagggcagccatgccagcctgagcagcgggtacgcaggggacaaggagggcagcgacatcagcttggtgggcagccaccggagagtgcggctgaacagaaggctcaacacccaggcggccagtaaccaaaccagccagctgggctccatagaccctcccagctctctaaagagccggctgactggccccgcccacagcaccaagcagactggagggaaagagtgaggccagcctgcccggcagcggcagcggcagcagcatcctgtccagcgccagcttcatcagcttgggcagcagtgccctcacctaccaggtgagcagcgggctgctgacttccacagccagccttccctccacccaggccagcagccgtcagagcgtccggctggatggcagtgcccaaaacaggcagagcagccacaccagcgtgcaggaggacaagacgggcggcaacgtgaaaaccagtgagcaggtcaccacgggggagcagcctgcccaggtgtgcatgcctttgtgagaat

SEQ ID NO: 728359 - DNA, 616 bp, Homo sapiens
catgggctggtgatgccagtccatgctcaaaagaagcccagccttacagagtctagcttcagaaataaaattaaatgttttctgcagcatattaaccccaagacaaaaggcaaagggcatgaggactccatgttctcagccgctgcgaaggtggccaaaaccagaaaagaaaatgttgcaaagagcctggctccagccaagagccctgtggggagaagtaagacggagaagccgacagggtgctccaaggcccaatctcgtcctgctcagaagctggtgggcccagccttcttggatggtccccaatccctagacgataagctccggctacactccagacaacctggctctgcctcagccctgggctacccccgccactgccctcgtcactgtcctcgagaggcttgtgccaacaaaccagggcacccaacctagctcctgaccctcacctcagatagaaacattggtccgctcaaggagaacatgcagagccatgaaaaagagtttataggctccccaactgctgcagccctccagaggaccagtattgtcatttccataaatgtgcaggtgggacagatgccactagaaatacactctatatttctcagcaata

SEQ ID NO: 728360 - DNA, 863 bp, Homo sapiens
ggagcggcctggctttgtctgagtcaggcagcccagcgtgtgggatgccaggctggatgtgctgggcctgaccagccgcccgctttcctcttctcttgcctctgcctgccccctggtggacagctggggtaaagcatgggagtgcgcctttggggtctcagtggggctgaaatacgactcctcccctaggacagcctgccttccccagccttgttctccggcaaagtcaatttcctggagaatcgaggctctgcctcagatgttcggagcctccgcaggatgaacacctccatttcaattccaggggctttgatcaacctgtgcctcccttgatccccaacttgtgggcaccttcccttgagcagtgcccccacgaggtacacctttcccgggaaacaaaaatcattccttctttgggtcctgcaagctgtaaagaaccaatacagcactgtgctactgaacatgttgccactatagaagccccttgtgttttgaagagtacatctctatagccattcgtttattcatcagaaaccagctagaagccaggccctgtgctgggcgctggagacatggaagaaactgggctgaggctcccgccttgaagagcttgtggcccagggaagggacagttcatctgtcattgattgccacgtgacagtgtctatgatgctaaaaagatgccagtgctgtgctgcaggagcaaaggccgtggaggaagaggctttggctttgttgcgagtccttgccagagccaggcaaagccagtcaccgctttgttcagatgactcaggtaaataaatgaggccgcacaggctgtcctgacaccacacacctctagaataccctggctgtgctgggag

SEQ ID NO: 728361 - DNA, 1033 bp, Homo sapiens
tcccaggcaacgcgccgcgcggggctccaggttccgcccagggactaactccaggtctgcgcgcgtccaacgagcacggctctcaaccggcctcctggcgcccaacgaccatggcttccaaccggcctccgtgcgcccaacgaccatgactcccaaccggcctccagtttccaactgtttctcgaacagggaagccgccatgacacagctgactacgcccttggtcacaggggacctgagatcctccacgatttacgggaccggcgccacctcgggctcgaaccaccctctcgatagggccgccgctaagtaatcggcgtaggggttcagccgcacatctccttcccgcgccgcggaccgagcagtcgttggtgctcttcaggtgcggcctgggtgcccagagccttcgttagactctcggacccgcaagggagcccgaactctttcagactcgctctccctcagccggacctcggccctttttcacaccccaggggagtctggatttctcatagtcctgggcaccagccccttcccagtctagctcttgggactccctgaagccggaactccctcgcctggactcccgggagaacctggaatccccatctccagtccacattttctcagaatctgtcctagcccttcagtctcccaggcatgacatcgtgtggtcccagcgccctaggtggtgagctgtgactctccttagagcctggcgaggccgaggtcctccccagctcgaacccatcccacactccccttctcagcctctgtgttccccagtggtcctggaaaagcccccagttccctctgcctggccccaatcctcacaaacccaattacccacgctcctttccattccataacccccatcactgcatcctccaggctcccatccatggaggacttgaggtggaaagcaatttggttcaaaataaccattatttattacttgaaagggaatatttccagtcgttgccagcctcctccccttctagtattggtaaattttttgcaccactgaaaaagt

SEQ ID NO: 728362 - DNA, 1157 bp, Homo sapiens
  misc_feature (435)..(435): n is a, c, g, or t
  misc_feature (447)..(447): n is a, c, g, or t
  misc_feature (450)..(450): n is a, c, g, or t
  misc_feature (464)..(464): n is a, c, g, or t
  misc_feature (472)..(472): n is a, c, g, or t
  misc_feature (494)..(494): n is a, c, g, or t
tcccaggcaacgcgccgcgcggggctccaggttccgcccagggactaactccaggtctgcgcgcgtccaacgagcacggctctcaaccggcctcctggcgcccaacgaccatggcttccaaccggcctccgtgcgcccaacgaccatgactcccaaccggcctccagtttccaactgtttctcgaacagggaagccgccatgacacagctgactacgcccttggtcacaggggacctgagatcctccacgatttacgggaccggcgccacctcgggctcgaaccaccctctcgatagggccgccgctaagtaatcggcgtaggggttcagccgcacatctccttcccgcgccgcggaccgagcagtcgttggtgctcttcaggtgcggcctgggtgcccagagccttcgttagactctcggagccccctgttccnataccgggtagntgnttgtttgggacgangcgccaangcgaggggaattcgcccgaagngggggggggggggggggggggggggggggggggggggggggggggggggggggggggggggggggggggggggggggggactcgctctccctcagccggacctcggccctttttcacaccccaggggagtctggatttctcatagtcctgggcaccagccccttcccagtctagctcttgggactccctgaagccggaactccctcgcctggactcccgggagaacctggaatccccatctccagtccacattttctcagaatctgtcctagcccttcagtctcccaggcatgacatcgtgtggtcccagcgccctaggtggtgagctgtgactctccttagagcctggcgaggccgaggtcctccccagctcgaacccatcccacactccccttctcagcctctgtgttccccagtggtcctggaaaagcccccagttccctctgcctggccccaatcctcacaaacccaattacccacgctcctttccattccataacccccatcactgcatcctccaggctcccatccatggaggacttgaggtggaaagcaatttggttcaaaataaccattatttattacttgaaagggaatatttccagtcgttgccagcctcctccccttctagtattggtaaattttttgcaccactgaaaaagt

SEQ ID NO: 728363 - DNA, 1884 bp, Homo sapiens; identical to SEQ ID NO: 67097
  misc_feature (1872)..(1872): n is a, c, g, or t
  misc_feature (1876)..(1878): n is a, c, g, or t
  misc_feature (1882)..(1884): n is a, c, g, or t

SEQ ID NO: 728364 - DNA, 1790 bp, Homo sapiens; identical to SEQ ID NO: 67096
  misc_feature (1778)..(1778): n is a, c, g, or t
  misc_feature (1782)..(1784): n is a, c, g, or t
  misc_feature (1788)..(1790): n is a, c, g, or t

SEQ ID NO: 728365 - DNA, 930 bp, Homo sapiens
ctgcagtgaaggtcccaaagtcccagacaagtcccctcttgttgcccaggctggagtgcagcagcatgattacagctcacatcagcctcgacctcccgggctcaagctatcctcctacctcagcctcccaagtagctgggactataggatctttctgctgatgcagctgttaagagtgtttcataaactgtgacaacactaagcaaaatcatagaaggaaactctatggacaatttcagatggagaagaagaaaggactggaagttcaatttggccatgacaattagacttgaagaagctgagtgagaaggccatgcagatatcttggagaagtgcattccaggcagaggaaaagccagtgcagagacactgaagcagggcatgactgatgtgtataaggagcatcatatacatgatcatctacagtccactgaggagaatagcagacgagaggccaggtgcagtgcatgtaatcccagcactttgggagactgagatgggaagatcgcttgaggccaggagtgcaagaccagcctgggcaacacagcaagaccttgattctactaaaaaaaaaaaaggatccttcaacttcaacaataataacacaagggaagtgaagaaaaacactttctaaggaaatctctctctgagctaccatcctgctagggagagcctgaaagcagaatgcatgacttgactagctctggtcaatgaaagaaatcaccagtggaaaggctaccagggggctttctcaaaagagagggacagtaaactggcaagatgaacaactcaatgccatccaggtctggatgagaaagaacagtcgagagactgaggtttcaggagtggaaacactcaaagcatcatcttccactttcttctccggctgctaggaagaaggggaaaacacagaccttctgaggacctgcg

SEQ ID NO: 728366 - DNA, 2035 bp, Homo sapiens
agcggcggggcgaaggcggagcgctaacgtctaacgctaacggcggtcgtgccccgccgctgctgtcacccccggccgctgctgccctccccgccgaggttctactgctctccttcttaagaagggtgggaggcactcggtctctccccacacctctcgcctgaggccaggcgccaggtgtcgcctgaagccagacagccggtttgggagcgagcctgaggccaaccaatcaatggctcagacagataagccaacatgcatcccgccggagctgccgaagatgctgaaggagtttgccaaagccgccattagggtgcagccgcaggacctcatccagtgggcagccgagtacgtgctcctttctcgccttcaccccttggaggacggccggagacagagggtcctgtaaaaccgcggaggttgtcatggctgcagctaggaagtccggactaactggcatcgtctttgttttagctcttgcattgctttgatgctttaaaatccacacataaatgctacatctagctgggcaaggatgggatgcctcccctaagggagccagattgagcagtaggacgccaggtcaataggccgtgtcctggggcaagcagcaagttagatgaccgcgtcacaccagcgtatgcacacccacctcctccctgcacgccttttcccactcccggtggaaagaagggctgggaatctccgaagcttaatctgcctttcttcgttctcctgtctcaccactagatggcagcagtgcagccgggggagggaagcgacagccctgggtggatggggtgggaccagtcctgctagttcactcctttaaggagacacttcctcccctgctgttaaaactcatacttggacccaaccaaagaccctttatatcttgtcttggaggaaattattgttattttctttagtgtttctctgaactgattttgttctgccaacataaagatgtccgcacagtacacactgcattctggggaaaggccaagcagagtgatggggtcctcaggcatggctgaaaacagtgtgcctcaaacacgggtgccttctttcaggagagacctccagaggctgctcagtagatggagcttacacaacaatcgctgcgggcctggattgaagtagctttgcacagaaagcctctcagctatgaaattgctccttggacaaacttgcctgcttgaaactggggaaccaggacttgagacaggagttggaagataactagacctcacggaccattttcaggctatttttactgtttgatgattccctgcttaggagggtttcagtgggaaagtgagagtgagagaggccgttgagagaaagccagtgagttggggaagggaagatgtcctcaggctgaggttgtgagtgggtgtcctgggcagatggtggggagagtgtggacacctttgagaagacacaaaatggcatctaagaggggcctttcggagtctctgggccagtgctgtgctcctggactggattaggatgtagcttttacaattggaaggaaaataagccagtggtgctcataaaaagaaacataaatgggggttgctttgcctagtaatgagccctgtttagttctccattttaaattttatatattgcctctaagattgaactttagcttcagaagactaatttattttggcatagtcagatagacagactttatcttatacgttagtttcaaacccatttgattgttcttgtgctgccgttttatagtaagcaaactgacattgcttagtattgtccctgacatttatggaagaggcattccactattgtagactgcttgctctcgtattgtatcacgtgctataatttttttagacatccatgaaaacttagtttgtagtttaaccacaatgaaaaaggagggcatgacctaagagccccctccattctatccagacatgaaaagcactgctcagatggttgtatgtgacttacttaaaacctgtagcattttagagaataaaactctgcaaagtgtttccaagac

SEQ ID NO: 728367 - DNA, 600 bp, Homo sapiens
ttcgcggtttgattctggggtggggcggcagcgggagcgcgcccgcttttcctaggccagcgggcggttgtctgtggctccgcgactgggcgccccgtcacgtaggttacacacacaatcactccccagggacggcccggagtccgtccaggcagctgcgccctccccagacccgggcaccgcggaggctggagccgcaatggtgctgatggagggcgggagatggagctgaccaggggccggaggggctgagaagagcctgcccaagtctgggccaagcacgaagccctttcccacccgtcgggctcctgggttcccgccagccgatttccagccgtcagggtcacgccactcgctggaaaccctgaactctgtgccccccaagccctgggccccctgcgggaatgttcaaaaatgagtaccagggaggtgcatttgttgaaattttcagtgctcaaggaaaaaatcctggagcaaaatggaagatccttggtagtccatctgtgatttggaaagagtttgataaagaagttaaaagttttgtgtttgtcctggaaggcagcagccaaacaaacaaaattcagttaccaaaggagaata

SEQ ID NO: 728368 - DNA, 502 bp, Homo sapiens; identical to SEQ ID NO: 73555

SEQ ID NO: 728369 - DNA, 743 bp, Homo sapiens
agggagctctaccatcaagtgaggggaatgcccaccatcgctatcatcaccatcaccactacttctgccacagccatcacattcacctctacctccaccatcaccatcactactcaagttggagaaatagaggccaggggaaggggataaagggagggcaaagaaaagtaattccaaaggaacatgagcaccaataatgctttaagagtgttttggaaatcaagagaatggaatatgaaaacatcaacatttgattcagatgaggatattctacttttacccaaaagaaaacgttttagaaagaaaaagtcaagaccagtgagacacaccaaacgccatgaagaggagcaggtctatgagcaagggaccacattaccctgttccatatgcaagcacgaaattgacctaactggtatttttctccataagaagcaacatgtagctctggccacgctgggtttccaatggatgggtagaaagaaaccacagccctcagtgattgctgttcagagacagttcatgatttctaaactattgtcatcttttatgttcactgaaaaaaccctacagagcattaataatgcttttgagctgctttggaaaaaacaaataccagcatactataagatttttgataacattgacaggagtgtcatatattctcaaaaaatatgtcatctgttaattaaaggagtgggcatttgtgaagacaggaattctacatggaaagctgacatgaatga

SEQ ID NO: 728370 - DNA, 455 bp, Homo sapiens
agggagctctaccatcaagtgaggggaatgcccaccatcgctatcatcaccatcaccactacttctgccacagccatcacattcacctctacctccaccatcaccatcactactcaagttggagaaatagaggccaggggaaggggataaagggagggcaaagaaaagtaattccaaaggaacatgagcaccaataatgctttaagtctgagaccgtaggagaaagatggctgtggagtcgcacattacccagaaggaaattaagaaggagcttcagaagctgatcctcacaagcagacaggcccgctgccgccagtaacagccgccgccaccgaatggtcgagttctccggatgaaacataccgtccagcgtgctggcgacctacacttggatagatgcaaccttgaaagaactgagcttagtaaaataagtctatccagaggctagaaagaag

SEQ ID NO: 728371 - DNA, 492 bp, Homo sapiens
tgtactcttaatgttttttaaaaatctgtggatacaataggaatatttttcagtctaaaaaccagcttaacacctaatgatgaaacattacaatactccctttatatatatgaagaaaataagcccaaaatcttcactttgatttactaatattcattagtcaaagcaattagcaaaagcagtgagcagtatgaaaactggaaggaaaaagaaaaaattatttacagatgacattaatatacctagaaaaccaagcaattagaagagctcatgttgtagcagaacaaaaaggataaaatttataggaacaaaacttaagaaatgtataagatctaaagaaaaaatattaagccaaaaaaaggacattaaaaagtcccaactcattggaaaagcatgacatcttggacataaagactcaataccaaaatgtcatgcttttccaatgagttgggactttttaatgtcctttttttggcttaatatttttgtcga

SEQ ID NO: 728372 - DNA, 758 bp, Homo sapiens
tgtactcttaatgttttttaaaaatctgtggatacaataggaatatttttcagtctaaaaaccagcttaacacctaatgatgaaacattacaatactccctttatatatatgaagaaaataagcccaaaatcttcactttgatttactaatattcattagtcaaagcaattagcaaaagcagtgagcagtatgaaaactggaaggaaaaagaaaaaattatttacagatgacattaatatacctagaaaaccaagcaattagaagagctcatgttgtagcagaacaaaaaggataaaatttataggaacaaaacttaagaaatgtataagatctaaagaaaaaatattaagccaaaaaaaggacattaaaaagtcccaactcattggaaaagcatgacatcttggacataaagactcaataccaaaaaattcttcaactcgtagaaaataaaatgattataagtacccaataaatttagaatgtgataggtgttagcataaaattcctaccaaataatcaaatgaaaatattttcacacgagctaaaaaaaaaaaaaaatctattaataggattaaaaaccaaaacaaaacttccatatgtaagtgtgttcttcacataagaaagagcatctctgcaataggaatacataccaaaataccatcttctgttatccaaaaaaaacaactaagttacggctcacatgcaaattccaacccacctttggtaactaaatgggctttggtcacatgctaaatac

SEQ ID NO: 728373 - DNA, 1088 bp, Homo sapiens
gggagaccgatgcgggcagatcacctgaggtcgggagttcaagaccagcctaaccaacatggagaaacccccatctctactaaaaatacaaaattagccaagtgtggtgacatatgtctgtagtcccagctactcgggaggctgaggcaggagaatcacttgaacccaggaggcggaggttgtggtaagccgagatcacgccactgcattccagtctgggcaacaagagcaaaactcggtctcaaaaaaaaaaaaaaaaaaagtcccgaagtggttaacactgccatttaggctgggcatggtgattcatgcctgtaatcccagcactttgggaggccaaggcatttgagaccagcccgggcaacatggcaaaaccctgtctctataaaaaatacaaaaaaaaaaaaaatagctgggcatggtggtgtgcacctgtacccccagcttctagggagggcgagatgggagaatcatgtgagcccctggagaggtcgaggctgcggtaagccatgactgcgctactgcactccaacctggatgacagagaccctgtctaaaaaaacataatatttaaaaaaaaaaaaaacttatcatatagatcaggtgtcataaaatctgggggttcaggctgtggctcctccctctgcacccttgcgatgcaaattaacctattaccttaaaatgagatgtgaccaattctgctcagagacagaagctactggtcaaagggattcagagcaaaccagtcacagctaccagaggatttacagagggagctaacagagccgggctgggctgcagagcgacctttccacagcacgctgcaacctaatacagtgtgttaagccaggggacctacaggggagacacagattgggaaaggctgggcttggtaagcaggagaattggcccaaatgactcatcacataaggagagaatgaggcaggtaatcagaagctagcatctctaactaaggagatcaaagaaccagtgggatcaccttgctcagtgggaaggtgatctggataaataccaaagacggggacacttgcctgcagctgggcttttctgctcccagtgacagaatg

SEQ ID NO: 728374 - DNA, 792 bp, Homo sapiens
tgcctcgcgtcgacgatctggtagcaaagaagaagaaacaaacactgatctctttctgccacccctctgaccctttggaactcctctgaccctttaggacaagcctacctaatatctgctagagaaaagaccaacaacggcctcaaaggatctcttaccatgaaggtctcagctaattcttggctaagatgtgggttccacattaggttctgaatatggggggaagggtcaatttgctcattttgtgtgtggataaagtcaggatgcccaggggccagagcagggggctgctgctttgggaacaatggctgagcatataaccataggtatgggaacaaaaaacatcaaagtcactgtatcaattgccatgaagacttgagggacctgaatctaccgattcatcttaaggcagcaggaccagtttgagtggcaacaatgcagcagcagaatcaatggaaacaacagaatgattgcaatcattctgttgtttccagtcgactccttctgacttgataaaagggaccgtcttccttggatttagtgaacccctttggttcctgaaaaattcaaggagtatctaggacatagtccccagaagacagtacaagactttctgataaactggacatttcaagacccaaataactaatcagaaaaatcaaagatgtgatactattttttatcccatgcataggtgctacacttggatcaaatgaacaatgttgggatctctatggataaaggtcttaaaagtcctgagataaagaatcctgcacccactggtacttctaa

SEQ ID NO: 728375 - DNA, 1253 bp, Homo sapiens; identical to SEQ ID NO: 386141
  misc_feature (820)..(821): n is a, c, g, or t
  misc_feature (835)..(835): n is a, c, g, or t
  misc_feature (855)..(855): n is a, c, g, or t
  misc_feature (903)..(903): n is a, c, g, or t
  misc_feature (1126)..(1126): n is a, c, g, or t

SEQ ID NO: 728376 - DNA, 568 bp, Homo sapiens
tgccacatgttcatatctatgtgcaggaaggacaagactgtagacagacagtcggctcccttggacactgcccagaacatgtggtcatgggggaaagggtgttaaacctggatggcaagtgagatcttgtgacccttggggacatggtattgccgtgttgaacctgctgtcgcaccatggggtaggactggggaggaggagcagtctagagcggagaggccctgggtgcttatatgggactggcctccaacctgaggcactggcttcataagctcaactcagcctatccggaaagccatttagtttttattgctgcttctgagaagtgggggagaggtgagctatttgtggatttgttttaggcagtgttcacaatcatagcacctaaatatgaaggatcagaataagttatgaaatgaaggtcaggaaccttttgtacatagtttcttatttggaatgatgttctttaagccctatgagtatttggtatgtgctcctgatgctggcatctgagtctcatttttgtaccgtgttatttgagcaaataaatacattaacttgcacaaac

SEQ ID NO: 728377 - DNA, 1035 bp, Homo sapiens; identical to SEQ ID NO: 5866

SEQ ID NO: 728378 - DNA, 809 bp, Homo sapiens
tccatctactgattcaaatgctaatctctcctggaaacactctcacagccacacccagaaataatgttttaccagctatctggacatccttagcttagtcaagctgacacataaaattaatcatcacatgtcctatttctttttcaatgatatttccttgctccatcttatttatatctttttaaaaatatgtattgttgctatgacctaaaaacaatctctctctttgctattatttactagctcctctcccatgtgactatatgaccgccttcaatgtacacattcatcccttattggaactttggcctttaaattagctatagtaggaaaaaaaaaaaaaaaacctctatattcagcacaaagctctatgttgaatatataatgagatgtcagtgcccattgaataaataaatgagtgaatgaatgaaaatagccagggatgccagataaaagataaagtagaattgtagtagattatctactcttgctatatcttttattcacactatagagtaataacacttgttggggtgcatttctatgagaaaactgcaaaaatatttggactaatgcattaataagttagcttacagatgtaggaagaaacccagtatttcagaccaaaaatggttaaactgaatgaccactgagtttactttcaaagttgatacagaatacgtcacattgaagcacaactaccattgccttcactactcgttagaaatattttatgccccaaatttataactggactctctttcactttgagatacacccccagttccttaagtaccttctttgagaaa

SEQ ID NO: 728379 - DNA, 684 bp, Homo sapiens
ctcttggtgaagatgccagaaaaatatcgtaaaaacctgctctcttatcctcttctctgtactactttgttaccccaccccaccccacctcaagcccccagtaaaaaatgaccttttggcccagggccctatctgagtatattgtgtggcagagttgtctctggctgactcccaggattgttaatgacttccttctctgtccctaaataattgcttgaaaagacagctgtggagagacattgcccccagcttgcaggctcattaattcagccctatgaaagagggtgcaaaggaagaaggtggaagttactttgccaagagtagcaggcttgggggaaactaaaatagaggcttcaggggaagggcagcagcatggtgtcagagattacacttggagtttgtgaagtctgggcaggcttcaatctaaagaaactttatgcacaaaagcccaaatccagggaaataaatgaaagtgattattcacttttctaaagtccttacagtagcgttcctctggtattgtttgaatacagtttaacctgaagggcacttggtttttgtgcagctcttcaagaacagaagcatctaagtaagtagaaagtctgagaaattaacagagaagattccctaaaagtcagccttcattacttgaccattattcataattctgcatttgtctattcc

SEQ ID NO: 728380 - DNA, 542 bp, Homo sapiens
cgttgcactccagcctgggtgacagagtgagatcccgtctcaaaacaaacaaccctcaaaactctccaataggccaggcacgatggctcacgcctgtaatcccagcactttggtaagtcgaggtgggggcggggggatcacctgaggttgggagttcgagaccagcctggctaacattgtgaaacccagtttctactaaaaattaaaaaattagcctggcatggtggcacgcgcctgtaatcccagctactgggaagctgaggcgagagaatcgcttgaacctgggagacggaggttgcagtgagccaagatcgtgtcattgcactccagcttgggcaacaagagagaaagtcaaaaaaaaaaaaaaaaaaaagagagaaaagaaaataaagaaactcccccttttgttgtagtatgaagacttcaaactataataatactagggtgggacgagtactagtaaatttatttccttttatttttactacattttttgcaatgtacatttactttgtctgacaataaaaagctacttacgagat

SEQ ID NO: 728381 - DNA, 567 bp, Homo sapiens
ggctaatttttctatttttagtagagatggggtttcaccatattggtcaggctggtctcgaactcctgaccccaggtgacccacctgccttggcctcccaaagtgctgagattacaggcgtgagccaccatgcccggccctcaagatttttatgaggaccacatgaaatgctgaaagcacttagtagtatgtccaggagcagggtcttgctctgtcatctagacttgaatgcagcgagtggcatcgtcatagctcactgcaggctcaatctctcagcctcaagcaatccttgcccctcagcctcctaagtagctgggactacacgtccagctaatttttgtatttttgtaaagatggggcctcactatgttgccttggctggtcttgaactcctagtttcaagttatcctctcaccttggcctcccgaagtgttgggattataggcgtgagccactgcaactggccaggacagtgattgattgattgattgattggtttgagacagagtctcactctgtcgtccaggatggagtgcagtggcacgatctcagctcactgtaacctcc

SEQ ID NO: 728382 - DNA, 1076 bp, Homo sapiens
cccgtccttcctctcctagcctaaggcgtgcaaacagagcgccactgggaggctgaaacctttaggccgatgcttgcttgcaaggtcaggcaagctggattctggtccccacctttgcagagagaacagcgatgttgtgcgcccatttctcagatcaaggaccggcccatcttactacctccaagagtgcttttctctctaataagaaaacatctactttgaaacatctactgggcgagaccaggagtgatggctcagcctgtaattctggaatttcgggaggccgaggcaggaagattccttgagcacaggagttccagaccagcctgggcaatgtagcaagacgctgtctctatttatacaataaaatttttttaaaaaaggaaaaaaaaaaaaaaaaaaaaaattgtgtgtggggggatgggccctgggaaaagtttttaaaaccatttggtgggggggcgggggcccaaagggttagggaacacggggaccaacgagcagtgtacacaaggagagcaccgggcgcacaaggaccatagggcgctgggggatatacttccaccaagtttaaaagagagcgccggggggaacacccgaggttttctaaaaacaaattccaagaagagggtcacggagggcaacaaacgggcgctctatacacaggaggaatccaaaaggcggaaggctctgaaagtactaaaaaatataagcccgcggacccaggggtagaggagaaacacagcgacacacggaaggcacaaacgcaagaggcgaaagcagagccaggcgagaagaagacaagacgacaaagaacgaaaggaaacgagcaaggagcaagagaggcaaaaggaagaaggacggaacaacagaagacgaaaaaggaagcgacaacaaaagaaagagaaaagacaagagaaagggcgaaagaacaaagaaaaagaaaaaagacacaaaaagaaaagaagaaacacgagcaaaacagacaagagagggagagagaaaagaaaaaaagaagagagaaggacgagaaaggaccacgaagaagaaacggagaagagagagaggaaaaagac

SEQ ID NO: 728383 - DNA, 435 bp, Homo sapiens
gctcgacatttaatctctcagtggctacattacatttatcatgaaattgatggacacttgaaattaaatgtgtccttaggttgtaatgacagaaatatagagtacaggaccacagagatattattcttgatcttgaccttgatcttgactggtcaggcttcatctagaatatttaccaattctgggtacatcaccagatagagatattcagaggagagggagcagaatgaagtagcttgtgaaaaccatgtcataagacaaattgaaatacttaaggtatatatctgggaaaacaaaacccagaagttaaaattctatagttatttgcacaatttttaaattatcttaagtttgggccattttaaggatcacaaaatcaatattgccttcctttaagatgtatttcaagtcagctcttggctttttactttggct

SEQ ID NO: 728384 - DNA, 571 bp, Homo sapiens
tcgtactgtggccagacattcacctctctcttgacatttcccaataatttccctttaaagactaggccagatagcactagatcttctgacaaagagaaaaaggcctatccaattcaagctgaaataagatattttttactgatgaggaatttcaagtgtccatcaatttcatgatacatgtaatgtagccactgagagattaaatgtgtccttaggttgtaatgacagaaatatagagtacaggaccacagagatattattcttgatcttgaccttgatcttgactggtcaggcttcatctagaatatttaccaattctgggtacatcaccagatagagatattcagaggagagggagcagaatgaagtagcttgtgaaaaccatgtcataagacaaattgaaatacttaaggtatatatctgggaaaacaaaacccagaagttaaaattctatagttatttgcacaatttttaaattatcttaagtttgggccattttaaggatcacaaaatcaatattgccttcctttaagatgtatttcaagtcagctcttggctttttactttggct

SEQ ID NO: 728385 - DNA, 442 bp, Homo sapiens
attgagtacttaaccaaataagatatacagatagcaaataagcacatgaaaagatgctcaacctcattagtcattagggaaatacaaattaaaaccataacgaagtaccactacatacctattagactggctttagaagaaaaacggacaataccaagcgctgacaaagatgttggacagctgagatgctcctcatactttgctggcgggaatgcaaaatgtttgagtcactttgggagagcttggcattttcttattaaggtaaacatacccttacctatgacccagtaatcctactcctaggtctttactcaagacaaatgaaagcatgtgtctatataaagacttgtacatgaatagcaactttattcaaaattgctcaacctggagacaacctgaatgtcctcaaacctgtgaatggacatctatggatgaatctcac

SEQ ID NO: 728386 - DNA, 974 bp, Homo sapiens
ccaatgtctaggtattctgaattatgttcactaaaaagtaggtctcaaagagcatcgtaatctccttagctttgtataaggaagccatgtaacaaagcagccttactacgtttctgtttttgcttttgttttatttttatctccattacttgttaagtggtaatggtgtagtagcatcttaaaataccatactattaagattgagccggggaaccttctcctattctttgctcttcagatatttctctactgtaaccccatagctcttgaacatctcatgacatatatcattgtattttaatttaataaattcatttttctatgcactagactggcttctttgcattataaccaggacttcacatagatgctggtacctcatagatttctaataaatacctgctgaattaaggaaacacaaatttatgttctacatcacgatgttagtgaaaatttgttgctgtgtttatttctcacaataaataaacatggggtgcctcctgtagtagtgtcctatgggaatcaattattgatacccagtgatgtagacaagttgttttaaaaaagaaaagattgaaggaaagcagtctcctcttttaccagcccccacctcaactatataattttaagaaaattgatatcaaaagctgtgatatccgtttctctttaccatccaaagttcttgaagttgccttgacaagcagagattccttgaatcagtccaaatacatgatatatagataaataatacgtgtgtgtgtgtagacatctttagtagaaacagcttttcagatactgatttcatactgtcttcctcctggctttccattgacttattgatttcagatacagtttcaaattgcatcttaattgtggggagtggggatagtagctagcctctggctcctcttttttaaggttatttctgagactgccttggagtggttcaaaccagaataaatgcagtttactgc

SEQ ID NO: 728387 - DNA, 434 bp, Homo sapiens; identical to SEQ ID NO: 24382

SEQ ID NO: 728388 - DNA, 490 bp, Homo sapiens
attaccaccatcttggaaaatagtatgaagctttctcaagaaattataaatatatttacattatgattcatcaatgcctcttctggatatacgtctaaagaacttaaaatcagtatgtcaaagagacatctgcaatttcatgttcattgcagagttattcataatagctgtgatttagaaacaacctaagtgtttatcaactgaagaatggattaaaaatatgtgaaaatttgaaacccttatacactgctgatgagagtttaaaacagtctggcagttcttcaaaaggataagtatagaattaccatatgactcagtaaattaactcctatgtatacaccaaaaagaaatgaaaacaaatgtctactcaaaaggtagcatacaagtacttacagcaacaaaaagtgggaagcaacagaaatgtccatgaattgcagagtggattaataaaatgtggtctgtccatgaaatacaatagtatttggcaata

SEQ ID NO: 728389 - DNA, 809 bp, Homo sapiens
cctgagtacccattgttattccatgaagtgatataattccatatctattattttctactttcttcttcaggttgtcagctatcagtacagttccctttaatagccctcagccataccaatgaaaattggttgtttacaatctcttctagactacaaaaccagataattcattgtatcaagcccttattataaggcttaagaatcagtcaagtgctcagtgaggccgtagaggaaatgtgaattttgtagctctgatagggagtgactttagcctctacctcaagtttcactggccactgctgatttggaagttgtgtatcaacagatgaagtgacaaaaccatccttagtaaattaatgtaactacaggcagcaccaggttaacacttcttcttacatgcaaacagctatctggctggcctaaggcattcttctcccctagtatagctgcttgcatttgtttctcctctttcctcattccaagacttaactgctgacaactgctgcaaatcagaatggataccctaatcttagccaccttaccccataccctagtgatagtcctgagtcatcctgatatgaaggttgaccaggatatcataatggcaatgatagtgcttgtaggacatgccatttgagtgtgtattctgtgccagatactgtgctagaacttcaggtgcatcattgttttaatccttaaaaaatcactttcagaggccaaggcagatcgatcgcttgagaccaggagttcaaggaccagcctgggcaacatgttgaaaccccatctctactaaaaatacaaaaaaaaaa

SEQ ID NO: 728390 - DNA, 632 bp, Homo sapiens
gtcccgtcagtacaatttcctctaaaacctataccttggcttgaaagaattatagttctcacgactaacaaaacaattctctgcagatataatacatgctatcccagtccctgccacactggaaaagcaataatcagatctggtggaattgctaacctgctcaaggaccatcttctcttcaacagagaattttacagaatcataataaaaccaagtacatatgagtttcctttaacctggctttcagattaattcaggatttgggtaagctcttagcctcacactgactcaaaaatccaaacaaatatttatggcctagagagcatgtaaagcaaaacacctcactagagggcaaaatgggaaagaaaacacccttttagcctcaaagcatgaagcagcaaacacctgccactccattctttgtccaggcaagccttcaaagtaagtgtcagagaacgggataaatatttatgtgtgaccaagctgaagtacagttaaaaaaaaaaaaaaaaagtagtccccaggtcctgccagaaaaggaggcaagacttaccgctgtgttgctgacaggcagatgtaattccatggaaggcctgacatttaaagccatatgtactggaaaatgtttcaaa

SEQ ID NO: 728391 - DNA, 466 bp, Homo sapiens
tatttttggaatgtatagtaaattcacatggatcaaaattcaaatgaaaattctccttccaactgtggtccccagccactcctttcctctccctagaggcaaccagtattactgattatgtgattatccttctagaagtattttgtaccttctacaagtgtgtgtgtgtgtgtgtgtgtgtgtgtgtgtgtacatgaatatttctatgtaaccatacatgcgtattttcttattttaatgagtggttacagaatatagacactgttatataccttgctttttcacctaacaccaaatcttggaaattattctgtattcctagaaagaaagcttttgcacttttaaaatggcatgcgtctacagtaggttaaagtaattcctaatgcgtggattaggcctattacataatagcactcaagaaattgttactgcctgtagcactgcccaagaacacggaaaaaaaaaa

SEQ ID NO: 728392 - DNA, 538 bp, Homo sapiens
agactgcgtcttctgttctagctctgctggccccagggctggagtccattaaagaatataaatcaaagagtgagaagccatccctgtagttggtcctatgatcacacatgctaagcaagcagtgtgtaattatgggaggacattaaaatgccagtggaagagatggatgagattcaaaacatgctttcttttctgggtcagtaaagtctgtttccttttttgccagaatacatgttcccttttattctatgaagaatagaaagtgtatctgagccatgagtaattttaaaagaaaggaagggaagaagggagcaaagggggcagaaagggagagaaaaaggaaggaaggaaggaaggaaacttccttttgataatcatctttcttgatggaaaaaataatgtacaaaatttaaaaataagaacaatttttggaaagtgattgttgattctggaaaagaaattctgaacagtgaagagatctttaaagataaacaaaactgaaacttaaatatagaggatctctatgaagcttgagaga

SEQ ID NO: 728393 - DNA, 458 bp, Homo sapiens
gaagaccaaaagagccaggaagagagaaatgggacgccatcaaaacttgcagaaaaacttgagaatatgagactagttcccagccacagcattcacataaatctctcaccataacccaggcattatgctaagcactttatattatcttatttcatccccagaacaaccccgtgagataggtattattatccccattccatgggggataactaaggcacggaagttactaaacttgtccagtgcctcataacatggtctcaagctcttaacaaatggagcccaggattcaaaaatctgaactctaataatggcttgtcattctggtttcttacccttgaggaacctgtgaggtgttaaccaacctgtaagctgcattccagcactggcaaacctggcctctcaaatatccagccaattctaagtttggtgccaggaacacagactccatccaacccctt

SEQ ID NO: 728394 - DNA, 441 bp, Homo sapiens
ctggctcttcctgcccaaagacgggccacagagtctccccgtgctcccttccaacctgttcccattgacgccaactttcaccatgctggacctgaaccagcccgaaacagtctccagggaagctatgcaccagggagaggaggcaagtccaaggcctaccagatggggaaagcagcagcagcggcagttgagtgatcagacacttgagtctcccgggaccctgacaccgtcctgggaatcaccttcttatgtggccacactgtggactgtcaactatacctgcctggattaaacaagcatcttttgaggacttgcaacctgggaggcagggattatcacgtccccattttacagacgaggagcactgagccccagagaagtgcagtggcttgcccaagtccatgtaattgaggtaggatacaaatcctggtagaatcctga

SEQ ID NO: 728395 - DNA, 562 bp, Homo sapiens
gcacgaggccggtaaccgggccctttccacctccgcctccatgttcagtttaaatattaatcttgctctatctagaaccccaagaatcatctaagctgactcttaaattatatccaaaaacttacggttgtgatattcaaatgtataaacagacagatgtaagacattaatagaaaagacattgtatccaaaacaccattaagaaaattaaaagacaaaaattaaactgctaaaaagattgcaacaaaatgtccaaatttatatttaaaaagtttttgcaagtcaataagaaataatattactaacctaatacaaaaatgagcaaagaacatgagctggcaaattatgaaaaaagaaatacaaatagctaataaataggtagagaaaagtttgacctcaattgtaataaaaaggtcaaattaacaaaaaaaattggatgtcattttcatctctcaaattgctgcccctaaaaaaaaaaaagctgatagtatctagtttcataaagaactcagagaaatgttattttcatccattactggtaactctgatgacccttccagag

SEQ ID NO: 728396 - DNA, 448 bp, Homo sapiens
tcctgcccttcatatttctcaaaggtagacttaataaaggtagaagagacatttctaatttttctatatatctcttgctccctaatttctaaaaggcataactaaaatgctttattcgagccactcccttgcatctgaaccctacctaccaagtaggttaagagtaggttaggtaaggtctgtagctacttctttctttcagttacaaattgtaggtgggaaagaaggatgcggaaggaaacttgcaaggaaagcaaacagaaagaaaaagaagtaaaaaaggagagaagggaatttggtgggtggtccaaccatcaaaatgtggtactaatgccataggtatctacaccacttatgtaagttggaatgttgatgcattccaacgcatgtttttatctttgtactgaaagcccttaagaatacccgaagtaaacatataaaaagtaaa

SEQ ID NO: 728397 - DNA, 490 bp, Homo sapiens
caatcggtttctttgctttgctaagaagagatctcttcaagatcgataaaacagtgacctctgttgggcatttactcaagttttgtttcgtgcataacatttcaggacccgcctgttggggaaagtgaggtcatccattcttcaccgattgtctaaacagagagacggtggtcctctgccgcggtgggattctttggtgtgaaaatgaaaatgggggaggatggctggatggtttcatttttagtgctctcctgtcttaagcaacgtaggcactcctgaaccaagttctctttcctgcatgaaacgaagccactgctcccagctccgcagccgtgcactgtgatccgtctatgtaatgtgagcttgcttttactcaactatctattttttagaaaatacaattcaataaatttcaagtacttgaactgagtgacacaatacaacacacagatttatcttttcaataaaaagtgttttttaaatagaaaaa

SEQ ID NO: 728398 - DNA, 350 bp, Homo sapiens
agagactaaggacgctaggtgggcagggctcttcacttgcaggtgcgcctgtgtgctgtgagttgctgggggttgtagaatgcttttggtggacagagggaaccaggttgcaatgtgagaacatttttatgaatttctgggaaactgccttaagatctattccaagagagacacctggttcttctcacctaacttgttgggtttccttttctcactctaaatattcactttaaggccgggcactgtggctcatgtctgtaatcctaatgctttgggaggctcaagcgatcctcggccttccaaagtgctgagattacaggcgttaagccactgagcctggctaaattaaa

SEQ ID NO: 728399 - DNA, 635 bp, Homo sapiens
ggagatacatatcagagaacatttgtacaattccccatgaaaattgctccaaagttgataacaatatagtcggtgcttctagttatatgcaagtactcagtgataaatggattaaaaaatattcagaaatgtattggggggtggaggagaataagaggcagagcaagagctagagaattggtttccttgcttccctgtatgctcagaaaacattgatttgagcatagacgcagagactgaaaaaaaaatttactttgatctctgtttttgaattcttattatttatattttgcttactaccttttttgccttttgtccttttgtggagagggcgatgaattaagagtagtggggtgggtggcgagtaagtaaaatttcaaatagcattttagtgaatgcaattcagtagtcctgaagcctgacttaataaaacaaaattcatttatggttgtttcatgaaagttattagataggatcaagttttgtttgtatattgtttgccttgctctggttttgcttttgtgcttaggcaagtgcaaaatactctatggaaatcataattgtcatcttcttcatggtgttagggatatattgtcacatgatttcaataaatccttttttgctttaaaaaggaa

SEQ ID NO: 728400 - DNA, 357 bp, Homo sapiens
agacctagaaatagcaactaaagagggatgagaaaaaaatatcataaaggtcaagggaagagtgcgtcttgagaaagaggatatgtccatgtattgccaaagcttaaggatattttctcttttcagaatatggcaacagatttctgaaagtaaatgtttcccatttcctaagtaccatacctaccaaaagacatcagaaatatagtcagatcttactgatcaacttctccatccaagtgatcactgttacttaagggctttcaatttttttttttgaccatgatccacagggaaaagaaaaatacattttatattgtgattcagctcacaaaatataaaactatctaacatattaaa

SEQ ID NO: 728401 - DNA, 541 bp, Homo sapiens; identical to SEQ ID NO: 273322

SEQ ID NO: 728402 - DNA, 517 bp, Homo sapiens
tgctcacttccttttctgtaaaaggagctctttgatccaaggtgacatggtatgggatccaatgacaataaatcagttattctgtgaaccctgatcaaaacttgactcaacttttgacagttaggttttttcctgaccacagactcctcacctttcttttcttagaaaatttacattggaaaacagatgtaaattttctccagcctcttgcaaggtttacagtccaggactttgaggtcctgggagtcatccttttgaaatacaatcatcaaagaagatagtgctccaatctcctagtctctgtgggagggttggaacctaacttcagtaaactaatcaccaattagcaaacacagaggggctgatcatactgacccactttcccactaaaatgtctagtactttccaccagctcaccacagtgcttaaaaactctcctgtcttttgttttactagagttgagtccaatctctttcatctattgcaatagtgttgaataaagtcttccttgcctaac

SEQ ID NO: 728403 - DNA, 1417 bp, Homo sapiens; identical to SEQ ID NO: 21

SEQ ID NO: 728404 - DNA, 216 bp, Homo sapiens
taggattccccccccaaccagaaaccaaacttaaaaactaggaacttccagtccagtctgtatccctagatgtaagattcttacctggataaattgataatgctgcgaaacaaagtgacctagaaatccagctaatcttatcagtgctcgtttttaattgagaaaatctaattactcagataattgtggagcgtgttgcatactcttaattactgt

SEQ ID NO: 728405 - DNA, 1005 bp, Homo sapiens; identical to SEQ ID NO: 249068

SEQ ID NO: 728406 - DNA, 871 bp, Homo sapiens; identical to SEQ ID NO: 248300

SEQ ID NO: 728407 - DNA, 454 bp, Homo sapiens
ttttcctttggaggctgaagaaaagaagaatggtattcatgcagttcccattttacagatgaaaacaagaggactttttctgtgaagtcaagaaagtggttacaatggtactttcagcctgtccgaattatgtattgcccctcccctttttattaataacattgaagtgtgatgggacaaccactgaagccgtctgttgaaacctgctgggactttttagccattctcttcaacataaagaatgggtgtttttggagggggtgagaggaatggggaaatgttgtcaaagagtacaatgttttagttgagacaggaggaatatattttgttgagatctacagcacagcatggtgactgtagttaacaatgaagtattgtgtatttccaaattgctaagacaataaatttcaaatgttctcaccacaaaaaagataggttttgaggtgatgaatct

SEQ ID NO: 728408 - DNA, 1500 bp, Homo sapiens
gagtgggaatctcaaagcagttgagtaggcagaaaaaagaacctcttcattaaggattaaaatgtataggccagcacgtgtaacttcgacttcaagatttctgaatccatatgtagtatgtttcattgtcgtcgcaggggtagtgatcctggcagtcaccatagctctacttgtttactttttagcttttgatcaaaaatcttacttttataggagcagttttcaactcctaaatgttgaatataatagtcagttaaattcaccagctacacaggaatacaggactttgagtggaagaattgaatctctgattactaaaacattcaaagaatcaaatttaagaaatcagttcatcagagctcatgttgccaaactgaggcaagatggtagtggtgtgagagcggatgttgtcatgaaatttcaattcactagaaataacaatggagcatcaatgaaaagcagaattgagtctgttttacgacaaatgctgaataactctggaaacctggaaataaacccttcaactgagataacatcacttactgaccaggctgcagcaaattggcttattaatgaatgtggggccggtccagacctaataacattgtctgagcagagaatccttggaggcactgaggctgaggagggaagctggccgtggcaagtcagtctgcggctcaataatgcccaccactgtggaggcagcctgatcaataacatgtggatcctgacagcagctcactgcttcagaagcaactctaatcctcgtgactggattgccacgtctggtatttccacaacatttcctaaactaagaatgagagtaagaaatattttaattcataacaattataaatctgcaactcatgaaaatgacattgcacttgtgagacttgagaacagtgtcacctttaccaaagatatccatagtgtgtgtctcccagctgctacccagaatattccacctggctctactgcttatgtaacaggatggggcgctcaagaatatgctggccacacagttccagagctaaggcaaggacaggtcagaataataagtaatgatgtatgtaatgcaccacatagttataatggagccatcttgtctggaatgctgtgtgctggagtacctcaaggtggagtggacgcatgtcagggtgactctggtggcccactagtacaagaagactcacggcggctttggtttattgtggggatagtaagctggggagatcagtgtggcctgccggataagccaggagtgtatactcgagtgacagcctaccttgactggattaggcaacaaactgggatctagtgcaacaagtgcatccctgttgcaaagtctgtatgcaggtgtgcctgtcttaaattccaaagctttacatttcaactgaaaaagaaactagaaatgtcctaatttaacatcttgttacataaatatggtttaacaaacactgtttaacctttctttattattaaaggttttctattttctcc

SEQ ID NO: 728409 - DNA, 1062 bp, Homo sapiens
gagtgggaatctcaaagcagttgagtaggcagaaaaaagaacctcttcattaaggattaaaatgtataggccagcacgtgtaacttcgacttcaagatttctgaatccatatgtagtatgtttcattgtcgtcgcaggggtagtgatcctggcagtcaccatagctctacttgtttactttttagcttttgatcaaaaatcttacttttataggagcagttttcaactcctaaatgttgaatataatagtcagttaaattcaccagctacacaggaatacaggactttgagtggaagaattgaatctctgattactaaaacattcaaagaatcaaatttaagaaatcagttcatcagagctcatgttgccaaactgaggcaagatggtagtggtgtgagagcggatgttgtcatgaaatttcaattcactagaaataacaatggagcatcaatgaaaagcagaattgagtctgttttacgacaaatgctgaataactctggaaacctggaaataaacccttcaactgagataacatcacttactgaccaggctgcagcaaattggcttattaatggccacacagttccagagctaaggcaaggacaggtcagaataataagtaatgatgtatgtaatgcaccacatagttataatggagccatcttgtctggaatgctgtgtgctggagtacctcaaggtggagtggacgcatgtcagggtgactctggtggcccactagtacaagaagactcacggcggctttggtttattgtggggatagtaagctggggagatcagtgtggcctgccggataagccaggagtgtatactcgagtgacagcctaccttgactggattaggcaacaaactgggatctagtgcaacaagtgcatccctgttgcaaagtctgtatgcaggtgtgcctgtcttaaattccaaagctttacatttcaactgaaaaagaaactagaaatgtcctaatttaacatcttgttacataaatatggtttaacaaacactgtttaacctttctttattattaaaggttttctattttctcc

SEQ ID NO: 728410 - DNA, 1889 bp, Homo sapiens; identical to SEQ ID NO: 257616
  misc_feature (1)..(2): n is a, c, g, or t
  misc_feature (6)..(7): n is a, c, g, or t
  misc_feature (9)..(9): n is a, c, g, or t
  misc_feature (1843)..(1843): n is a, c, g, or t

SEQ ID NO: 728411 - DNA, 1328 bp, Homo sapiens; identical to SEQ ID NO: 257617
  misc_feature (41)..(41): n is a, c, g, or t
  misc_feature (1282)..(1282): n is a, c, g, or t

SEQ ID NO: 728412 - DNA, 1678 bp, Homo sapiens
  misc_feature (1)..(2): n is a, c, g, or t
  misc_feature (6)..(7): n is a, c, g, or t
  misc_feature (9)..(9): n is a, c, g, or t
  misc_feature (1632)..(1632): n is a, c, g, or t
nnagcnncngtaaggatagcatcaactggcaaacggagaaggaggagaacagagtggagaggaaccctgttaggagaaattgagcggcattccatctggtaggcaagtttgcatttctcctttttgggatctgcccaggaatgttgtcaagtgtaatggctcccctgtgggcctgcatcctggtggctgcaggaattctagccacagatacacatcatccccaggattctgctctgtatcatctcagcaagcagctattacagaaatatcataaagaagtgagacctgtttacaactggaccaaggccaccacagtctacctggacctgttcgtccatgctatattggatgtggatgcagagaatcaaatattaaagacaagtgtatggtaccaagaggtctggaatgatgaatttttatcctggaactccagcatgtttgatgagattagagagatctccctacctctaagtgccatctgggcccccgatatcatcatcaatgagtttgtggacattgaaagataccctgaccttccctatgtttatgtgaactcatctgggaccattgagaactataagcccatccaggtggtctctgcgtgcagtttagagacatatgcttttccatttgatgtccagaattgcagcctgaccttcaagagcattctgcatacagtggaagacgtagacctggcctttctgaggagcccagaagacattcagcatgacaaaaaggcgtttttgaatgacagtgagtgggaacttctatctgtgtcctccacatacagcatcctgcagagcagcgctggaggatttgcacagattcagtttaatggcacttcttcaccatctgcatggccttcttggttctcagcttagctaagtccatcgtgttggtcaaattcctccatgatgagcagcgtggtggacaggagcagcccttcttgtgccttcgaggggacaccgatgctgacaggcctagagtggaacccagggcccaacgtgctgtggtaacagagtcctcgctgtatggagagcacctggcccagccaggaaccctgaaggaagtctggtcgcagcttcaatctatcagcaactacctccaaactcaggaccagacagaccaacaggaggcagagtggctggtcctcctgtcccgctttgaccgactgctcttccaaagctaccttttcatgctggggatctacaccatcactctgtgctccctctgggcactgtggggcggcgtgtgaagactgaagtgttcttcagtaattgtgctggcacttaggagagagaggagggggaataatagtgggttaaaaagctttctgggtcgggtgtggtggttcttgcctatagtcccagtgctttgggaggccatagcaggaggattgcttgagcccaggagttcgagaccagccagagcaacatagtgagaccacatctctaccagtaaataaataaataaataaataaataaataaataaataaatagctgggcatagtggctcatgcctgtactctcagctacttgggaggttgaggtgggaggattgcttgagcccaggatttcaaggctgcagtgagccatgattgcaccactgcaccccagcctgggtgacagancaagaccctgtctcaaaaaaaataaaataaaaggctttctgccttc

SEQ ID NO: 728413 - DNA, 1539 bp, Homo sapiens
  misc_feature (41)..(41): n is a, c, g, or t
  misc_feature (1493)..(1493): n is a, c, g, or t
cactcgttatgcaagtgtcaatattaaagacaagtgtatgnacaagaggtctggaatgatgaatttttatcctggaactccagcatgtttgatgagattagagagatctccctacctctaagtgccatctgggcccccgatatcatcatcaatgagtttgtggacattgaaagataccctgaccttccctatgtttatgtgaactcatctgggaccattgagaactataagcccatccaggtggtctctgcgtgcagtttagagacatatgcttttccatttgatgtccagaattgcagcctgaccttcaagagcattctgcatacagtggaagacgtagacctggcctttctgaggagcccagaagacattcagcatgacaaaaaggcgtttttgaatgacagtgagtgggaacttctatctgtgtcctccacatacagcatcctgcagagcagcgctggaggatttgcacagattcagtttaatgtggtgatgcgcaggcaccccctggtctatgtcgtgagtctgctgattcctagcatctttctcatgctggtggacctggggagcttctacctgccacccaactgccgagccaggattgtgttcaagaccagtgtgctggtgggctacaccgtcttcagggtcaacatgtccaaccaggtgccacggagtgtagggagcacccctctgattgggcacttcttcaccatctgcatggccttcttggttctcagcttagctaagtccatcgtgttggtcaaattcctccatgatgagcagcgtggtggacaggagcagcccttcttgtgccttcgaggggacaccgatgctgacaggcctagagtggaacccagggcccaacgtgctgtggtaacagagtcctcgctgtatggagagcacctggcccagccaggaaccctgaaggaagtctggtcgcagcttcaatctatcagcaactacctccaaactcaggaccagacagaccaacaggaggcagagtggctggtcctcctgtcccgctttgaccgactgctcttccaaagctaccttttcatgctggggatctacaccatcactctgtgctccctctgggcactgtggggcggcgtgtgaagactgaagtgttcttcagtaattgtgctggcacttaggagagagaggagggggaataatagtgggttaaaaagctttctgggtcgggtgtggtggttcttgcctatagtcccagtgctttgggaggccatagcaggaggattgcttgagcccaggagttcgagaccagccagagcaacatagtgagaccacatctctaccagtaaataaataaataaataaataaataaataaataaataaatagctgggcatagtggctcatgcctgtactctcagctacttgggaggttgaggtgggaggattgcttgagcccaggatttcaaggctgcagtgagccatgattgcaccactgcaccccagcctgggtgacagancaagaccctgtctcaaaaaaaataaaataaaaggctttctgccttc

SEQ ID NO: 728414 - DNA, 750 bp, Homo sapiens
atagatcccccggtgatgcagatgtggctggtctgggaacactgctcttcccatccttgctctctgctgcatcacccagaaagcagcaacagtgggatgcagtcagaatgagctcctgctccccagctcatgcagctgcacccagtgttcctctacctcttcttggacacgcagcctgtggcgccccctgcttcagcaccagaccccacaccctcactttgcagggtgtggttcctctctccctcagcaattccactgacttatttccagcagcaaatacacatgctgttatttctcccatctttagaacacagctttcctagccccatatcccttaagcggctgctcaagttttcttgataaccagtcccccaattcttctccgatccttcctcttgtaactgctctgaagtctactgctgcagagtgccctaatcacaagcctgtggttccatccatttttacccagtgaacacacttatggaaaagcacttagtccacagcgcagaaaatgcctagcaccttggaagccccctgcacccccttccagtgttaccctcccaggagcatcaggatcctgccttccaaaaactgcaaggagctttgcttgtttctgaacttccataaatgaaatctgacaaaatgtacttttgtgtgtctggattcttcaactcaatgttaggtctgtgccgttcactcataccattttgagtagctgtagtctgttcattcagtaagtcttgtgaatat

SEQ ID NO: 728415 - DNA, 1404 bp, Homo sapiens
cagtcctgggaattgagtcgggaggctggcaagggagtgagacctcctggggctggcacgtgctggactcccctctagaaaagagaaggacccgtgagggagagggcagaggcacttactgctcccgttgactgtaatctgcccctggcaaaccaggcttttcttgggctctggccgcatgcccagctgcgtgtctagtctctcttctggaagagttgggcaactggctctccagaggtttattttagggtcccagtgcttctttgaggacacagcagaaaactaaggggcagctgacaggcttctggaacagctgacaggctggggaggctgaaggctaagactttcaaccactagatcacactgaattccagtcctaggtgaacactgatctctccctttgaggaggtgactttctgcaactagaggctgagctggagtgtctgaggctctctttgctttttggatggttgtggtccttatgattggaagaaaaaaagaagggattccattttcaatacacatttataactcctgccagtaacagacactgttgattggggcacccattcaatgttttctaatcctccactgtatctacatataactttgtttgaaagaggagactgaggttcagggaggttgggatggcgggatggcaggttgtcaggccccggtgatggaggccaacccctcccgtggctctgtgctccagtgtggtagatgtctaagactctcaaatatagaactagatcagcaggcagagctgggggcattggggcaagctgagagtcactcttgtctggctgagtgctgggacagaaaaggctgagggagggaagtggaggcccaggcttgcccatggtggtgttagagggatgcaagacaggttccagggctcggatggcctcaggagcaagcagggctcccttggctgcctctgctgctgtcacgccagcccaaggctcctgccccagggaggttactgttactgctgtagttgccaccacctgttgctcctgagtggatgctaggccttccagggcagccagttacagtcagcctttccctggtgctcaggaaggattaggagaggtggtctcatggcctgaacagcccatgaaaggcagaactgagagactggggaggaagtgaaagtcctcccagctcagaaggaaatgcagagaagtagaaatacccagcccctctcccacacccacacagactcagcccacaaactggagagtaaaaataaagaaatcgtacaggaagcatggagcaaatgactgtgagatgtttcgctttagagaagtgaggagcagagggggagcagaggctggagttggctgagaggggaaatccgcaggtacagcctgcggggctcttagagcccagaggtttgtt

SEQ ID NO: 728416 - DNA, 1248 bp, Homo sapiens; identical to SEQ ID NO: 258206
  misc_feature (20)..(20): n is a, c, g, or t
  misc_feature (29)..(29): n is a, c, g, or t
  misc_feature (36)..(36): n is a, c, g, or t
  misc_feature (39)..(39): n is a, c, g, or t
  misc_feature (57)..(57): n is a, c, g, or t

SEQ ID NO: 728417 - DNA, 212 bp, Homo sapiens
tagtaggagggagcctagactttaaacttgattgttgataacttatggaatatgtaggtaagttgctactgaaaaatataggcagcttgataaaacacagtggctcataatcaagtgctggctaatgtcagcatctagaacagcttcttacctatgacagatgttgaactgatgttgagtttaatgtccgtagttaaagtcaagcagttagc

SEQ ID NO: 728418 - DNA, 702 bp, Homo sapiens; identical to SEQ ID NO: 262017

SEQ ID NO: 728419 - DNA, 476 bp, Homo sapiens
atatgctgtctaaatttgccttgggaaaccatcatggtggtcacaaaaccacttctacggcttgccttgacctagcaggaatgaagatataaagaaagaatgagcgcgtcatggttatgatgggatgatgatgtctgttgtgttgtttggtgtcagtttctgtaacgcctttctatttcaatcaaggctattaacttttcctctgttttagtgaagtttccttgaagtagaaaatgggagtgtattgggcatctcagagttttcagctgaactgaagggtctgatggtaactttacccccaaatccctgagagaaaagcagggggtccctgcttcagctctgctcagaagagcctccctcacatggtggtttctgtgtcactagactggttaaccaaatggttcttctaaatacccaacttttaatagaaactcttgcggcttggattattaaagtcctaacatgcttatttaatc

SEQ ID NO: 728420 - DNA, 329 bp, Homo sapiens
caggacgcggtcgtcccaactccttccgagtggaaagagtgtaaaacttttgtccgtgcgcgggtggagctcagtaggaccacggcgcgtcctgccccggcttccccagcctcccagcagggttagctgcggtcagcgcactttccacttgggactcccggccagaaatttctcgggaatggagcggtcacagtgtggcagcagagaccgaggcgttagcggccgacctcacttggcccctgggctagtggtggctgcccctccgcccccgtccccggcgttgccggtaccatcggggatgcaggttcccccagcgttcctgcggccgc

SEQ ID NO: 728421 - DNA, 752 bp, Homo sapiens
tgcagtgggaataccaggggtgggcactgtcaagagacccagctttgacttcaaatgccacccagagggacaactgctcactttcagagcaggagcaggaggccagaggagagtgtgagtctaacatctgcacagtgagaagtccaggagaagcaaaaatgagatccaggctggagcggctgtgccagagggtccctatgatccagacctcaagagagggttcctggacctcccacagaaagggattcaagaccagctgaaactgattagagccaagatagccaaccaaatgacttcaggaagacctcaggcttcattatcatctcatttccatgctaaaaaaacccagctccctagaacaatgggaaatattgggcacttcatcaggcgagttcaggtgcatttctagagattgtccaggtgctggtaacaataatagagaaccatccatatccacaagaggcagaacctcttccagcaaaatggtgctgcctcacccaaaggtcacactggcattagcccctcatcctctggagttcatctcatccaggcgaagacagctggctggcctcagagggtgagacgcaactcgagggtaaaaacatttttacagggcatggacacaaaagtggcctttacctctggataagcttttaaaacttcccatttacatgtaaaggtgtactttctatgtgccaccaagaaacctaaagtgagtaaaaggtgtttcactttaatcaagttccccaatg

SEQ ID NO: 728422 - DNA, 413 bp, Homo sapiens
tgcagtgggaataccaggggtgggcactgtcaagagacccagctttgacttcaaatgccacccagagggacaactgctcactttcagagcaggagcaggaggccagaggagagtgtgagtctaacatctgcacagtgagaagtccaggagaagcaaaaatgagatccaggctggagcggctgtgccagagtaactgttccagcgggtgtgggggagggtcccccaaaaagacttacctggactgaatgggaaataatagaaaataggagcaagagactgtcactttataataggttctgttatgacctcctacaacaatatgttagaaattatgatttctaatatgtctatgatacagatagacatatagttagaaaactaaataaagagacagattttgagctaggtatact

SEQ ID NO: 728423 - DNA, 948 bp, Homo sapiens
tgcgcgcaggcgtagttaagagagcgcattttgacttcgaggcaccgccgacgttactgtgtcgccatggggcgccgtccagctcgctgttaccggtattgtaagaacaagccgtacccaaaatctcgtttctgccgaggggttcctgatgccaagatccgcatctttgacctgggtagaaagaaggcaaaagtggatgagttcccactcggtggccacatggtgtctgatgaatatgagcagctgtcttctgaagccctggaggccgcccgtatttgtgccaacaaatacatggtgaaaagttgtggcagagatggctttcacatgcgagtgcggctccatcccttccatgtcatccgcatcaacaagatgttgtcctgtgctggggctgacaggctccagacaggtatgcgaggtgcctttggaaaaccccagggtactgtagcccgggtccacattggtcaagtcatcatgtccatccgcaccaagcttcagaacgaggagcatgtgattgaagccttgcgcagggccaagttcaagttccctggacgccagaagattcatatctccaagaagtggggcttcacgaagtttaatgctgacgaatttgaagacatggtggccaagaagtgcctcatccctgatggttgtggagtcaagtacgttcccagtcatggccccttggacaagtggcgggttctgcactcatgaaggttttggcagtactgtctccttgggccatgctggtctgacttatgcttactaataaatctgtttactggcaaaaaataaattttccaggggatcggcaaaggggaactcgggggggccgaccactttggccttaggagggagaaaccgccgcgggaatgcacaacgctggatggcgacgccacacaaacaaacagaaagaatatataaaaaaaaaaatatataatcaaatacatc

SEQ ID NO: 728424 - DNA, 713 bp, Homo sapiens
caataataaaaacctaaaaaaaaaaaaagactgctatgtaatcttgtgtcttttctttctctctctctctttttttttgagacagggtcttgtcctgtcacccaggctggagtgcagtagtgtgatcttggctcactgcagtctttccttgctgggcttaagcgatcctcccaccttggtctcccacagtggtgggattacaggtgtgagccaccatgcctggcccaaactattttttaatacagtaaaatgcatttattatcatggcttagatttagtgaatgtgtaggagtgaaagtctactgagagaataaatctagtaatttaatgaactttcttcatagcttcataagagttagttaattatgatttcttaattcattgcccaaagaatgaattactggaattcattatattttttttttgaaaaaaaaaaactaagttagctgcctgtgtgtgtgtgtgtgtgtgtgtatgtatgtatctatgtattctagagaaatatatattatatgcatccagagatgtgtaaaatattctctatcagtaggagaatagattaataaattgtggtgtaatcatatgctagaatactatacagcagtaaaaaaatgaactagagctgtacacaataacatggatatatcccacagacatgatgttgaaagacagatatggcctgggtttgttagctcatgcctgtaataccagcc

SEQ ID NO: 728425 - DNA, 1095 bp, Homo sapiens
aaccagaggcgcgggtcacagagacctagaacagctggaatccttcgcccccggcgcgcagccttcgcccgccggaatcgctgccttatccaccagcgggatgcttacctcgcccgccctctcgggtcaggcgggcccgggaggatgggagggtggctgctgagcgggagccgccacgtcttccacccgacatattgcctagagtttgctgtgacttagatcttgattcagagatggagaaatcaggcccatcttctaccatctctgagcagcagctgcagaggcaagagggatggattaacaccaaaacagacttggctgagcagagtctcatttcatctgagaaatggcttcaactgcatgggcttaagagcaacaaattgaccttgaaacagattttgtcacagatcggattcccacattgtgaagattatgtggcgtctctggggagacctgtggcttctcggtatgctgatggtctgtttccacagctctacagagcagaagatggcagagtatacaatctgacagctaaatcagaactgatttatcagtttgtggaacatttaacacaagctgtggagagctacaagcagcgaatggactggctcaccagcaagagccggcagattttggtgtcatcttggaacagtgcgtcaccatagtgctggattttggcggcattctggagggggagcttgatctgtgccgagaggctctaacaatggttctccaggagcaggtggctcacataaccgagttcaatatcatacgggtttctcaagagcctgtgaagtggcaggaaaatgctactcctgtgaccgaacagtccatagctactgccatcagttgggttgagaaactgacggttgagctgactgtgagcgaggctggccgcctggatgctctgctggaagccgggagagacaagactttactcttcttcacagatggatctgtcatctgtcacacactttccaaggtgaagtacgcgcaagctgatgactccatccatttttggatgtcaatgtattgacatgaattttgatagggacatttttggaaataaagctttacctggaagaagtgattaga

SEQ ID NO: 728426 - DNA, 1212 bp, Homo sapiens
aaccagaggcgcgggtcacagagacctagaacagctggaatccttcgcccccggcgcgcagccttcgcccgccggaatcgctgccttatccaccagcgggatgcttacctcgcccgccctctcgggtcaggcgggcccgggaggatgggagggtggctgctgagcgggagccgccacgtcttccacccgacatattgcctagagtttgctgtgacttagatcttgattcagagatggagaaatcaggcccatcttctaccatctctgagcagcagctgcagaggcaagagggatggattaacaccaaaacagacttggctgagcagagtctcatttcatctgagaaatggcttcaactgcatgggcttaagagcaacaaattgaccttgaaacagattttgtcacagatcggattcccacattgtgaagcttgaagaattccctttagcatttcttataaggcaggtctggtagtgatgaactccctcggcttttgtttatctgtgaaagtctttatctctccttcatttgggaaggacagctttgattatgtggcgtctctggggagacctgtggcttctcggtatgctgatggtctgtttccacagctctacagagcagaagatggcagagtatacaatctgacagctaaatcagaactgatttatcagtttgtggaacatttaacacaagctgtggagagctacaagcagcgaatggactggctcaccagcaagagccggcagattttggtgtcatcttggaacagtgcgtcaccatagtgctggattttggcggcattctggagggggagcttgatctgtgccgagaggctctaacaatggttctccaggagcaggtggctcacataaccgagttcaatatcatacgggtttctcaagagcctgtgaagtggcaggaaaatgctactcctgtgaccgaacagtccatagctactgccatcagttgggttgagaaactgacggttgagctgactgtgagcgaggctggccgcctggatgctctgctggaagccgggagagacaagactttactcttcttcacagatggatctgtcatctgtcacacactttccaaggtgaagtacgcgcaagctgatgactccatccatttttggatgtcaatgtattgacatgaattttgatagggacatttttggaaataaagctttacctggaagaagtgattaga

SEQ ID NO: 728427 - DNA, 666 bp, Homo sapiens
cggggaggctgcgccactgggaggctgcgcagactgttgaagggggcacaggaacgtggaattggtgttggaccaaatgaaactgccaacacctgccctcaaaactggggagttcccagtggctgaaccgaggatttccacaatggggggcactgttctaaaaagagaaggttgagggcctagaccgttgagttgtaatcattcacaaaaccttttccatggaattctgcagctggcctgggaaggctgtgcacggtggccacacggtgctgcggtgaagtctaaggggctgttcaacgtagcacctacatttggggaattacagatgccacagcctgcagggaggcacccacaactgtctcccccaaggtaaagacgactgtccttcacttacgacacaccgggttcctgcacagcgatggcctggagcatccagagaagggtccctgctctcagagccggccaggcgggctgtgtacacggccacggaaagcacccttgggggagggtgttgctgtgatttctgcacccccacttcctcacgtcctgcaacctagctagaatctgcaatcaaaagctacccagctttggaaggctgagtgggatcacttaaggccaggagtttgagtccagcctgggcaacacagcaagttcccgtctctgaaa

SEQ ID NO: 728428 - DNA, 230 bp, Homo sapiens
ttttttttttctttctttctttctttctttttctttctttctttctttctttctcgctctcgctctctccctccctcgctcgttttctctctctctcgctcttgccctctcgctctctccctcgctcgttttctctctctctctctctctctgtctctcgctctcgccctctctctctctgtctctctctctctctctctctctctctctctcccttctgtcgtcttctc

SEQ ID NO: 728429 - DNA, 473 bp, Homo sapiens; identical to SEQ ID NO: 211840

SEQ ID NO: 728430 - DNA, 486 bp, Homo sapiens
gaaaccacactccacttagaacagggtttgagaggcttagtcagcactgggtagcgttttgactccattcttggctttcttctttttcttcccagaaggatttttgtgcagaaatgggtcttttgttgccgtgttagtcctccttggaaggcagctcagaaggcccgtgaaacgtcgggggacaggacccccagggagggaaccccaggctacgcactttagggttcgttctccagggagagcgacctcgtcccccgatcctgaccgcccttccggcccacgctctcctgtttggcttccacaggcctggacttctctggcttctctgcccacacactccctgcccccagtgtccctgcccctgccccagcacaggtgacttcatttctgtcctctcagctcagtggactcgctcaacttttgtataagtctccacttggtggcagcagcttgctgatgacttgttttaaaactttcatcctaaat

SEQ ID NO: 728431 - DNA, 2180 bp, Homo sapiens; identical to SEQ ID NO: 224662
  misc_feature (1532)..(1532): n is a, c, g, or t

SEQ ID NO: 728432 - DNA, 429 bp, Homo sapiens
tatttgcaatcacagatctgaagtttatcaatacatgatctcctcaaaaacgaaaggaataaaacaagtatctgcaatttgctgagaacttaatatgtgtcagttgcctgcaaaactcatcattctttagactttcaaatacatctgtgaggacggtattgttgtttccacttacacatgagaaggcaagagacaagcccacggtcacccagctggaaaactaagctccatgagaagaggggacttgcccatgtggctcagggctctatgcccagtgccctagacagtgcctgactgtgtgtgcggaatgaatgaataaccttggtgatccacccaatggcactggcgctcagtgacctcatctgaaatggaataaggattttatgaaaatgcatgtttgttgaataacacaaaggagaatattatcta

SEQ ID NO: 728433 - DNA, 1062 bp, Homo sapiens
ggccctaaccgctcccgcatccctcgcctgcacagtgggcagtctggcgcctgtggcgtcgtgtttgctgagggcccggctgccgttgactgaggctgcgatggcggcggcaggccggggtcgggagcaggactcggcgcgcttcgtctatgtgacgcgcttcggctcgcatcagtgcagtggcgtcctgcaactgggcggccgtggagctcaaggcctttggggtcaggggcctggggcaggctgtcgccaggagaagccgagggaagcaatggcggtggcgggcgttcagggtggcagcgagctgcccctcggttcccagctcagggtccccacgacccctggtgtggaggctgcggcctctgcctcctcccagctgcgggcatcgagagttcagagcggcaccagacagtcggcgcgtgcaggtttaatccagaaggatgcagctaaaaagtatgattttcccataccattgaatgaagcttccaaaataatgaagaaaaagaaaaaggttttagtatggaatagagtatacaaagtcatttcaagaatgcttgaagaaaatgaaaaatatagacacaggctgaaatgccaaaggttatctagtgaaagctcaaattacacaagatgaatcttcttatcttctggaataacctatctttggatgtttcccaaagaagagtatgaagaatctaaagatgaaacattaaatgaatcataattatttgttacttttgatgtgttttattagaattgggactttagtagtcgaacagaaaaattaccttctttataaattaataatatttctttgctacttaataatacctttagttaaatattgttaaccatatgcatgcaagtgttattttcagaattaatgcttattctacatacttttaaattaacctcatacataaaattaaattagcatatcaatgcaattgcatgaattttataattaccagcttttccattttattaatgagtctacaactgctgctttgttcatctcttcttttagatgtaactcttaaattaaacttggattcatttaaatta

SEQ ID NO: 728434 - DNA, 4585 bp, Homo sapiens
tatctgtcgtcctgacttcttgttcattccaatgaatcgatacagactgttagtgcacatcaatatccattttgtcctcttcttttttggcatacaaccaaaacttacataggctttttatcattttactgggcctatgtaactgagttttagccagtggaatatgtccaagtgacatttgccacttctaggtctggcacattaacacttgatgtattacatttcagaccctcttatcattctgcagtgtgtttggcgatctgttgtttaagatctatatgcactggttactgttgcttgccttccattcctacccttactaatcagattcctattatagctacttctgtccttgattcattttgtatattagatgtgtgtgtgttcatgtgcatgcatgcaccctcacatgtaggtgtatatgggagtggtggtaaagacaggatatttcttcagttcatgggattttatttcaggagaattcaaacattcacgtattggagaagatgacacatttcttgaatgtctttggctttgagctgaatgcactaactagaagggacttcagattgtcctccttcgggggaggtaagtatattcttcatatacaggtaagagtgaaatgatagaagaatgttcctcctctccttttcttcctggacaacagatcaaatatttctcagatcttttacagctgaattggagtcacatggacaggtatgatcttaaaatataaaaaattattttaaaattacatgctaaaattttataaaaataaatgctaaaactaacttaaacggaagcatttgattaaaaaatttatccaaaaaagtttgaattttatatgaaacaggatagaagatgaaaaagctaaagaaataaaatataaataaattatggctggggacagtggctcacacctgtaatcccagcactttgggaggctgaggtgggaggactgattgaggctaggagtttgagacctgttatttgaggcacatgggaaggaaagttttctttgagatattccacattttataatattcttcaagagatttacagagttccttgagtgaattgttggtttgttcttaatactgaatttcctattcaaatttatttagaagttcatttcttacagtgatctcatctcctattaagatattcttcaaggtaggttcttggccagtttctcaatgacagatttttaaaaatattgttaatctttttattaatatgagaacataattgttccagatctggaggccatcctttaagcttcttgcaacagtctgggagcaaagagtttactcgccactgggtagtgggccatggacaccccagtctccaccagaagttcgggattgcaaaatgggactctggcagcaaatttcaaactgtatgccagacctggccctttgcagtgatataaaatttttcttgaggtgtctggaaagatggctgaataggaacagctctgctctgcagctcccagcgagatcaacgcagaaggagataatttctgcatttccaactaaagtacccagctcatctcattgggactggttagacagtgggtgcagcccacagaaggcaagcagaagcagggtggggtgtcgcctcacccgggaagcgcaaggggtcagggaactccctcccctagccaagggaagctgtgagggactgtgccgtgaggaacggggcattccggcacagatactatgctttccccacggtctttgcaacccacagaccaggagattcccttgggtgcctgcaccaccagggccctgggtttcaagcaaaaaactgggcagccatttgggcagacactgagctagcagcaggagtttttttcataccctagtagcccctagaatgccagcgagacagaactgttcactcccctggaaaggggcactgaagccagggagccaagtggtctagctcagcagatcccacccccacggagcccaacaagctaagacccactgggttgaaattctcgctgccagcacagcagtctgatgtccacctggaatgcttgagcttggtgcagggaggggcgtctgccattactgaggcttgattaggcagtttccccctcacagtgtaaacaaagctgctgggaagtttgaactgggtggagcccactgcagctcggcaaagttgctgtagcaagagtgtctctctagattcctcctctctgagcagggcatctctgaaacaaaggcagcagccccagtcagggacttatagataaaactcccatctccctgggacagagcacctgggggaaggggcagctgtgggcacagcttcaggacacttaaacgttcctgcctgctggctctgaagagagcagcagatctcccagcacagtgctcaagttctgctaagggacagactgcctcctcaagtgggtccctgacccctgtgcctccggagtgggagagaccttccagcaggggtcaacagacatctggtgggtgcccgtctgagacgaagcttccagaggaaggaacaggcagcaatctgtgctgttctgtagcctgcgctggtgatacccaggtaaacagggtctggagtggatctccaacaaactccagcagacctgcagcagaggggcctgactgttataaggaaaactaacaaacagaaaggaatagcgtcaacatcaacaaaaaggacatccacacaaaaaccccatccgaaggtcaccagcatcaaagaccaaaggtagataaatccatgaagatgaggaaaaaccagtgcaaaaaggctgaaaattccaaaaaccagaacaccttttctcctgcaaaggatcacaactccttgccagcaagagaacaaaactggatggagaatgagtttgacgaatttacagaaggaggcttcagaaggtgggtaataacaaactcctctgagctaaaggagcatgttctaacccaatgcaaggaagctaaaaatgaaaaaaggctggaggaattgctaactagaataaccactttagagaagaacataaatgatctgatggagctgaaaaacacagcacgagaccttcgtgaagcatacagaagtatcaatagctgaatcgatcaagcagaagaaaggatatcagagattgaagatcaacttaatgacataaagtgtgacgtcaagattagagaaaaaaagaatgaaaaggaacgaacaaagcctccaagaaatatgggactatgtgaaaagaccaaacctatgtttaattgatgtacctgaaagtgctggggagaatagaaccaagtttgaaaacactcttaggatattatccaggagaacttccccaacctagcaagacaggccaatattcaaatcagtaaatacagagaacaccacaaagatactcctcgagaagagcaaccccaagacacataatcatcagattcaccaaggatgaaatgaagaaaaaaatgttaagggcagccagagagaaaggtcggtttactcacaaagggaagcccattaaactaatagcagatttgtctgctgaaaccctacaagccagaatagagtggggggccaatatttaacattcttaaagaaaagaattttcagcccagaatttcatatccagccaaactaagcttcattagcaaagaagaaataaaatcctgagagacaagcaaatgctgagcgattttgtcaccaccaggcctgccttacaagagctccagaaggcagcactaaacacataaaggaaaaaccagtaccagccactgcaaaaacataacaaactataaagaccaccgacactatgaagaaactgcatcaactaacaggcaaaataaccaactagcatcataatgacaggatcagattaacacataacaatattaaccttaaatgcaaacgggctaaatgccacaattaaaagacacagactggcaaattggatagagtcaaaatccatcattgtgctgtattcaggagacccatctcacgtgcaaagacacacataggctcaaaataaagggatggaggaatatttaccaagcaaatggaaaggaaaagaaaaaaagcaggggttgcaatcctagtctctcataaaacagactttaaaccaacaaagataaaaaaagacaaagaagggcattacataatggtaaagggatgaatgcaacaagcagagctaactattctacatatatatgcacccaatacaggagcacccagattcataaagcaagttcttagagacctacaaagagacttagactctcacacaataataatgggagactttgacactccactgtcaatattagacagaacaatgagacagaaaattaacaagaatattcaggacttaaactcagctctggaccaagcagacctacagaactcagaacttgaactcagctttggaccaagcagacatctacacaactctccacttcaaatcaacagaatatacattcttagcagcaccacatcgcacttattctaaaattgaccacataattggaagtaaaacactacacaccgaatgcaaaagaacggaaatcacaacagtctctcagaccacagtgcaatcaaattagaactc

SEQ ID NO: 728435 - DNA, 4480 bp, Homo sapiens
tatctgtcgtcctgacttcttgttcattccaatgaatcgatacagactgttagtgcacatcaatatccattttgtcctcttcttttttggcatacaaccaaaacttacataggctttttatcattttactgggcctatgtaactgagttttagccagtggaatatgtccaagtgacatttgccacttctaggtctggcacattaacacttgatgtattacatttcagaccctcttatcattctgcagtgtgtttggcgatctgttgtttaagatctatatgcactggttactgttgcttgccttccattcctacccttactaatcagattcctattatagctacttctgtccttgattcattttgtatattagatgtgtgtgtgttcatgtgcatgcatgcaccctcacatgtaggtgtatatgggagtggtggtaaagacaggatatttcttcagttcatgggattttatttcaggagaattcaaacattcacgtattggagaagatgacacatttcttgaatgtctttggctttgagctgaatgcactaactagaagggacttcagattgtcctccttcgggggaggtaagtatattcttcatatacaggtaagagtgaaatgatagaagaatgttcctcctctccttttcttcctggacaacagatcaaatatttctcagatcttttacagctgaattggagtcacatggacaggtatgatcttaaaatataaaaaattattttaaaattacatgctaaaattttataaaaataaatgctaaaactaacttaaacggaagcatttgattaaaaaatttatccaaaaaagtttgaattttatatgaaacaggatagaagatgaaaaagctaaagaaataaaatataaataaattatggctggggacagtggctcacacctgtaatcccagcactttgggaggctgaggtgggaggactgattgaggctaggagtttgagacctgttatttgaggcacatgggaaggaaagttttctttgagatattccacattttataatattcttcaagagatttacagagttccttgagtgaattgttggtttgttcttaatactgaatttcctattcaaatttatttagaagttcatttcttacagtgatctcatctcctattaagatattcttcaagatctggaggccatcctttaagcttcttgcaacagtctgggagcaaagagtttactcgccactgggtagtgggccatggacaccccagtctccaccagaagttcgggattgcaaaatgggactctggcagcaaatttcaaactgtatgccagacctggccctttgcaggtgtctggaaagatggctgaataggaacagctctgctctgcagctcccagcgagatcaacgcagaaggagataatttctgcatttccaactaaagtacccagctcatctcattgggactggttagacagtgggtgcagcccacagaaggcaagcagaagcagggtggggtgtcgcctcacccgggaagcgcaaggggtcagggaactccctcccctagccaagggaagctgtgagggactgtgccgtgaggaacggggcattccggcacagatactatgctttccccacggtctttgcaacccacagaccaggagattcccttgggtgcctgcaccaccagggccctgggtttcaagcaaaaaactgggcagccatttgggcagacactgagctagcagcaggagtttttttcataccctagtagcccctagaatgccagcgagacagaactgttcactcccctggaaaggggcactgaagccagggagccaagtggtctagctcagcagatcccacccccacggagcccaacaagctaagacccactgggttgaaattctcgctgccagcacagcagtctgatgtccacctggaatgcttgagcttggtgcagggaggggcgtctgccattactgaggcttgattaggcagtttccccctcacagtgtaaacaaagctgctgggaagtttgaactgggtggagcccactgcagctcggcaaagttgctgtagcaagagtgtctctctagattcctcctctctgagcagggcatctctgaaacaaaggcagcagccccagtcagggacttatagataaaactcccatctccctgggacagagcacctgggggaaggggcagctgtgggcacagcttcaggacacttaaacgttcctgcctgctggctctgaagagagcagcagatctcccagcacagtgctcaagttctgctaagggacagactgcctcctcaagtgggtccctgacccctgtgcctccggagtgggagagaccttccagcaggggtcaacagacatctggtgggtgcccgtctgagacgaagcttccagaggaaggaacaggcagcaatctgtgctgttctgtagcctgcgctggtgatacccaggtaaacagggtctggagtggatctccaacaaactccagcagacctgcagcagaggggcctgactgttataaggaaaactaacaaacagaaaggaatagcgtcaacatcaacaaaaaggacatccacacaaaaaccccatccgaaggtcaccagcatcaaagaccaaaggtagataaatccatgaagatgaggaaaaaccagtgcaaaaaggctgaaaattccaaaaaccagaacaccttttctcctgcaaaggatcacaactccttgccagcaagagaacaaaactggatggagaatgagtttgacgaatttacagaaggaggcttcagaaggtgggtaataacaaactcctctgagctaaaggagcatgttctaacccaatgcaaggaagctaaaaatgaaaaaaggctggaggaattgctaactagaataaccactttagagaagaacataaatgatctgatggagctgaaaaacacagcacgagaccttcgtgaagcatacagaagtatcaatagctgaatcgatcaagcagaagaaaggatatcagagattgaagatcaacttaatgacataaagtgtgacgtcaagattagagaaaaaaagaatgaaaaggaacgaacaaagcctccaagaaatatgggactatgtgaaaagaccaaacctatgtttaattgatgtacctgaaagtgctggggagaatagaaccaagtttgaaaacactcttaggatattatccaggagaacttccccaacctagcaagacaggccaatattcaaatcagtaaatacagagaacaccacaaagatactcctcgagaagagcaaccccaagacacataatcatcagattcaccaaggatgaaatgaagaaaaaaatgttaagggcagccagagagaaaggtcggtttactcacaaagggaagcccattaaactaatagcagatttgtctgctgaaaccctacaagccagaatagagtggggggccaatatttaacattcttaaagaaaagaattttcagcccagaatttcatatccagccaaactaagcttcattagcaaagaagaaataaaatcctgagagacaagcaaatgctgagcgattttgtcaccaccaggcctgccttacaagagctccagaaggcagcactaaacacataaaggaaaaaccagtaccagccactgcaaaaacataacaaactataaagaccaccgacactatgaagaaactgcatcaactaacaggcaaaataaccaactagcatcataatgacaggatcagattaacacataacaatattaaccttaaatgcaaacgggctaaatgccacaattaaaagacacagactggcaaattggatagagtcaaaatccatcattgtgctgtattcaggagacccatctcacgtgcaaagacacacataggctcaaaataaagggatggaggaatatttaccaagcaaatggaaaggaaaagaaaaaaagcaggggttgcaatcctagtctctcataaaacagactttaaaccaacaaagataaaaaaagacaaagaagggcattacataatggtaaagggatgaatgcaacaagcagagctaactattctacatatatatgcacccaatacaggagcacccagattcataaagcaagttcttagagacctacaaagagacttagactctcacacaataataatgggagactttgacactccactgtcaatattagacagaacaatgagacagaaaattaacaagaatattcaggacttaaactcagctctggaccaagcagacctacagaactcagaacttgaactcagctttggaccaagcagacatctacacaactctccacttcaaatcaacagaatatacattcttagcagcaccacatcgcacttattctaaaattgaccacataattggaagtaaaacactacacaccgaatgcaaaagaacggaaatcacaacagtctctcagaccacagtgcaatcaaattagaactc

SEQ ID NO: 728436 - DNA, 1758 bp, Homo sapiens
tatctgtcgtcctgacttcttgttcattccaatgaatcgatacagactgttagtgcacatcaatatccattttgtcctcttcttttttggcatacaaccaaaacttacataggctttttatcattttactgggcctatgtaactgagttttagccagtggaatatgtccaagtgacatttgccacttctaggtctggcacattaacacttgatgtattacatttcagaccctcttatcattctgcagtgtgtttggcgatctgttgtttaagatctatatgcactggttactgttgcttgccttccattcctacccttactaatcagattcctattatagctacttctgtccttgattcattttgtatattagatgtgtgtgtgttcatgtgcatgcatgcaccctcacatgtaggtgtatatgggagtggtggtaaagacaggatatttcttcagttcatgggattttatttcaggagaattcaaacattcacgtattggagaagatgacacatttcttgaatgtctttggctttgagctgaatgcactaactagaagggacttcagattgtcctccttcgggggaggtaagtatattcttcatatacaggtaagagtgaaatgatagaagaatgttcctcctctccttttcttcctggacaacagatcaaatatttctcagatcttttacagctgaattggagtcacatggacaggtatgatcttaaaatataaaaaattattttaaaattacatgctaaaattttataaaaataaatgctaaaactaacttaaacggaagcatttgattaaaaaatttatccaaaaaagtttgaattttatatgaaacaggatagaagatgaaaaagctaaagaaataaaatataaataaattatggctggggacagtggctcacacctgtaatcccagcactttgggaggctgaggtgggaggactgattgaggctaggagtttgagacctgttatttgaggcacatgggaaggaaagttttctttgagatattccacattttataatattcttcaagagatttacagagttccttgagtgaattgttggtttgttcttaatactgaatttcctattcaaatttatttagaagttcatttcttacagtgatctcatctcctattaagatattcttcaaggtaggttcttggccagtttctcaatgacagatttttaaaaatattgttaatctttttattaatatgagaacataattgttccagatctggaggccatcctttaagcttcttgcaacagtctgggagcaaagagtttactcgccactgggtagtgggccatggacaccccagtctccaccagaagttcgggattgcaaaatgggactctggcagcaaatttcaaactgtatgccagacctggccctttgcaggtgggcatcactaaaaatttaaattaccaaaattgactcaagagtaaatctatgtctgaggagaaagcctttggaaaaattgaattagtaagcaaaaacctacccaaaataaataacagtaagtctagaaaattttacacagggattaccaacaaacattcaaagcacagaaaaatctctttagcacaaaatgctacaaaatacagaaaaagaggaaaattctgtagtttctctcatgaagttaatatattctagttagctgaactagaaaaataagagaaagaaaaattataggttaatcttccttatgagtacatgcaagtatcataagatg

SEQ ID NO: 728437 - DNA, 1711 bp, Homo sapiens
tatctgtcgtcctgacttcttgttcattccaatgaatcgatacagactgttagtgcacatcaatatccattttgtcctcttcttttttggcatacaaccaaaacttacataggctttttatcattttactgggcctatgtaactgagttttagccagtggaatatgtccaagtgacatttgccacttctaggtctggcacattaacacttgatgtattacatttcagaccctcttatcattctgcagtgtgtttggcgatctgttgtttaagatctatatgcactggttactgttgcttgccttccattcctacccttactaatcagattcctattatagctacttctgtccttgattcattttgtatattagatgtgtgtgtgttcatgtgcatgcatgcaccctcacatgtaggtgtatatgggagtggtggtaaagacaggatatttcttcagttcatgggattttatttcaggagaattcaaacattcacgtattggagaagatgacacatttcttgaatgtctttggctttgagctgaatgcactaactagaagggacttcagattgtcctccttcgggggaggtaagtatattcttcatatacaggtaagagtgaaatgatagaagaatgttcctcctctccttttcttcctggacaacagatcaaatatttctcagatcttttacagctgaattggagtcacatggacaggtatgatcttaaaatataaaaaattattttaaaattacatgctaaaattttataaaaataaatgctaaaactaacttaaacggaagcatttgattaaaaaatttatccaaaaaagtttgaattttatatgaaacaggatagaagatgaaaaagctaaagaaataaaatataaataaattatggctggggacagtggctcacacctgtaatcccagcactttgggaggctgaggtgggaggactgattgaggctaggagtttgagacctgttatttgaggcacatgggaaggaaagttttctttgagatattccacattttataatattcttcaagagatttacagagttccttgagtgaattgttggtttgttcttaatactgaatttcctattcaaatttatttagaagttcatttcttacagtgatctcatctcctattaagatattcttcaaggtaggttcttggccagtttctcaatgacagatttttaaaaatattgttaatctttttattaatatgagaacataattgttccagatctggaggccatcctttaagcttcttgcaacagtctgggagcaaagagtttactcgccactgggtagtgggccatggacaccccagtctccaccagaagttcgggattgcaaaatgggactctggcagcaaatttcaaactgtatgccagacctggccctttgcagagttaaaagaagccaggtgtggtggctcacacctgtaatccctggactttgggaggctgaggccagagaatcacctgaggtcaagggtttgaaaccagcgtggccaacatgacaaaaacccatctctactaaaatagaaaaattagccaggagtgatggcgggcacctgtaatcccagctacttgggaggctgatggaggagaatcacctgaacccaggaggtggaggttgcagtgggccaagattgcaccactgcactcctgtctgggcaacagagtgagactgtc

SEQ ID NO: 728438 - DNA, 4564 bp, Homo sapiens
tatctgtcgtcctgacttcttgttcattccaatgaatcgatacagactgttagtgcacatcaatatccattttgtcctcttcttttttggcatacaaccaaaacttacataggctttttatcattttactgggcctatgtaactgagttttagccagtggaatatgtccaagtgacatttgccacttctaggtctggcacattaacacttgatgtattacatttcagaccctcttatcattctgcagtgtgtttggcgatctgttgtttaagatctatatgcactggttactgttgcttgccttccattcctacccttactaatcagattcctattatagctacttctgtccttgattcattttgtatattagatgtgtgtgtgttcatgtgcatgcatgcaccctcacatgtaggtgtatatgggagtggtggtaaagacaggatatttcttcagttcatgggattttatttcaggagaattcaaacattcacgtattggagaagatgacacatttcttgaatgtctttggctttgagctgaatgcactaactagaagggacttcagattgtcctccttcgggggaggtaagtatattcttcatatacaggtaagagtgaaatgatagaagaatgttcctcctctccttttcttcctggacaacagatcaaatatttctcagatcttttacagctgaattggagtcacatggacaggtatgatcttaaaatataaaaaattattttaaaattacatgctaaaattttataaaaataaatgctaaaactaacttaaacggaagcatttgattaaaaaatttatccaaaaaagtttgaattttatatgaaacaggatagaagatgaaaaagctaaagaaataaaatataaataaattatggctggggacagtggctcacacctgtaatcccagcactttgggaggctgaggtgggaggactgattgaggctaggagtttgagacctgttatttgaggcacatgggaaggaaagttttctttgagatattccacattttataatattcttcaagagatttacagagttccttgagtgaattgttggtttgttcttaatactgaatttcctattcaaatttatttagaagttcatttcttacagtgatctcatctcctattaagatattcttcaaggtaggttcttggccagtttctcaatgacagatttttaaaaatattgttaatctttttattaatatgagaacataattgttccagatctggaggccatcctttaagcttcttgcaacagtctgggagcaaagagtttactcgccactgggtagtgggccatggacaccccagtctccaccagaagttcgggattgcaaaatgggactctggcagcaaatttcaaactgtatgccagacctggccctttgcaggtgtctggaaagatggctgaataggaacagctctgctctgcagctcccagcgagatcaacgcagaaggagataatttctgcatttccaactaaagtacccagctcatctcattgggactggttagacagtgggtgcagcccacagaaggcaagcagaagcagggtggggtgtcgcctcacccgggaagcgcaaggggtcagggaactccctcccctagccaagggaagctgtgagggactgtgccgtgaggaacggggcattccggcacagatactatgctttccccacggtctttgcaacccacagaccaggagattcccttgggtgcctgcaccaccagggccctgggtttcaagcaaaaaactgggcagccatttgggcagacactgagctagcagcaggagtttttttcataccctagtagcccctagaatgccagcgagacagaactgttcactcccctggaaaggggcactgaagccagggagccaagtggtctagctcagcagatcccacccccacggagcccaacaagctaagacccactgggttgaaattctcgctgccagcacagcagtctgatgtccacctggaatgcttgagcttggtgcagggaggggcgtctgccattactgaggcttgattaggcagtttccccctcacagtgtaaacaaagctgctgggaagtttgaactgggtggagcccactgcagctcggcaaagttgctgtagcaagagtgtctctctagattcctcctctctgagcagggcatctctgaaacaaaggcagcagccccagtcagggacttatagataaaactcccatctccctgggacagagcacctgggggaaggggcagctgtgggcacagcttcaggacacttaaacgttcctgcctgctggctctgaagagagcagcagatctcccagcacagtgctcaagttctgctaagggacagactgcctcctcaagtgggtccctgacccctgtgcctccggagtgggagagaccttccagcaggggtcaacagacatctggtgggtgcccgtctgagacgaagcttccagaggaaggaacaggcagcaatctgtgctgttctgtagcctgcgctggtgatacccaggtaaacagggtctggagtggatctccaacaaactccagcagacctgcagcagaggggcctgactgttataaggaaaactaacaaacagaaaggaatagcgtcaacatcaacaaaaaggacatccacacaaaaaccccatccgaaggtcaccagcatcaaagaccaaaggtagataaatccatgaagatgaggaaaaaccagtgcaaaaaggctgaaaattccaaaaaccagaacaccttttctcctgcaaaggatcacaactccttgccagcaagagaacaaaactggatggagaatgagtttgacgaatttacagaaggaggcttcagaaggtgggtaataacaaactcctctgagctaaaggagcatgttctaacccaatgcaaggaagctaaaaatgaaaaaaggctggaggaattgctaactagaataaccactttagagaagaacataaatgatctgatggagctgaaaaacacagcacgagaccttcgtgaagcatacagaagtatcaatagctgaatcgatcaagcagaagaaaggatatcagagattgaagatcaacttaatgacataaagtgtgacgtcaagattagagaaaaaaagaatgaaaaggaacgaacaaagcctccaagaaatatgggactatgtgaaaagaccaaacctatgtttaattgatgtacctgaaagtgctggggagaatagaaccaagtttgaaaacactcttaggatattatccaggagaacttccccaacctagcaagacaggccaatattcaaatcagtaaatacagagaacaccacaaagatactcctcgagaagagcaaccccaagacacataatcatcagattcaccaaggatgaaatgaagaaaaaaatgttaagggcagccagagagaaaggtcggtttactcacaaagggaagcccattaaactaatagcagatttgtctgctgaaaccctacaagccagaatagagtggggggccaatatttaacattcttaaagaaaagaattttcagcccagaatttcatatccagccaaactaagcttcattagcaaagaagaaataaaatcctgagagacaagcaaatgctgagcgattttgtcaccaccaggcctgccttacaagagctccagaaggcagcactaaacacataaaggaaaaaccagtaccagccactgcaaaaacataacaaactataaagaccaccgacactatgaagaaactgcatcaactaacaggcaaaataaccaactagcatcataatgacaggatcagattaacacataacaatattaaccttaaatgcaaacgggctaaatgccacaattaaaagacacagactggcaaattggatagagtcaaaatccatcattgtgctgtattcaggagacccatctcacgtgcaaagacacacataggctcaaaataaagggatggaggaatatttaccaagcaaatggaaaggaaaagaaaaaaagcaggggttgcaatcctagtctctcataaaacagactttaaaccaacaaagataaaaaaagacaaagaagggcattacataatggtaaagggatgaatgcaacaagcagagctaactattctacatatatatgcacccaatacaggagcacccagattcataaagcaagttcttagagacctacaaagagacttagactctcacacaataataatgggagactttgacactccactgtcaatattagacagaacaatgagacagaaaattaacaagaatattcaggacttaaactcagctctggaccaagcagacctacagaactcagaacttgaactcagctttggaccaagcagacatctacacaactctccacttcaaatcaacagaatatacattcttagcagcaccacatcgcacttattctaaaattgaccacataattggaagtaaaacactacacaccgaatgcaaaagaacggaaatcacaacagtctctcagaccacagtgcaatcaaattagaactc

SEQ ID NO: 728439 - DNA, 1674 bp, Homo sapiens
tatctgtcgtcctgacttcttgttcattccaatgaatcgatacagactgttagtgcacatcaatatccattttgtcctcttcttttttggcatacaaccaaaacttacataggctttttatcattttactgggcctatgtaactgagttttagccagtggaatatgtccaagtgacatttgccacttctaggtctggcacattaacacttgatgtattacatttcagaccctcttatcattctgcagtgtgtttggcgatctgttgtttaagatctatatgcactggttactgttgcttgccttccattcctacccttactaatcagattcctattatagctacttctgtccttgattcattttgtatattagatgtgtgtgtgttcatgtgcatgcatgcaccctcacatgtaggtgtatatgggagtggtggtaaagacaggatatttcttcagttcatgggattttatttcaggagaattcaaacattcacgtattggagaagatgacacatttcttgaatgtctttggctttgagctgaatgcactaactagaagggacttcagattgtcctccttcgggggaggtaagtatattcttcatatacaggtaagagtgaaatgatagaagaatgttcctcctctccttttcttcctggacaacagatcaaatatttctcagatcttttacagctgaattggagtcacatggacaggtatgatcttaaaatataaaaaattattttaaaattacatgctaaaattttataaaaataaatgctaaaactaacttaaacggaagcatttgattaaaaaatttatccaaaaaagtttgaattttatatgaaacaggatagaagatgaaaaagctaaagaaataaaatataaataaattatggctggggacagtggctcacacctgtaatcccagcactttgggaggctgaggtgggaggactgattgaggctaggagtttgagacctgttatttgaggcacatgggaaggaaagttttctttgagatattccacattttataatattcttcaagagatttacagagttccttgagtgaattgttggtttgttcttaatactgaatttcctattcaaatttatttagaagttcatttcttacagtgatctcatctcctattaagatattcttcaagatctggaggccatcctttaagcttcttgcaacagtctgggagcaaagagtttactcgccactgggtagtgggccatggacaccccagtctccaccagaagttcgggattgcaaaatgggactctggcagcaaatttcaaactgtatgccagacctggccctttgcaggtgggcatcactaaaaatttaaattaccaaaattgactcaagagtaaatctatgtctgaggagaaagcctttggaaaaattgaattagtaagcaaaaacctacccaaaataaataacagtaagtctagaaaattttacacagggattaccaacaaacattcaaagcacagaaaaatctctttagcacaaaatgctacaaaatacagaaaaagaggaaaattctgtagtttctctcatgaagttaatatattctagttagctgaactagaaaaataagagaaagaaaaattataggttaatcttccttatgagtacatgcaagtatcataagatg

SEQ ID NO: 728440 - DNA, 4501 bp, Homo sapiens
tatctgtcgtcctgacttcttgttcattccaatgaatcgatacagactgttagtgcacatcaatatccattttgtcctcttcttttttggcatacaaccaaaacttacataggctttttatcattttactgggcctatgtaactgagttttagccagtggaatatgtccaagtgacatttgccacttctaggtctggcacattaacacttgatgtattacatttcagaccctcttatcattctgcagtgtgtttggcgatctgttgtttaagatctatatgcactggttactgttgcttgccttccattcctacccttactaatcagattcctattatagctacttctgtccttgattcattttgtatattagatgtgtgtgtgttcatgtgcatgcatgcaccctcacatgtaggtgtatatgggagtggtggtaaagacaggatatttcttcagttcatgggattttatttcaggagaattcaaacattcacgtattggagaagatgacacatttcttgaatgtctttggctttgagctgaatgcactaactagaagggacttcagattgtcctccttcgggggaggtaagtatattcttcatatacaggtaagagtgaaatgatagaagaatgttcctcctctccttttcttcctggacaacagatcaaatatttctcagatcttttacagctgaattggagtcacatggacaggtatgatcttaaaatataaaaaattattttaaaattacatgctaaaattttataaaaataaatgctaaaactaacttaaacggaagcatttgattaaaaaatttatccaaaaaagtttgaattttatatgaaacaggatagaagatgaaaaagctaaagaaataaaatataaataaattatggctggggacagtggctcacacctgtaatcccagcactttgggaggctgaggtgggaggactgattgaggctaggagtttgagacctgttatttgaggcacatgggaaggaaagttttctttgagatattccacattttataatattcttcaagagatttacagagttccttgagtgaattgttggtttgttcttaatactgaatttcctattcaaatttatttagaagttcatttcttacagtgatctcatctcctattaagatattcttcaagatctggaggccatcctttaagcttcttgcaacagtctgggagcaaagagtttactcgccactgggtagtgggccatggacaccccagtctccaccagaagttcgggattgcaaaatgggactctggcagcaaatttcaaactgtatgccagacctggccctttgcagtgatataaaatttttcttgaggtgtctggaaagatggctgaataggaacagctctgctctgcagctcccagcgagatcaacgcagaaggagataatttctgcatttccaactaaagtacccagctcatctcattgggactggttagacagtgggtgcagcccacagaaggcaagcagaagcagggtggggtgtcgcctcacccgggaagcgcaaggggtcagggaactccctcccctagccaagggaagctgtgagggactgtgccgtgaggaacggggcattccggcacagatactatgctttccccacggtctttgcaacccacagaccaggagattcccttgggtgcctgcaccaccagggccctgggtttcaagcaaaaaactgggcagccatttgggcagacactgagctagcagcaggagtttttttcataccctagtagcccctagaatgccagcgagacagaactgttcactcccctggaaaggggcactgaagccagggagccaagtggtctagctcagcagatcccacccccacggagcccaacaagctaagacccactgggttgaaattctcgctgccagcacagcagtctgatgtccacctggaatgcttgagcttggtgcagggaggggcgtctgccattactgaggcttgattaggcagtttccccctcacagtgtaaacaaagctgctgggaagtttgaactgggtggagcccactgcagctcggcaaagttgctgtagcaagagtgtctctctagattcctcctctctgagcagggcatctctgaaacaaaggcagcagccccagtcagggacttatagataaaactcccatctccctgggacagagcacctgggggaaggggcagctgtgggcacagcttcaggacacttaaacgttcctgcctgctggctctgaagagagcagcagatctcccagcacagtgctcaagttctgctaagggacagactgcctcctcaagtgggtccctgacccctgtgcctccggagtgggagagaccttccagcaggggtcaacagacatctggtgggtgcccgtctgagacgaagcttccagaggaaggaacaggcagcaatctgtgctgttctgtagcctgcgctggtgatacccaggtaaacagggtctggagtggatctccaacaaactccagcagacctgcagcagaggggcctgactgttataaggaaaactaacaaacagaaaggaatagcgtcaacatcaacaaaaaggacatccacacaaaaaccccatccgaaggtcaccagcatcaaagaccaaaggtagataaatccatgaagatgaggaaaaaccagtgcaaaaaggctgaaaattccaaaaaccagaacaccttttctcctgcaaaggatcacaactccttgccagcaagagaacaaaactggatggagaatgagtttgacgaatttacagaaggaggcttcagaaggtgggtaataacaaactcctctgagctaaaggagcatgttctaacccaatgcaaggaagctaaaaatgaaaaaaggctggaggaattgctaactagaataaccactttagagaagaacataaatgatctgatggagctgaaaaacacagcacgagaccttcgtgaagcatacagaagtatcaatagctgaatcgatcaagcagaagaaaggatatcagagattgaagatcaacttaatgacataaagtgtgacgtcaagattagagaaaaaaagaatgaaaaggaacgaacaaagcctccaagaaatatgggactatgtgaaaagaccaaacctatgtttaattgatgtacctgaaagtgctggggagaatagaaccaagtttgaaaacactcttaggatattatccaggagaacttccccaacctagcaagacaggccaatattcaaatcagtaaatacagagaacaccacaaagatactcctcgagaagagcaaccccaagacacataatcatcagattcaccaaggatgaaatgaagaaaaaaatgttaagggcagccagagagaaaggtcggtttactcacaaagggaagcccattaaactaatagcagatttgtctgctgaaaccctacaagccagaatagagtggggggccaatatttaacattcttaaagaaaagaattttcagcccagaatttcatatccagccaaactaagcttcattagcaaagaagaaataaaatcctgagagacaagcaaatgctgagcgattttgtcaccaccaggcctgccttacaagagctccagaaggcagcactaaacacataaaggaaaaaccagtaccagccactgcaaaaacataacaaactataaagaccaccgacactatgaagaaactgcatcaactaacaggcaaaataaccaactagcatcataatgacaggatcagattaacacataacaatattaaccttaaatgcaaacgggctaaatgccacaattaaaagacacagactggcaaattggatagagtcaaaatccatcattgtgctgtattcaggagacccatctcacgtgcaaagacacacataggctcaaaataaagggatggaggaatatttaccaagcaaatggaaaggaaaagaaaaaaagcaggggttgcaatcctagtctctcataaaacagactttaaaccaacaaagataaaaaaagacaaagaagggcattacataatggtaaagggatgaatgcaacaagcagagctaactattctacatatatatgcacccaatacaggagcacccagattcataaagcaagttcttagagacctacaaagagacttagactctcacacaataataatgggagactttgacactccactgtcaatattagacagaacaatgagacagaaaattaacaagaatattcaggacttaaactcagctctggaccaagcagacctacagaactcagaacttgaactcagctttggaccaagcagacatctacacaactctccacttcaaatcaacagaatatacattcttagcagcaccacatcgcacttattctaaaattgaccacataattggaagtaaaacactacacaccgaatgcaaaagaacggaaatcacaacagtctctcagaccacagtgcaatcaaattagaactc

SEQ ID NO: 728441 - DNA, 1627 bp, Homo sapiens
tatctgtcgtcctgacttcttgttcattccaatgaatcgatacagactgttagtgcacatcaatatccattttgtcctcttcttttttggcatacaaccaaaacttacataggctttttatcattttactgggcctatgtaactgagttttagccagtggaatatgtccaagtgacatttgccacttctaggtctggcacattaacacttgatgtattacatttcagaccctcttatcattctgcagtgtgtttggcgatctgttgtttaagatctatatgcactggttactgttgcttgccttccattcctacccttactaatcagattcctattatagctacttctgtccttgattcattttgtatattagatgtgtgtgtgttcatgtgcatgcatgcaccctcacatgtaggtgtatatgggagtggtggtaaagacaggatatttcttcagttcatgggattttatttcaggagaattcaaacattcacgtattggagaagatgacacatttcttgaatgtctttggctttgagctgaatgcactaactagaagggacttcagattgtcctccttcgggggaggtaagtatattcttcatatacaggtaagagtgaaatgatagaagaatgttcctcctctccttttcttcctggacaacagatcaaatatttctcagatcttttacagctgaattggagtcacatggacaggtatgatcttaaaatataaaaaattattttaaaattacatgctaaaattttataaaaataaatgctaaaactaacttaaacggaagcatttgattaaaaaatttatccaaaaaagtttgaattttatatgaaacaggatagaagatgaaaaagctaaagaaataaaatataaataaattatggctggggacagtggctcacacctgtaatcccagcactttgggaggctgaggtgggaggactgattgaggctaggagtttgagacctgttatttgaggcacatgggaaggaaagttttctttgagatattccacattttataatattcttcaagagatttacagagttccttgagtgaattgttggtttgttcttaatactgaatttcctattcaaatttatttagaagttcatttcttacagtgatctcatctcctattaagatattcttcaagatctggaggccatcctttaagcttcttgcaacagtctgggagcaaagagtttactcgccactgggtagtgggccatggacaccccagtctccaccagaagttcgggattgcaaaatgggactctggcagcaaatttcaaactgtatgccagacctggccctttgcagagttaaaagaagccaggtgtggtggctcacacctgtaatccctggactttgggaggctgaggccagagaatcacctgaggtcaagggtttgaaaccagcgtggccaacatgacaaaaacccatctctactaaaatagaaaaattagccaggagtgatggcgggcacctgtaatcccagctacttgggaggctgatggaggagaatcacctgaacccaggaggtggaggttgcagtgggccaagattgcaccactgcactcctgtctgggcaacagagtgagactgtc

SEQ ID NO: 728442 - DNA, 1516 bp, Homo sapiens
gcgcctccgcgtctgcccgcgccgggcttcgggggcctggggagcctgaggcggccaggaagtggggcgaggaagggcggccacacggcccgagctgggagtcccacagtcccgcagcggcgacgccgccacccgccgagtgccgaggcccggggcccactcccagcccagctccaggagaggccgcgccggaggaccgcgaggacggcgccgcagcgccaggtcgggctgagctaagggaggaaatggagcgaaaagtggcggcgggcagagggccccgggcgggcggagaatcgctgacgagggcatttcggaaggaactgaacctaggagcacagggctccctcccgggaaggcagggcgtgaccctggagccgccggtccctcttgccgcggccccaggcgtggctggcgcgctccaggatctggagcttctacaagtttgctttgtttcctgcttttgcatctaaaaacccgctctctcctcgcccgcctgccggagaccaggactctggcccgtctgcctccctccggcgtcgtctccgggagcgcgggcgcggtggggcctgcaggccgggctgggaccaggcgcgccttggggcgcgagtggctcggccgtcgccgcagaacccgctccctgcgaaacagccgcacccgctccctgggagagtcatgagaactggggtcgcgcctgacccccgcgcccgaagaaaaccagcccgcggaccccgccacacgggccgtgacccgagccccgcgcgccgtcccgaacgcgcgcggtgaaaacgccccgctgcgccggccttgctcggtccccctcctccacccccacttctccggaaaaaaaaaattctgaattgggaacgaagacccgaaaaactcgccatgaccattcccctccccggcccctagcttcggcccggaaggcccctcagggcagcggccgtgggtaccacgacccggccagttcccctcgccgcggaccgaccgggcagggccaacccaggactgttccggggaggggagcagggtaggggagcgaatgttggggttcgttcgtgggtcacccagaactgggcgcacgctggcggcgcccggacttcgccgactgtccgcccggtgccacccgcgcggctcgcgccagacgcagcctggcggtccctgtcctgtcttcgagtatttgtttttaatgctgggtgtcgatcgagacaacaagcgctcagagcaaagcaaggatgcattacgggggtaattttaaaccgatcgataagatttttcagagaaaaaaaaatcgctcatagtccatattttttaagaaaaaaaaaaaagcctcaacattttaacggattttgttaaaagggaagatatatacttcttaacatcacaatcctgaatttcttttgctaaaaaaaatgtaaaaccccaaagccagaataaaaaataaaataataataaaaatacaaaaacaaaaaaaaaaatgaaagcaatttcagttacttactggaggctgtttcct

SEQ ID NO: 728443 - DNA, 1104 bp, Homo sapiens
aggagtctggtggcagcatgcccaataccatgcacctgccctacctcaggcagcgtggtggactgtgggggcctccacctgctctgtctcccttccaggctgcctgatggagtctggctcctggagctgagccacaataatctcagccatctgccggctggcgccttccagggcttttggggactgcgggtgttgctgctttctctcaatatcctgcgggatctgtctgatggggccctagggggcctcagtttcctggagcagctgaacctcagccataaccagctggcccatctgcccacagacttctcggctaccctgggctctctgctctgcctggacctctctcacaacctactcacttccctggaccccaccagcctgtggcgcctggggggcctggagcagctcaacctgagccacaaccagctggctgaactggccgcaggggtctttgggggcctcttccacctacactggctctcgctggctgggaaccagctgcagcgggtgaagggtgctgccctgaccactgtgccgggcttggaagtcctctctgtagctgggaatgacatcagtgagctggaggccgaggcgtttgcaaccttaggagcactgggccttctctctcctgggtaaccgactgcagcacctggaggtcaaggcagtggcaggcatccggacagcaggcatgcggctgctgttgttggataacccctggacacgtgactgtgacctgcagtgagccttcggaaagttgggtcacctgcggcacttgagtgtcgtagacctgggcatcctgacttgcgctgggcccgaaaggctgtcaggggcagtgctgagtggtgtggaggcccagctttgcctggctgagactgccactgtgctgggcatcacaggcaccgtgctgctcacagtggctgtggctgtgctgatggctgagcgcaagcgaagacagggcccgcaagaagccggggagctggggagctttctggagagactatttaatcagcaggcagatcaacaggccaaaatttccaccataactgcaaacttgaatgcggatgaatggattacaacatggtcaaaccttgcaatgagagg

SEQ ID NO: 728444 - DNA, 400 bp, Homo sapiens
gaatattaaaatcataagaatgcacagtgatgcatgcctctaatccaaactacttgggaggatgaggcaagaggatcacttgaggagcccagaagtttgagaccagcttgggaaacatagtaagactctaccttcataaaaaaattgtgcacacttgtgtgtatgctttagatcctgttttttgttgttgttgttgttgttgttttggtttggtttggttttttaaagcataagactgacgctttgttacaaagcattcctttgggagcatgcctgggacgttattagaattaacattcattatatgtattggtaggtaattaatgcagtaagaactcttccctctgtatttattagatgcaaagaagaatacatttattaaaatttggtatctacaagt

SEQ ID NO: 728445 - DNA, 514 bp, Homo sapiens
tgtgtagattcgctggaagcagctggaggctccagttctcatctgctcaggtgtccccggcgccttggcgaactcggccactccagttcctcacgtggtgagcactcagggcagcgggtcgattttccgaggtcccatacctgggtttgaggggcgcggctcgcagcggcgggtgcaggggcgactgccagccctcaccccgcctcggggtgcgttcggaggccgacacctggaggacgcctccagtccccgcgggacgccacgcctgcgcgccagggatccgggataagaagtgcgcgccgggctccggctgcgcgccgcggggccaccagtttgcgcgcagggctcaggcgaccgtgcggccatggacacgccacggggcatcggcaccttcgtggtgtgggactacgtggtgttcgcgggcatgctggtcatctcggccgccatcggcatctactacgccttcgctgggggcggccagcagacctccaaggacttcctgatgggcggccgc

SEQ ID NO: 728446 - DNA, 520 bp, Homo sapiens
cacatttgctgttgcaggtgaccaggattgggctgattgttcacaagaccaggaagcaggattttcaggtgttggctggatcggctggctttctgatggccagctatgccttgggagctgtggggggcgtctgcgccctggccaatgtcctgggggctcaggtgtgccagctggagcgactgtgctgcacggggcaatgggaagatgcccagaaactgcagcaccgcctcattgagccaaacgctgcggtgagccagtggcagcgggggcgcggcctggcggggggtgggcagtctgtgtcctcattggagcaggacccagggctggcaccaggccccactcagtctcttcctttcagaaaatcctttgagagaacatcccagtgtgggaactccttgtgactcccagaaaatcctgacttcggacaaagtcgagcaccactgattgtcaaacttaagtgtgcattaaaatttccttgggggcgaattaaagttccaacttttgggcccaagaagatgca

SEQ ID NO: 728447 - DNA, 410 bp, Homo sapiens
cacatttgctgttgcaggtgaccaggattgggctgattgttcacaagaccaggaagcaggattttcaggtgttggctggatcggctggctttctgatggccagctatgccttgggagctgtggggggcgtctgcgccctggccaatgtcctgggggctcaggtgtgccagctggagcgactgtgctgcacggggcaatgggaagatgcccagaaactgcagcaccgcctcattgagccaaacgctgcgaaaatcctttgagagaacatcccagtgtgggaactccttgtgactcccagaaaatcctgacttcggacaaagtcgagcaccactgattgtcaaacttaagtgtgcattaaaatttccttgggggcgaattaaagttccaacttttgggcccaagaagatgca

SEQ ID NO: 728448 - DNA, 654 bp, Homo sapiens
gcccaggctggtcttgaactcctggcctcaagcaattcatcccatcttggcttcccaaagcactggaattataggcatgagccacatcacccagccttgtagttatttttaaaatgaagacaagaggaatagagtatacctttaaaaatatatgatactgtgtattggatgattctgaaaggatgtatttgcctatgaagaaaaaccttcttgttttgatgtctggttgttagctttttactttactaaagcccagttaacttttctgtgctttagttccacatctgtaaaattactcattttatatttctctatccactttgaaaattaagtaaatgctctttgaatttcaacttttaattatttaagccaagatctctcttctgtattttttatgtgttctttattgtgggcttactaattcttgaatttaaaaaaatcatttaaatcaagcaatagtaatagtatatgtttaagcatatagtgtatgtttttaaataaataagcaggctgggttttagtggctcacccctataatcccaacactttaggaggccaaggcaaaaggatcacttgagtcctggaattgaagaccagtctgggcaacatagcgagatcacacctctacaaaaaaaaaagtttaaaaattagcca

SEQ ID NO: 728449 - DNA, 410 bp, Homo sapiens
aggtggttagtagggtgccttcagaagccctgcaacccaccctccctcagaggcacccaagagaagtgatttgccacaggtgaggaggggtctcgggcagcaccggagttgaactttaagtccagatcaatggtagtgccaccactgggcctcctgctgcccacacccctgcctgtctgctgtgcagatgctgcatctacatagaacacggctttcccagccgcccagctgggacaatagggctggtgggtcaggggacctgagtcctggtccttagggtgggattttggttaggtccctgcttctcttgggatcttatttacccgactctgcagcagccatggtagcttttgactccaggccacaaagccatgagaatgggccttataaactgtaaagtgacgtgcagc

SEQ ID NO: 728450 - DNA, 469 bp, Homo sapiens
ctccgaaaggagggagacgagctcaaccctcgggccttactggcagctcgcagcctagcacggagcccgcgcctgtgcgggcgcctggagctgcccgctccgccgcagcagccgccgcgcctggccgtacgctgtggccggaccccgcggtcgctcgctcacacacccctcgccgctccgcgcctggctcgcccgcgggggccgagcgcgagcgggcgggcgggggaggtgaggggtgcgggcgggtgtgcatgtgcctggctgggtgcacaccccgcaaggcggcggcgccaggacgcggagcgctccccagagcccggctgcctcgcacagctcccgcggctgcgaccatgttccagcccgcggccaagcgcggctttaccatagagtccttggtggccaaggacggcggcaccggcgggggcactggcggcgggggcgcgggctcccatctcctggcggcggccgc

SEQ ID NO: 728451 - DNA, 380 bp, Homo sapiens
ccacaggacccgcgctcgaccctggcgaaggtgcaccggcagcggcgcgacctgctgaacagcgcctgtagccgccactcacgccggcagcgcctgctacagccggaggacctgcggcacgtgctggtggacgacgcgcatggcctgctctactgctacgtgcccaaggtggcctgcaccaactggaagcgcgtgctgctggcgctgagcggccaagcccgcggcgacccgcgcgccatctccgcgcaagaggcgcacgcgcctggccgcctgccctcactggccgacttcagccccgccgagatcaaccggcgcctgcgcgcctacttggccttcctgttcgtgcgggagcccttcgagcgcctggcatcggcttaccg

SEQ ID NO: 728452 - DNA, 532 bp, Homo sapiens
aagatgacctggacatggactccagtgaaggcagcagccccaatgcatctccacatgacagggaggaagcttgttccccacaacaggaacctcagggctgcaggtgcccgctggaccgcttccaagactttgccctgattgatgccccaacgttggaggatgagccccaagaggggcagcagtgggaaatagccctgcccaacaactggcagcggtacccaaggacaaaggtggaggagaaggaggcttcggacacaggtggggaggaacctgagaaggaagaggaagacctgtactatgggctgccagatggagccggggacctcctcccggacaaggagctgggttttgagcctgacacccaaggctgagatgtttgtgctccgtagcttctagtctggaactgctgctgacccctgtgtgacatcacagggcctcagtttccctatctgcaaaatgggatgatatggaggttcaatgagatggtggcattttgagaatggtaaagaaatacacagggaggggatgatga

SEQ ID NO: 728453 - DNA, 178 bp, Homo sapiens
ggtagtatatgagccatcctcttcaagaagcctggaaaccctgcttccccacctacaggcatgcccctcaggactgtgaaagtggcagctttcctctccctgcctcagccatcacttcagagcaggctactgctgctgcctcccagaggggcttgcagcctccagctcttgctcctcc

SEQ ID NO: 728454 - DNA, 282 bp, Homo sapiens
ggcagagccggacgccaggggctggacgcccaaccacctagtcactccccaggacgcagttatcgcgcgcaaagcagctgggggaccccgcaaggaaactcaggcacaatggagcccgcttctttttctgtcaactctgaatgctatgtctggtttggtcctggctgctagttcgaagctggaacatcctccagagctggggcccatttccttttatttgccttgggccccaaatgaaaagcatctatccgcatgcctaataaaaattttcttaaatcgggc

SEQ ID NO: 728455 - DNA, 464 bp, Homo sapiens
gcaaccaggcgccagcccccgaaccatcacacgccgactcggggctccctccggccccgccatccccgcaaacccaaccacctacacagctcggcagcttcccgtccccattgtcgagacccgacggagtttcccgtctacgacaatgacgccatttctgtcagagaagaaactcacaacaagcccggcgtccggcgcagggccggccgctctcccctagggcctcggcgcccggccgagcgaatccgcgcccccacgcgccgcgtccgagcgagaggccggccgggggccaccgaggggccaggagggcctgtgggccgcgggcaggaccggcccgccacagagcccctgcccacgtcccgttccgggctcagacccgacaagtgggagcgagatcaacatctggccccgccgcgggacaacgtgagggccgagggccccggaggcggaacggcccccaccct

SEQ ID NO: 728456 - DNA, 1051 bp, Homo sapiens
gtgagcttgaactaagtgatccatgtggcccccggtcacaaggcctagtgctaggcagcttacctatattataagtgcatgctgcctaaaaggagtaaatcctttttttgaaaactattaccatatttaatgttcttttttgagtcctgggaattactataaaatatttattatttcaaaaacaaaaataaagattttttaaaaaaagttttctagagcaaagccaccgtaagaaagtttgtaaccagaggtttttgaattctaatttgatgctgaaagagtagaagtattatgaatgtataagcaactccccattcccccattaatagtttttcccaatcaaataatgttgccataaatagttgttgttttatatattaatgggtttacagtgaactgccacttgtttgtttggtctaccttaatgtgttttactctttattttcttaatgattttggccgctaaaatggaaaaaaattaactcaagtgggttaaaaagggttttgaaaacatagtagagaacagatgtaaattccttaaagtaaccattcatccagtcactgaaatagaatcctaaaaatacagttggcctacattctgacttacaaaagagtgcaacttttgtccctgctattatgaacagtgtaaaacattaagaattagtgtgctgagaagaaatacttcatgtattctcttcctgcaggagcttgttaggtgtgctctcctgccccccaacttcctttgttggtaaaaatggtaggaattgacagggaggatagaaagtcatgtttttttttggtaggaggaggaagaagaggtcattccagcagtattgtgtagaaattaatttgtcagaaattaaaattgaaggatgaaatgtttattaatagggttctagttaaaaaaataaaggtatccatagacagtaagatactgtgcaattgttgaaaaaatactggtatgtacaaataaaaaatgagacaaaaaaaatctggtaagtgaggaaagcaaagtgccagatatatatgtatagaacgctacctttcttgt

SEQ ID NO: 728457 - DNA, 347 bp, Homo sapiens
accctgcatgaccctgttccccgggaggggcagcctggggagtgacaggcatgacctcgatggtgggccaggggcctcctcagaggagcaaagagaagcttggtggaagagaaagccgctagtattcagcgagaagatcactcaaatccttcaccagcatgctcagtgaagaatgcattaaaaaaattagactttttttcttcctggcaacaaaatcttgccaaaataagtaccaaaataagtgttccaatggttttatttggggaaagccaacgctttccccaaaaagactttttcttgtttctcatttggctgctacaaataaagctgcaatgaacatacatgta

SEQ ID NO: 728458 - DNA, 587 bp, Homo sapiens
aactgtgcatacggattgaaggctgagggttcccttcaattttagcttattttgcctttttgtctatgcatatcataaattgcaaatttggaagagctattgcaagaatagggaattaagagagaaagccatgtagcctactttggtttgaggaattggcttacctggcatataaggaaacttctgcatgacatatatggaaccttctccctctagcttcctggagtctactttaaggcttgggtacaaacctcagtgaaagtatttctgtgttttattttgcctccattgtaccttactcaaaaatcacttgaggaagaagacagttgtcatggcatgattgcggaattcattgttttcctggcaaaatttctccttactagtgctcaatctaatccatgcaaaaatacagttcctgaatagatctaagttatgctgactgtatgtttgtttgccctcataaccatctttagtctttatctgccctacagtcttgcagtggagctgactgttgcaggatacatttccctggctctgtgtcagctactcctacctgggttctgttgttgaatgtataaatgaatgac

SEQ ID NO: 728459 - DNA, 219 bp, Homo sapiens; identical to SEQ ID NO: 242748
  misc_feature (9)..(9): n is a, c, g, or t

SEQ ID NO: 728460 - DNA, 448 bp, Homo sapiens
tgtaaaaaaaaaaaaaaaaaaaaaaaaaagcatacaacagaaactgtatgtggcctgtgaaacctaaaatatatattctttggctcttaacgaagatgtttgccaacccctggtatatattaaagacagttattttagagactgtgtctggtaaccctattatttgaaacttctttgttagtttctggagtttattccatactttttatcagtgccatcctgtctcgtcatatgtgcctggttttattgggctgagcaatggatgttgtatatgtgaaaaaaaatttttttaattgagacctaggatgactttcttcctatagtgaggatttgtgtttgcttccaacagttgattggaaatgctagtaatcctgtataaccttattttagcatcaggcattgaggtcattctaaaattagcatcagtttacttttgggtgacatttac

SEQ ID NO: 728461 - DNA, 551 bp, Homo sapiens
tcatagtactctattttgctgtctgcagagtctgccatgagatctctgttgcattccagatactggtaatctgtgtcgtctctgtttttctttgccttttttccgggttctgcttgctttgggtttattttgctcttgagatgggagcttaaattattggtttgagattttttctcttttctaatgtatgcatttagtgctataaatttcccttcagcattgccttagctatgttccatatatttggatatattgtagtttcatttttcattcagttcaatgtatttttttattttccttgagacttcctgtttggctcttaggtagtgtaaatttctgtttattcctgtatctgctgtacatttaagtcattgctaattatttaccatcctaaataatattgtcagaaataacatcctttaatcaggcacggtggttcatgcctataaccctagccctttgggagaccaaggcaggaggatcccttgagcctaggacttcaagacctgcctaggcaacataacgagatcttgtctctacaaaaaaagaaa

SEQ ID NO: 728462 - DNA, 806 bp, Homo sapiens
gtagatttaaaaatcagtatcttcctgacagaggtattgctataaattttcttttctagatgaaaagaaaaatttttcacttagttattatgaatatatatataaatacatatatatatagttcttacaaataatgaaagccaagttttaaggaagtactgtggctttgtagcccagactgagaggaaaactgacaactatgtcatcaattcaccaaatagacgaaatgggtttctgtgttctctgttaagttataaaactaaacttagatactgaaattaacacaatttaaaaacagtcatgtagaataatgatgctattatttataatgctcatttgattctcacaatcttgttaagtggacaaagcaaatatcaccatcctgtttgctgaataatgaaactgagtctctgggaagctaactggtaggtctagaacccgtccagttatctttcctgtgattcctttacctttatcatcatcatcgtggtaagcattacattagacttagctatgtgccagacgttgttttaagtattttacctgtattaactcatttaatcctcttaatagaggattttttgagtttgttctattactattacccaattttccaaaaaactgagacacacagaggttaagtaatttgtccagttatagagcttagtgaatggtggagccagaattcaaacacaggtagtttggctctcaatatagtctgtgctcttaactaattcactatatttgtctctcaaatatccaaatcacatttctatgaaagttgtgtattaaaagttaatagattt

SEQ ID NO: 728463 - DNA, 517 bp, Homo sapiens; identical to SEQ ID NO: 216137

SEQ ID NO: 728464 - DNA, 736 bp, Homo sapiens
tgaaattctattcaatttcccaacactggttcccagactggctaaatgtgacttatctatacaagtctttaaaaattcagagacctgggccccatcctcagggcgactaattgaatagattgaggctggagttcagggatagaccgcatggccaaatttgggaactatgactacagatggtgtgagccactgaggaaataacatcactggggagaaaaaggtagctttcattatatagcttatatgaccttgagaatgtatattatgtctctctcttttgagggtgtaagggagagagggaaggaaatgagaaacatgatcatcagggaaaggaagacgtacgacaaatcctgcacagctagtgccaggatgctaaagtattgtgatgagggaaatggtgcagaccaggcttctaaagtgaagttgttaatgaaatgaaaggtagacaatacgcagaagcagcctgtcatatatgctaaactgtctgttttctggagaatccaaaagcattggaaactgttttctctgatatccctagttggtttactcaaggataaaatgcccagacttccttcctaacagcaggctaattgatttaaccaaagaatgtgcaaacaagatatactgttcctaaattatgcagtttttccttccttctctatacagtctatttttgcttttgttggacaacatcccactgatcgatcgatctctgaataaaaacactgaaatggac

SEQ ID NO: 728465 - DNA, 494 bp, Homo sapiens
gctatatgcacaagatgctacctgcagagattggtttttgcccagatgtgcaggagagatgcacagagaggaagaaatgcatacatgtgtgcaggttttggcgtgtgcacaagaagcctggaaggattttctttggatctacagtcaaaatggatttccgagaggaagctgtctgaaaacacacctcttccctgtgctacatacggtcccatctctgccagccaggttgtcaggaaagtgatcagcactggcttcaactctggctagagctctttggccaatgtgatgggcagaaaactggaatgaggacagaaaagcacctcagaggtttgaagagtctagtctctcaccaccttgctgctgagacttatttgaatgcctgtttcatatggagcttttaagtgtaacagttgtgagtgaaattgccccttttcaagcgctccgagtttgcttctgcatggaaggggaagatggactagagctgatacctcctg

SEQ ID NO: 728466 - DNA, 811 bp, Homo sapiens
gctatatgcacaagatgctacctgcagagattggtttttgcccagatgtgcaggagagatgcacagagaggaagaaatgcatacatgtgtgcaggttttggcgtgtgcacaagaagcctggaaggattttctttggatctacagtcaaaatggatttccgagaggaagctgtctgaaaacacacctcttccctgtgctacatacggtcccatctctgccagccaggttgtcaggaaagtgatcagcactggcttcaactctggctagagctctttggccaatgtgatgggcagaaaactggaatgaggacagaaaagcacctcagaggtttgaagagtctagtctctcaccaccttgctgctgagacttatttgaatgcctgtttcatatggagcttttaagtgtaacagttgtgagtgaaattgccccttttcaaggtaattgaattccatttttcactttccatttccctctagaaaaatcaaaacgttttcagagcttggcttcttagtgggtgattttctaaggtgggaactttagaaccataaaacattctagtgtggcaaaggcattcaggaaccggatgaccaggccccttctccgcaggtgaacagcctccaccagccggtcttggagaacatattgatttcactgtgtttttatttgaaacaccaaaggaatgcccatatcttgtccttgggccagggctgtgggttaggggagctgggtttctgtccagaatcttgtcatctgtagggcagctgaggggcattattacccagaggtccctggaaacctgtgctaaattggt

SEQ ID NO: 728467 - DNA, 225 bp, Homo sapiens
gcacaggtctacgccatcccccacgcagtttcggagatggagcgctgggcccatggagggaaggcggcaggctcggcggctccggcagcttgctggggcaggggctcaaggcggcagtccgatagtggaggccgctgagaactgtcacggagctgcgtctgtacagcgagcatcccttatttattcagggcgagtgtgtatttggggcggcgtgcagggggctga

SEQ ID NO: 728468 - DNA, 501 bp, Homo sapiens
ggaatgtgacatcagcggcgccgggcgcttggggctggaggaggcagctcgcctcagctgcgctgtgcacacctcgcccgggggaggacgcagacccgggcaggcggcagggatgtcggcgaaggagaggccaaagggcaaagtgatcaaggacagcgtcaccctcctgccctgcttttatttcgtcgagttgcctatattggcatcatcggtggttagcctctatttcctcgaactcacagatgtcttcaaacctgtgcactctggatttagctgctatgaccggagtcttagcatgccgtacattgaaccaacccaggaggcaattccattcctcatgttgcttagcttggcttttgctggacctgcaattacgattatggtaggagaaggaattctctactgttgcctctccaaaagaagaaatggggtcggactagagcccaacattaatgctggaggctgcaacttcaattccttcctcagacgagctgtcagatt

SEQ ID NO: 728469 - DNA, 916 bp, Homo sapiens
aagggagattatccagacccccaggagcgaacagcaagcagcaaccgaagcgcaagtgccaggattacagcctaggctgctccaactatgagcccttcctcggaccctgggactcggctacttggggtttgggggtcttccacaccacagaggcacaaagctgactttaatcactttttttcctttaaacttgattctgccgcagtggagccagcacagcggatgttttcacacccagcaagacaaaggccgtcgtctccgccatgacactgttccgttccaagcagaggccgggattctggactcctcgaaaaatcaaaaagaaacaaggaaaacaaacaacaaatacagcaacaaacagaaaaaactgaaaaccaccaaaatcgtttgcccgtttgcccgtgccaggggtgatctgggcatctgttgcagcagaaggcgcttgtgtggggctaatttttcttttggtgggggggacaagctgttggcttgtttgctatttcaacttcgtttataattaacttaaaaaaaaccccaccattcagcctagtcaacaacaaacaaagaaaaagcagacatcggaagagaaatgccataggaagcggcatgaatacatgccacagccggtgccacttgccactcggaaaacctcagggaaagatgccaattctacagctgcgaagaaggcagagaaaggaggataaaggtctacaactagaaatcataaggaaagaatactgcttgtataatcctggattgcaattgcacacagcctctgctgggagaagagagggaatatttaaatggagatatagatgggtataaattaaaagataggcacctatcgattgcgtataaacacatgtgtaaggttgtatgtgtatataaatatgcatattttcagacaaacgtttag

SEQ ID NO: 728470 - DNA, 416 bp, Homo sapiens
agtaatgagctgagccttggcccccagaagtttcccagaaatgaagccagtcaacggaacccaccttattccacaatcaaacgatcaaaggtgtcaaagaatataagagcaaaaaccccatccaaaggacagtgatatggtttggctctgtgtccccacccaaatgtcaccttgaataaatccccatgcgtcaagggcaggaccagatggagataacttaatcatggggtgcttcccccatgagtgagctctcatgagatctgatgattttataaatgggaattccgctgcacaagctctcttgcttgacaccacgtaagacgtaattttgctcctcatttgccatgattgttaggcctccccagcctaacaatgtggaattgtgagcaaattaaacctctttccttataaattac

SEQ ID NO: 728471 - DNA, 728 bp, Homo sapiens; identical to SEQ ID NO: 205376

SEQ ID NO: 728472 - DNA, 712 bp, Homo sapiens
ctcactctgtcacccaggctagagggcagtgccacggtctcagctcactgcaacctccacctcccaggttcaggcaattctcctgcctcagcctcccgagtagttgggattacaggcacacgctaccactcctggctaattttttgtatttttagtagagactgggtttcaccttgttggccaggctggtctcaaactccagacctaagacgatccacgcacctcggcctcccaaagtgttgggagtacaggcatgagccaccactcccagcctagacaagctgatttctcttggccccttcccattctagaattcagtattccttctgcctgttaattcaatggaaaagttggctcaagtgagtattaggttagcaaacactataaatattttatataccagacacttcctgtcccttctcaggtctctgtttgaatacagtactaaaaagttcatctggatcagcagcctaggctcccaccctgccatgagttgggttaccttttagatttcctggatgagtatgaagttaactgtagcctaattatactagacactctgaaaaaggtttttgtgtgatgtctgcaggaaaaactttcttttcttccctgtggtgtttcccatttcagaagcttgtattcaaacatgccagtcatgcttatatttttagttattcttatttctccaccccattgctcaagaggtgagtcc

SEQ ID NO: 728473 - DNA, 692 bp, Homo sapiens
cttagaatctgtcatttctatctcattaaatcagaggatctaaattgaaagtataatcaaaacaatttctattcttgaaaatttcaggctatcatacagagaattgcagtgaaatatcttggccacatgctaaccccaggcaaacttttctgctccccctcccaaactgcctcagcttttgtgagataacatttatggttcctaccttcttctagagaatgctaactagaaattgcatcaggcatttgatatagtggtgatgtttaagtcttctctgctaaaaagatttgttctgtattgggcatagcactctgttgatatgtagatattgtaattaagattgccctgtcttgtgatatggtcatctcccaaaatatccctgatttactaagaattacctaatatgataaatagattgctgttgggctatataattctctctggtgccagatctaatagtgccaggtatagaaattttgaagtctggccatgataaagaaatgagaacaggaaggggaacatcacacaccggggcctgttgtggggtgggggaaggggggagggatagcattaggagatacacctaacgttaaatgaagagttaatgggtgcatcacaccagcatggcacatgtatacatatgtaacaaacctgcacattgtgcacatgtaccctaaaacttaaagtataat

SEQ ID NO: 728474 - DNA, 774 bp, Homo sapiens
aaaaaaaaagaggggaacttcttttatttgttgataaaatattggtgaggttggtgccgctactgaaactgaacacactagggtacaagagaaggaatgcttctcgctggtggtcttcttagactcaaagagagaagtatctctccctctccccaggaactctacagagcaaggacaaaaccacttctgacttagagggagggctgaatgcagtgaccctatttaccaaatcccaaactgggtcatgaatttttttaatgacatttcagtttgaaaagaaagctggaagatggagtttgtgtgctgacatgttggaattcctggggcattatgagggttcccatgggggccaaagaagagaagatttaatatggtgatgtgttgtcataaaacatttgattgtttttgctcggattctttgaagatttagtctattatcgataagagaaacactaaagaactcttggttgtgtatttggccgctctcatttcggcaagtgtttaaatgtgtcattagacaaaaggtgctctgcaacagttggctctgactggagaccaaatttctctcaaatcaatccataaaccacttctgtcagagacgctctctgcacgcaccaatctggccagctcacaagccagaaattagatgtataactggatttcctctgagtcagccaatgctttgggttacatttaagcacaatctttctatgttatagcaagttccaaaggttgcagttctttttccttttctttccttccttcctttttttt

SEQ ID NO: 728475 - DNA, 531 bp, Homo sapiens; identical to SEQ ID NO: 399418

SEQ ID NO: 728476 - DNA, 340 bp, Homo sapiens; identical to SEQ ID NO: 399419

SEQ ID NO: 728477 - DNA, 662 bp, Homo sapiens
ctaagtcaaaataaacatgggatccaagcagttgcccttttaaaagacttcgtttcacacaatgtagataaaacaacctccaggattgccagataaaatgcagggccagctaaatttgaatttcagataaacaacggacaattgtttagtacaaatatgtcccacgtttcagataaacagtgatttttttttaactacagtaagtttcatgtaatatttaggatatatttacaacagagaatcatttcattgtgtgaaataaaataattcaaacttaaagctgttgaaactttaaattattctgagctttgagagggacatggctatatggcatgagtcaagcagcatgtagttgtaacttctgctttttcctgtaagtgatctggaatgattgaggcgtgccagagataagacccctgagaacattacacctcctcacagaatattaaaggaatcttccttggaatgtagcaagttaaactaatcaaattgttacaactgtttctgcctatataagtgaaatcttggcctcctcactttggagcactgaccccattcctttggaatcatgtttcgcgatggctatcctcaagctttgtgctgcagtaaactttatacttagtcatattttctgaatctcattattgaaggttgacatttgt

SEQ ID NO: 728478 - DNA, 2778 bp, Homo sapiens; identical to SEQ ID NO: 236595
  misc_feature (2504)..(2504): n is a, c, g, or t

SEQ ID NO: 728479 - DNA, 978 bp, Homo sapiens; identical to SEQ ID NO: 236593
  misc_feature (569)..(569): n is a, c, g, or t
  misc_feature (688)..(688): n is a, c, g, or t
  misc_feature (697)..(697): n is a, c, g, or t
  misc_feature (700)..(700): n is a, c, g, or t
  misc_feature (710)..(710): n is a, c, g, or t
  misc_feature (731)..(731): n is a, c, g, or t
  misc_feature (752)..(752): n is a, c, g, or t
  misc_feature (755)..(755): n is a, c, g, or t
  misc_feature (772)..(772): n is a, c, g, or t
  misc_feature (781)..(781): n is a, c, g, or t
  misc_feature (785)..(785): n is a, c, g, or t
  misc_feature (814)..(814): n is a, c, g, or t
  misc_feature (831)..(832): n is a, c, g, or t
  misc_feature (844)..(844): n is a, c, g, or t

SEQ ID NO: 728480 - DNA, 2913 bp, Homo sapiens
  misc_feature (2504)..(2504): n is a, c, g, or t
  misc_feature (2623)..(2623): n is a, c, g, or t
  misc_feature (2632)..(2632): n is a, c, g, or t
  misc_feature (2635)..(2635): n is a, c, g, or t
  misc_feature (2645)..(2645): n is a, c, g, or t
  misc_feature (2666)..(2666): n is a, c, g, or t
  misc_feature (2687)..(2687): n is a, c, g, or t
  misc_feature (2690)..(2690): n is a, c, g, or t
  misc_feature (2707)..(2707): n is a, c, g, or t
  misc_feature (2716)..(2716): n is a, c, g, or t
  misc_feature (2720)..(2720): n is a, c, g, or t
  misc_feature (2749)..(2749): n is a, c, g, or t
  misc_feature (2766)..(2767): n is a, c, g, or t
  misc_feature (2779)..(2779): n is a, c, g, or t
ctcattttgatgtctagaatcaggggatccaggatcatcaccaaggtcattttcccaggtatggaggggtctttctgcttctttcttgtcatgcacagctgctgaggaaggggctgggagtaaagacagtgaaatggggaggaggagtccattcaaaccgagaaacaaagtgtttggtttttcttacccctggtgtagaagctaccaaccttttccaagaaagagggcctggcccccttctcgggtctggctgggtgcctgctgtgcctctctggcctcccctccgaagggcaccattccctcgggtgagtactaccggcctgcaccgtcttccagtggggacagcctgagaagagagtctggggccttacttcagtaccttccttcactggcctcaccctgtgcaaatcatgccacacgctgcagcctccttttccctatctataaaataaaaatgaccctgctctatctcactgggctggcaagaacacactgttgttgccttgcagacagatgtgctgaggctgtagaaagtgctttttatttggttgggagcttgtgcataaatgcgagaggggctgcacatctgacggactagaggtgactcatggctgaaccggaacaggacatcggggagaagccagcagccatgctgaactctccacagggccctgtgaaaagctcttcacctcctctgccctctggatctagtgaagcctattcatccttcagatgtcagctcaaataatcaaccttcatggaggcctcccttgacccctaacatgctttcaaagtactgtgtatttcacattcatcatgccccgacaactgtgatttcccatttattaatatctgtctcttctgctggcctgcaaactccaggagcacagagacatctttgggatttttgaacatgatttccccagggcttagcccagtgcctggtgcaaagcaggctttcaacatgttcagtggatattgtaagaaagaaagaaatacacaaaaggcctggcatatgcaaagcactctaaatattcactcctttcccttccctctgggtgagaaaatttctccttataaagacaccctcctaactgtatctctgctagagaactgaagacataaagcactctgtgccaaaaatatttaagtaaaaacttgagctaagcacagagattataaatatttcttccccagattacgcaccatttaaaaatactgtctcagctccttttcatgatttgggtggtgattaaagaaaattactcttcaagactgaaagtcattactgcccttttcctgacttgccttttcccttgagaaggggaggataagctgcagggcaggaagtggaagtggggcatccttgtcctttgtctggcagacagccaactggtcaggtactgctccttctcaactctttcctgattcccaggtgaatataaacaagaaggcacaaatccacacttgccaacaacggacccaagtgataacaagaaacccagtgacacctgtctaggtgaagactcagcccctatgtgaccaggttgcaaagccaaactgaccatctgctttccatttggacttttagttcatactgtatcttctcaggacagttaagttggaatacaatgccactgtcctgaaagatggtagaattatcctatttctggaggagtgggggtggtgggtaggaatctcaagagcgatttgctcctctgcacaatagcttctttaaggacaccagggcccccagggctatacatttccctgaagctttccagataagcaacaaggtatgagcacctgctatgtattgcccaagggtgatgtgtttaaatatccattgcatattttaaatccttggctggcttaaagctgcaagctttctgtcttcagtggatataatgggggcatacatcccagagcttgcccaacactccaagaaaagaaccctcagctaatgcaaagtgtgtatgtgcccatgaaagctccatgtctacttaacattcagtttttaggattatttatgctgtaataatagatatgaaaatctctgacaggtattttgtttcctttacaaactgtatttgaatttatgggtgatttagagcttgtgtttaaagtcagaattcagaaccccaaagaaaatgacttcattgaaattgaactgaagagacaagaactgagttaccaaaacctactaaacgtgagttgctgtgaactggggattaaaccagaacgagtggagaagatcagaaagctaccaaacacactgctcagaaaggacaaagacattcgaagactgcgggactttcaggaagtggaactcattttaatgaaaaatggaagctccagattgacagaatatgtgccatctctgacagaaaggccctgctatgatagcaaagctgcaaaaatgacttattaaatactcccaggaatggccgcgcatggtggctcaccccctgtaatcccagcactttgggaagccaaggtgggcngatcacctgaggtcaggagttctagaccagcctggccaacatatagtgaaacccagtctctactaaaaaaaatacaaaaattagctaggtgtggtggcgcacacctgtagtagtccccngcctcccangtngctgggactncagtgcccaccaccacacccngctaatttttttttttttttngtngagacagggtttcactntgttggccnggcnggtcttgaactcctgacctcatgatccgnctgccttggcctcccanngtgctgggattncaagtgtgagccaccgcgcccggccaattccactgattctaaaatggccttaagtgaaattaatcacgtaccaaaatgccatcctaagaagtcccagaactatttaggttaaaataaaatatgaaatgacctag

SEQ ID NO: 728481 - DNA, 1294 bp, Homo sapiens
  misc_feature (1020)..(1020): n is a, c, g, or t
ctcattttgatgtctagaatcaggggatccaggatcatcaccaaggtcattttcccaggtatggaggggtctttctgcttctttcttgtcatgcacagctgctgaggaaggggctgggagtaaagacagtgaaatggggaggaggagtccattcaaaccgagaaacaaagtgtttggtttttcttacccctggtgtagaagctaccaaccttttccaagaaagagggcctggcccccttctcgggtctggctgggtgcctgctgtgcctctctggcctcccctccgaagggcaccattccctcgggtgagtactaccggcctgcaccgtcttccagtggggacagcctgagaagagagtctggggccttacttcagtaccttccttcactggcctcaccctgtgcaaatcatgccacacgctgcagcctccttttccctatctataaaataaaaatgaccctgctctatctcactgggctggcaagaacacactgttgttgccttgcagacagatgtgctgaggctgtagaaagtgctttttatttggttgggagcttgtgcataaatgcgagaggggctgcacatctgacggactagaggtgactcatggctgaaccggaacaggacatcggggagaagccagcagattcagaaccccaaagaaaatgacttcattgaaattgaactgaagagacaagaactgagttaccaaaacctactaaacgtgagttgctgtgaactggggattaaaccagaacgagtggagaagatcagaaagctaccaaacacactgctcagaaaggacaaagacattcgaagactgcgggactttcaggaagtggaactcattttaatgaaaaatggaagctccagattgacagaatatgtgccatctctgacagaaaggccctgctatgatagcaaagctgcaaaaatgacttattaaatactcccaggaatggccgcgcatggtggctcaccccctgtaatcccagcactttgggaagccaaggtgggcngatcacctgaggtcaggagttctagaccagcctggccaacatatagtgaaacccagtctctactaaaaaaaatacaaaaattagctaggtgtggtggcgcacacctgtagtagtcccagctacatgggaagctgaggcaggagaatcacctgaacccaggaggcagaggttgcagtgagctgagattgcgccactgcactccagcctggcgacagagcaagactctgtctctcaaaataaataaataaataaataaataaataaataaataatc

SEQ ID NO: 728482 - DNA, 1429 bp, Homo sapiens
  misc_feature (1020)..(1020): n is a, c, g, or t
  misc_feature (1139)..(1139): n is a, c, g, or t
  misc_feature (1148)..(1148): n is a, c, g, or t
  misc_feature (1151)..(1151): n is a, c, g, or t
  misc_feature (1161)..(1161): n is a, c, g, or t
  misc_feature (1182)..(1182): n is a, c, g, or t
  misc_feature (1203)..(1203): n is a, c, g, or t
  misc_feature (1206)..(1206): n is a, c, g, or t
  misc_feature (1223)..(1223): n is a, c, g, or t
  misc_feature (1232)..(1232): n is a, c, g, or t
  misc_feature (1236)..(1236): n is a, c, g, or t
  misc_feature (1265)..(1265): n is a, c, g, or t
  misc_feature (1282)..(1283): n is a, c, g, or t
  misc_feature (1295)..(1295): n is a, c, g, or t
ctcattttgatgtctagaatcaggggatccaggatcatcaccaaggtcattttcccaggtatggaggggtctttctgcttctttcttgtcatgcacagctgctgaggaaggggctgggagtaaagacagtgaaatggggaggaggagtccattcaaaccgagaaacaaagtgtttggtttttcttacccctggtgtagaagctaccaaccttttccaagaaagagggcctggcccccttctcgggtctggctgggtgcctgctgtgcctctctggcctcccctccgaagggcaccattccctcgggtgagtactaccggcctgcaccgtcttccagtggggacagcctgagaagagagtctggggccttacttcagtaccttccttcactggcctcaccctgtgcaaatcatgccacacgctgcagcctccttttccctatctataaaataaaaatgaccctgctctatctcactgggctggcaagaacacactgttgttgccttgcagacagatgtgctgaggctgtagaaagtgctttttatttggttgggagcttgtgcataaatgcgagaggggctgcacatctgacggactagaggtgactcatggctgaaccggaacaggacatcggggagaagccagcagattcagaaccccaaagaaaatgacttcattgaaattgaactgaagagacaagaactgagttaccaaaacctactaaacgtgagttgctgtgaactggggattaaaccagaacgagtggagaagatcagaaagctaccaaacacactgctcagaaaggacaaagacattcgaagactgcgggactttcaggaagtggaactcattttaatgaaaaatggaagctccagattgacagaatatgtgccatctctgacagaaaggccctgctatgatagcaaagctgcaaaaatgacttattaaatactcccaggaatggccgcgcatggtggctcaccccctgtaatcccagcactttgggaagccaaggtgggcngatcacctgaggtcaggagttctagaccagcctggccaacatatagtgaaacccagtctctactaaaaaaaatacaaaaattagctaggtgtggtggcgcacacctgtagtagtccccngcctcccangtngctgggactncagtgcccaccaccacacccngctaatttttttttttttttngtngagacagggtttcactntgttggccnggcnggtcttgaactcctgacctcatgatccgnctgccttggcctcccanngtgctgggattncaagtgtgagccaccgcgcccggccaattccactgattctaaaatggccttaagtgaaattaatcacgtaccaaaatgccatcctaagaagtcccagaactatttaggttaaaataaaatatgaaatgacctag

SEQ ID NO: 728483 - DNA, 2327 bp, Homo sapiens
  misc_feature (2053)..(2053): n is a, c, g, or t
ctcattttgatgtctagaatcaggggatccaggatcatcaccaaggtcattttcccagacagatgtgctgaggctgtagaaagtgctttttatttggttgggagcttgtgcataaatgcgagaggggctgcacatctgacggactagaggtgactcatggctgaaccggaacaggacatcggggagaagccagcagccatgctgaactctccacagggccctgtgaaaagctcttcacctcctctgccctctggatctagtgaagcctattcatccttcagatgtcagctcaaataatcaaccttcatggaggcctcccttgacccctaacatgctttcaaagtactgtgtatttcacattcatcatgccccgacaactgtgatttcccatttattaatatctgtctcttctgctggcctgcaaactccaggagcacagagacatctttgggatttttgaacatgatttccccagggcttagcccagtgcctggtgcaaagcaggctttcaacatgttcagtggatattgtaagaaagaaagaaatacacaaaaggcctggcatatgcaaagcactctaaatattcactcctttcccttccctctgggtgagaaaatttctccttataaagacaccctcctaactgtatctctgctagagaactgaagacataaagcactctgtgccaaaaatatttaagtaaaaacttgagctaagcacagagattataaatatttcttccccagattacgcaccatttaaaaatactgtctcagctccttttcatgatttgggtggtgattaaagaaaattactcttcaagactgaaagtcattactgcccttttcctgacttgccttttcccttgagaaggggaggataagctgcagggcaggaagtggaagtggggcatccttgtcctttgtctggcagacagccaactggtcaggtactgctccttctcaactctttcctgattcccaggtgaatataaacaagaaggcacaaatccacacttgccaacaacggacccaagtgataacaagaaacccagtgacacctgtctaggtgaagactcagcccctatgtgaccaggttgcaaagccaaactgaccatctgctttccatttggacttttagttcatactgtatcttctcaggacagttaagttggaatacaatgccactgtcctgaaagatggtagaattatcctatttctggaggagtgggggtggtgggtaggaatctcaagagcgatttgctcctctgcacaatagcttctttaaggacaccagggcccccagggctatacatttccctgaagctttccagataagcaacaaggtatgagcacctgctatgtattgcccaagggtgatgtgtttaaatatccattgcatattttaaatccttggctggcttaaagctgcaagctttctgtcttcagtggatataatgggggcatacatcccagagcttgcccaacactccaagaaaagaaccctcagctaatgcaaagtgtgtatgtgcccatgaaagctccatgtctacttaacattcagtttttaggattatttatgctgtaataatagatatgaaaatctctgacaggtattttgtttcctttacaaactgtatttgaatttatgggtgatttagagcttgtgtttaaagtcagaattcagaaccccaaagaaaatgacttcattgaaattgaactgaagagacaagaactgagttaccaaaacctactaaacgtgagttgctgtgaactggggattaaaccagaacgagtggagaagatcagaaagctaccaaacacactgctcagaaaggacaaagacattcgaagactgcgggactttcaggaagtggaactcattttaatgaaaaatggaagctccagattgacagaatatgtgccatctctgacagaaaggccctgctatgatagcaaagctgcaaaaatgacttattaaatactcccaggaatggccgcgcatggtggctcaccccctgtaatcccagcactttgggaagccaaggtgggcngatcacctgaggtcaggagttctagaccagcctggccaacatatagtgaaacccagtctctactaaaaaaaatacaaaaattagctaggtgtggtggcgcacacctgtagtagtcccagctacatgggaagctgaggcaggagaatcacctgaacccaggaggcagaggttgcagtgagctgagattgcgccactgcactccagcctggcgacagagcaagactctgtctctcaaaataaataaataaataaataaataaataaataaataatc

SEQ ID NO: 728484 - DNA, 2462 bp, Homo sapiens
  misc_feature (2053)..(2053): n is a, c, g, or t
  misc_feature (2172)..(2172): n is a, c, g, or t
  misc_feature (2181)..(2181): n is a, c, g, or t
  misc_feature (2184)..(2184): n is a, c, g, or t
  misc_feature (2194)..(2194): n is a, c, g, or t
  misc_feature (2215)..(2215): n is a, c, g, or t
  misc_feature (2236)..(2236): n is a, c, g, or t
  misc_feature (2239)..(2239): n is a, c, g, or t
  misc_feature (2256)..(2256): n is a, c, g, or t
  misc_feature (2265)..(2265): n is a, c, g, or t
  misc_feature (2269)..(2269): n is a, c, g, or t
  misc_feature (2298)..(2298): n is a, c, g, or t
  misc_feature (2315)..(2316): n is a, c, g, or t
  misc_feature (2328)..(2328): n is a, c, g, or t
ctcattttgatgtctagaatcaggggatccaggatcatcaccaaggtcattttcccagacagatgtgctgaggctgtagaaagtgctttttatttggttgggagcttgtgcataaatgcgagaggggctgcacatctgacggactagaggtgactcatggctgaaccggaacaggacatcggggagaagccagcagccatgctgaactctccacagggccctgtgaaaagctcttcacctcctctgccctctggatctagtgaagcctattcatccttcagatgtcagctcaaataatcaaccttcatggaggcctcccttgacccctaacatgctttcaaagtactgtgtatttcacattcatcatgccccgacaactgtgatttcccatttattaatatctgtctcttctgctggcctgcaaactccaggagcacagagacatctttgggatttttgaacatgatttccccagggcttagcccagtgcctggtgcaaagcaggctttcaacatgttcagtggatattgtaagaaagaaagaaatacacaaaaggcctggcatatgcaaagcactctaaatattcactcctttcccttccctctgggtgagaaaatttctccttataaagacaccctcctaactgtatctctgctagagaactgaagacataaagcactctgtgccaaaaatatttaagtaaaaacttgagctaagcacagagattataaatatttcttccccagattacgcaccatttaaaaatactgtctcagctccttttcatgatttgggtggtgattaaagaaaattactcttcaagactgaaagtcattactgcccttttcctgacttgccttttcccttgagaaggggaggataagctgcagggcaggaagtggaagtggggcatccttgtcctttgtctggcagacagccaactggtcaggtactgctccttctcaactctttcctgattcccaggtgaatataaacaagaaggcacaaatccacacttgccaacaacggacccaagtgataacaagaaacccagtgacacctgtctaggtgaagactcagcccctatgtgaccaggttgcaaagccaaactgaccatctgctttccatttggacttttagttcatactgtatcttctcaggacagttaagttggaatacaatgccactgtcctgaaagatggtagaattatcctatttctggaggagtgggggtggtgggtaggaatctcaagagcgatttgctcctctgcacaatagcttctttaaggacaccagggcccccagggctatacatttccctgaagctttccagataagcaacaaggtatgagcacctgctatgtattgcccaagggtgatgtgtttaaatatccattgcatattttaaatccttggctggcttaaagctgcaagctttctgtcttcagtggatataatgggggcatacatcccagagcttgcccaacactccaagaaaagaaccctcagctaatgcaaagtgtgtatgtgcccatgaaagctccatgtctacttaacattcagtttttaggattatttatgctgtaataatagatatgaaaatctctgacaggtattttgtttcctttacaaactgtatttgaatttatgggtgatttagagcttgtgtttaaagtcagaattcagaaccccaaagaaaatgacttcattgaaattgaactgaagagacaagaactgagttaccaaaacctactaaacgtgagttgctgtgaactggggattaaaccagaacgagtggagaagatcagaaagctaccaaacacactgctcagaaaggacaaagacattcgaagactgcgggactttcaggaagtggaactcattttaatgaaaaatggaagctccagattgacagaatatgtgccatctctgacagaaaggccctgctatgatagcaaagctgcaaaaatgacttattaaatactcccaggaatggccgcgcatggtggctcaccccctgtaatcccagcactttgggaagccaaggtgggcngatcacctgaggtcaggagttctagaccagcctggccaacatatagtgaaacccagtctctactaaaaaaaatacaaaaattagctaggtgtggtggcgcacacctgtagtagtccccngcctcccangtngctgggactncagtgcccaccaccacacccngctaatttttttttttttttngtngagacagggtttcactntgttggccnggcnggtcttgaactcctgacctcatgatccgnctgccttggcctcccanngtgctgggattncaagtgtgagccaccgcgcccggccaattccactgattctaaaatggccttaagtgaaattaatcacgtaccaaaatgccatcctaagaagtcccagaactatttaggttaaaataaaatatgaaatgacctag

SEQ ID NO: 728485 - DNA, 843 bp, Homo sapiens
  misc_feature (569)..(569): n is a, c, g, or t
ctcattttgatgtctagaatcaggggatccaggatcatcaccaaggtcattttcccagacagatgtgctgaggctgtagaaagtgctttttatttggttgggagcttgtgcataaatgcgagaggggctgcacatctgacggactagaggtgactcatggctgaaccggaacaggacatcggggagaagccagcagattcagaaccccaaagaaaatgacttcattgaaattgaactgaagagacaagaactgagttaccaaaacctactaaacgtgagttgctgtgaactggggattaaaccagaacgagtggagaagatcagaaagctaccaaacacactgctcagaaaggacaaagacattcgaagactgcgggactttcaggaagtggaactcattttaatgaaaaatggaagctccagattgacagaatatgtgccatctctgacagaaaggccctgctatgatagcaaagctgcaaaaatgacttattaaatactcccaggaatggccgcgcatggtggctcaccccctgtaatcccagcactttgggaagccaaggtgggcngatcacctgaggtcaggagttctagaccagcctggccaacatatagtgaaacccagtctctactaaaaaaaatacaaaaattagctaggtgtggtggcgcacacctgtagtagtcccagctacatgggaagctgaggcaggagaatcacctgaacccaggaggcagaggttgcagtgagctgagattgcgccactgcactccagcctggcgacagagcaagactctgtctctcaaaataaataaataaataaataaataaataaataaataatc

SEQ ID NO: 728486 - DNA, 887 bp, Homo sapiens; identical to SEQ ID NO: 236594
  misc_feature (613)..(613): n is a, c, g, or t

SEQ ID NO: 728487 - DNA, 1022 bp, Homo sapiens
  misc_feature (613)..(613): n is a, c, g, or t
  misc_feature (732)..(732): n is a, c, g, or t
  misc_feature (741)..(741): n is a, c, g, or t
  misc_feature (744)..(744): n is a, c, g, or t
  misc_feature (754)..(754): n is a, c, g, or t
  misc_feature (775)..(775): n is a, c, g, or t
  misc_feature (796)..(796): n is a, c, g, or t
  misc_feature (799)..(799): n is a, c, g, or t
  misc_feature (816)..(816): n is a, c, g, or t
  misc_feature (825)..(825): n is a, c, g, or t
  misc_feature (829)..(829): n is a, c, g, or t
  misc_feature (858)..(858): n is a, c, g, or t
  misc_feature (875)..(876): n is a, c, g, or t
  misc_feature (888)..(888): n is a, c, g, or t
acgcctatttacggtgttctgaatgaaacaggacactaattactattggaaccatttttctctgttttgaacagttggataagggaagtcttgacgtgctgcctatgtgtccgctgcccttcatcaaagttgagctactgagaaattggagttgaaggaacagtggctaatggcatgtgctgggatgcaagtaagacattatgcttgggcataaggagttctggtattttatgtatacctattcagaaccccaaagaaaatgacttcattgaaattgaactgaagagacaagaactgagttaccaaaacctactaaacgtgagttgctgtgaactggggattaaaccagaacgagtggagaagatcagaaagctaccaaacacactgctcagaaaggacaaagacattcgaagactgcgggactttcaggaagtggaactcattttaatgaaaaatggaagctccagattgacagaatatgtgccatctctgacagaaaggccctgctatgatagcaaagctgcaaaaatgacttattaaatactcccaggaatggccgcgcatggtggctcaccccctgtaatcccagcactttgggaagccaaggtgggcngatcacctgaggtcaggagttctagaccagcctggccaacatatagtgaaacccagtctctactaaaaaaaatacaaaaattagctaggtgtggtggcgcacacctgtagtagtccccngcctcccangtngctgggactncagtgcccaccaccacacccngctaatttttttttttttttngtngagacagggtttcactntgttggccnggcnggtcttgaactcctgacctcatgatccgnctgccttggcctcccanngtgctgggattncaagtgtgagccaccgcgcccggccaattccactgattctaaaatggccttaagtgaaattaatcacgtaccaaaatgccatcctaagaagtcccagaactatttaggttaaaataaaatatgaaatgacctag

SEQ ID NO: 728488 - DNA, 2002 bp, Homo sapiens
ctttgtttttctcatgtatcaatacctataggtaagtctattgattgtactgttgcagagccttgttttctgcaaaacgttggcaatgtgttatttgaaaccagatgttttcttaagaaataaacctgctaaacttgtttcctgtggaaactggaaatttgttttattttatagtttaaaatgccataaatgcaagatcttccattggttgaatcaatatagccttctaaatgtgatttctggttctaaatgtgtgcctgttctaaatgcttctaaatgctgacacctgaaaacctttttgcatatattcacatacgactatgactatttctgcagtaattattattgagacttactataataatgataaggctgtatataaattataccttactaaaaatttaaaatctaggaatttactgagagagcataaagtatggttgtaatagagaaaacaaatgattgaaatggcttaaatgcaagcctttaatattaattttgagtattttaacgcaaataaaaccaattatgacagtgtgctcaaattggtaaacaaccaatctgtgactttatgaaaatatatttatgacagtcatacttgccttactcttaagtgtagtatttgtccttaagttgggagcaccataaattaattttaaagcaaaacatatgaccctcatccaatgttttaaatgaattgcttcctactaggaaaacaaaacatctcaggacatcaaatacttctagtaatcaagatgttttgtttaaatttgctaatgtaagcttcaactctatttggttgcactttaaaaaagcatactagaaaatggggaatatttgaaacatgcatttttaaaagctaggtgttatcttactcagaagatgttaaaagcttctttatacattttatttgaaagtaatttccaaaaaagggatgcttggtgggtatatgaaaaggtgttcagtatcactaatcatcagggaaatacatatcaaaaccataatggaatattacctcacagctgttaggatggcttttatcaaaaagacaaaaaataacaagtattagtgagactgtggaagagaaggaaccctcacacaccactgataggaatgtatatcagtataggcattattaaaaacactatggagattcttcaaaaatgtaaaactaagaatactatataatcaaacaatcccacttctgggtatatatccaaaggaaatgagaaccatgtataaaagagatatgtactctcccatatccattgcagatttactcacaacagtgaagatactgaaacaatataaatgttcattgatggaaaagaatacagctggaggcatcatgctacctgacttcaaactacactacaaggctacagtaaccaaaacagcatggtactggtaccaaaacagacatatcgaccaatggagcagaacagagacctcagaaataaaacaacatgtctacaaccatttgatctttgacaaacctgacaaaaacaagaaatggggaaaggatctcctattcagtaaatggtgctgggaaaactggctagccatatgcagaaaactgaaactggaccccttccttacaccttatatgaaaattaactcaagatggattaaagacttaaatgtaaaactgaaaaccataaaaatcctggaagaaaacctaggcaataccattcaggacatagggatgggcaaagacttcatgatgaaaacaccaaaagcaattgcaacaaaagccaaaattgacaagtgggatttaattaaattaaagagcttcttcacagcaaaagaaataatcatcagagtgaacaggcaacctacagagtggaagaaaatttttgcaatctacccatctgacaaaggtctaatatccagaatttaaaaggaacttaaacatatttacaagaaaaaaaaaaacaaccttatcaaaacataggcaaaggatatgaatggacacttctctaaagaagacatttacatggcc

SEQ ID NO: 728489 - DNA, 4678 bp, Homo sapiens
  misc_feature (1406)..(1406): n is a, c, g, or t
  misc_feature (2415)..(2415): n is a, c, g, or t
  misc_feature (2488)..(2488): n is a, c, g, or t
  misc_feature (3003)..(3003): n is a, c, g, or t
  misc_feature (3056)..(3056): n is a, c, g, or t
gactcagtgcatcaaaggctggagaaagaatcaccctagaactgagtgccacaggcttcggaagctgcacaagactgcaacacggtgacagcttctatttctaacagcaaacctaaaaagctcaggaaccaaaataaaacggatagaaatgaaaccactcagagtatgacgacagtactcaaagcaactcacgagcatttccccacgctgtcttccaaaatgtgaaaaatgtgatttttttttaatggccacattggagaactgctatgagcagacctcatttatataacccttcccagcacctcatgtatcatcattattaaaaaacactatggggatcatgctttcacataactttgtcttatttgttatctacatagcctaagcaaatagtaaatgatggagaatgaaaataattgtcaatgtttagggggaaaaaaatacctgcatttcaaattttttaaaaaaaccataaaatctatcttttaaaaaaggaaggagtaagctggaatccacaattgttagaaacccaaaagtgatacagaggggaggcaaaaaaaaaaaaaaatactatattctccacactgaaacaatgtatctttctcaacagcccagtttcatctgtagctgtattttccccactgaaatgccaccattaatcataacaacagatgagtaaaaatcaattaatattccttcagcatctcttaggtgtcttcaatcctgtgcgctgtcatccctttaaagaggaaggaaaagatccacagccaggaaacagactcagaaactcaaacccaggtctctggaccccacagggaagtgaggcacagccaagagcaatctgtgtccattactggcctcaaatgaccacatggaaacactgtgtgcagagccagccccccaagcccgtggcggtcctccttggagatgatggggtctggggagaggtcagagtcaggctcacgtgaacttcagaaagccactgcccaggatatgggtggaccgcaagtctaccatgggctgtcccagctccaaagacgtcagaaccccacagcgattgttattcccaaagccctttacgcttggctccacagcacacggcagagaaaatcgacagaaggaaggatgttcacaggtgtccacccctacctatgccccagtgacctggaaataaaatccatcaagagcaccggggtcagccagctggggtacgctggagagtatgggtggcagagggaaccccgctgtggattgatcatttgacactgtgttcagcataccttttaaaaaaatgttggtaccatgtaaaaatataacctaaataacaagtacatttttaatgctgagatggagaatttagcacctataatccttccagagatgcacaccacgcaaccacgtgagtnccctctggctctgaattccgagagcagctaccaacacaggcctccgctgcctgcactcagcacacctatcggaaagcgccagtgctggcatgggctttccctccctggcggctgctcctcctgcacccccatgcccaggcactccggccagaaacaagggaggagtctggggactgatcctccccctctcacctcccacatctacccaggtaccacaccctgccatctgtctcctgctgccctctgtcactgcaggagcccctggagagcacatcacccctcactaggctgcagccacagcccctctcagaaaaccctgctgtctgctttccagtgcagccctgtctaatcaccctccatgtatcctccccatggctcttcccccatagcctcaggttggagcacccagctttcgcctgcagaagcccctccatgcccccgacacagcaccccatgaacaactcacctggcaccgctactctctccagcctggtctctcactagccccctcaagcctggggctgtagcctttccaagccattggcagccaaaggacccccttccccagctgctgtgtgtggccctggccatgctccttgtctgtaaggccattctaacacctcgcctcctgccagcccctacgcccagtttattccatgtcaggaggtatggcctccatcccctgatggcccactcctccttacatgcccagccttgcgtcctcaccactcccccacagctcagacaggcctgccctgcccctgggcttgggcatccccacggtttccctgccagtgggcatccccacagttccttcgcctccagaggcccagcacccagttctgcctcggccccaggcacatggaccttcccttgggtcttagtgtctctttctcagacttgccttttcttggtggtttgatggtcacccacccaacctccttccctgaaagtctggtgcaggaaggggtaaaaacacatatacaaaggtcaccagcaagccagccancaccagctctggagaaaacacggacagaaagacgtatgcccaccattcactcattcgcaagccgggagaactnacttacttccttgcctgcttgagaaacagccgccgcaccagagactgggtttcatagtgtctgaattctcaaggaatgtggatggaggacagtgaatctctaactggctgctgcacttctcacacttacagcttgctcattcgcactttaaagtcaaacctcgagtcccctcatgccagcagtcaccttctccccgatcttttacagtaactggggaaaggcagcccagagaacaggccagggcagaggtcaggctgcaaaacatgcttccctaaggacgtccaggctggagggggcccggcagcaggtgggtctttctttcagggtcttcctccaccaaattcaggactattccagaaagaggcagtgagtccctggatggggaaaccgctcctcctgagccttccccacagattggatcggagtggaaggtgcccccaggtgacagcacctagcaaggctgatgcaggccttctgcctggcccacaggagagccccagccccactccccagancacagacgaccaaggctcctgtgtacgggggaagtatcatagtgccgtgcttngcacttggtcattttagcaactaggtgttttagaaggaagcacaaggacctaggaactgggttgagctctgtcaggccttgcctctcagttaggatctgttgggtagatgggctcattgccactaaccagactcgtcttccagggagccttcctgatttaccaggctgcgtgagggccctcctctgtgcctgtctggtgtccctgcctaccttggccactgtctgcagacatcacagagagttgaaggggcctggcttgggcctgtgtgagcccccagcacctggggcctatccatagcaagtgtcggggaaactgctgcatgttactgcgtcccatctgcacggcctggctatgaggggccctcagctcagcactcagtgagaccaactcaacactgaaatggtggagtcagggtggcccgtgcgtccagcattcccattaccatactacagagcacggggctgaggaaacaggcacttgccaccatcaccatcatgacaagtagcctctcaagacaggaggtagagagcatctggtcccacgacccttactacactcttcccttgtcctgcagcccaactccctgctctaaacacaaagtaggacatcctcttcttctgagctacctgggtcctggctcccctgcaacttcctttcctgcctgagcagccctgagcagacagtgctgtgtctttcatgatcatcatcacgtggcccaacagaccaggtctgcagacaagtccactgccaagcaagtctcggagcacagttctgggccccagagtcagcccagtccagcccagccccatcagggcctctggacagcctgagagcaaggcctcgtgctgtccctctccgaggaaggatttgcctcaggcctggttctgagaagtaaacagggtaatgttctgaagcagtggacttcaaaccaaacccccacaaaataaatgtttaaaactacatatctatttgcacatttttaagttgatatgaaaaatttctcatcataagtctaaatacttgtagaggatgtaatttccaacatactgtaaatattaacatttaaaaataaaactgttaatgtttctcttttaaatggatccaatggtatctaaataccacggcgattagagattcgccatcatccatttttaaattacataatcaagctcttctttaaccattggaaatttaacagtgttccttttttcctccacaaactctgatctccctcagagatgtttatactatcacagtgtattttatgcttgaaagccttatactgattatcctattatatactatagggccaaaaaatacaaaaatcaatgttttaattttttttaatttcctgtgatttcctgtgatcataaagctctgtcagaagttttctcctggactgaattattataacaattactataagtatacaattgatcaataagacagaaatatattgcaaaattgtataagaaataacctttaaaaataaacttaattaggccaggcgcagtggttcacgcctgtaatcccagcactttgggaggccgaggtgggcagatcacctgaggtcagcagttcaagaccagcctggtcaactggtgaaaccccatctctactt

SEQ ID NO: 728490 - DNA, 1321 bp, Homo sapiens
gactcagtgcatcaaaggctggagaaagaatcaccctagaactgagtgccacaggcttcggaagctgcacaagactgcaacacggtgacagcttctatttctaacagcaaacctaaaaagctcaggaaccaaaataaaacggatagaaatgaaaccactcagagtatgacgacagtactcaaagcaactcacgagcatttccccacgctgtcttccaaaatgtgaaaaatgtgatttttttttaatggccacattggagaactgctatgagcagacctcatttatataacccttcccagcacctcatgtatcatcattattaaaaaacactatggggatcatgctttcacataactttgtcttatttgttatctacatagcctaagcaaatagtaaatgatggagaatgaaaataattgtcaatgtttagggggaaaaaaatacctgcatttcaaattttttaaaaaaaccataaaatctatcttttaaaaaaggaaggagtaagctggaatccacaattgttagaaacccaaaagtgatacagaggggaggcaaaaaaaaaaaaaaatactatattctccacactgaaacaatgtatctttctcaacagcccagtttcatctgtagctgtattttccccactgaaatgccaccattaatcataacaacagatgagtaaaaatcaattaatattccttcagcatctcttaggtgtcttcaatcctgtgcgctgtcatccctttaaagaggaaggaaaagatccacagccaggaaacagactcagaaactcaaacccaggtctctggaccccacagggaagtgaggcacagccaagagcaatctgtgtccattactggcctcaaatgaccacatggaaacactgtgtgcagagccagccccccaagcccgtggcggtcctccttggagatgatggggtctggggagaggtcagagtcaggctcacgtgaacttcagaaagccactgcccaggatatgggtggaccgcaagtctaccatgggctgtcccagctccaaagacgtcagaaccccacagcgattgttattcccaaagccctttacgcttggctccacagcacacggcagagaaaatcgacagaaggaaggatgttcacaggtgtccacccctacctatgccccagtgacctggaaataaaatccatcaagagcaccggggtcagccagctggggtacgctggagagtatgggtggcagagggaaccccgctgtggattgatcatttgacactgtgttcagcatacctttcggacgcgtgggtccagccgggaatccggcccatgcg

SEQ ID NO: 728491 - DNA, 2798 bp, Homo sapiens
  misc_feature (535)..(535): n is a, c, g, or t
  misc_feature (608)..(608): n is a, c, g, or t
  misc_feature (1123)..(1123): n is a, c, g, or t
  misc_feature (1176)..(1176): n is a, c, g, or t
tctgacgctctcacccaccccacccaagatcagacacagccaggaaaggacccaagagaaaatccttcaaggtggcctgaggtcccatccctccctcagacccatgtggtcccaggccaggctgcctgggacacagtaaataccactgtgtgcaaaaatcgaagtacaaaaccacaagactaaacaaaacaaacccagagagcggccgctctccacccactcctccttacatgcccagccttgcgtcctcaccactcccccacagctcagacaggcctgccctgcccctgggcttgggcatccccacggtttccctgccagtgggcatccccacagttccttcgcctccagaggcccagcacccagttctgcctcggccccaggcacatggaccttcccttgggtcttagtgtctctttctcagacttgccttttcttggtggtttgatggtcacccacccaacctccttccctgaaagtctggtgcaggaaggggtaaaaacacatatacaaaggtcaccagcaagccagccancaccagctctggagaaaacacggacagaaagacgtatgcccaccattcactcattcgcaagccgggagaactnacttacttccttgcctgcttgagaaacagccgccgcaccagagactgggtttcatagtgtctgaattctcaaggaatgtggatggaggacagtgaatctctaactggctgctgcacttctcacacttacagcttgctcattcgcactttaaagtcaaacctcgagtcccctcatgccagcagtcaccttctccccgatcttttacagtaactggggaaaggcagcccagagaacaggccagggcagaggtcaggctgcaaaacatgcttccctaaggacgtccaggctggagggggcccggcagcaggtgggtctttctttcagggtcttcctccaccaaattcaggactattccagaaagaggcagtgagtccctggatggggaaaccgctcctcctgagccttccccacagattggatcggagtggaaggtgcccccaggtgacagcacctagcaaggctgatgcaggccttctgcctggcccacaggagagccccagccccactccccagancacagacgaccaaggctcctgtgtacgggggaagtatcatagtgccgtgcttngcacttggtcattttagcaactaggtgttttagaaggaagcacaaggacctaggaactgggttgagctctgtcaggccttgcctctcagttaggatctgttgggtagatgggctcattgccactaaccagactcgtcttccagggagccttcctgatttaccaggctgcgtgagggccctcctctgtgcctgtctggtgtccctgcctaccttggccactgtctgcagacatcacagagagttgaaggggcctggcttgggcctgtgtgagcccccagcacctggggcctatccatagcaagtgtcggggaaactgctgcatgttactgcgtcccatctgcacggcctggctatgaggggccctcagctcagcactcagtgagaccaactcaacactgaaatggtggagtcagggtggcccgtgcgtccagcattcccattaccatactacagagcacggggctgaggaaacaggcacttgccaccatcaccatcatgacaagtagcctctcaagacaggaggtagagagcatctggtcccacgacccttactacactcttcccttgtcctgcagcccaactccctgctctaaacacaaagtaggacatcctcttcttctgagctacctgggtcctggctcccctgcaacttcctttcctgcctgagcagccctgagcagacagtgctgtgtctttcatgatcatcatcacgtggcccaacagaccaggtctgcagacaagtccactgccaagcaagtctcggagcacagttctgggccccagagtcagcccagtccagcccagccccatcagggcctctggacagcctgagagcaaggcctcgtgctgtccctctccgaggaaggatttgcctcaggcctggttctgagaagtaaacagggtaatgttctgaagcagtggacttcaaaccaaacccccacaaaataaatgtttaaaactacatatctatttgcacatttttaagttgatatgaaaaatttctcatcataagtctaaatacttgtagaggatgtaatttccaacatactgtaaatattaacatttaaaaataaaactgttaatgtttctcttttaaatggatccaatggtatctaaataccacggcgattagagattcgccatcatccatttttaaattacataatcaagctcttctttaaccattggaaatttaacagtgttccttttttcctccacaaactctgatctccctcagagatgtttatactatcacagtgtattttatgcttgaaagccttatactgattatcctattatatactatagggccaaaaaatacaaaaatcaatgttttaattttttttaatttcctgtgatttcctgtgatcataaagctctgtcagaagttttctcctggactgaattattataacaattactataagtatacaattgatcaataagacagaaatatattgcaaaattgtataagaaataacctttaaaaataaacttaattaggccaggcgcagtggttcacgcctgtaatcccagcactttgggaggccgaggtgggcagatcacctgaggtcagcagttcaagaccagcctggtcaactggtgaaaccccatctctactt

SEQ ID NO: 728492 - DNA, 786 bp, Homo sapiens
cttgttttgtaatgttttgaatctcttgagatgtatttaccccactagatacatatttgccactggttagttctccatctaagctcaagaggttattcatctctctttagattccagtggtttttcttttaacttccaggtaaaatagaaactgctatggtatacaaccaaattttggggttaaacataatcagaaaagaaaatccagttaaatttatgaagtgagattttcagatcctagatcttgaatatagcaaaggtcttttcatcttgatggccccaaagcttgttggtcatagtctatttctggccattatcttcttaaataatctatttttaagccctcatttatttttggttttggatgaggaaagtcatgttttctaagtcctctcccctaataaaacctacccaacaatagtgctttgaaaagtggtagttatcttgaagatactcttgccaaatgcaaagataaacattctttttgtctgctttataaatatgaaatatgccagatctatagtattttaatgtgcatctactttaaatgagtcatcttggggtttttataattcccttacattcttgcccctctacacttgaaataacaaaatgccttaattttatagattagttctcttatagtagacaggcagctatatgcagcaaaaccaataaagttatttttcaactttcatagttgtaaaatattttatagcaatacaaaacagctaagaaaacatgccacattttattttagcattttcaaataatttgtttttggtg

SEQ ID NO: 728493 - DNA, 493 bp, Homo sapiens
ctcccctaataaaacctacccaacaatagtgctttgaaaacatgacttccctcatttatttttggttttggatgaggaaagtcatgttttctaagtcctctcccctaataaaacctacccaacaatagtgctttgaaaagtggtagttatcttgaagatactcttgccaaatgcaaagataaacattctttttgtctgctttataaatatgaaatatgccagatctatagtattttaatgtgcatctactttaaatgagtcatcttggggtttttataattcccttacattcttgcccctctacacttgaaataacaaaatgccttaattttatagattagttctcttatagtagacaggcagctatatgcagcaaaaccaataaagttatttttcaactttcatagttgtaaaatattttatagcaatacaaaacagctaagaaaacatgccacattttattttagcattttcaaataatttgtttttggtg

SEQ ID NO: 728494 - DNA, 1151 bp, Homo sapiens
tgcgcagggctgaatggtcgctgagacagagatggaagccaggacaagggagcccaccgggcccagatagagacttcagaacccactcctgagaacagcggagccaggcgcttagaggaagaccaaatgctgccaggacacggattgtccaggattacattccagcatcttattagatggcctgattagccagaggtttccaggccgtctgtccgcctccaggagatggactgggacctttagacatcggtggagaacaggatgctctgtcccttgctgtccagggcagggatggcctccagccgcaagaagtacagcagcacctcgacctgccctcgcggagtggggaagaggagagtggctcagagcggggctcacagctgctggtggggaggtctttggggcccaagctcccaagtccacctcaggtgctagaaacccctgctggtgtcatgaaccccttacagtgggacgggggtggggtggggtcctgacaaggcatgacttgttgggtgaggggtggttatttattttagagatgcacagggccttgctctgtcccccaggctggagtacagtggctccatcatggatcactgcagcctctaactcctgggctcaagcaatcctcctgtgtcagcctcccagatacctaggattacagatgtgtgccccaatgcctgcctaatttttctttgtattttttctggagatggggtttgctacattgcccagactggtctcaaacacctgggttcagttgtcctgcctcggcctcccaaagtgctgggattacaggcatgagccaccacactcgaacacttggggtggttttaagcccccagcaaggtgcaccagcaggaccaggaggtggcctgggcaccccctatcactcccatccatgcaaacctaggcaagtccctgtctctgaatctcagccaccaccacatacaatgcaagtgggaagatgggcaggactgggggtggggcaggcagaggccacctctgtcaggctggggttgcatgggctggaggctgtcttcccatacctgggacatgacctccaaggaccagctgtcagtcatggtgatgggctggctggggttggcagggagcttgctctccttctcggagggccggagcagcgtggg

SEQ ID NO: 728495 - DNA, 803 bp, Homo sapiens
atcgccagggtatctatggccgggctcaggcggctgctggggagccaggagaccgcgcgggacggcggatgaggcgcggcggctgcggcccagggcacctcccctctggcttcccgaacccggccaggtccgacccgagggggaggatggaaacacctgccgcgctctgagccccccagaagagaacacccttcccgccatatcaccccacggtcctgcggaggccaccgcctggtccccccaagtctccatcgcgcagcgtggggccgagaggaatagtgagcgatggcggaaaacctgaaaagactggtctcaaacgaaactttacgaacgttgcaggaaaagctagacttctggctgaaggagtacaacacaaacacgtgtgatcaaaatctaaaccattgccttgaactcattgagcaagttgccaaggtgcagggacaactctttgggatcctcacagcagcagcccaagaaggaggacgtaatgatggtgtggaaacaatcaagtcacgccttttgccttggctggaggcttcctttactgctgcttccctgggaaaatctgttgacagcaaggtcccctctctgcaggacacgtttgatagggagagacataaagatcccagtcctcgggatcgggatatgcaacagttagactctaatttgaactcaacccggagtcaatgcaaccaggttcaagacgatctggttgaaactgaaaagaatcttgaagaaagcaagaacagatcggccatatcccttttggctgcagaggaggaaataaatcagctgaaaaagca

SEQ ID NO: 728496 - DNA, 717 bp, Homo sapiens
agcggagtcgcacagctacctggtaggtgactggaggtgttgatcagtgcttggtgggattttgctgatgtggccccaagcccgcctccctccccaccctgcgatggcagaagaaactcgacaaagtaaattggcagcagccaagagaaagttaaaagaatattggcagagaaacagccctggtgttccagcaggagccaagaggaacaggaaaacaaatggcagcatccatgagacagccacttctggtggttgccactcacctggagattcagcaacaggtatccacggggagagccctacatcatctgctaccctgaaggatctggagagcccgtgccaagaactagcagtagtcccagactcgaggtccgtaaaagtcagtcaactgaagaacaccatcaaatctttgaaacaacagaagaaacaagtggtacatcagctggaagaagtaacatgatttctttgtttgctcgcgacatgactgctcggtttgggggacactcagatgtagaggccccgagtctcgtctcacccactcccagcctggggaagaaggctcaccccccagagtccaccccatcccccacagggtctctgataacccggtcccatgggtgggcctgtcccggggcaggggcagtggtggcattctggggacatgtctcttgcagtaccatctctgcctctgcctggttagatctctgtcttcctctt

SEQ ID NO: 728497 - DNA, 721 bp, Homo sapiens
ggaaacctcagggccaaaggctcctgtctgtccttttccaccctaaatcttctgtgaagaaccgtacttggcccatacgtgctcagtaaatgtttattgaatgaatgcacttttctaaatcacaagctggcagaagggggggcctttctcaaactccatctctagaggtttatattgctgtcctctcaagagattccagattcagaccttcagttctgtggctgtgggcaaaagccaacaaagacccaaatcctctgtccttgggagcttgaggagagtttaccagttcgagttcccactgggtctgagaactttgcctttaaaatccattcctggtccctgcctaccacttcctgctctggggaatagagttgagggggccaccctccatcaccttaatgtgactctccccacagaaacaacagaagaaacaagtggtacatcagctggaagaagtaacatgatttctttgtttgctcgcgacatgactgctcggtttgggggacactcagatgtagaggccccgagtctcgtctcacccactcccagcctggggaagaaggctcaccccccagagtccaccccatcccccacagggtctctgataacccggtcccatgggtgggcctgtcccggggcaggggcagtggtggcattctggggacatgtctcttgcagtaccatctctgcctctgcctggttagatctctgtcttcctctt

SEQ ID NO: 728498 - DNA, 1265 bp, Homo sapiens
acctcagaagctggagaggtggcacaacagagagggccacatggggaccggagccacaggaccggccaaggtccaaggcatggactccaagccctggtactgtgacaaaccgccttccaagtacttcgcgacagagtcacaggcgcctgaggttcccgcctgtggacacccagaactgggtatttgtgacggagggcatggacgacttccgctacgcctgtcagtctcctgaagatacgcttgtttgtcgccgtgacgagtttttactccccaaaatatctctcagaggtccccaagctgaccgcaaaagcaggaagaaaaagctgctcaagaaagcggccctattttccgagctctcgccagtacagccagcacggaaggcgttcgtagaggaagtggaagcccagctgatgaccaagcatcccttggccatgtaccccaatctgggaaaagatatgcctccagatctcctactacaggtgctgaaacagctggatcccgagaggaagctggaggacgcttgggctcgttgtgaggccgggagaagacaaccgaggtacccaccgagtctggtaaatatccctgtggggaatcctgcccgcggcctcccgagactccggtgtcccgtctccgtcctcagcttcccaagactccggtgtccagtcgccgcccagagcctcccaagactcgggtgtccagtctccgcccagagcctcccaagactcgggtgtccagtctccacccggaacctccagagactcgcgcatctcatctccgcgtggatcctcccgagactggagtgtcccatctctgcccagagcctcccaagactctggtgtccagtgtccacccagagcctcctgatactggagcgtcccatctctgcccggagcctcccgagactcgcgtatctcatctccacccggagcctcctgagactggagtgtcccatctccgcccagagccttccaagactcaggtgtccagtctctgcccggacctcccgaggctggagtgtcccatctctgcctggacctcccaacactcatcgggtgtccagtttcctactacaggtgctgaaactggattctgagaagaagctggaagatgcacgggctcgttgtgagggccaggagatgacaaccgaggaactcaccaagcctggtaaataccatttttgggaatcctgtccgcggccttttgagagtcggatgccccatctccgcctggtgcttcccataactcgtcgaatggccagtctctgc

SEQ ID NO: 728499 - DNA, 984 bp, Homo sapiens
ggggaagcaaggcatgtcgtacttggtggcaggagagagtgcagaggaaactgccacttataaaccgtcagatctcatgagaattccctcactatcatgagaacagcatgggggagaccacccctacaatccagtcacctcccaccaagtccctccctccacacatgggaattacaattcagattacaattcaaaatgagatttgggtggggacatagagccaaaccatatcagttagtcagtgaagactgaggtatctgtagaagtgagggaggagcacagtggtctggatgaaccagtggggtgatagtcaggggactggcattcagtgaggctgggggagaagcttcctaaaagcattgcccttgaaaagcagggcatacctatctgatactgaggatgtagaatgcagtttggagatgcttcctagctacctaatcttccaaggcaaaccatgcactcttcatcctgatatttgtgatgcctccctgggctacatgacagagggtgcactgcaaaggatgtgaaggaaagtcaccacagggcaaaggtggaaacccaggggcctttccccagtgagactttctggctgttcctttggaacttccacctgctagttgcagatgtttgccactggatggggccccatgctacgtgggaactgttcaggactgtgggtacttagttccagcagagctggctccaccagggcaccaggactgcaggcttctcaactcctggcctggagaggcagcttcagcaaccagtgcctgggaatccactagccctttctctgtgagtcacgtgagggcagaatctgctcaaagtcagagggctggagcaacctggattgtgccagagtgagggcccagctcactggaggtcagagtaagagagtcaaggatgggaagaaacagggttttgctcagtcttgcagatactgaggcactcaggaggctcaggatggcagcaacagggcatgtg

SEQ ID NO: 728500 - DNA, 847 bp, Homo sapiens
gaagaggccaagctgaaaaaggtagccagaatgggatttaatgcatcttccatgctccgaaaaagccagctaggtttcctcaacgtcaccagttactcccgtttagccaacgagctgcgtgtgagctgcatggagcggaaaaaggtccaaattcggagcttggatccctcctctttggcgagcgaccgatttaacttcattctggcgagtaccaacagcgaccagctcttcgtagtgaaccaggtcgaagtcgaaggctccaagtacggcatcatcagtctgcgaactctgaagatcccttcgttccacgtgtacgtgctcagaaacctctacgtccccaaccggaaggtgaagtccctgtgctgggcctcgctgaaccagttggactctcacgttctgctgtgcttcgagggaatcacagatgctccaagctgtgcagtgctgctcccagcgtcgcggttcttaagtgttcacacaagagttaaccagcctggcatgctctgcagtttccagatcccagaggcctggtcctgtgcgtggtccctcaacacccgggcatatcactgctttagtgcaggcttgtctcagcaggtcctgttgaccagcgtggcgacgggacaccagcagtcatttgataccagcagtgatgtcttggcccagcagtttgctagtacggctcctttgctgtttaatggctgtcgctccggggagatctttgccattgatctgcgttgtagaaatcgaggcaaggggtggagggccactcgcctgttccatgactcagcagtgacctctgtgcaaatcctccaagaagagcaatgcctgatggcatcagacatgactggaa

SEQ ID NO: 728501 - DNA, 613 bp, Homo sapiens
tttatgaaccaatcaagagtcaaagtcctttgttttaaaaaagttctattgacatggaattcaatattagcttaaagccagatactgtctaattgcttactacatcactttttgaggaacattaatgcaagtatttctagtcctaattttgcaatatcccaaagtatcaatgatatcaagtagggctcaagaatctacaaacatacttttaaagtttttaattaaaaaatgtattctggatatgacaccaaaagctcatatcccaaaaatcattgcaaagactaatgtcaagaaactttctccctatgttttcttctaggcattttacggttttgggtactgcatttgggtctttaagccattttggattaagttttgtacatagtgtgaggtaacggttcagtttcactcttttgcacatggatatgcagtttctccaataccatttatcgaaaagactatcctttccacatttctattcttggaacctgatcaaatgtgattttttttctaaaaaaaaatttgctttctaatttgtcacattgttctatgtgtctgaaaaaaaaaaatgtattctggccagcatgtcataaatacgagagtaataaatgat

SEQ ID NO: 728502 - DNA, 2161 bp, Homo sapiens
agaagaaagagacagcgatggcggcagaggcttcgaagactgggccttctaggtcttcctaccagcgaatggggaggaagagtcagccctggggtgccgctgaaatccagtgcaccaggtgtggaaggagggtatccagatcatccggtcaccattgtgaacttcaatgtggacatgctttttgtgaactatgcttgttaatgactgaagaatgcaccacaattatatgccctgattgtgaggttgctacagctgtaaatactagacaacgctactacccaatggctggatatattaaggaagactccataatggaaaaactgcagcctaagacgataaagaattgttctcaggactttaagaagactgctgatcagctaactactggtttagaacgttcagcctccacagacaagactcttttgaactcatcagctgtaatgttggacactaatactgcagaagaaattgatgaagcattgaatacagcacaccatagtttcgaacagttaagcattgctggaaaagcacttgaacacatgcagaagcaaacgatagaggaaagagaaagagttatagaagttgtggagaaacagtttgaccaacttttggctttttttgattccaggaaaaagaacctgtgtgaagaatttgcaagaactactgatgattatctatcaaatttaataaaggctaaaagctacattgaagagaaaaaaaataatttgaatgcagctatgaacatagcaagagcattacaattatcgccttctctaagaacatactgtgacctgaatcagattatccggactttgcagttaacttcagatagtgaattagcacaagttagttctccacaactaaggaaccctcccaggttgagtgtgaattgcagtgagatcatctgtatgttcaacaatatgggaaagattgaatttagggactcaacaaaatgttatccccaagaaaatgaaattagacagaatgttcaaaagaaatataataacaaaaaggaactttcttgttacgatacatacccaccgctagaaaagaaaaaggttgacatgtctgtcctaaccagtgaagcaccaccacctcctttgcaacctgagacaaatgatgtacatttagaagcaaaaaacttccagccacagaaagacgttgcaacagcatcccctaaaaccattgctgtgttacctcagatgggatctagccctgatgtgataattgaagaaattattgaagacaacgtggaaagttctgcagagctagtttttgtaagccatgtaatagatccttgccatttctacattcggaagtattcacaaataaaagacgccaaagtactggagaagaaggtgaatgaattttgcaataggagttcacaccttgatccttcagacattttggaactaggtgcaagaatatttgtcagcagtattaaaaatggaatgtggtgtcgaggaactatcacagaattaattccaatagagggtagaaataccagaaaaccttgtagtccaaccagattatttgtccatgaagttgcactaatacaaatattcatggtagattttggaaattctgaagtcctgattgtcactggagttgttgatacccatgtgagaccagaacactctgctaagcaacatattgcactaaatgatttatgtctggttctaaggaaatctgaaccatatactgaagggctgctaaaagacatccagccattagcacaaccatgctcattgaaagacattgttccacagaattcaaatgaaggctgggaagaggaagctaaagtggaatttttgaaaatggtaaataacaaggctgtttcaatgaaagtttttagagaagaagatggtgtgcttattgtagatctgcaaaaaccaccaccgaataaaataagcagtgatatgcctgtgtctcttagagatgcgctagtttttatggaactagcaaaagatctgatctaataaagttggttgagacactttctcattttttcaatgtttctgtattggaagaagaacttaaagcttcctaatctattttgttggcgtcattcctctgctgaatttttaaatgttcactctggcttacctgttaatggaagaatttgcataatatctacttagaaagatagtgggccccggag

SEQ ID NO: 728503 - DNA, 2302 bp, Homo sapiens
agaagaaagagacagcgatggcggcagaggcttcgaagactgggccttctaggtcttcctaccagcgaatggggaggaagagtcagccctggggtgccgctgaaatccagtgcaccaggtgtggaaggagggtatccagatcatccggtcaccattgtgaacttcaatgtggacatgctttttgtgaactatgcttgttaatgactgaagaatgcaccacaattatatgccctgattgtgaggttgctacagctgtaaatactagacaacgctactacccaatggctggatatattaaggaagactccataatggaaaaactgcagcctaagacgataaagaattgttctcaggactttaagaagactgctgatcagctaactactggtttagaacgttcagcctccacagacaagactcttttgaactcatcagctgtaatgttggacactaatactgcagaagaaattgatgaagcattgaatacagcacaccatagtttcgaacagttaagcattgctggaaaagcacttgaacacatgcagaagcaaacgatagaggaaagagaaagagttatagaagttgtggagaaacagtttgaccaacttttggctttttttgattccaggaaaaagaacctgtgtgaagaatttgcaagaactactgatgattatctatcaaatttaataaaggctaaaagctacattgaagagaaaaaaaataatttgaatgcagctatgaacatagcaagagcattacaattatcgccttctctaagaacatactgtgacctgaatcagattatccggactttgcagttaacttcagatagtgaattagcacaagttagttctccacaactaaggaaccctcccaggttgagtgtgaattgcagtgagatcatctgtatgttcaacaatatgggaaagattgaatttagggactcaacaaaatgttatccccaagaaaatgaaattagacagaatgttcaaaagaaatataataacaaaaaggaactttcttgttacgatacatacccaccgctagaaaagaaaaaggttgacatgtctgtcctaaccagtgaagcaccaccacctcctttgcaacctgagacaaatgatgtacatttagaagcaaaaaacttccagccacagaaagacgttgcaacagcatcccctaaaaccattgctgtgttacctcagatgggatctagccctgatgtgataattgaagaaattattgaagacaacgtggaaacatgcggcacagatgatcttggggagacacctagatatccaaaaaagcctcttcagaaaaactcatctgttccttttggatcaaaagcagatactgtaacaactgtctgagcttgatgtagtggagtttactgtatgtgtagttctgcagagctagtttttgtaagccatgtaatagatccttgccatttctacattcggaagtattcacaaataaaagacgccaaagtactggagaagaaggtgaatgaattttgcaataggagttcacaccttgatccttcagacattttggaactaggtgcaagaatatttgtcagcagtattaaaaatggaatgtggtgtcgaggaactatcacagaattaattccaatagagggtagaaataccagaaaaccttgtagtccaaccagattatttgtccatgaagttgcactaatacaaatattcatggtagattttggaaattctgaagtcctgattgtcactggagttgttgatacccatgtgagaccagaacactctgctaagcaacatattgcactaaatgatttatgtctggttctaaggaaatctgaaccatatactgaagggctgctaaaagacatccagccattagcacaaccatgctcattgaaagacattgttccacagaattcaaatgaaggctgggaagaggaagctaaagtggaatttttgaaaatggtaaataacaaggctgtttcaatgaaagtttttagagaagaagatggtgtgcttattgtagatctgcaaaaaccaccaccgaataaaataagcagtgatatgcctgtgtctcttagagatgcgctagtttttatggaactagcaaaagatctgatctaataaagttggttgagacactttctcattttttcaatgtttctgtattggaagaagaacttaaagcttcctaatctattttgttggcgtcattcctctgctgaatttttaaatgttcactctggcttacctgttaatggaagaatttgcataatatctacttagaaagatagtgggccccggag

SEQ ID NO: 728504 - DNA, 2132 bp, Homo sapiens
agaagaaagagacagcgatggcggcagaggcttcgaagactgggccttctaggtcttcctaccagcgaatggggaggaagagtcagccctggggtgccgctgaaatccagtgcaccaggtcaccattgtgaacttcaatgtggacatgctttttgtgaactatgcttgttaatgactgaagaatgcaccacaattatatgccctgattgtgaggttgctacagctgtaaatactagacaacgctactacccaatggctggatatattaaggaagactccataatggaaaaactgcagcctaagacgataaagaattgttctcaggactttaagaagactgctgatcagctaactactggtttagaacgttcagcctccacagacaagactcttttgaactcatcagctgtaatgttggacactaatactgcagaagaaattgatgaagcattgaatacagcacaccatagtttcgaacagttaagcattgctggaaaagcacttgaacacatgcagaagcaaacgatagaggaaagagaaagagttatagaagttgtggagaaacagtttgaccaacttttggctttttttgattccaggaaaaagaacctgtgtgaagaatttgcaagaactactgatgattatctatcaaatttaataaaggctaaaagctacattgaagagaaaaaaaataatttgaatgcagctatgaacatagcaagagcattacaattatcgccttctctaagaacatactgtgacctgaatcagattatccggactttgcagttaacttcagatagtgaattagcacaagttagttctccacaactaaggaaccctcccaggttgagtgtgaattgcagtgagatcatctgtatgttcaacaatatgggaaagattgaatttagggactcaacaaaatgttatccccaagaaaatgaaattagacagaatgttcaaaagaaatataataacaaaaaggaactttcttgttacgatacatacccaccgctagaaaagaaaaaggttgacatgtctgtcctaaccagtgaagcaccaccacctcctttgcaacctgagacaaatgatgtacatttagaagcaaaaaacttccagccacagaaagacgttgcaacagcatcccctaaaaccattgctgtgttacctcagatgggatctagccctgatgtgataattgaagaaattattgaagacaacgtggaaagttctgcagagctagtttttgtaagccatgtaatagatccttgccatttctacattcggaagtattcacaaataaaagacgccaaagtactggagaagaaggtgaatgaattttgcaataggagttcacaccttgatccttcagacattttggaactaggtgcaagaatatttgtcagcagtattaaaaatggaatgtggtgtcgaggaactatcacagaattaattccaatagagggtagaaataccagaaaaccttgtagtccaaccagattatttgtccatgaagttgcactaatacaaatattcatggtagattttggaaattctgaagtcctgattgtcactggagttgttgatacccatgtgagaccagaacactctgctaagcaacatattgcactaaatgatttatgtctggttctaaggaaatctgaaccatatactgaagggctgctaaaagacatccagccattagcacaaccatgctcattgaaagacattgttccacagaattcaaatgaaggctgggaagaggaagctaaagtggaatttttgaaaatggtaaataacaaggctgtttcaatgaaagtttttagagaagaagatggtgtgcttattgtagatctgcaaaaaccaccaccgaataaaataagcagtgatatgcctgtgtctcttagagatgcgctagtttttatggaactagcaaaagatctgatctaataaagttggttgagacactttctcattttttcaatgtttctgtattggaagaagaacttaaagcttcctaatctattttgttggcgtcattcctctgctgaatttttaaatgttcactctggcttacctgttaatggaagaatttgcataatatctacttagaaagatagtgggccccggag

SEQ ID NO: 728505 - DNA, 2273 bp, Homo sapiens
agaagaaagagacagcgatggcggcagaggcttcgaagactgggccttctaggtcttcctaccagcgaatggggaggaagagtcagccctggggtgccgctgaaatccagtgcaccaggtcaccattgtgaacttcaatgtggacatgctttttgtgaactatgcttgttaatgactgaagaatgcaccacaattatatgccctgattgtgaggttgctacagctgtaaatactagacaacgctactacccaatggctggatatattaaggaagactccataatggaaaaactgcagcctaagacgataaagaattgttctcaggactttaagaagactgctgatcagctaactactggtttagaacgttcagcctccacagacaagactcttttgaactcatcagctgtaatgttggacactaatactgcagaagaaattgatgaagcattgaatacagcacaccatagtttcgaacagttaagcattgctggaaaagcacttgaacacatgcagaagcaaacgatagaggaaagagaaagagttatagaagttgtggagaaacagtttgaccaacttttggctttttttgattccaggaaaaagaacctgtgtgaagaatttgcaagaactactgatgattatctatcaaatttaataaaggctaaaagctacattgaagagaaaaaaaataatttgaatgcagctatgaacatagcaagagcattacaattatcgccttctctaagaacatactgtgacctgaatcagattatccggactttgcagttaacttcagatagtgaattagcacaagttagttctccacaactaaggaaccctcccaggttgagtgtgaattgcagtgagatcatctgtatgttcaacaatatgggaaagattgaatttagggactcaacaaaatgttatccccaagaaaatgaaattagacagaatgttcaaaagaaatataataacaaaaaggaactttcttgttacgatacatacccaccgctagaaaagaaaaaggttgacatgtctgtcctaaccagtgaagcaccaccacctcctttgcaacctgagacaaatgatgtacatttagaagcaaaaaacttccagccacagaaagacgttgcaacagcatcccctaaaaccattgctgtgttacctcagatgggatctagccctgatgtgataattgaagaaattattgaagacaacgtggaaacatgcggcacagatgatcttggggagacacctagatatccaaaaaagcctcttcagaaaaactcatctgttccttttggatcaaaagcagatactgtaacaactgtctgagcttgatgtagtggagtttactgtatgtgtagttctgcagagctagtttttgtaagccatgtaatagatccttgccatttctacattcggaagtattcacaaataaaagacgccaaagtactggagaagaaggtgaatgaattttgcaataggagttcacaccttgatccttcagacattttggaactaggtgcaagaatatttgtcagcagtattaaaaatggaatgtggtgtcgaggaactatcacagaattaattccaatagagggtagaaataccagaaaaccttgtagtccaaccagattatttgtccatgaagttgcactaatacaaatattcatggtagattttggaaattctgaagtcctgattgtcactggagttgttgatacccatgtgagaccagaacactctgctaagcaacatattgcactaaatgatttatgtctggttctaaggaaatctgaaccatatactgaagggctgctaaaagacatccagccattagcacaaccatgctcattgaaagacattgttccacagaattcaaatgaaggctgggaagaggaagctaaagtggaatttttgaaaatggtaaataacaaggctgtttcaatgaaagtttttagagaagaagatggtgtgcttattgtagatctgcaaaaaccaccaccgaataaaataagcagtgatatgcctgtgtctcttagagatgcgctagtttttatggaactagcaaaagatctgatctaataaagttggttgagacactttctcattttttcaatgtttctgtattggaagaagaacttaaagcttcctaatctattttgttggcgtcattcctctgctgaatttttaaatgttcactctggcttacctgttaatggaagaatttgcataatatctacttagaaagatagtgggccccggag

SEQ ID NO: 728506 - DNA, 694 bp, Homo sapiens
cgccagcgaggacgccgtccagggcatcgccaaggaggatgccgcccagggcatcgccaacgaggacgccgcccagggcatcgccaacgaggacgccgcccagggcatcgccaaagaggacgccgcccacggcatcgccaacgagctgtatacgacatcgctaacgaggacaccctacaagccgtcgctaacaagtacactgtacacaacatcgctaatgagggcactgtacaagacatcaccaatgagggcgctttatacgacattgctaatggcaccgacaaggcacgctaacgtggacgctgtacacgacattgctaatgaggacagcgtataagacatcgctagtaactatcgcaagaacaaaaaaccaaacaccgcatattctcactcatagatgggaattgaacaatgagatcacatggacacaggaaggggaatatcacactctggggactgttgtggggtggggggggagggatagcatcgggagatatacctaatgctagatgatgagttagtgggtgcagcgcaccagcgtggcacatgtatacatatgtaactaacctgcacaatgtgcacatgtaccctaaaacttaaagtatatatatataaaaaaagacatcgctagtgagcacgctgtatacgacatcgctaatgaggacaccatacaaggcatcgctaacgatgacgc

SEQ ID NO: 728507 - DNA, 847 bp, Homo sapiens
aggaatgccacctagctttagttacttcataaaggttcctggactccagctattagaataggaaaactgagacttgtctagcttggtgagaggtctgagtgccccttaaagacttgggagcccccacccaaaccttttgtttacagaagaggagtaaatgccacagaatgctttgaaattccccctctgtgccccatcagcaccccagaaagaggagccggagaccatggaatagcaatagtctctcaggccctctgggctccccctttggaagccagtctcccagctcctgccctggggggaacgttccaacagggtctcagagacatcctgggataatgagggtcccctccttctggagcccaactggaaggcagagaatggtcactttgacctcgaggggcatctataaggggcactaagcagaggccagatttgctgaggaaatcctgaatgaggagcaggtggagagaaaaaggaggccattctcaactgaggaagggtgggctgggagggaggggccagggataatttatgatatcattgctcccccgccgcacttacttcccagccctctgctactgtaccgttgctaggagagcctggctctgtctggggctgggagggtgtaacaagcgggaggctgttccatctgcactcctcctcccccacccaggggagggcaccgcatggagctggatccaccaccccttcccaggccctgacagacaccagtctcttctgtcgttcccccaaatctagccactcaagggatagcaggactcccagttgggctgaggatctagagcaaggaatgggcaagagagcatggaaggagacacactgg

SEQ ID NO: 728508 - DNA, 1021 bp, Homo sapiens
  misc_feature (818)..(818): n is a, c, g, or t
  misc_feature (839)..(839): n is a, c, g, or t
  misc_feature (1013)..(1013): n is a, c, g, or t
gctctgccctccgcctcctcttctccgcccactctcgccgcggtctcttggcggcggaggctttgtctcgtgggctggtccccagcggctccctccccgaacagctgctgctccagggaggaagcggcgcgggtgctgtccagcttcccggtgctgaaaaccggagggctcgtcatccaccactaccatgtaagggccatgagaagggctcatcctggcgcacgcggacatggaggaggacttattccagctaaggcagctgccggttgtgaaattccgtcgcacaggcgagagtgcaaggtcagaggacgacacggcttcaggagagcatgaagtccagattgaaggggtccacgtgggcctagaggctgtggagctggatgatggggcagctgtgcccaaggagtttgccaatcccaccgatgatactttcatggtggaagatgcagtggaagccattggctttggaaaatttcagtggaagctgtctgttctcactggcttggcttggatggctgatgccatggagatgatgatcctcagcatcctggcaccacagctgcattgcgagtggaggctccaagctggcaggtggcattgctgacctcggtggtctttgtaggcatgatgtccagctccacgctctggggaaatatctcagaccagtacggcaggaaaacagggctgaagatcagcgtgctgtggactctgtactatggcatccttagtgcatttgcgcccgtgtatagctggatcctggtgctccggggcctggtgggcttcgggatcggaggagttccccagtcggtgacgctgtntgccgagttccttcccatganagccagagctaaatgtattttgctgattgaggtattctgggccatcgggacagtgttcgaggtcgtcctggctgtgttcgtgatgcccagcctgggctggcgttggctgctcatctctcagctgtccgctcccctctttgccgtgctgtgtttctggctgctgaaatgcaaggnatgatgtg

SEQ ID NO: 728509 - DNA, 847 bp, Homo sapiens; identical to SEQ ID NO: 212130

SEQ ID NO: 728510 - DNA, 2815 bp, Homo sapiens; identical to SEQ ID NO: 238003

SEQ ID NO: 728511 - DNA, 2762 bp, Homo sapiens
tagtacattgaaattcaaagtcatgcttgttactgttaatgaaagcagatttaaagcaacaccaccatcactggagtatttttagttatatacgattgagactaccaagcatgttgctcttattcagtgtaatcctaatctcatgggtatccactgttgggggagaaggaacactttgtgattttccaaaaatacaccatggatttctgtatgatgaagaagattataaccctttttcccaagttcctacaggggaagttttctattactcctgtgaatataattttgtgtctccttcaaaatccttttggactcgcataacatgcacagaagaaggatggtcaccaacaccgaagtgtctcagaatgtgttcctttccttttgtgaaaaatggtcattctgaatcttcaggactaatacatctggaaggtgatactgtacaaattatttgcaacacaggatacagccttcaaaacaatgagaaaaacatttcgtgtgtagaacggggctggtccactcctcccatatgcagcttcactaaaggagaatgtcatgttccaattttagaagccaatgtagatgctcagccaaaaaaagaaagctacaaagttggagacgtgttgaaattctcctgcagaatcacctaactttccaacatgcaaaggacaagtacgatcatgtggtccacctcctcaactctccaatggtgaagttaaggagataagaaaagaggaatatggacacaatgaagtagtggaatatgattgcaatcctaattttataataaacgggcctaagaaaatacaatgtgtggatggagaatggacaactttacccacttgtgttgaacaagtgaaaacatgtggatacatacctgaactcgagtacggttatgttcagccgtctgtccctccctatcaacatggagtttcagtcgaggtgaattgcagaaatgaatatgcaatgattggaaataacatgattacctgtattaatggaatatggacagagcttcctatgtgtgttgcaacacaccaacttaagaggtgcaaaatagcaggagttaatataaaaacattactcaagctatctgggaaagaatttaatcataattctagaatacgttacagatgttcagacatcttcagatacaggcactcagtctgtataaacgggaaatggaatcctgaagtagactgcacagaaaaaagggaacaattctgcccaccgccacctcagatacctaatgctcagaatatgacaaccacagtgaattatcaggatggagaaaaagtagctgttctctgtaaagaaaactatctacttccagaagcaaaagaaattgtatgtaaagatggacgatggcaatcattaccacgctgtgttgagtctactgcatattgtgggccccctccatctattaacaatggagataccacctcattcccattatcagtatatcctccagggtcaacagtgacgtaccgttgccagtccttctataaactccagggctctgtaactgtaacatgcagaaataaacagtggtcagaaccaccaagatgcctagatccatgtgtggtatctgaagaaaacatgaacaaaaataacatacagttaaaatggagaaacgatggaaaactctatgcaaaaacaggggatgctgttgaattccagtgtaaattcccacataaagcgatgatatcatcaccaccatttcgagcaatctgtcaggaagggaaatttgaatatcctatatgtgaatgaagcaagcataattttcctgaatatattcttcaaacatccatctacgctaaaagtagccattatgtagccaattctgtagttacttcttttattctttcaggtgttgtttaactcagttttatttagaactctggatttttagagctttagaaatttgtaagctgagagaacaatgtttcacttaataggagggtgtcttagtccatattacattgttataacagagtatcacagactggataacttctaaccaatagtttatttgtttcataaatctaaaagctgagaagtccaagatggtggggctgcctctggtgagggtcttctcgaagcatcataatatgctggaaggcatcacaacatggtggaagggatcacgtggcaaaagagcatgtacatgggagtgagagaaaaagagagagagagacagagtggcgggggccggggaggagcgcaaactcatcctttataaagacaccactcctgagataacaatccaatcccatgataatgacattaatccattcaagaagatagagctctcgtgacttaatcaccttctaaagatctcacctgacaacactgttgcattggcagttaagtttccacgtaaactttcggggacacattcaaaccacaggagaaactcaaattgttcctgggcaaatcacaacatggggaattttattcataaatgtccacagaaacagtaaatgttctcgcttcagaacttaattcatctaatccctcctgtttgtctcaaattataggataactttgaaactttctgaattaacgttatttaaaaggaaatgtagatgttattttagtctctatcttcaggttattatcacttaaaaacctgcgaaagctgtcaacttttgtggttgtagcaagtattaataaatatttataaatcctctaatgtaagtctagctacctatccaatactaaataccccttaaagtattaaatgcactatctgctgtaaacgg

SEQ ID NO: 728512 - DNA, 650 bp, Homo sapiens; identical to SEQ ID NO: 246010

SEQ ID NO: 728513 - DNA, 591 bp, Homo sapiens
cgcaccccctttgtttttctgcgtaagtgaaaacattttggtgaagtctagcaggaactagagcactagctcctctatttgaagtgaacgcccaaaccgtggcacgtggccagctgtcttttgggtggcacagggaacagttggtgacagctggatacaatcaagttccattacaaacagattttaagtgtcatttacacacagaagaaattgcaagctttagcaaaataaaatctgggggttttcaaagcaagacaatgccccaatccaagcctgtgtgagcagttcgctttgcagcctcttgcggggattaacaccccttcttcaccaggctccaccctctctgcaaggtctatgctgcaaaattagcaagtccaggaggcttgctccctggcagagctgctgagtcctctgtcttctatttattcactttttgaagaaccctgaattaaaggcctgtctaaccactgttcagcctactccttttgggtgggaggggtcagaggctggcttctagaatcacacagtgattgggcaagtgaaggctggcatgcccagctaaacctcatctcctttttttttttttttttt

SEQ ID NO: 728514 - DNA, 867 bp, Homo sapiens
ctgtagtgggccactcagttagttcacccaggctcccacattctccatgctctgtttcaggaaacaaccagaactgtggacagtcttaccaaagacactaacatcatcaccagagaattaaagaaatccagtgagtggcccacaacaattggctggcataggacatgatcctagcttcccacagggcacttgggattgtgcagtcagaagtgattgatgtgcatatgtttccacagacctctctgatgtctatgccgtcaccaaaaatattcagactgcaaaccaggaaatgcattgaattgccaccattgtccttatacttccgtttaaggacactccaggcccaacgtctcaaggccttttaggctagcttccttcaaacctcaaatcttggttgctgtctaatttaacctttaacccttttaccatttgccctgagaacacttgccggcagcacttccagctgcagcgtttacccaaagatacctctgccaggaaagaccttgcttttattattacttttgcatttctctagcatattgacattggaaacaaaagacatcattctatatatagcattctggttttagtggtggtagttccatttacaaaatatagtaattcttgatcactgaaaatgtcagagcctagaaaacggagcattcctatgcgtgatgttaacatcattaaacagttgttggccaaagactcatgtgatgaatccaatttttctaaaataaatagctcagatgattcagatgattctgatattaggtctgtttagaaataaaacttcaaaaacagtttttatattttacttccacattgaaaatcagtcagatttgctttggcctcaaagaatgtgtt

SEQ ID NO: 728515 - DNA, 398 bp, Homo sapiens; identical to SEQ ID NO: 250541

SEQ ID NO: 728516 - DNA, 350 bp, Homo sapiens
gactggttgcaaattctgttttttattattgtcttggcatcttgatatctagaccactcctacaagtttatctggcagtaggaacttggtgcatttttttctacgctacacccccccacccttaatctttctttgctgtcataatattcagtagcatttataaaagctgtctagttagctctttaaaaacttttgtcctgcaaaatgtttgttagtcaacacactactttgtgtaaacaactattatgtttccttgggaccatcacaagctctttaacaaacacaaggactcaattcattcagcaggtggggattaaagaatcaaagcccagtagcaaaaccaaaactga

SEQ ID NO: 728517 - DNA, 1048 bp, Homo sapiens
tataggcagaaatatatatatttggctattttcctctgaagaactctgactaatacaacctgtgttttaattaggatacttttgattacatataaaagcaaccctgagtcaaactgacttaaacttcattacacaataaggacaggtagcacaactttcaggactggttctttccctggctaacatttatgcatatcttatcaaagatgcagaatttattttatctgtcacatctaccatgctcataatcagtttcatcttcaaactgcagctcatactgcaagtaatcttattattacccaaacacaatcatattcaggagaagaagctaaaacattttttttctgtgtccattgatattaatgagtacatttttttttccagaagcttattagacaacttctcttcatgattgaagaattggggagttgggtctcatacaattactggtatcagttctattgaaataaattggtattggataagatcccgagaatacaaactcacgcgtgatgattgggtaattaacaaaaattgtgactcttttaggaaggaatgagtaggtagttgcaatacacaaattgactacatccgatggtccttagtttctctatttataaaatgggtggaggaatagtgtctaccacataagcttttcttgaatgttaaatctgattctgtaattaataaaagggcttatccccatgattgatgcataatacctacttgataagtgttagttaccattcatttaaagatcggtattttattttccattatgtactactcaactaataatctgtaaggaagaaaacgatggggagagaggaagagggaaagaggaaggtttctacctttcctttacacttactgatttattgttaccaatcctgagattaaatattaactgataatgttatgcaaactatttttaccgagcaggacagattatttttcaaaatcatgttttccaaacaggcattttattattttcctatttttgaataattttggatccattgagcgtatttgtaaatcctcaaagtaa

SEQ ID NO: 728518 - DNA, 831 bp, Homo sapiens; identical to SEQ ID NO: 229710

SEQ ID NO: 728519 - DNA, 912 bp, Homo sapiens
aatctgagaatacacgtagaaacatttcggctgaagagaacaactatgaaagagatatttcaagagaatgaaaaatattttttgtttgtctgaaagtgaataatgtgaaggtgctttatagggccctgtatattttacattttaataataataaagacaatagctaaaagtaaatgagctccgtaatttgcttggtgatttctatataagtcttcttttatgtaaaacacaaaacaaaacataacccaaaaaatctatgcaaaatataccaggatatatctttttttttttttggttctactactgtattagttcattttcacgctgctgataaagatatacccgagactgggatatttacaaaagacgaggttttattggacttacagttctgtatggctggggaggcttcacaatcatggtggaagaaaaggaggagaaagtcacatcttacggggatggcaggaggcaaaaagaaaccttgtgcagggaaactgccatttttaaaaccgtgagatctcatgagactcattcagtaccatgagaacagtgaaggaaagacctgaccccatatttcagtcacctcccactgggttcttctcatgacatgtgggaattgtgggagttacaattgaaaatgagatttgggtagggacatagccaaaccatattaactactatacaaattaactatttaaatttatttttttaatgtacattaaaaactgtaaatttcttaaggaggaaagaagaaactgtttttcattttctaggtgataagttaggaaacattaagaaacaagcttgtgatcttatcctgatctcaaatgacataaatttagaccatatttcatctgctgcctaaagtttcagcatcctagggaaagaaaagaacagatattttaaaaagaa

SEQ ID NO: 728520 - DNA, 640 bp, Homo sapiens; identical to SEQ ID NO: 202286

SEQ ID NO: 728521 - DNA, 713 bp, Homo sapiens
ccgcctactactactaaattcgcggccgcgtcgacgccatatttcacgtcctaaagtgtgtatttctcattttccgtgattttcagttttctcgccatattccaggtccttcagtgtgcatttctcatttttcacgttttttagtgatttcgtcatttttcaagtcgtcaagtggatgtttctcattttccatgattttcagttttcttgccatattccacgtcctacagtggacatttctaaattttccacctttttcagttttcctcgccatatttcacgtcctaaagtgtgtatttctcattttccgtgattttcagttttctcgccatattccaggtccttcagtgtgcatttctcatttttcacgttttttagtgatttcgtcatttttcaagtcgtcaagtggatgtttctcattttccatgattttcagttttcttgccatattccacgtcctacagtggacatttctaaattttccacctttttcagttttcctcgccatatttcatgtcctaaagtgtgtatttctcattttccgtgattttcagttttctcgccatattccatgtccttcagtgtgcatttctcatttttcacttttttagtgatttcgtcatttttcaagtcgtcaagtggatgtttctcattttccatgattttcagttttctgtcgacgcggccgcgaatttagtagtagtaggcggcgg

SEQ ID NO: 728522 - DNA, 465 bp, Homo sapiens
ggtgtgcacagctaagcatgctttcagctcgctggctgcatcttttccagtggggactcactgtgcgtcaggagcacacaaagaaagctgacatttgtttctcattttccatgattttcagttttcttgccatattccacgtcctacagtggacatttctaaattttccacctttttcagttttcctcgccatatttcacgtcctaaagtgtgtatttctcattttccgtgattttcagttttctcgccatattccaggtccttcagtgtgcatttctcatttttcacgttttttagtgatttcgtcatttttcaagtcgtcaagtggatgtttctcattttccatgattttcagttttcttgccatattccacgtcctacagtggacatttctaaattttccacctttttcagttttcctcgccatgtcgacgcggccgcgaatttagtagtagtaggcggcgg

SEQ ID NO: 728523 - DNA, 439 bp, Homo sapiens
ccttcagtgtgcatttgtcatttttcacgtttttcagtgatttcgtcatttttcaagtcgtcaagtggatgtttctcattttccatgattttcagttttcttgccatattccacgtcctacagtggacatttctaaattttccacctttttcagttttcctcgccatatttcacgtcctaaagtgtgtatttctcattttccgtgattttcagttttctcgccatattccaggtccttcagtgtgcatttctcatttttcacgttttttagtgatttcgtcatttttcaagtcgtcaagtggatgtttctcattttccatgattttcagttttcttgccatattccacgtcctacagtggacatttctaaattttccacctttttcagttttcctcgccatgtcgacgcggccgcgaatttagtagtagtaggcggcgg

SEQ ID NO: 728524 - DNA, 840 bp, Homo sapiens
ccttcagtgtgcatttgtcatttttcacgtttttcagtgatttcgtcatttttcaagtcgtcaagtggatgtttctcattttccatgattttcagttttcttgccatattccacgtcctacagtggacatttctaaattttccacctttttcagttttcctcgccatatttcacgtcctaaagtgtgtatttctcattttccgtgattttcagttttctcgccatattccaggtccttcagtgtgcatttctcatttttcacgttttttagtgatttcgtcatttttcaagtcgtcaagtggatgtttctcattttccatgattttcagttttcttgccatattccacgtcctacagtggacatttctaaattttccacctttttcagttttcctcgccatatttcacgtcctaaagtgtgtatttctcattttccgtgattttcagttttctcgccatattccaggtccttcagtgtgcatttctcatttttcacgttttttagtgatttcgtcatttttcaagtcgtcaagtggatgtttctcattttccatgattttcagttttcttgccatattccacgtcctacagtggacatttctaaattttccacctttttcagttttcctcgccatatttcatgtcctaaagtgtgtatttctcattttccgtgattttcagttttctcgccatattccatgtccttcagtgtgcatttctcatttttcacttttttagtgatttcgtcatttttcaagtcgtcaagtggatgtttctcattttccatgattttcagttttctgtcgacgcggccgcgaatttagtagtagtaggcggcgg

SEQ ID NO: 728525 - DNA, 510 bp, Homo sapiens
ccttcagtgtgcatttgtcatttttcacgtttttcagtgatttcgtcatttttcaagtcgtcaagtggatgtttctcattttccatgattttcagttttcttgccatattccacgtcctacagtggacatttctaaattttccacctttttcagttttcctcgccatatttcacgtcctaaagtgtgtatttctcattttccgtgattttcagttttctcgccatattccaggtccttcagtgtgcatttctcatttttcacgttttttagtgatttcgtcatttttcaagtcgtcaagtggatgtttctcattttccatgattttcagttttcttgccatattccacgtcctacagtggacatttctaaattttccacctttttcagttttcctcgccatatttcacgtcctaaagtgtgtatttctcattttccgtgattttcagttttctcgccatattccaggtccttgtcgacgcggccgcgaatttagtagtagtaggcggcgg

SEQ ID NO: 728526 - DNA, 383 bp, Homo sapiens
ccgcctactactactaaattcgcggccgcgtcgacgccatatttcacgtcctaaagtgtgtatttctcattttccgtgattttcagttttctcgccatattccaggtccttcagtgtgcatttctcatttttcacgttttttagtgatttcgtcatttttcaagtcgtcaagtggatgtttctcattttccatgattttcagttttcttgccatattccacgtcctacagtggacatttctaaattttccacctttttcagttttcctcgccatatttcacgtcctaaagtgtgtatttctcattttccgtgattttcagttttctcgccatattccaggtccttgtcgacgcggccgcgaatttagtagtagtaggcggcgg

SEQ ID NO: 728527 - DNA, 312 bp, Homo sapiens
ccgcctactactactaaattcgcggccgcgtcgacgccatatttcacgtcctaaagtgtgtatttctcattttccgtgattttcagttttctcgccatattccaggtccttcagtgtgcatttctcatttttcacgttttttagtgatttcgtcatttttcaagtcgtcaagtggatgtttctcattttccatgattttcagttttcttgccatattccacgtcctacagtggacatttctaaattttccacctttttcagttttcctcgccatgtcgacgcggccgcgaatttagtagtagtaggcggcgg

SEQ ID NO: 728528 - DNA, 866 bp, Homo sapiens
ggtgtgcacagctaagcatgctttcagctcgctggctgcatcttttccagtggggactcactgtgcgtcaggagcacacaaagaaagctgacatttgtttctcattttccatgattttcagttttcttgccatattccacgtcctacagtggacatttctaaattttccacctttttcagttttcctcgccatatttcacgtcctaaagtgtgtatttctcattttccgtgattttcagttttctcgccatattccaggtccttcagtgtgcatttctcatttttcacgttttttagtgatttcgtcatttttcaagtcgtcaagtggatgtttctcattttccatgattttcagttttcttgccatattccacgtcctacagtggacatttctaaattttccacctttttcagttttcctcgccatatttcacgtcctaaagtgtgtatttctcattttccgtgattttcagttttctcgccatattccaggtccttcagtgtgcatttctcatttttcacgttttttagtgatttcgtcatttttcaagtcgtcaagtggatgtttctcattttccatgattttcagttttcttgccatattccacgtcctacagtggacatttctaaattttccacctttttcagttttcctcgccatatttcatgtcctaaagtgtgtatttctcattttccgtgattttcagttttctcgccatattccatgtccttcagtgtgcatttctcatttttcacttttttagtgatttcgtcatttttcaagtcgtcaagtggatgtttctcattttccatgattttcagttttctgtcgacgcggccgcgaatttagtagtagtaggcggcgg

SEQ ID NO: 728529 - DNA, 536 bp, Homo sapiens
ggtgtgcacagctaagcatgctttcagctcgctggctgcatcttttccagtggggactcactgtgcgtcaggagcacacaaagaaagctgacatttgtttctcattttccatgattttcagttttcttgccatattccacgtcctacagtggacatttctaaattttccacctttttcagttttcctcgccatatttcacgtcctaaagtgtgtatttctcattttccgtgattttcagttttctcgccatattccaggtccttcagtgtgcatttctcatttttcacgttttttagtgatttcgtcatttttcaagtcgtcaagtggatgtttctcattttccatgattttcagttttcttgccatattccacgtcctacagtggacatttctaaattttccacctttttcagttttcctcgccatatttcacgtcctaaagtgtgtatttctcattttccgtgattttcagttttctcgccatattccaggtccttgtcgacgcggccgcgaatttagtagtagtaggcggcgg

SEQ ID NO: 728530 - DNA, 719 bp, Homo sapiens
ctgctctgggaagatatatttaatttatgtatttttgtttactctgaactcttccaggtactataagagaagctgacttattaagattgcatcctctctctctccaatccctttaatggtttatggtctaagagtagattgaactcttagacagagaagactattgattgatagaccgatagcataagcaaagataatgataccaactctgcctttcactttctttcttttttttttttttttttgttagacggagtcttactctgtcacccaggttggagtgcaatggtgccatctcggctcactgcaaccactgcctcctaggtttaagcaattctcctgccttagcctcctgagtagctgggattacaggcacctaccaccatgcccagctaatttttttgtatttttagtggacacagggtttcgccatgttggccgggctggtctcaaactcctgacctcaggtgatccactcacctcggcctctgaaagtgctgggactgcaggcttgagccaccacacctggcctgcctttcattttttgagcccctgctttataccaggcactgtactctctgctttatgtatatttgcatttttcaaatgtggatctgcagacctgttttcaagttatatttaagaatgtcttaattttgctgctcttctagaagatgccctataaccaagtttctatgtttgcatttaaaagaagaaag

SEQ ID NO: 728531 - DNA, 777 bp, Homo sapiens
  misc_feature (406)..(406): n is a, c, g, or t
tccacattcactttcttccctgttttagggaagaaaatgatcatagacattcgattttccaaattggcgctcttattttcaatgctaattggattacttctcttccaaccctcctgcccatccatccatcccagtccccaggcatcttaaccttaccatctgagcttcagctgaaatctgtttataggcaacattgaaagtaccagattggggccaggtgtagcggcccacacctgtaatcccagcactttgggaggcggaggctagcggatcatgaggtcaggagttcaagaccagcctggccaacatggtgaaacccccatctctactaaagatataaaaaactagccgagcgtggtgttgcatgcctgtgatcccagctactcgggaggctgaggcgggggantcgcttgaaccggggaggcagaggttgcggtgagccagatcgtgcattgcactccagcctggccgacagggtgagactccatctcaaaaaagagaaagtaccagattgtacttttaacatctgtctagcgtatcgacgaattttagtgggagctcgttgatttatttctcagggcatacatgtgccaatctgtctcactgatgtctctctctttttcaaaataaatacaggaagaaggactccacttgtgtcacccaaaggcgtagcaaaggagcaaaccatcagggacacagagggcatagagacccagaaatcacagagaacaggaggccaaagctcgcgaagagagtgggaatcacggcacaaaacag

SEQ ID NO: 728532 - DNA, 674 bp, Homo sapiens
ttgtatgtctgtactgatctatactgggtgctgggcaaacgggcattcttaaacactcctagtagggaagaaattggtacaacctttccggaggacaatttaactgatttatttaaagcccgaaaaatgtacatacctttaactcagcagtttcgttactgatttatcttaaggaagtaatttagaatctgtgcctaactgtttacaataactcatagatgaaaaaggcaaaacaaaacacaagtaacctcaaatctccccatgtaacagtttgcttaaacactatagcgttattttacgcaagctacagaagcattgttgaaacatatatttattaggacagaaaaaaattcatgaaatgttattttatcttcttttttcttaaaatggaacttaaaaaaaatttttttaactccaacctaccttttacaccatctgcagagctttcctctcccaaatcaaagctactcctgttcctacctccaggatggaatccccaccttcgtatgcaagggtcttcatgatatggcctcagccaagctatcttagctccagtcacggccccatcttccatatcctatgctgcttgcacaggaagcagctcgctaaccccaggcacacctgctttcatctggagcgtctgcccatcatgattcctccccctggtcccttca

SEQ ID NO: 728533 - DNA, 876 bp, Homo sapiens
agaccataatggatccttaccttagaaaaaaagcacatacatcaaaatttggcatgcaatttcaggagtttgttaacctcctaaggacctccacaaacctgctagaagtacaaagaacctaggttaaaaaaatccctgttttagagtgacatatgcaaaaatggtgcagaatggaactccaggtgcttgtccctcccaggaacaccaagaaacttgcaaacactgtcagaatcaagtttattagaactctgaagatagtcaaaagtttatggcaactaagataacttttaaccaggaaagggctgaaatgtagtaggaaagctttgcggcattttaacctactcttacgcaaccccctccccagcctggcagcaacctttaagacagcagcctgagttctcactgtgggttcctggttctggaaggagtagagcagaacttgtttccaagaaattgtgtttgtctgttttgacctgtttggaggttccctgaaaaactgatgcaaagggcttgcctttgttttgcataactgggaattctctcagggtggaaaagtagctttgtaaataaagaatggtcctcaaaaacattaaaaggcaaatgaatgagatgttgaaacctcaacaaaagatacagttgaggcaaacaagacacatgttgaaaacctggctggaaaggtggggagtaagatacttgggctatgagggatgtgaaaagctcccacatgtatcagacagtctgaaggcccatgcacatgtccagggcagagtccacaatcagaaaaaacatgaagagacctacgcttttacttctagttttcctttaggcttagcacaagcagggagtaaagtagtgctaagtcatagctgtaatcag

SEQ ID NO: 728534 - DNA, 152 bp, Homo sapiens
cactgatttgttgtgaggctctaggactctaagccagctgcgaggtctctgtgacagtggactcatgcctctcttccaattcgccagtgattgctgccagacctttcaccatcccctacctgacagctcttcttccgtctgaactggagatg

SEQ ID NO: 728535 - DNA, 695 bp, Homo sapiens
ggtgcgcaccatcacacccagctaatttttgtatttttagtagagatgggggtttcaccatgttggccaggctggtctcgaactcctgacctcatgatccacccaccttgacctcccaaagtgctgggattacaggcgtcagccaccgcgtccagccagggaagatgatttctataggacagagggaaagagcatattctaggttgaagaaaccatatggataaagaggcaggaaaacacagaccatgttcagtaaacaataagaaatccagtttgcctgaattatagagtacttgttaaagaagaggagaactaggagaaaagtagtattatagtagggcataaaggactaggatatcaggctgagtttatcctgaattccatttttaaactctagctgtgaatcaaaataatttgtagaactttatttatttatttttaaatacagatatctgcatctcacctaagactttaatcaatgaggaaatcactgaaggtttctgagccaggaaatgccattgattgttaatttatttattcaatcaacaaatatgataagcagctaccatttgtcaggcactgtgctaggaaccagtggatgtcaatgtaaataaaacaatcgttgccctcaaggaatttataatctacacatacaaacagtcagttgaaatcaatgataaattatattgtattat

SEQ ID NO: 728536 - DNA, 241 bp, Homo sapiens; identical to SEQ ID NO: 203216

SEQ ID NO: 728537 - DNA, 615 bp, Homo sapiens
agtgatttattcgtaacctgtttcctgaagtccagatcatcagttacagcttggtgcattttcacaaacacccacgtagtcactgttcaggtccagaaaccaccagcctgcagcccccaaaggccccagcacaggcgccctgtggtgctgctgtctggcctgacgagtctgcctgttgctcactgaatataaacggagtcaaagcagggcttcttaggtctgacctctttgtcctgtgtgtaggtgaaagcagtctcatttctgtgtagtactgtggcgggaatgcacccagctctgctgtaggtggagggtctcagttacctgctgtacttcctccagacaggactgttgttctagtaactctcagcaatgaaggaaccaatgcagtctccgactttactggcttgagtttcgctcttgttgcccaggctgagtgcaggggcgtgatctcggctcactgcagcctctgcctcctgggttcaagcgactctcctgcctcagcctcctgggtagctgggattacaggtgcccaccaccaggcctggctaatttttgtatttttaatagagacggggcttcgccacgttgcccaggctgatctcgaactcaagggat

SEQ ID NO: 728538 - DNA, 716 bp, Homo sapiens
gtggtgacctagaggaccccggcagaatacactcaaagtccactgcctccatgaccagtgcatctccaggtttgcctaaggaatatagtccttgtgacctgactgtcactcatatgtattcagggccccaggccactttggtcagctggtggcagaaccagctgggactcaggtctgtcccactctacctgaggattctcctctggcccagagctgatctaaatgtgtcctctgtgggtgccagcagaattctgctcagtgtagtgctgtgctgtgacagggcagcagtgagttccaatgcaaaatcccacactcctctcgctccaccacatgcacagattctctctccaagctgttgtgccagaggtgagggaggggggcataggcgatgcaggaccgtctttcccaccctcttcagtgcctcttcttgatacgatgtgaaaaccaggtactgtgatcactcacctgattttttgtttcttatgaagatgctttttttttttttttaaataaggagtctcactctgtcacccaggctggagcgcagtggcaccatttcgtctcactgcaacctctgcttcccaggttcaagcaattcttctgcctcagcctcccaagtagctgggattataggcccccaccaccacgcccagctaatttttgtatttttagtagagatggggtttctccatgttggccaggccagtcttgaactc

SEQ ID NO: 728539 - DNA, 762 bp, Homo sapiens
acccttgcccatcttctcacatcaccaatttcctggtatccagctctactcaagtatggtaaggctcctgtcttatgttcttatttgtgtgcttccctgccctactaggcatgttccttgaaggcgtggacttaacttttatatctacagtgcttgtcacataagaagcactctaagaagagtagaccttgaacctgttaacagaaccattactgttcactatggaagaatcagaatacatgccctgcatttaaaaaatcaacctgtagttcacaacagctggtagtcagagggctaggccctaggctcaatagtcagacttaatagatagcactgatttttattaatttgaccgatttagacatttcagaggcattagcaaatatgtgattagggtattcattaaattttagctgcaggatttcgttacagcagttttttctctaaaggactgctgtggttaatgatctgtcagcatttccattataaccatcactgttaaagaatatttttgctgtttcagctatctccatttgaaagttggcagtttctaagcacagaattagtttttgaaaatgtattaggctgaatgttaaatggaattggcccttacttttcccatttttgtgttttggaacactgagcatctttccacacactgctccaaccaccctgaattataatcacatttgctcttgcttgaaagttaatagagcttcagtcatccttcttgttcctaagttccaaagtattgtatattcc

SEQ ID NO: 728540 - DNA, 1163 bp, Homo sapiens; identical to SEQ ID NO: 398426

SEQ ID NO: 728541 - DNA, 497 bp, Homo sapiens
ggaacattccatgctaaggggtgcattcatggacagggactgggactcaggagtccacagattatgatcagggagtgcctgtcaccctggggaaggtggtggagaatggggttggaaatacagagggggccttgagtaacagattcccagttatctccctttcttcgccatactttttatctcaagttctcagtttaggccttctgatcaataccatcctacaggactctccccaacatcctccacatttcacacatatttcttctgctggggaaaggtgcctgcctctactctgcctacttttttttttttttctttttgagatggagtctcactccatcgccccaggctggagtgcggtggcgccatctggcctcactacagcctccacctcctgggtttaagcaattctcatgccttagcctcctgagtagctgagattacaggcacccaccaccacacctggctaatttttgtatttttagtaaagacagcgt

SEQ ID NO: 728542 - DNA, 1013 bp, Homo sapiens
gaaaatagaggatcccgtgctgcacaaaggatgcctggaactctcttcttacgggccacccctcagccacagctgtggggccagcgaagtgagagcctgcccagaggggccaagtccctgtcaggttacaaaattgttaagccaacccctcaccaaacacagggcattattagtaaacaggtgaggaaaatcctctaggtcggctagctggacgtgcaggactgagggttcaacttcacagcctgtctacagcaccagccctaccatcactgtggattaatcacccaccaaatcctacccatcccaattatgaaaaaaatgacgagcgtccagtgcaatgcccatctccaacctctgtgcagaggaagcctggcctctccctggagcaggtccttgttcagaggattgctccaggagaacctcgtccctcacccaggtcagcatttcagaaggagacacctgatctgcctctatcgctgccacacaccatgctatgcaggcttggactgctcagaaatctcttgtgggagccacattatttttcctgcagaacagaattatctagaagggggtaaataatagtttctaaggtggtatctgatcacagaataaaatatgaagtgagatgaagtatacagacgggctcagagacagcctgtattcactgcagcactggctctgaaggctgctgggtaggaacgtgagcaggagctggggtcccctgtgctgtttctgcctctgctcatgattctctttgggaggttcagctggtaatgtcatctctgctcactcaggtccttgatctagagaactatttcagtatttgccacccaccacaagcccacatcctggggatgctgtgaacattcctgaacctgtgaagtttcccaaatctctcagaactagagggcctacacagggaggggccatatgccttttcctggtagacagaataaacaactgttaagaggcatcctttgtgcagcacgggatccatgcctataatcccagca

SEQ ID NO: 728543 - DNA, 666 bp, Homo sapiens
catagtattctcagtaaccagacatctaaaagcagtgataacaggtaagctattaattaaattttagagcttaaggattttaacttacaagttttgagtttaggggattcttccctaaaaagttatgctagtaaccctcagtttacctacagattctcttttcattacagctttttctatgcctatacatactgtttactatggacattttttctaccctactacctcattctttatttctttatttatttattttttagagttgaggtcttgctcacttacccaggctggagtgcagtggcacaatcactgcagccttgaactcctgggctcaagtgatccttctgcctcagcctcccatgtagctaggactatagtgtggcaccatacctggataattaaaaaaaattctttttttagagagaaggtcttgctatgctgctcaggctggtctcgaactcctggcctcaagtgattctcccacctcggcctctcaaatctctgggattataggtgtgagccacagtatctggcagctaccttattcttctaaattctgcattaaatttcattgtgtgactttaccgtggtttaacagttctatgctttatgaacattttggatatttctggttcatttctatccagaaaagacaaatcctatgtt

SEQ ID NO: 728544 - DNA, 548 bp, Homo sapiens
catagtattctcagtaaccagacatctaaaagcagtgataacagggagacaccacgaaatcattctttgcctaagtgtaattcccatttggagataacaattccaaaggacttgaaactaaaagaagcagagaaaactgatgggagcaagatggcccatcagtgtcccgtaccctcaccaccccttacatgcgcttacacagcaaccatagtgttagggtgtgtgccggctgtggttgggcttctttgctgtggcgtgtgagtgatgcactagggccttccgcaggttgtcacggcccagaggctctggcactgaccaacacgaatggataactgtctgatgtcagtatttctttggagctgatattagccaaaatgactaaagactttgcgaagaataacttgatggagtatcatgggaaaggactggtccacaacagaaggggacatgagcattttgcctcacagagagagcctggagtcacaaggtggttcaaaagatggcatctagttaatgatctgatgggagcagactggggatcctctaag

SEQ ID NO: 728545 - DNA, 325 bp, Homo sapiens
gatgagccggtccgccaagaagcttagtaatactagtaactgggattacaggtgtgtgccaccacgcccaactaacttttgtaattttagtagagacaaggtttcaccatgttgggcaggctggtctaattaattaagctttttaaacaatttaaccaaaacaaaattctggcattagattcagcatatcaggaggtactctttgaagaccattgcatttctttctttttcagtaaaatgaaggggaaaaaaagtgtgttgacctgaattgatttgatatggggaagaggccttttaagatcaagtcctttctttttgttacaaa

SEQ ID NO: 728546 - DNA, 396 bp, Homo sapiens
gcagagtctcactctgtcacccacgctggagtacagtggcacaatcttggctcactacaatctctgcctcccaggttcaagtgattctcctgcctcagcctccctagtaactgggattacaggtgtgtgccaccacgcccaactaacttttgtaattttagtagagacaaggtttcaccatgttgggcaggctggtctaattaattaagctttttaaacaatttaaccaaaacaaaattctggcattagattcagcatatcaggaggtactctttgaagaccattgcatttctttctttttcagtaaaatgaaggggaaaaaaagtgtgttgacctgaattgatttgatatggggaagaggccttttaagatcaagtcctttctttttgttacaaa

SEQ ID NO: 728547 - DNA, 523 bp, Homo sapiens; identical to SEQ ID NO: 300843

SEQ ID NO: 728548 - DNA, 563 bp, Homo sapiens
aaaacgtctttaaatgttttattgtttttacaatcagaatatgaatgttgtaataacacaatctaaattttctgacaaactgcacttattataaggcaggattttcaaacaatttaccacaaagccattttacatggtatatatgccacaagaaaaaagtgtcaggcgaaaaacatgtctacatacaaacagaatacaaaatgagaaattatatatttctgatgacagaaccaaaaatcatgtatttatggtaataacagtttatgatattaggtacataatgtgactgatatttgtcctataaggacacaaaagctatttattatagggtaggaagtgtaactttgcttggattcatgcacagaaaggtaccgataatatataataatggtaatattacgcaagtattaaataacataaaaatctacaaaaggatatctatagcatcaaaaaggtacattagcaaaaataaagatatcccatccaattcttaaccttaaaacatgtcagagaatctccaggactggataaacattagagaaatttactttgaagtagagatg

SEQ ID NO: 728549 - DNA, 658 bp, Homo sapiens
ctttgataagtctggctacagagtaaagttaacattctattatgaagcaaggaataaatccatccctgtatcaattaaaggaagagaatatcaatgtgaaagggggcattagaaaccacgcttcaaaaggattcccacagtgacagaacttctcaatgaaacaccacaccccaagtaacgggggcggggtggtgcaccatagaatctgcccctaggaggcacagccacctccacaccgagggtttccagtttcccattcacataaaagaaacaagtaagagattctgggaggcgctgggctaggaaggcatctactcactgtctccaccaacaattccctcagtaaagcagccattgcccaataatgcttctatttattttacccagaagcagatctattagccagacattctaaaaacacaaacgcttcgttgtgcttggagtaactccaatattgatgccttgctgcagaacgatgctgcaggaatataaagtgagccatgtgctagctgtacccacttatgaagcacactgtcagaaactgtcacatcctggagaccaacccatccgaaagactgagaataaaccccctacgagaacactgtggaaggagggagaaagccaaagataggatgaagcagggccctcctaaagtctc

SEQ ID NO: 728550 - DNA, 685 bp, Homo sapiens
ccagcttctgaccatcctggtggtggtggctgaggacctgggtgtgtacacctgcagcgtgagcaatgcgctggggacagtgaccaccacgggcgtcctccggaaggcagagcgcccctcatcttcgccatgcccggatatcggggaggtgtacgcggatgtggtgctgctggtctggaagcccgtggaatcctacggccctgtgacctacattgtgcagtgcagcctagaaggcggcagctggaccacactggcctccgacatctttgactgctgctacctgaccagcaagctctcccggggtggcacctacaccttccgcacggcatgtgtcagcaaggcaggaatgggtccctacagcagcccctcggagcaagtcctcctgggagggcccagccacctggcctctgaggaggagagccaggggcggtcagcccaacccctgcccagcacaaagaccttcgcattccagacacagatccagaggggccgcttcagcgtggtgcggcaatgctgggagaaggccagcgggcgggcgctggccgccaagatcatcccctaccaccccaaggacaagacagcagtgctgcgcgaatacgaggccctcaagggcctgcgccacccgcacctggcccagctgcacgcagcctacctcagcccccggcacctggtgctcatcttggag

SEQ ID NO: 728551 - DNA, 359 bp, Homo sapiens
tcatgcctggctaatttttctgtatttttggtagagatggggttttgccatgttggccaggctggcctctaactcctggcctcaagtgatctgcccacctcagcctcccaaagtgctgggattacaggcatgagtcaccatgcctacctgagaagggaattttctagtcttcatattcttccctagtcttgacattgatttggaacagacagctagaaagaggagagaaaaacagagtatatatttatgaatataaaatcttgagtgcttgctctgtgggcccgtttgtccctacctttatttagcgtttcagaacccaagttgatggttactaaaaggctgatcgctttaggttcttt

SEQ ID NO: 728552 - DNA, 812 bp, Homo sapiens
  misc_feature (483)..(483): n is a, c, g, or t
  misc_feature (505)..(505): n is a, c, g, or t
  misc_feature (523)..(523): n is a, c, g, or t
cagcgagaactcagatggcgacgtggtggtcagctgctcagccatcagcagcctgcccgacatcgtcttcaccatcaatggagtccagtaccccgtgccacccagtgcctacatcctgcagagcgaggggagctgcatcagtggcttccagggcatgaacctcaacccagccagaaagtacttcccccagtgggaggctcccaccctggtagatgaacagcccctggagaactacctggatatggagtacttcggcactatcggcatcggaactcctgcccaggatttcaccgtcgtctttgacaccggctcctccaacctgtgggtgccctcagtctactgctccagtcttgcctgcaccaaccacaaccgcttcaaccctgaggattcttccacctaccagtccaccagcgagacagtctccatcacctacggcaccggcagcatgacaggcatcctcggatacgacactgtccaggttgnaggcatctctgacaccaatcanatcttcggcctgagcganacggaacctgctccttcctgtatatgctcccttcgatggcatcctggggctggcctaccccagcatatcctcctccgtggcccacaccccgtcttttgacaacatctggaaccaggggcctgtattctcaggacctactactctgtctacctcagcgccgatgaaccagagtggcagcgttggtgatctttggtgacattgactcttcttactacactggaagtctgaactgggtgcctgttaccgtcgagggtactggcagatcacgtggacagcatcccatgaacgg

SEQ ID NO: 728553 - DNA, 320 bp, Homo sapiens; identical to SEQ ID NO: 177147

SEQ ID NO: 728554 - DNA, 417 bp, Homo sapiens; identical to SEQ ID NO: 191187

SEQ ID NO: 728555 - DNA, 494 bp, Homo sapiens
aaacagaactagttgtagtgtaggaaaaagccactgataaaacaggttatattcttaagcctctctttattgagaacccctagaattgcaggataaacttgatcgaagtaaaatccaaatcttaaactaagttctgtgagatttaagagcaataatcaacagttctaagcctaataaagagagctcttaatcagctcagtggtggttaaaaccagctatcttttaaagaagagaaaaaacaaaacacagcaatgccctgtctcttcagaaaattgttttaaaaagttagccaggcatagttagtggcccacgcctgtagtccgagctgtttgggaggttgaggtgggaagattggttgagcccaagattttgaggctgcagtaagccataattgtaccactgcactccagcctgagcgacagagaacaagaccctgtctcaaaaataaagtgggggaaggggtgcaaaattacactgtgagaagccaagaagtt

SEQ ID NO: 728556 - DNA, 183 bp, Homo sapiens
ggctctttgcgtgcgaggcatacatagtcaatgagggagtatcattgagcccaagattttgaggctgcagtaagccataattgtaccactgcactccagcctgagcgacagagaacaagaccctgtctcaaaaataaagtgggggaaggggtgcaaaattacactgtgagaagccaagaagtt

SEQ ID NO: 728557 - DNA, 650 bp, Homo sapiens
gccctctacccagggcataagggactgttagttaagaaaaggttgtaatagccgggcatggtggctctcgcctgtaatcccaggactttggaaggctgaggcgggtggatcacttgaggtcaggagttcaagaccagcctggccaacatggtgaaaccctgtctctactaaaaatacaaaaattagccaggcatggtggcaggcacctgtaatccagctacgcaggaggctgaagcaggataatcgcttgaacccatgaggtggaggttgcagtgagctgagatcatgccactgtgacagagcaagactctatttaaaaaaaaaaagaaagaaagaaagaaaagattgtgtgacatcatagtctgtgtattgcagcccccgtgctgtcctggtgctatggggagtagaagagaggctttgagaggcactgggatggattaaaagagggctggacttgaagccaaggctcacattctacaggtaccatttagtaattgtatgaccttgagcaaatttcatcacctccagagcctctatttcctcatctgtaaaatgaaaggggaggcatctctgctttactcatacaattgttatgagtttcacctaagagcatgagaggtagtttttacacaataaaactctgcacaagt

SEQ ID NO: 728558 - DNA, 340 bp, Homo sapiens; identical to SEQ ID NO: 166953

SEQ ID NO: 728559 - DNA, 724 bp, Homo sapiens
  misc_feature (1)..(1): n is a, c, g, or t
ntctatacgatccccttcgcggttccataaattatcaattatttcaaatatatttattttggcacagttttagtgcaatcaaaatgtggacagtcacaagaagatttttgattgtaagtgagtaaggaatcaattaaaacagtgttctagaagaactgtagtcttgaattttagactcttagaccacaaacgaacctggaaaagtcacacataaactgtacaaaattagataatatgggcttcaaacaaaaacaacagcaagctctctttcggtatgaaaactctacttttttttttttttttttttttttaaagagccagtccttgttttcttgtctctaaaatgtggatggttatactgtatctgcttgccaaattcatagaattcttgtgaaaattaaatggattaatttatgctagagaaatctataaattataaatctctgtacaataatttttcaaaatatggtatgcagataattttcaggggggtgacaaaatttttatgttttaatgattacatatctatatttacttcttgtttatgatgagtgatatgctacttttattgtagcttcctttgaaattaatgtatggaggtaaaaatgtgagtcaacttaaaagaaaagaaaattactaatactataggtaaaatgtggatatgacaaaaatcgtgatgatggtatgtgcacaagcgaagttcagaaaacattgcattgtgaag

SEQ ID NO: 728560 - DNA, 428 bp, Homo sapiens
atcctatagtggagacacctacttttgtccagtacttgcaactgggctcagtggtctctactcttccctgcctacaaagctagaagagaaaggcgaggaatggcactgccttctgaaagatgactggcttctacttccttctcttgtccagttcatgaactccctggagttttgcaatgcagtcatacaggtggctcaccccttgattcgaaatcagcttgtcaattacatttacaatggatttttggtaccagtcttggctcctgctctccataaggtgactgtggaagaggtcatgaccacaactgcatatctggaccttttcctgcgtagcatctccgagccagcactacttgagatcttcctccgttttatcctattgcaccagcacgagaatgtccacatcctagacactcccacgatgatct

SEQ ID NO: 728561 - DNA, 537 bp, Homo sapiens; identical to SEQ ID NO: 179179

SEQ ID NO: 728562 - DNA, 340 bp, Homo sapiens
tgctacgtgtggaatgaggtcattgtgcccgcaggttgtttgtgattagctgtctctaacaattgttcatacaataattgttcattattctcctcaacttggggctctccccaacctggggacccttccttattgttgcttacttagcaggactccacataagggtgtggaaacttcattcactcatatcttcaacacaaattgtaggtagcctgtttttttaaaaaatttattcaacaaatatttagtccaagccactattacttattaccttctcaacttctgtatggacctttaactatctctgacactattcactattcttccacacgtcactatt

SEQ ID NO: 728563 - DNA, 333 bp, Homo sapiens
gggccatccagtgaagccctgggtgagtgacctcagccctgacaaaagactgtgccataagtgggtccagtgcatagagtcagcagcgagcagtgcctcactgagctgtcggggactgtctggaaggtgagtcatcaagccaaagaggatgcttcttgaaccttagggtttgatggagtttgccctgttaggttttagatttacttgggatccagcattcatatattttatttttttcgaatagtggttctttttggaatgggaatgtttatcctatgcctgtctcaccattgtattttgagagttcatgttgtttgattccacaggttcaca

SEQ ID NO: 728564 - DNA, 657 bp, Homo sapiens
gtttatgttacagatttttttcatctgctgagtaaacttgggcatgcttttgactaaaggcatttgaactggctgttaaattcatctctacagttgtcctgccatatccacagggaattggtcccaaaatgtccacggacaccaaaattcatggatgctcctcaagttcggcagtctgccctgaagataggaaaacgtcctatacacacatacaaaaggtcagccgtctgtatctgtgggttccacatcctacaaatgctattatcttccatcccagttggttgaatctgcaggtgcaaaacccgtggatacagaagcccgactgtatttcctttttttctgagacagagtcttgctctgttgcccaggtgggagtgcagtggtgcgacctcagctcaccaccacctccacctcccagattcaagcggttctcctgcctcagtctcccaagtagctgggactacaggtgcacaccaccaatgcctggctaactgtctcactttgttgccgaggctggtctcaaacccttggctcaagtgatcctcctgccttggcttcccaaagtgctgggattacaggtgtgatgcatcacacctgctgtcttttattatataattttcctacctccctgaggtttatctaatattaatacactgt

SEQ ID NO: 728565 - DNA, 714 bp, Homo sapiens
ggggaaaaggcatcaacagcaccagcaaataaagaacagatgctcaattagtgatggtgatggacaagattcctttatttttgaagcaaatgaagcttggaaagattttcatggttctcttcttcgattttatgaaaatggagaactctgtgatgtcacactcaagtcacagcaaactgtacaatggcagttgagtgggttttgaaaaacgtctgaattgtagtgtctacatctaccttctgccttctctctaccctttgaaaaaaaataaatggcatgtttgagaagagagctctattaaaagaggaatattgcaaatggcttcagattctatgagtagtaaacaagctaggaatcacattacaaaggggaaaaggcaacaacagcaccagcaaataaagaacagatcctcaattagtgatggtgatggagaagattcctttatttttgaagcaaatgaagcttggaaagattttcatggttctcttcttcgattttatgaaaatggagaactctgtgatgtcacactcaaggttggctcaaagctaatctcttgtcacaagctggtattggcttgtgttattccctactttagagccatgtttctttctgaaatggctgaagccaagcaaacgctgattgagattagagattttgatggtgatgcaatagaagacttggtaaagtttgtctattcttcacggctcactttga

SEQ ID NO: 728566 - DNA, 591 bp, Homo sapiens
gcccaagccgttgcagcaggaagaacaggtcgagtgatcgaggtcacagcaaactgtacaatggcagttgagtgggttttgaaaaacgtctgaattgtagtgtctacatctaccttctgccttctctctaccctttgaaaaaaaataaatggcatgtttgagaagagagctctattaaaagaggaatattgcaaatggcttcagattctatgagtagtaaacaagctaggaatcacattacaaaggggaaaaggcaacaacagcaccagcaaataaagaacagatcctcaattagtgatggtgatggagaagattcctttatttttgaagcaaatgaagcttggaaagattttcatggttctcttcttcgattttatgaaaatggagaactctgtgatgtcacactcaaggttggctcaaagctaatctcttgtcacaagctggtattggcttgtgttattccctactttagagccatgtttctttctgaaatggctgaagccaagcaaacgctgattgagattagagattttgatggtgatgcaatagaagacttggtaaagtttgtctattcttcacggctcactttga

SEQ ID NO: 728567 - DNA, 752 bp, Homo sapiens
gccctaagcccactgtgtgggcgtcccatctcgtacagtggccgtctccagcctccactgggcccaaataggtaaaaagaaagcctggggaaggaagagccaggaaacctcgggagagtggaatttcaggaatggcaggtcagaactggttccagcatgggtccctttgccttgtgcttagctgagggatttttgttattaattttttttttcctgttcaacactcctaacctcttttgaatttcagttctctttttttatcctgaaggattattttattgtacttttgagggtttttttttttttttttttttgccttgcacaaagtactgactcatgttgctaatggctgtggctgtatgctagttatatgtctcattatcctaccccttaagattgatcatttctgtgttggtttctatttcaaaccagaataggccaggtgggtcaattcatgtatttctgaattcaataatgaggcttccctaccgtgaaatgtacatatcttgtcatgggcggacaggtactaaatagagcctatctatactagattttaaaacaatggatttctccccaaaaaacaacatttccagcagacaatgggctttgtgctccaaatcttgtaattttggttttaaataaatttcatgtaaggaggcagggctaactagactgtcttcttttcagatcataacttgatctctttttaagattatttctgggacttgtacagcctcaggaaacttgggtct

SEQ ID NO: 728568 - DNA, 1001 bp, Homo sapiens
tttttcaaaatttctgtgctacactgtgagttttttcaaattgtcacaaatttcacaaaaaaattcaaatgtatctattgaaaaaaatctgcataacagtgagccttcacagttcaaggctgtgttattcaagggttagttgtatatgttattaaaattcacaatctcacaaggagcttatgctgctttctgacagcccaagaatgcttcccatgctagctcatgtctttatttgatagtaaatatgttccccacctaaaagatgtctgaagcccattagctttactcatggtgccagaagtagtgtaatattttttcttctcttagtgaatttcttttccagaaaaaagagttgaaacttaataagatcaatatagaaggccaaaagttgtcctgagcaatggggttatttcttaaccagatgcttgtctcttctccccagctgcaacattcctctgtactgaatttctttagtgccaagggggataagtggaaagagatgaaaatatagctgctgttgcatggatgaccccattcactctgactccttcagcaagtttcatttttccttataattctcggaggaatgctttgcctaaccacctaccccaacatctaggatttacttttaagatggtcagttaatattgcttgaacataaacttttggccagagtaactggaaatttaagtttattaaacttttacatacttaactatggtctacagggtattttaaactctgccatttgggtttagatctgcttttttacccccacccccaaatgtgcagcagtgtgaaatgtatgagaactaattggataaagtaatttttttaagaccttggtatcttatttctgccagataatagagaacaaatataaaatattcccatgattaaacacaccagatacagcttgaatttttagaatattaaacaggagtgataatgaggaagaacttaggtccctaattacaaaaggtttacacacacacagacac

SEQ ID NO: 728569 - DNA, 815 bp, Homo sapiens
ttaacatgatacgaatcgagctggtacccaggctgcagcttggaatctcatactatttgattatattgatcactctcccaatgtttagtcactttccctcattctttgcagtctttacaacctgacttaactgccattattttgatgtctcatttaaattacttatcttctttgacatttgacctcatcatttccaatgtacttgctatcttcagtatctagctattcaatctcatgatctcagctcaaaccacgttattactcctaattgcaaatttttacaatctaacttttaagtctcctgccttccgaacattaacttctatctttctagttcattccatttactacaacttcaaaaatactgtgactcatcctggatctacaatctcatacaatatacaatacagtccttatacaattctcaatccagttttctccacacatcctttacttctcagcaaacccaccttcaaaacatttaaataatttttactactgctgttatccacccaggccaagccaaaatcatgtctcatctgaatttttatcccccttcctgcttctgcattggccctcaccctcagtctattctcaatacccaagcaagaatataacatagtatcatggagatcatgccactctgctcattcacttttaaggacttctaattccactctgggtcattattgtacagattatacagctctactcatgctccccaccaggcacacctctttgatcacagccctgttgctcttcccctcatgcctctgttctagttttgctgtacccaacacttcctggtgctcttt

SEQ ID NO: 728570 - DNA, 408 bp, Homo sapiens
gtggctggtagagtgtcctattaggcattatactaattatataaatagtgaaatattgcttaagaataattgacctaatttaaaatgatacagatcaagtaacctaaaggccattaggagtttccattttttcatgaaatttggctctaacccttcgccccctggtgataaatacatttggtttattttgtgctcacaggcactttaatgttttgttatgtgtgtgatgcccagatcctttaccctgatgtgacccgcaccagagttcaaggaatactttgcatttatgatactcagaggatcctttaaaaacctaagtgtgttacagtttgaagagcttagaatcacttgatgaagagttgaggaaaaactatacaaaactgatttttgtgagctgaatagttgatt

SEQ ID NO: 728571 - DNA, 1035 bp, Homo sapiens
cagcagtgttggattggacctcggttcctaaggtactgccatctttgatgaaactaccactaccagttcatttaagttttattcttttccattgctgcctttgccctatgtctcagacttcaatgcatggaccaaaagacctttccagtaataaactcttgagatgcttagaattattgccaccctttgatgcctttctactttacttaaaaagaatattctcttttcctgtgattaattctttctcatttctcattttttccttatccttcaagtaaacatacccacaccttattcatcctcaaagcctagccagacactcctgaatctttagatgtatacatcttcagatcaggtggagaaccccatctgtacttagttataaaggaacacttcaaatcaccattgactgtcagctatttatttctgctaccaagaccaatatatgttttttatttcataaagatttttcatagcgagtataaaaactactttgtaattaatgccctcctaaatcaccagttcttcttctctttctgcattctgggctcaaaactttgttggggaaaatggagaaaaatgaagactttacctgccaaaaagcatggtgccaaaccattgatgtgtacctgccatagttacccactttttttttaatcaggaaagaccttattaacacattcatccccaacctctccattacctggtgatctagtttgtgaatgaagatgttcaaaggtgttgattgttttttagtttttgttacaggtctctcctttgttgcaccttaccaagatttccagaccaatggcttattcttattgtctcttttatttattgcttagtttctcctcatttcactgagaagtgccttcaaattctgttgaattccctgaaattctatgaaatctatagatttttcttaacttattctcctgatatttttgcatctgaaagaaaccaaagtacttagttaactgctagactacaaggtgaagtggccttcattgcatatcccagaaagaatccagagca

SEQ ID NO: 728572 - DNA, 166 bp, Homo sapiens
ctagctttgactcctctgtcacttgtccgctttggcatcacctcctcatagaagacttctatgactcccgagattctcaggagcatggcaggtgaagtgctcctcccatgaatggatggagattaaggagtgtgtgttattcatgcttaattcaccagtgcttagc

SEQ ID NO: 728573 - DNA, 622 bp, Homo sapiens
ataaactggaaggtcggattgtcaccatgcccggcctcactgcttcttttcttttagtattaggtgccaactaaaagtgttcaccacgtctgttcaacattgcactagatgttctagccagtgcagtaaggcaaggaaaaacaataaaaggcttccagatcttaagagggaaatgtaaaaatttctttattcaaagataacataactgtctgtgtagaaaatcctacggtatctacaaagaaaactgttttgttaggactaataagtgaattttacatggttacaagataccaaggaaatacagaaaaatccattatatttctgtattctagtaatgaacaatcagaaattgaaattctaaaacagtatcataatctgtcaaaaatatgaaatacttagagataaatttgacaacagatgtgcaagatcgtgcactaaaaaatacaaacattaataaaagaaatgatctaaataaatggagcaagctgctgtattcatagatcagaaaactcaatgttgctatgatataaattctctcaattgatctatagatctcaattaaaatctcagcagacatttcagtagaaattgacatgctggccgggcgcagtggctcacgcct

SEQ ID NO: 728574 - DNA, 407 bp, Homo sapiens
caatttttgtgtgtttagtagagacagggtttcatcctgttggccagtctggtctcgaaccagtcctggcctcaagtgatccgcctgccttggcctcccaaagtgctaggatacaggcatgagccactgcaccctgccagtttttcttttcttctctttttttgagatggagtttcactcttttgcccagcctgtagtacacattttaaatttgggtgtgttgtattggtctatgctgctggagacctgggtctgtacttgactcatccagctgaccactggaaaggatttcataaattcgtgtttgtcttgtcatcagttaagctcctggtatgttaatttaagctggcatgacaggaggagatcaagtatttatggcttggacatggcgagcagtggagaaactc

SEQ ID NO: 728575 - DNA, 526 bp, Homo sapiens
ttacattactgtgacacttttgttgtagtttataaaagtattagtctgcagtggattggaaatttaaaagactggtccttaccatggataatttgagatgcactggaaatgtgtgagttttcaaactgcctaggttcaaatccttactccattccttacaactgtgtgataatgggcaaactgttagcctatgactcagtttctgttcccagaatgggaatagcacctccctcagggttatgtgaagataaagtgagataacttgtttactcaaatatttattcatcatctgctatgtaggatactgttctggatgatgaaaacattagtgcacaagacagagtctctgtactcatagcatattacagtaaatcctagtgaggaagataaataatagaccagtagatatataatatctcatcaggtaacaactgaagaaaaaaaaaactaagtcaaaggtatgaagagtggtggggattgctattttagataaagcagtgaggggaaactcttttgaagatacagc

SEQ ID NO: 728576 - DNA, 413 bp, Homo sapiens
aaggtaaagaaatgaaacaaaaccgttagattattataaaacagagtgacagcttaaatttgtcagtgtataagaattttgtgtatacttgaaaaacactggcctggcaacttagtagaagataaatttgagtgtagtgtttctgtagttgagaatgagtgaatggaaacctgtagaagcaaagcagttaggagaaaatcatctagagaaatgttagccttgagagtgagttccacaaccacttagctgtagtggttgaaggaggaaagaatcctacctccaaattacaactttacaagaaacagaactactaaccttgagaaaccattatttatgccatttatcagcccaaactgaaaatttagtgctcaaagctggcactattgtataacataagttgcccgccaatcgaa

SEQ ID NO: 728577 - DNA, 403 bp, Homo sapiens
gcatttagaggatccaactttatcccaacacaggactctcctaacatgtaggaagagtgagagcaaatctgacagcatggactcatcagggtatgaagatggtttgggtgttttgttttgttttgttttgtttttttgagataggatctcgctgtgttatccaggctggtctcgaactcctgggctcaagggatcctcccacttcagcctcccgagtagctgggacaacaggcatgagccaccccacctggctggtttggggtttttttgtttggtttggggttttgactacttttttgggggaaatgtttgggcaagaacatgtgaggacagggataaggccgacagggggctatctggcatttagaatgtgttgggcgataacatcacgggtaccgagctc

SEQ ID NO: 728578 - DNA, 399 bp, Homo sapiens
ctgacttgaggatcccatcgccaacacaggactctcctaacatgtaggaagagtgagagcaaatctgacagcatggactcatcagggtatgaagatggtttgggtgttttgttttgttttgttttgtttttttgagataggatctcgctgtgttatccaggctggtctcgaactcctgggctcaagggatcctcccacttcagcctcccgagtagctgggacaacaggcatgagccaccccacctggctggtttggggtttttttgtttggtttggggttttgactacttttttgggggaaatgtttgggcaagaacatgtgaggacagggataaggccgacagggggctatctggcatttagaatgtgttgggcgataacatcacgggtaccgagctc

SEQ ID NO: 728579 - DNA, 278 bp, Homo sapiens
tgatccacatttgttgctttctagcatatcataacttccactgcggattttgtcctcacctctgtctttaatgaaagcaaatcttcattgcatttagatggacttttggcctcagaagattactctgtgactgaattaacattttttagttgtggtttttgtcatatttgtttctttgtttagggctaaatgaaaagatcccagaggtcatcagaaaacagcaggtagttcatggaaaaggttcctttgtactaattgaagttacagaaggctgacca

SEQ ID NO: 728580 - DNA, 445 bp, Homo sapiens
cactctagatgatcccctttccccaggggtatcctgcagcctcttctaaatgtgttaccaggagaatgccatcagaatctgggagctcactgagctgtacgaaaaatgtgtgggaaatgaggaggaaagaagaggctggccttttttcttcgtgttacagatactcgtgaacacaaaagccagcggggttcgattatgaaaataacatttcatcctttatgaggaaaaaaatgagtagtttcctttagaggttaaaataaaatatatgctgtattcatgtcacaagagggaaaagcctgaatcataatattttacaccaactgagacaagtatgaaagattttaaggaactccatgttcttctatgaaaatacctgctaagtaagcctttagtaagcctttcattggtttgtgaggaatgcttcatgaagttcttgttttggaaa

SEQ ID NO: 728581 - DNA, 771 bp, Homo sapiens
gggcgactctagagtataccctctctgcctgccagattcccaaaaacacgagatttttctcctatttcagcagttggccacaacttcattgctgggaaaaggccaagaaagaagagagaactctcaccacaacatttcaaagggaatacattgccagaacttggaatactctactggacaaacatttcctccaaggtaaatattaccattgtaccaataaagggacacatcactagaatttttgaatggcagtggtacagcacaaaggtttaattgtttagtctcatacagacctagagtgacataagagaaagagagagagggagagagagagaagaaagcagtgctgttggggtatcctgcagcctcttctaaatgtgttaccaggagaatgccatcagaatctgggagctcactgagctgtacgaaaaatgtgtgggaaatgaggaggaaagaagaggctggccttttttcttcgtgttacagatactcgtgaacacaaaagccagcggggttcgattatgaaaataacatttcatcctttatgaggaaaaaaatgagtagtttcctttagaggttaaaataaaatatatgctgtattcatgtcacaagagggaaaagcctgaatcataatattttacaccaactgagacaagtatgaaagattttaaggaactccatgttcttctatgaaaatacctgctaagtaagcctttagtaagcctttcattggtttgtgaggaatgcttcatgaagttcttgttttggaaa

SEQ ID NO: 728582 - DNA, 339 bp, Homo sapiens
  misc_feature (24)..(24): n is a, c, g, or t
ggtccagttgtgctggtcccaggntcttggtgaggaggtggcaggaggggatggcttatagtacttgtatacaaatttatttgcttgtttattaattacggggtctctctctgttgcccaggctggagtacaggggcacaatcgtaactcctgggctcaagtgatcctcctgcctcaggctcctgagtaacttggattacaggcacatgccaccaggcccagctgattttttcaaattgtctcactatgttgcccaggctggtctccaacttctgggctcaagtgatacttccaccttagcctcctattagtttttcccttacagcaattcctgcaata

SEQ ID NO: 728583 - DNA, 490 bp, Homo sapiens
ctcgggaggcagaggcagaagaatctcttgaacccgggaggcagaggttgcagtgagctgagattgcgccactgcactccagcctgggtgacagagcaagactccgtctcaaaaaataaataaaaataaaaagagtaggactgaaagacacaggcacagggggctgtcacaacagtccaggtgtgaggccctctatgacaaggagggcatgaggctgcaataagatggaaagagaaaggaagggcaggatgcagagaacgtgccagggcaggtgggaaggatttggtgacattggtgtgaagggaaaggaagagggcatcaaagatggttttgagattctgatctggggtgaactggaggataacaagactgtgggaataggaaaggtggcaggaggggatggcttatagtacttgtatacaaatttatttgcttgtttattaattacggggtgacagagcaagactccgtctcaaaaattaattaaaat

SEQ ID NO: 728584 - DNA, 688 bp, Homo sapiens
ctcgggaggcagaggcagaagaatctcttgaacccgggaggcagaggttgcagtgagctgagattgcgccactgcactccagcctgggtgacagagcaagactccgtctcaaaaaataaataaaaataaaaagagtaggactgaaagacacaggcacagggggctgtcacaacagtccaggtgtgaggccctctatgacaaggagggcatgaggctgcaataagatggaaagagaaaggaagggcaggatgcagagaacgtgccagggcaggtgggaaggatttggtgacattggtgtgaagggaaaggaagagggcatcaaagatggttttgagattctgatctggggtgaactggaggataacaagactgtgggaataggaaaggtggcaggaggggatggcttatagtacttgtatacaaatttatttgcttgtttattaattacggggtctctctctgttgcccaggctggagtacaggggcacaatcgtaactcctgggctcaagtgatcctcctgcctcaggctcctgagtaacttggattacaggcacatgccaccaggcccagctgattttttcaaattgtctcactatgttgcccaggctggtctccaacttctgggctcaagtgatacttccaccttagcctcctattagtttttcccttacagcaattcctgcaata

SEQ ID NO: 728585 - DNA, 141 bp, Homo sapiens
  misc_feature (24)..(24): n is a, c, g, or t
ggtccagttgtgctggtcccaggntcttggtgaggaggtggcaggaggggatggcttatagtacttgtatacaaatttatttgcttgtttattaattacggggtgacagagcaagactccgtctcaaaaattaattaaaat

SEQ ID NO: 728586 - DNA, 769 bp, Homo sapiens
acataggagtggtaaccagaaggaaatgaggagtctaaacaaggttagctttttaaaatgggagatattgtagaatgttggtatgccaaaaggagtgattcagtcaagaggaaggaattgatacaaaagaaagaggggctaattatagaagccaagtcccttcgtaggtgtgggagataatccagtgcataattggaggagttagtctttgaaagtatatgaccatggagtggttggctgtgtgtggtggaagaaaagataattagaaatgaggcattcaaagaacttaaaggccatatgttaagatattttaagccttaagactggatgcggttaccaaagatatgagtacagataaacaagaagtccaaggactgagctctagagcactatgatgttaacatgtctgtttatatcacagattatctataaagatatcacttacacctgaaacagtgacagtagtagcaatggggaaaaagacattaattcagaatgagaaggagttagtaaaagattgattgatgactataatgtgaaaaggtatgaggaggtattatctgatggcctgcacttcaaagacaatgagatttttgagggaggaagttttgggtaagaatttcttttagatcagaattcattcattactagactatgcaaatttgccagcatttaagatttcattaaattaatgtgaattaatgcatctaggctctgatcaacagtggcttccaatgtgtcagaaaaagagacacattatatgcctttg

SEQ ID NO: 728587 - DNA, 328 bp, Homo sapiens
gatcattacacagatgtatcaaaatatcactctgtatcccataaatatctacaattattacacgtcaaccaaaaacaaaaggaaaggaaaataaaaagacacaaatattttccttaaaaaaaaaaggccctcaaattggaaaggaagaagttaaactgtctctgtttgcagatgacatgaaaactctaaagactctaccaaaaatgttggcactaataaaaaatttcagcaaagttgcaggatacaaaatcaataacaataaaaaaatgtagcatttccatgttctaacaatgaactatctgaaaaagaaatcaagaaaacaatccca

SEQ ID NO: 728588 - DNA, 883 bp, Homo sapiens
tcggtaccccacccacctgagtccagaaaacttattctagcctccctcccctagccctcattccttttattatttattttctttagaaaacaaattagggaatgaaatatttagaaacaaagatccaggtgctaactgtgggcattgctactgttactcttcttaaaaaaaaaaaaaaaaaaaaaaacttcacatttccaaataaatagtaacactttttaatgtgttcttaacgttttatttggcattaatctaaattcccctctagcacaatgaaaacagaaagagaaagttaaaatttcaagtaaactgaaaacaacaatagtgctcagaggatttttttttaagtgaaaagggatagtgcttaattatgacaaataaaagctaacttgagatgcacatatacagatgcagccacttattttggcgggggacacttcaggaattaaaatttaaatagcgagagatcaaatagatacttggtaaatgtgtctgaattggatgttcccagacacaaaaataaaatgagttattgacagctcttgggagacaacattataaagactagacacgttatttattttaactctatgttctaaattaccattgagtaattgacattcgtatttgactatggtttgtggttaagttcttaattgcaataatgttaaataaaatgtgaagcccaaagcaaacaacaacaaaaattatagcaatacttcaacagaggtaataataatatgctgcatcaatggttcagaatccagcatctacataaaacaagcaacagggtaatgaaattattttcttttcaaatattctggcagagctactttagttttcttaagttatagattgtggtcttaactgcaacttttcgctc

SEQ ID NO: 728589 - DNA, 887 bp, Homo sapiens
tcggtaccccacccacctgagtccagaaaacttattctagcctccctcccctagccctcattccttttattatttattttctttagaaaacaaattagggaatgaaaattttagagaaccaaagaatcccggggctaaactgtgggcattgctactgttactcttcttaaaaaaaaaaaaaaaaaaaaaaacttcacatttccaaataaatagtaacactttttaatgtgttcttaacgttttatttggcattaatctaaattcccctctagcacaatgaaaacagaaagagaaagttaaaatttcaagtaaactgaaaacaacaatagtgctcagaggatttttttttaagtgaaaagggatagtgcttaattatgacaaataaaagctaacttgagatgcacatatacagatgcagccacttattttggcgggggacacttcaggaattaaaatttaaatagcgagagatcaaatagatacttggtaaatgtgtctgaattggatgttcccagacacaaaaataaaatgagttattgacagctcttgggagacaacattataaagactagacacgttatttattttaactctatgttctaaattaccattgagtaattgacattcgtatttgactatggtttgtggttaagttcttaattgcaataatgttaaataaaatgtgaagcccaaagcaaacaacaacaaaaattatagcaatacttcaacagaggtaataataatatgctgcatcaatggttcagaatccagcatctacataaaacaagcaacagggtaatgaaattattttcttttcaaatattctggcagagctactttagttttcttaagttatagattgtggtcttaactgcaacttttcgctc

SEQ ID NO: 728590 - DNA, 2406 bp, Homo sapiens; identical to SEQ ID NO: 398447

SEQ ID NO: 728591 - DNA, 2047 bp, Homo sapiens; identical to SEQ ID NO: 398446

SEQ ID NO: 728592 - DNA, 859 bp, Homo sapiens; identical to SEQ ID NO: 398445

SEQ ID NO: 728593 - DNA, 1274 bp, Homo sapiens
atcgagaccggcggaggcaggtcagagccgtctggaatgcgcgcaccttcaacggtatttggagattattcgcactgaattttctgcccgccaagaacgaataggattgccaagccacaccactttttggagcccgcttattcgcgcctatccaccctctcctgtgccccaggttccctgagcacgggaatcctttccgggcatggccaagtttgttcggtggctcagagcgggaagggaagtgcagttcgacacctgtccagctgctccgcttggagatcaaaggccggctatgggctgagcgacagatttacgggacggtggtacagattaaggcgagaaccctgccggtcctggactcgagttcgcacccaaggaaagcgtacaggtccctggaagcgggtggatgtcggagaggccgaggcagcctgcgctgtggccaggcaggcttggtgggctttagtctcagtatgtgttctttaaagtcttgacaggttattagtaaaggaaggggcaccccagggtcatgaagatgcttctcgctctggcccaagcatgctgaggctcgcttattcctcggccaggcccagtaaaacagctcaagcacagcctggagtcttcccgcatctgcgcgggagtagagtctggctttgggccccgcgtaccccgcagtcgtcggggaccagttcgaggccccgggaagggtttccgcggcagggcgcggagtaaagaggggaagaaggaatcctctccgcgtgatcagtagggcgggcttgtgatactctcacacccaggttccagctcagcccccaaactgctgccccaagaaaacaagttggggagtgtggatttagacataacaacgggtgtgagctgatgtccttacaaccaaaaatattgagactagaaattcagctccgaatccacgaccctcagattgatgcttaatcgcaccctcgactccagaaaagctgccggggacagacatggacaggttttgccaagggttcattaaaatagtctgcactggaataaccggggtgcaagagatcacgtcttcactcagggctttggggatcccctcgtcgccccaggtcagtgggtggggaggagggcaaacttctgtcttttgtttgtgggtgagggatgcgaattgtggcagcagccgagaaaaggggggaaattaattgcagccaattaataattaatcccctttaaacagctttattatctcttctgggcgacagagatttgtctgataaccccctgaagac

SEQ ID NO: 728594 - DNA, 1571 bp, Homo sapiens
ttagcgatggtttgggaacccgggcgctggaaaggcgcgggtgcggagggcggctgagccgcgcggctgcggcaccgtgggcgcgagacccctgccgagaggagcgcgcggacgccgggggaagcgcctcggggcggctggaggcgcagcaccctgggggagccggggcgcgggagagacaaaactgttcgaaccttctctcccttccccacccccagcgcccaaacccggggcgggtgagcgcgacccttgcagcgaccccttgccgagccctgcccgcgcgattactaaggagacgcggcctccggcactgccgtccccgcgccgtttgaaaacggatccatcagcggggtatttggagattattcgcactgaattttctgcccgccaagaacgaataggattgccaagccacaccactttttggagcccgcttattcgcgcctatccaccctctcctgtgccccaggttccctgagcacgggaatcctttccgggcatggccaagtttgttcggtggctcagagcgggaagggaagtgcagttcgacacctgtccagctgctccgcttggagatcaaaggccggctatgggctgagcgacagatttacgggacggtggtacagattaaggcgagaaccctgccggtcctggactcgagttcgcacccaaggaaagcgtacaggtccctggaagcgggtggatgtcggagaggccgaggcagcctgcgctgtggccaggcaggcttggtgggctttagtctcagtatgtgttctttaaagtcttgacaggttattagtaaaggaaggggcaccccagggtcatgaagatgcttctcgctctggcccaagcatgctgaggctcgcttattcctcggccaggcccagtaaaacagctcaagcacagcctggagtcttcccgcatctgcgcgggagtagagtctggctttgggccccgcgtaccccgcagtcgtcggggaccagttcgaggccccgggaagggtttccgcggcagggcgcggagtaaagaggggaagaaggaatcctctccgcgtgatcagtagggcgggcttgtgatactctcacacccaggttccagctcagcccccaaactgctgccccaagaaaacaagttggggagtgtggatttagacataacaacgggtgtgagctgatgtccttacaaccaaaaatattgagactagaaattcagctccgaatccacgaccctcagattgatgcttaatcgcaccctcgactccagaaaagctgccggggacagacatggacaggttttgccaagggttcattaaaatagtctgcactggaataaccggggtgcaagagatcacgtcttcactcagggctttggggatcccctcgtcgccccaggtcagtgggtggggaggagggcaaacttctgtcttttgtttgtgggtgagggatgcgaattgtggcagcagccgagaaaaggggggaaattaattgcagccaattaataattaatcccctttaaacagctttattatctcttctgggcgacagagatttgtctgataaccccctgaagac

SEQ ID NO: 728595 - DNA, 1196 bp, Homo sapiens
gatgtaagaagtgtctttcgcctcctgccatgattctgaggtctccccagccatgtggaactgggaagaatggaaggcaacgcctccgaattaaattttgggacccccagtaaaatttcaggaaagcccagaattgatctgagaatgcacaaactcggcatgtctttgacagagaaggctctgggatttcagcgcgttcattgccctccactaaggagctgctcagcaaaggggcttccctctgctctgctctcgggttcggaatccggagcgagtttccagtgagcggcgcccgctgagcgagtgggaaagcatcgcgcgtgcctttccccgcgcgcgtctgcggatcagcgcaggcgaggtgggtgggaatgcagatgtgaggctggaggcagtagagccatctcgcaatcatgcagcaacaagcaaggcagagctggcatgttgttgactgataacatcgagaagctgctatattaatcctggactgccaatctctgaacttcttggtatattgggaacataaactcttttggttaggcactgcgtcagatttctactacatgcagccaaatgcaatctagattgaaatacccctttacctaagttagctttagctgttctcacaacttgctgtttgtgctccacccacagcatatgagatcccttttgcccacagcaccctccctcagtgtgatgtcgtcccccaaccagtatttgcaggttttttgttttttttttttaatcacaaaactgctctcagtctgccaaatctgttggccctagagccagaagtgctatctcctgggaattttttttttttttgagacaggatcttgctgtcatccaggctggagggcagtggcacacactcctgggctcaagcgatcctcctgcttcagccttccgagtggttgggactataggtgagtgccaccactcccagctaattgtttttattttttgtagagatggggatgggcagggatcttactttttgcccaggctggtcttgaactcctggactcaagccatcctcctgccttgatctctcaaagtgctgggattacaggcatgagccaccatgcccggcctgggatctattcttaacccttgccctagtcagggtggtcttcctgcaggattaagagttagactctgagactctgatatcacaccctggcttggccttccct

SEQ ID NO: 728596 - DNA, 834 bp, Homo sapiens
cgcctcctgccatgattctgaggtctccccagccatgtggaactgaatgcagatgtgaggctggaggcagtagagccatctcgcaatcatgcagcaacaagcaaggcagagctggcatgttgttgactgataacatcgagaagctgctatattaatcctggactgccaatctctgaacttcttgagatgggtcttgctctgtcacccaggctggagtgcagtggcaggattgcagctcactggagcctccaaatcctggcctcaagcgatcctcccgcctcagcctcctgagtatctgggactacaggtgtgcaccaccacactaggctatttattatttttgttattattttgtaaagatagggtctcaccatcttgctcaggctggtcttaaactcctgggctcaagcgatgctccccctgtggcccctcaaagtgcaaagaaaacttaacagctttatccacagtgttattttcttttctcttgatgctgtgaattatccccttgatgtcagtgaagctggggttgttttgaaagacttaaatcaatacttccattgagaaaattggaccttgctggctaaagatgaaaagctggaaccctttccaacagctcacttctgtgggctgagatcaggggcagatggctcagtgtcccttgaggtgatttgattacccgtcacggccggacgcctggtctgggtacgtgaagagaagcacagacaggcagctgtagttacactgtttaaaaaagcagaggtactttttcaattcaatgacaggaaggcaaaatacccctacaggtttgaaggaaaaataatttttttcaaaatg

SEQ ID NO: 728597 - DNA, 1159 bp, Homo sapiens; identical to SEQ ID NO: 343433

SEQ ID NO: 728598 - DNA, 871 bp, Homo sapiens
cgcctcctgccatgattctgaggtctccccagccatgtggaactgaatgcagatgtgaggctggaggcagtagagccatctcgcaatcatgcagcaacaagcaaggcagagctggcatgttgttgactgataacatcgagaagctgctatattaatcctggactgccaatctctgaacttcttggtatattgggaacataaactcttttggttaggcactgcgtcagatttctactacatgcagccaaatgcaatctagattgaaatacccctttacctaagttagctttagctgttctcacaacttgctgtttgtgctccacccacagcatatgagatcccttttgcccacagcaccctccctcagtgtgatgtcgtcccccaaccagtatttgcaggttttttgttttttttttttaatcacaaaactgctctcagtctgccaaatctgttggccctagagccagaagtgctatctcctgggaattttttttttttttgagacaggatcttgctgtcatccaggctggagggcagtggcacacactcctgggctcaagcgatcctcctgcttcagccttccgagtggttgggactataggtgagtgccaccactcccagctaattgtttttattttttgtagagatggggatgggcagggatcttactttttgcccaggctggtcttgaactcctggactcaagccatcctcctgccttgatctctcaaagtgctgggattacaggcatgagccaccatgcccggcctgggatctattcttaacccttgccctagtcagggtggtcttcctgcaggattaagagttagactctgagactctgatatcacaccctggcttggccttccct

SEQ ID NO: 728599 - DNA, 906 bp, Homo sapiens
caccatccatgtaagatgtgacttgctcctccttgccttctgccatgattgtgaggcctccccagccacttggaactgaagcaaacactgctattgccacctttttgcagaggaaggtactgaggtgaagcgacttgcccaaaccctacaaaaataactggccattgcatcaacagcagtgtcaagagcatcatagcatcggatgatgatggacagatgcctctgctgcagagttatgcccccgccccaacactcaattggcaatcatctggggaagtctgtcacaatggtccctgtccacctttcttttagtggtttcagcatctgtcaaaggttcttatttgaatttccatcctatcaagggctgcaaaatggtgactttctgaccgtattattgcatctacattcacagctgacattcttcaataaagaaaagttttccttcatcaagtagaactatttagttatgctgaaattcagtatcttctagaaagacattaaatctttaattatttttaattctcaattctcagaataaccaattcatgtaataatcacctccagtgatggcaaatgagttttgttttggaagacattctcttttctagttatgtacttgcggagttttatatattcatagtcatttttaaatgctcaggttgtctcacacttgccactgtatactcttcaactagaatgctacttaacccagattaaaatccacgtttcccgtgtaaaacaccaacctgacatcacacaaaaatctcgggggcttttttccgggggggggaaaagcgtgtttagacatggggcctgggcctagtggttccccgggcccttttttggcccaaggggagaacgcggggcccccaagggggcgaaattgaaagcccgtacttattccaa

SEQ ID NO: 728600 - DNA, 469 bp, Homo sapiens
caccatccatgtaagatgtgacttgctcctccttgccttctgccatgattgtgaggcctccccagccacttggaactgaagcaaacactgctattgccacctttttgcagaggaaggtactgaggtgaagcgacttgcccaaaccctacaaaaaacagagtcttactctattgcccatgctggagtgcaatggcgctatctccgctcactgcaacctccgcctcccgggttcaagcgattctcctgcctcagcctcccaagtagctgggattacaggcacccaccaccatgcccggctaatttttgtatttttagtagagacggggtttcaccatgttagccaggctggtctcaaactcctgacctcgctatctgcccgcctcagcctctcaaagtgctgggattacaggtgtgagccactgggcctggcctatctttttattccttaataaaaaatgtttgtttcctc

SEQ ID NO: 728601 - DNA, 763 bp, Homo sapiens
gccacactggtcatctacaaagtaatgtttaccaattgacgacagggatttaactagattaaaaagatcaaagtgtggtttttctctgctttttaaaatttcactcggaatttgtagctgggccaattcaacacattttacttttcagtggaattgatttttctaatgtttcagaattttaacatatcaagaagaaaacaacgttctcaaagtctggcctctttagcatgatgtaaacctatagaaatgctttgaaatgtgctggtgtaagataagagttatcttgtatgatttaatcatatgcagtgttgtctcagttacgttcagggaaatgtttctgtgtcattcagagatgcttgatgaattaacacctcccaccctgagtgaggggttgacttgttgggagatgatttgggcttcactgggatctgtgacaggtgggggctgggctgggtgtcacaaagagaatagtggtagaaatcgggcgaaggaagaaagaagttactggtaaaaatcattacaccataaagcaccaaggaaataactgagttaaaataggtgaagtttcttttttcccccctgtaacaggagagttttccttatgataattattctgagacttggtcactttgttctttgaatgtggagctgctgaactcattcagaagccatttgctgcctatcaggactttctgaagaagttcttttgcctctgcctaccctctggcaccctcccatggaggcacaggggacccagagctaa

SEQ ID NO: 728602 - DNA, 715 bp, Homo sapiens
gtgttgctgggtcgacccacgcgtctgtggtttttctctgctttttaaaatttcactcggaatttgtagctgggccaattcaacacattttacttttcagtggaattgatttttctaatgtttcagaattttaacatatcaagaagaaaacaacgttctcaaagtctggcctctttagcatgatgtaaacctatagaaatgctttgaaatgtgctggtgtaagataagagttatcttgtatgatttaatcatatgcagtgttgtctcagttacgttcagggaaatgtttctgtgtcattcagagatgcttgatgaattaacacctcccaccctgagtgaggggttgacttgttgggagatgatttgggcttcactgggatctgtgacaggtgggggctgggctgggtgtcacaaagagaatagtggtagaaatcgggcgaaggaagaaagaagttactggtaaaaatcattacaccataaagcaccaaggaaataactgagttaaaataggtgaagtttcttttttcccccctgtaacaggagagttttccttatgataattattctgagacttggtcactttgttctttgaatgtggagctgctgaactcattcagaagccatttgctgcctatcaggactttctgaagaagttcttttgcctctgcctaccctctggcaccctcccatggaggcacaggggacccagagctaa

SEQ ID NO: 728603 - DNA, 2721 bp, Homo sapiens; identical to SEQ ID NO: 191265

SEQ ID NO: 728604 - DNA, 2618 bp, Homo sapiens; identical to SEQ ID NO: 191266

SEQ ID NO: 728605 - DNA, 689 bp, Homo sapiens
atggatgaagaaactgacgctcaggtgacgtcacctgcctaagtttgcacaggtagtaggttatagagctgggatttgactcagttctgtttgtctccaaagccggggtcctgacaatgacgtgattctgcccaaattctttaaattcaaactgtttgattatttaagaacctgtaaaactggccctgtcttacctctcctgttttctctctcattactttgtagcacaaactcagtttcagccaaggtagtctcactatctccaaatctgttgtatttttttccctctcctaaacttttgttcatatgggttcttctgcttggaatacccttccctctactcactgcttgttcatattttatacatctttgaaggactaggtcaaatatttatttatgtatttatttatttattgagacagggtctcatattgttgccaggctggagtgcagtggcacaattgtggctcactgcagcttcaatctcccaggctcaagggatcctcccgcttcagcctcctgagtagctagggtctactgacatgtgtaccacatgtgcccggctaatttttttttttcttttagtagagatgaggtcttgttgttacccaggctgatctcgaactcgtgagctcaaggattcctcctgccttggcttcccaaagtgctgggattacaggcataagcca

SEQ ID NO: 728606 - DNA, 879 bp, Homo sapiens
ggcaaccctgactcggaccgctcgggagagccccaggagaggccagcgccgcgcagcagccgccccgctgcgcccacctccccggctgctcccggagggctcacaaaggcggtggccgcccgagtggccttctccatccaggcgttcgcgtcctcctccccaccttctctcccgaaggcgaaaatggcagggccaggcgagaacctgggacagcggtggccctagccctgcgatcctcacccctcctgctgggagaggctgcgggctgcccgcggacgatgtggccgcggctgctcccgagcgcatcttcggcccgggtccccgccgccacccctcttctctgctccttccatcccgcccagaggagttgatgccgctgtcgccgccgccgccgctgctgaagccgcggctgatggatgccagggagtgccgcattgcttagcgaccccgcctctgggtttgctggtaggagcggctgctctttcttctttcttgcttggggtccatagaacagatacggacattccatctattcttcacaacgtcctcccctttctcttcgtttctgacatgtgcattcccagaagattatccccgggtccacatcacaacaaaacgcccctgtcgtacaacaccgaggcaaggtcccgaggaaaatgaagggctacacgacaggcacgcagtagcgggagcgaaaagcacggaaacacaccgacgagaaccaagggccacccggcaacgcccctgaagggagcgcccacggcagaaccccccgcagcaacccccaaaaggagaaagcgccacaaggggcgcccgacacggacgaagccgccacgcgagcgcgcagcgacacaaacgccagcaaacaacaggccacac

SEQ ID NO: 728607 - DNA, 691 bp, Homo sapiens
  misc_feature (675)..(675): n is a, c, g, or t
ggcaaccctgactcggaccgctcgggagagccccaggagaggccagcgccgcgcagcagccgccccgctgcgcccacctccccggctgctcccggagggctcacaaaggcggtggccgcccgagtggccttctccatccaggcgttcgcgtcctcctccccaccttctctcccgaaggcgaaaatggcagggccaggcgagaacctgggacagcggtggccctagccctgcgatcctcacccctcctgctgggagaggctgcgggctgcccgcggacgatgtggccgcggctgctcccgagcgcatcttcggcccgggtccccgccgccacccctcttctctgctccttccatcccgcccagaggagttgatgccgctgtcgccgccgccgccgctgctgaagccgcggctgatggatgccagggagtgccgcattgcttagcgaccccgcctctgggtttgctgatgatctctctccgccctggagctcagcgctgaagagctaccttattattaatcagaatttccatcgccacccctggcaggcgtatccttcagcagggaccgcaggaacattcacagtgcaggggctgagatgtgcgtgggggttgtttttgttacatcttggaagagaagagaagaggacagtaccaagatcagaaacacccgtgctangtggaaaatagggtga

SEQ ID NO: 728608 - DNA, 661 bp, Homo sapiens
cagaaatctatagctgtaaatgtctacattaaaaaagaagaaagatctcaaatcaataacctaaccttccagcttggagcagttaagagagagacagagagcgcaaactaaacccaaagcaaacagaagggagaaataataatgttttagagcagagataatacaaaatagagaacagaaaaacaatggagcaaatcaaggaaaccaaaagttggacccttaaaaagacaaataatattggcatgccttacctagactgaccaagagaaaagttactaaattactaaaatcagaaataaaaatgaggacattactactaaccttacagaaataaaaacaattataagaaaatgagcaatgggatatcaacaagtcacataacttagataaaatagacgaattcctagaaacacacaaactaccaacactgactgaaaaagaaacacaaaatctgaaatctataacgagaaaagaatgaatcagtatcaaaaaacttccagataagaaaagtccaggcccagaaagtttcactgatgaattctgccaaatgtttaaagaattaacactaatctctctcaaattcttgaaaaaaaatgaagagaagggagcatctcctaacctattctatgagatcagtattactctgatcctaaagcccgac

SEQ ID NO: 728609 - DNA, 862 bp, Homo sapiens; identical to SEQ ID NO: 538429
  misc_feature (82)..(82): n is a, c, g, or t
  misc_feature (90)..(90): n is a, c, g, or t
  misc_feature (97)..(97): n is a, c, g, or t
  misc_feature (100)..(100): n is a, c, g, or t
  misc_feature (103)..(103): n is a, c, g, or t
  misc_feature (141)..(141): n is a, c, g, or t
  misc_feature (166)..(166): n is a, c, g, or t
  misc_feature (172)..(172): n is a, c, g, or t
  misc_feature (183)..(183): n is a, c, g, or t
  misc_feature (194)..(194): n is a, c, g, or t
  misc_feature (208)..(208): n is a, c, g, or t
  misc_feature (210)..(210): n is a, c, g, or t

SEQ ID NO: 728610 - DNA, 1009 bp, Homo sapiens
aaaaggtggagatccagatctagggggagaattggctaggttcttcatcacagtcactgtcttgagacacataggtggtccatggaaacatttccatgagggatttcagaggggagaatgggcagactgcaaagcctcggtactctaataccaggcaaaaagaagaaagggaacaggcattttagttttcacattgaaacagagtgtatgtgtatggccctatgcaaatgttgttcctggtgaatattcatcaatgtactcatcacacataggtatatttagacagaaaggggtcctcatcacagacacccaaattatgagcacattactgcctcctctcccctagaggtgcttcttccagcctcccccattggaggccagcacaagacgggctctccaacccaatatcttccccttccctccttcctttctgctcaggtggctgagtatacacattgaactcttttgtttcaacttcacgtgtatataggttggtgcaaaagtaactgtggtgttttccattaaaagcaatgtcaagaaccgcaattactttggcaccaacctaatatgtatgcaagtacattctttaacctttccaactcccagtccaagccatcaggctaatttccgcgtggaatttgtggtcactggtttgcagtcctttcatttctggtgtggtcagaagtctccttcagactcttcccgataagattgccataggcttcttcatcacctttagtacctacccacttttgctgggataacactacccaagataaattcaaaaaaattgtcctaagtgttagtgtgtttctgttttggttgaagtctattattgctatatggttttctactgtttctacttgatggaagactattaagggttaagtaggctggcctaggaagctgaccaccatttataacatacttttgagtgggaaaatgcattcagaggcctgtaatcaatacttaggtggactttgggaatatagtatttattttatgagtg

SEQ ID NO: 728611 - DNA, 1033 bp, Homo sapiens; identical to SEQ ID NO: 205317

SEQ ID NO: 728612 - DNA, 1141 bp, Homo sapiens; identical to SEQ ID NO: 205316

SEQ ID NO: 728613 - DNA, 1074 bp, Homo sapiens
ctcttgccactgccatgtaagaagtgcctttcaccacccccacaccctgccatgactctgaggcctccccagccacgtggaactgaggcagctgtatggaggccaatatgcagacaagggaagtaactcaggcattttgggggagaggtacagaaagaagagaaaagactgaactgactgctgttctgaacaagaactgtgactatatgtggtactcccagaatggctggtttcctttcagacccatcaagtggccatcctattggcttggactgaagacccccactggagaactgtctctgcagccttagagagaatccagattttgcatttccagtgcagggattgatggagccttgtgtatcaaagtgccaatttctttctaacaagctagggaggataccgttgacagcagcagaaaggggtagcagtggtttgctttccaaatggtaataagaagggcctggcagtggcaacctgtccacgtatcattaaaaatggactctcctgcttcgtttggaattcaacccaatgaacttgaataaactctggacaatgaccagcacagagccctaagcaggatacagcaagattatttgctttactcatccactgagtacctaccatgtgccaaatactatgctatatgccgagtatacactggcaaataaaacacatatggtccctggagcctatgaatcttaccccatctagccacaaataataaaaataagaagaatctgaaggacaagtgggacagaaatactcaagcagaatgagggtgagattgaagtccctgaacatacagtgccctttacacttgatcttagccaaaaggccgagaagagattacagtgctttttaaaggtagcatttcacccagccaataatcaatccctttggccttcttgaggtgcaaggccacacactcaaattctttaatcaaacaataggctagtgcaaatggagctatttcttaaacccagctgtttacacagcagctacaaatctgttcagaaggaatcccccaccatccacaactgtctatcgagcagatgtgcaagagtatttgtc

SEQ ID NO: 728614 - DNA, 1100 bp, Homo sapiens
ctcttgccactgccatgtaagaagtgcctttcaccacccccacaccctgccatgactctgaggcctccccagccacgtggaactgaggcagctgtatggaggccaatatgcagacaagggaagtaactcaggcattttgggggagaggtacagaaagaagagaaaagactgaactgactgctgttctgaacaagaactgtgactatatgtggtactcccagaatggttggactgaagacccccactggagaactgtctctgcagcctatactgatgacactggccactgtccagggctccaccccaaggagtccaagccccagacatttagccttagagagaatccagattttgcatttccagtgcagggattgatggagccttgtgtatcaaagtgccaatttctttctaacaagctagggaggataccgttgacagcagcagaaaggggtagcagtggtttgctttccaaatggtaataagaagggcctggcagtggcaacctgtccacgtatcattaaaaatggactctcctgcttcgtttggaattcaacccaatgaacttgaataaactctggacaatgaccagcacagagccctaagcaggatacagcaagattatttgctttactcatccactgagtacctaccatgtgccaaatactatgctatatgccgagtatacactggcaaataaaacacatatggtccctggagcctatgaatcttaccccatctagccacaaataataaaaataagaagaatctgaaggacaagtgggacagaaatactcaagcagaatgagggtgagattgaagtccctgaacatacagtgccctttacacttgatcttagccaaaaggccgagaagagattacagtgctttttaaaggtagcatttcacccagccaataatcaatccctttggccttcttgaggtgcaaggccacacactcaaattctttaatcaaacaataggctagtgcaaatggagctatttcttaaacccagctgtttacacagcagctacaaatctgttcagaaggaatcccccaccatccacaactgtctatcgagcagatgtgcaagagtatttgtc

SEQ ID NO: 728615 - DNA, 1063 bp, Homo sapiens
ttcctcacttaggtccttgtccctgaagggccatggagctaagtgaccagcgtgcctctctgggtcccgtgtgtgtggtaggaatcttcacactgccttgctgtgaccgtgggccatcgcatcacctccctgtgccttggtttcctggcctctaaagactgaccttaaggggttgtttgtaaggatgaaggcacaaatgcaagccaagtccttagaattctcagcacatagcaagtgctcaatgaaccgcctggctgctgttcgctggggacacagtcttttgctctctggatgtctgaccgtgccctgtccctgcctcacagggccatccatcagtgctggtgagctgagctcagctgacaagccagcctggcacggagcgctgcccctcctgctggtcccagatccgttctgtccggaggagaatttcttatccccaggagatgcctggcctcgttaggagcctcctcacccgcccgcccgaccaaccctctgactccctccacctcaccgcctgggaacaacaggaagagagcaggacagcagcagaaaggagtgctgcttatgtggctcttctcagaatcaggaggctcccaggccaggaatgtgaaaccattatgcagatgaagaagatgaagcccgagaggttatgaaacagacccaagtgggctcgctcttcagtctcggcataaggaatccggaacctgggcccgtgtccggaactgctgtgcccaggcagcttgcctggaaatcaggtagcgtggggggaccccaaaatccccctgtgacagaccacgaatctgccgtgtttgtgcacctctgttttgcttcccagaaacgaaactttggcaactggagagggatggagtggggcgggtggggtacagcaagatcgggaaacagcaccgtcctcaaatgcctgcagaaggtgagagaaccagcaagtgtgatgaagcacctgtgtgcttcgcagccattaccgtgtctaaatctcacaaccacacagtgaggaagggtttctgtttccattttatagataagcaaactgaggctcagagaaagt

SEQ ID NO: 728616 - DNA, 684 bp, Homo sapiens
agttcccagtcatctttatccctttaagcatggtttattttctgagcaaggagtcatcatgggagaccttttttccttattttgggaggtagatcctcccccaatacctgtaaattgtgccattccaaatcaggattatgaatgctggaaggatgactcttgtggaaccatagggagcttcctgctttggtattttgttatcgtatttgtcctgatgttcttctctagggcttctgtctggatgtctgaggataaaaaggatgaaggcagtgggacaagtacttcagtaaggaaagcaagcaaagagacttcctgtaagcggcaaagcaaagacagtgcctgggatccctcacaaacaatgaagaaaccaaagcagaaccaacttacccctgtaaccaactcagaagtggctttggtcaatgcctatcctgaacaaagacgagccaggcgccagtctcagttcaatgaggtgaaccagaaccaacatgacagtgatactacggagtatggcagtgaagagtctaactcagaagcctcctcgtggaaggagagtgaaagtgaacaccacccatcaccagacagtattaagaggagaaaaatggctcagaggcaaaggaatctgggaagttaccaaatgagcgaaaggcactgcctccactgcaaagccttgagaaccaacgaatg

SEQ ID NO: 728617 - DNA, 721 bp, Homo sapiens; identical to SEQ ID NO: 157842

SEQ ID NO: 728618 - DNA, 630 bp, Homo sapiens; identical to SEQ ID NO: 497230

SEQ ID NO: 728619 - DNA, 2835 bp, Homo sapiens
tttctcatctgtacattgaggcaatgagtaaccacctcataggtggtaagggttagataggaaagaacacagtagaatgcctagcacacctaagtactcaatcaatgttagttctggacctttcatttgaatactgcttgagctctgtgcccaatctccctttcctggatcaaataagatttttctttgttagtgatttctttctagatacttccttggccagaactatagatcctctgtctttcactaactcttgttgatctatggttctcattcaagtttgtgtagaacatccagagatttcagaggcattgtttactcctgatgaacagggaacattgcgtgtccaggaaccagcacactgcctgagttatgggggatattcaggaagcatgctgaaccaatgaatgaatgaacaaatgaatgaatagctgattctgactagtcaaccaaaacttaattagcgccattgcttccagatgttattgcttctcaagggagtatgcaatgtgaaagaagaaagaaaaaaaggcgcctctcaatcgtcaaatatcagtagatgcattggttttattaactgatattttctcttcaaaggaaaggctgattcagtcttgcacaggcgaaagatccagtgggtcccattggttctctgtgtctcctgctacacaaattactgacggaaagatttgagccttcattgtgaccacatccacagagaccatagtccagagagagcaattggggcctgaatcaactgctggtgtttgttgagcagaaacagtgagtctctgacttcccaccaacagctaacctgatatggaagagccaagaggcatctcagatttgtcaacattgctttaatgagctgaggaacttctcatggtaaactcagcagctgagtaacaggatgatggcaccacaacaggtagataatcaaggcaggaggtcaaagcactggagccaacacccgcccaggatggggtataaaagggttgggaggagaggaggcttcagtctcagtggctcagccttcccagctgatctgaagctcctgtgcagcctcagccctacaccatgacctccttctacagcacctcctcatgccctctgggttgcaccatggctcctggagcaagaaatgtctttgtctctcctatcgatgttgggtgccagcctgtggcagaggccaatgctgcctccatgtgcctcttggccaacgtggcacacgccaacagagtccgtgtggggtcgactcccctgggccgccccagcctctgtctgcccccaaccagtcacactgcttgtcccttgccagggacctgtcacattcccggcaacatcggaatctgtggggcctacggcaaaaacaccctgaatggccatgagaaggagaccatgaagttcctgaatgaccgcctggccaactacctggagaaggtgcgccagctggagcaggagaatgcagagctggagaccacactcctcgagaggagcaagtgccacgagtccaccgtgtgccccgactaccagtcctacttccgtacaatcgaggagctccagcagaagatcctgtgcagcaaggctgagaatgccaggctgattgtacaaattgacaacgcgaagctggctgctgatgactttaggatcaagctggagagtgagcgctcccttcaccagctggtggaggcggacaagtgcgggacgcagaagctcctggatgacgcgaccctggccaaggccgacctggaggcccagcaggagtccctgaaggaggagcagctctccctcaagagcaaccacgagcaggaagtaaagattctgaggagtcagctgggggagaagttccggatcgagctggacattgagcccaccattgacctgaacagggtgttgggggagatgcgggctcagtacgaggccatggtggagaccaaccaccaggatgtggaacagtggttccaagcccagtctgaaggcatcagcctgcaggccatgtcctgctccgaggagctgcagtgctgccagtcggagatcctggagctgagatgcacggtgaatgccctggaggtggagcgccaagcccagcacaccttgaaggactgtctgcagaactccctgtgtgaagcggaggaccgctacggcacagagctggcccagatgcagagcctcattagcaacttggaagagcagttgtctgagatccgggccgacctggagcggcagaaccaggagtaccaggtgctgctggacgtgaaggcccggttggagaacgagattgccacataccggaaccttactcccctgcaatccctgttccacgcctgcctcctgtacttcttgtccaagctgtggccctgtcaccggtgggtctccctctggccatggagccagcatggggagatgattctgaaggcccgagttaggagattgaggctggttgcactggggtcaggagtgccctcaccttgcccagtcttccttcaagactagactcactgaggcattttccctaaatcaaccggtagcagatacttccaaggagtggctccctgcctatgcctctaagctgtattttttgttgttgctaaaatgttgtaattatcttccatgaaagcaattatttttcctggtgtctcttcttggtacttttagttctattccagtgtttcagaatctccaaaaatgtaactgggttccctgcattaaatggtcaataaacctccttcctgcaccaagtgctgtctccccggtgttggttgtatgtgagatgtcggagagtcctggtcgtcaggtcctgtgtcctcactggctctgacatcttgcttccaggag

SEQ ID NO: 728620 - DNA, 411 bp, Homo sapiens
gacaggggatacccggcgactcctacttccgtacaatcgaggagctccagcagaaggtgaggtgtgggatcgcctgggcatgctgggtctgagaaggcagaagccttcgcaggaggaatctgcataaggtccagagagctttgggttcttggtttctcttggacatgagcgtaaataccacacatggagtgggagcttagagtatggtgctttgtgtgtgaaccgtctttccgttttcctcagatcctgtgcagcaaggctgagaatgccaggctgattgtacaaattgacaacgcgaagctggctgctgatgactttaggatcaagtaagtcaggatgaggagggtcagtgtgacttctctcctgctgtatttccaagggcccgccccattactcagtctatattgtagg

SEQ ID NO: 728621 - DNA, 598 bp, Homo sapiens; identical to SEQ ID NO: 338675

SEQ ID NO: 728622 - DNA, 1924 bp, Homo sapiens
tttctcatctgtacattgaggcaatgagtaaccacctcataggtggtaagggttagataggaaagaacacagtagaatgcctagcacacctaagtactcaatcaatgttagttctggacctttcatttgaatactgcttgagctctgtgcccaatctccctttcctggatcaaataagatttttctttgttagtgatttctttctagatacttccttggccagaactatagatcctctgtctttcactaactcttgttgatctatggttctcattcaagtttgtgtagaacatccagagatttcagaggcattgtttactcctgatgaacagggaacattgcgtgtccaggaaccagcacactgcctgagttatgggggatattcaggaagcatgctgaaccaatgaatgaatgaacaaatgaatgaatagctgattctgactagtcaaccaaaacttaattagcgccattgcttccagatgttattgcttctcaagggagtatgcaatgtgaaagaagaaagaaaaaaaggcgcctctcaatcgtcaaatatcagtagatgcattggttttattaactgatattttctcttcaaaggaaaggctgattcagtcttgcacaggcgaaagatccagtgggtcccattggttctctgtgtctcctgctacacaaattactgacggaaagatttgagccttcattgtgaccacatccacagagaccatagtccagagagagcaattggggcctgaatcaactgctggtgtttgttgagcagaaacagtgagtctctgacttcccaccaacagctaacctgatatggaagagccaagaggcatctcagatttgtcaacattgctttaatgagctgaggaacttctcatggtaaactcagcagctgagtaacaggatgatggcaccacaacaggtagataatcaaggcaggaggtcaaagcactggagccaacacccgcccaggatggggtataaaagggttgggaggagaggaggcttcagtctcagtggctcagccttcccagctgatctgaagctcctgtgcagcctcagccctacaccatgacctccttctacagcacctcctcatgccctctgggttgcaccatggctcctggagcaagaaatgtctttgtctctcctatcgatgttgggtgccagcctgtggcagaggccaatgctgcctccatgtgcctcttggccaacgtggcacacgccaacagagtccgtgtggggtcgactcccctgggccgccccagcctctgtctgcccccaaccagtcacactgcttgtcccttgccagggacctgtcacattcccggcaacatcggaatctgtggggcctacggcaaaaacaccctgaatggccatgagaaggagaccatgaagttcctgaatgaccgcctggccaactacctggagaaggtgcgccagctggagcaggagaatgcagagctggagaccacactcctcgagaggagcaagtgccacgagtccaccgtgtgccccgactaccagtcctacttccgtacaatcgaggagctccagcagaaggtgaggtgtgggatcgcctgggcatgctgggtctgagaaggcagaagccttcgcaggaggaatctgcataaggtccagagagctttgggttcttggtttctcttggacatgagcgtaaataccacacatggagtgggagcttagagtatggtgctttgtgtgtgaaccgtctttccgttttcctcagatcctgtgcagcaaggctgagaatgccaggctgattgtacaaattgacaacgcgaagctggctgctgatgactttaggatcaagtaagtcaggatgaggagggtcagtgtgacttctctcctgctgtatttccaagggcccgccccattactcagtctatattgtagg

SEQ ID NO: 728623 - DNA, 2445 bp, Homo sapiens
tttctcatctgtacattgaggcaatgagtaaccacctcataggtggtaagggttagataggaaagaacacagtagaatgcctagcacacctaagtactcaatcaatgttagttctggacctttcatttgaatactgcttgagctctgtgcccaatctccctttcctggatcaaataagatttttctttgttagtgatttctttctagatacttccttggccagaactatagatcctctgtctttcactaactcttgttgatctatggttctcattcaagtttgtgtagaacatccagagatttcagaggcattgtttactcctgatgaacagggaacattgcgtgtccaggaaccagcacactgcctgagttatgggggatattcaggaagcatgctgaaccaatgaatgaatgaacaaatgaatgaatagctgattctgactagtcaaccaaaacttaattagcgccattgcttccagatgttattgcttctcaagggagtatgcaatgtgaaagaagaaagaaaaaaaggcgcctctcaatcgtcaaatatcagtagatgcattggttttattaactgatattttctcttcaaaggaaaggctgattcagtcttgcacaggcgaaagatccagtgggtcccattggttctctgtgtctcctgctacacaaattactgacggaaagatttgagccttcattgtgaccacatccacagagaccatagtccagagagagcaattggggcctgaatcaactgctggtgtttgttgagcagaaacagtgagtctctgacttcccaccaacagctaacctgatatggaagagccaagaggcatctcagatttgtcaacattgctttaatgagctgaggaacttctcatggtaaactcagcagctgagtaacaggatgatggcaccacaacaggtagataatcaaggcaggaggtcaaagcactggagccaacacccgcccaggatggggtataaaagggttgggaggagaggaggcttcagtctcagtggctcagccttcccagctgatctgaagctcctgtgcagcctcagccctacaccatgacctccttctacagcacctcctcatgccctctgggttgcaccatggctcctggagcaagaaatgtctttgtctctcctatcgatgttgggtgccagcctgtggcagaggccaatgctgcctccatgtgcctcttggccaacgtggcacacgccaacagagtccgtgtggggtcgactcccctgggccgccccagcctctgtctgcccccaaccagtcacactgcttgtcccttgccagggacctgtcacattcccggcaacatcggaatctgtggggcctacggcaaaaacaccctgaatggccatgagaaggagaccatgaagttcctgaatgaccgcctggccaactacctggagaaggtgcgccagctggagcaggagaatgcagagctggagaccacactcctcgagaggagcaagtgccacgagtccaccgtgtgccccgactaccagtcctacttccgtacaatcgaggagctccagcagaaggtgaggtgtgggatcgcctgggcatgctgggtctgagaaggcagaagccttcgcaggaggaatctgcataaggtccagagagctttgggttcttggtttctcttggacatgagcgtaaataccacacatggagtgggagcttagagtatggtgctttgtgtgtgaaccgtctttccgttttcctcagatcctgtgcagcaaggctgagaatgccaggctgattgtacaaattgacaacgcgaagctggctgctgatgactttaggatcaagctggagagtgagcgctcccttcaccagctggtggaggcggacaagtgcgggacgcagaagctcctggatgacgcgaccctggccaaggccgacctggaggcccagcaggagtccctgaaggaggagcagctctccctcaagagcaaccacgagcaggaagtaaagattctgaggagtcagctgggggagaagttccggatcgagctggacattgagcccaccattgacctgaacagggtgttgggggagatgcgggctcagtacgaggccatggtggagaccaaccaccaggatgtggaacagtggttccaagcccaggtgagtgggggttacagagccagggagtacctggcctccatctgagcagggaggtgactgtgtttctctgtgctccagtctgaaggcatcagcctgcaggccatgtcctgctccgaggagctgcagtgctgccagtcggagatcctggagctgagatgcacggtgaatgccctggaggtggagcgccaagcccagcacaccttggtacgtgtccttcaccctcactgcactgcaaatgccccatgccatgtcctggtagtagcatctcttaaagtctcacaaatcag

SEQ ID NO: 728624 - DNA, 2605 bp, Homo sapiens
tttctcatctgtacattgaggcaatgagtaaccacctcataggtggtaagggttagataggaaagaacacagtagaatgcctagcacacctaagtactcaatcaatgttagttctggacctttcatttgaatactgcttgagctctgtgcccaatctccctttcctggatcaaataagatttttctttgttagtgatttctttctagatacttccttggccagaactatagatcctctgtctttcactaactcttgttgatctatggttctcattcaagtttgtgtagaacatccagagatttcagaggcattgtttactcctgatgaacagggaacattgcgtgtccaggaaccagcacactgcctgagttatgggggatattcaggaagcatgctgaaccaatgaatgaatgaacaaatgaatgaatagctgattctgactagtcaaccaaaacttaattagcgccattgcttccagatgttattgcttctcaagggagtatgcaatgtgaaagaagaaagaaaaaaaggcgcctctcaatcgtcaaatatcagtagatgcattggttttattaactgatattttctcttcaaaggaaaggctgattcagtcttgcacaggcgaaagatccagtgggtcccattggttctctgtgtctcctgctacacaaattactgacggaaagatttgagccttcattgtgaccacatccacagagaccatagtccagagagagcaattggggcctgaatcaactgctggtgtttgttgagcagaaacagtgagtctctgacttcccaccaacagctaacctgatatggaagagccaagaggcatctcagatttgtcaacattgctttaatgagctgaggaacttctcatggtaaactcagcagctgagtaacaggatgatggcaccacaacaggtagataatcaaggcaggaggtcaaagcactggagccaacacccgcccaggatggggtataaaagggttgggaggagaggaggcttcagtctcagtggctcagccttcccagctgatctgaagctcctgtgcagcctcagccctacaccatgacctccttctacagcacctcctcatgccctctgggttgcaccatggctcctggagcaagaaatgtctttgtctctcctatcgatgttgggtgccagcctgtggcagaggccaatgctgcctccatgtgcctcttggccaacgtggcacacgccaacagagtccgtgtggggtcgactcccctgggccgccccagcctctgtctgcccccaaccagtcacactgcttgtcccttgccagggacctgtcacattcccggcaacatcggaatctgtggggcctacggcaaaaacaccctgaatggccatgagaaggagaccatgaagttcctgaatgaccgcctggccaactacctggagaaggtgcgccagctggagcaggagaatgcagagctggagaccacactcctcgagaggagcaagtgccacgagtccaccgtgtgccccgactaccagtcctacttccgtacaatcgaggagctccagcagaaggtgaggtgtgggatcgcctgggcatgctgggtctgagaaggcagaagccttcgcaggaggaatctgcataaggtccagagagctttgggttcttggtttctcttggacatgagcgtaaataccacacatggagtgggagcttagagtatggtgctttgtgtgtgaaccgtctttccgttttcctcagatcctgtgcagcaaggctgagaatgccaggctgattgtacaaattgacaacgcgaagctggctgctgatgactttaggatcaagctggagagtgagcgctcccttcaccagctggtggaggcggacaagtgcgggacgcagaagctcctggatgacgcgaccctggccaaggccgacctggaggcccagcaggagtccctgaaggaggagcagctctccctcaagagcaaccacgagcaggaagtaaagattctgaggagtcagctgggggagaagttccggatcgagctggacattgagcccaccattgacctgaacagggtgttgggggagatgcgggctcagtacgaggccatggtggagaccaaccaccaggatgtggaacagtggttccaagcccaggtgagtgggggttacagagccagggagtacctggcctccatctgagcagggaggtgactgtgtttctctgtgctccagtctgaaggcatcagcctgcaggccatgtcctgctccgaggagctgcagtgctgccagtcggagatcctggagctgagatgcacggtgaatgccctggaggtggagcgccaagcccagcacaccttgaaggactgtctgcagaactccctgtgtgaagcggaggaccgctacggcacagagctggcccagatgcagagcctcattagcaacttggaagagcagttgtctgagatccgggccgacctggagcggcagaaccaggagtaccaggtgctgctggacgtgaaggcccggttggagaacgagattgccacataccggaaccttctggagagcgaggactgcaagtacgtgtgatctgggcaattc

SEQ ID NO: 728625 - DNA, 3100 bp, Homo sapiens
tttctcatctgtacattgaggcaatgagtaaccacctcataggtggtaagggttagataggaaagaacacagtagaatgcctagcacacctaagtactcaatcaatgttagttctggacctttcatttgaatactgcttgagctctgtgcccaatctccctttcctggatcaaataagatttttctttgttagtgatttctttctagatacttccttggccagaactatagatcctctgtctttcactaactcttgttgatctatggttctcattcaagtttgtgtagaacatccagagatttcagaggcattgtttactcctgatgaacagggaacattgcgtgtccaggaaccagcacactgcctgagttatgggggatattcaggaagcatgctgaaccaatgaatgaatgaacaaatgaatgaatagctgattctgactagtcaaccaaaacttaattagcgccattgcttccagatgttattgcttctcaagggagtatgcaatgtgaaagaagaaagaaaaaaaggcgcctctcaatcgtcaaatatcagtagatgcattggttttattaactgatattttctcttcaaaggaaaggctgattcagtcttgcacaggcgaaagatccagtgggtcccattggttctctgtgtctcctgctacacaaattactgacggaaagatttgagccttcattgtgaccacatccacagagaccatagtccagagagagcaattggggcctgaatcaactgctggtgtttgttgagcagaaacagtgagtctctgacttcccaccaacagctaacctgatatggaagagccaagaggcatctcagatttgtcaacattgctttaatgagctgaggaacttctcatggtaaactcagcagctgagtaacaggatgatggcaccacaacaggtagataatcaaggcaggaggtcaaagcactggagccaacacccgcccaggatggggtataaaagggttgggaggagaggaggcttcagtctcagtggctcagccttcccagctgatctgaagctcctgtgcagcctcagccctacaccatgacctccttctacagcacctcctcatgccctctgggttgcaccatggctcctggagcaagaaatgtctttgtctctcctatcgatgttgggtgccagcctgtggcagaggccaatgctgcctccatgtgcctcttggccaacgtggcacacgccaacagagtccgtgtggggtcgactcccctgggccgccccagcctctgtctgcccccaaccagtcacactgcttgtcccttgccagggacctgtcacattcccggcaacatcggaatctgtggggcctacggcaaaaacaccctgaatggccatgagaaggagaccatgaagttcctgaatgaccgcctggccaactacctggagaaggtgcgccagctggagcaggagaatgcagagctggagaccacactcctcgagaggagcaagtgccacgagtccaccgtgtgccccgactaccagtcctacttccgtacaatcgaggagctccagcagaaggtgaggtgtgggatcgcctgggcatgctgggtctgagaaggcagaagccttcgcaggaggaatctgcataaggtccagagagctttgggttcttggtttctcttggacatgagcgtaaataccacacatggagtgggagcttagagtatggtgctttgtgtgtgaaccgtctttccgttttcctcagatcctgtgcagcaaggctgagaatgccaggctgattgtacaaattgacaacgcgaagctggctgctgatgactttaggatcaagctggagagtgagcgctcccttcaccagctggtggaggcggacaagtgcgggacgcagaagctcctggatgacgcgaccctggccaaggccgacctggaggcccagcaggagtccctgaaggaggagcagctctccctcaagagcaaccacgagcaggaagtaaagattctgaggagtcagctgggggagaagttccggatcgagctggacattgagcccaccattgacctgaacagggtgttgggggagatgcgggctcagtacgaggccatggtggagaccaaccaccaggatgtggaacagtggttccaagcccaggtgagtgggggttacagagccagggagtacctggcctccatctgagcagggaggtgactgtgtttctctgtgctccagtctgaaggcatcagcctgcaggccatgtcctgctccgaggagctgcagtgctgccagtcggagatcctggagctgagatgcacggtgaatgccctggaggtggagcgccaagcccagcacaccttgaaggactgtctgcagaactccctgtgtgaagcggaggaccgctacggcacagagctggcccagatgcagagcctcattagcaacttggaagagcagttgtctgagatccgggccgacctggagcggcagaaccaggagtaccaggtgctgctggacgtgaaggcccggttggagaacgagattgccacataccggaaccttactcccctgcaatccctgttccacgcctgcctcctgtacttcttgtccaagctgtggccctgtcaccggtgggtctccctctggccatggagccagcatggggagatgattctgaaggcccgagttaggagattgaggctggttgcactggggtcaggagtgccctcaccttgcccagtcttccttcaagactagactcactgaggcattttccctaaatcaaccggtagcagatacttccaaggagtggctccctgcctatgcctctaagctgtattttttgttgttgctaaaatgttgtaattatcttccatgaaagcaattatttttcctggtgtctcttcttggtacttttagttctattccagtgtttcagaatctccaaaaatgtaactgggttccctgcattaaatggtcaataaacctccttcctgcaccaagtgctgtctccccggtgttggttgtatgtgagatgtcggagagtcctggtcgtcaggtcctgtgtcctcactggctctgacatcttgcttccaggag

SEQ ID NO: 728626 - DNA, 2367 bp, Homo sapiens
tttctcatctgtacattgaggcaatgagtaaccacctcataggtggtaagggttagataggaaagaacacagtagaatgcctagcacacctaagtactcaatcaatgttagttctggacctttcatttgaatactgcttgagctctgtgcccaatctccctttcctggatcaaataagatttttctttgttagtgatttctttctagatacttccttggccagaactatagatcctctgtctttcactaactcttgttgatctatggttctcattcaagtttgtgtagaacatccagagatttcagaggcattgtttactcctgatgaacagggaacattgcgtgtccaggaaccagcacactgcctgagttatgggggatattcaggaagcatgctgaaccaatgaatgaatgaacaaatgaatgaatagctgattctgactagtcaaccaaaacttaattagcgccattgcttccagatgttattgcttctcaagggagtatgcaatgtgaaagaagaaagaaaaaaaggcgcctctcaatcgtcaaatatcagtagatgcattggttttattaactgatattttctcttcaaaggaaaggctgattcagtcttgcacaggcgaaagatccagtgggtcccattggttctctgtgtctcctgctacacaaattactgacggaaagatttgagccttcattgtgaccacatccacagagaccatagtccagagagagcaattggggcctgaatcaactgctggtgtttgttgagcagaaacagtgagtctctgacttcccaccaacagctaacctgatatggaagagccaagaggcatctcagatttgtcaacattgctttaatgagctgaggaacttctcatggtaaactcagcagctgagtaacaggatgatggcaccacaacaggtagataatcaaggcaggaggtcaaagcactggagccaacacccgcccaggatggggtataaaagggttgggaggagaggaggcttcagtctcagtggctcagccttcccagctgatctgaagctcctgtgcagcctcagccctacaccatgacctccttctacagcacctcctcatgccctctgggttgcaccatggctcctggagcaagaaatgtctttgtctctcctatcgatgttgggtgccagcctgtggcagaggccaatgctgcctccatgtgcctcttggccaacgtggcacacgccaacagagtccgtgtggggtcgactcccctgggccgccccagcctctgtctgcccccaaccagtcacactgcttgtcccttgccagggacctgtcacattcccggcaacatcggaatctgtggggcctacggcaaaaacaccctgaatggccatgagaaggagaccatgaagttcctgaatgaccgcctggccaactacctggagaaggtgcgccagctggagcaggagaatgcagagctggagaccacactcctcgagaggagcaagtgccacgagtccaccgtgtgccccgactaccagtcctacttccgtacaatcgaggagctccagcagaaggtgaggtgtgggatcgcctgggcatgctgggtctgagaaggcagaagccttcgcaggaggaatctgcataaggtccagagagctttgggttcttggtttctcttggacatgagcgtaaataccacacatggagtgggagcttagagtatggtgctttgtgtgtgaaccgtctttccgttttcctcagatcctgtgcagcaaggctgagaatgccaggctgattgtacaaattgacaacgcgaagctggctgctgatgactttaggatcaagctggagagtgagcgctcccttcaccagctggtggaggcggacaagtgcgggacgcagaagctcctggatgacgcgaccctggccaaggccgacctggaggcccagcaggagtccctgaaggaggagcagctctccctcaagagcaaccacgagcaggaagtaaagattctgaggagtcagctgggggagaagttccggatcgagctggacattgagcccaccattgacctgaacagggtgttgggggagatgcgggctcagtacgaggccatggtggagaccaaccaccaggatgtggaacagtggttccaagcccagtctgaaggcatcagcctgcaggccatgtcctgctccgaggagctgcagtgctgccagtcggagatcctggagctgagatgcacggtgaatgccctggaggtggagcgccaagcccagcacaccttggtacgtgtccttcaccctcactgcactgcaaatgccccatgccatgtcctggtagtagcatctcttaaagtctcacaaatcag

SEQ ID NO: 728627 - DNA, 2527 bp, Homo sapiens
tttctcatctgtacattgaggcaatgagtaaccacctcataggtggtaagggttagataggaaagaacacagtagaatgcctagcacacctaagtactcaatcaatgttagttctggacctttcatttgaatactgcttgagctctgtgcccaatctccctttcctggatcaaataagatttttctttgttagtgatttctttctagatacttccttggccagaactatagatcctctgtctttcactaactcttgttgatctatggttctcattcaagtttgtgtagaacatccagagatttcagaggcattgtttactcctgatgaacagggaacattgcgtgtccaggaaccagcacactgcctgagttatgggggatattcaggaagcatgctgaaccaatgaatgaatgaacaaatgaatgaatagctgattctgactagtcaaccaaaacttaattagcgccattgcttccagatgttattgcttctcaagggagtatgcaatgtgaaagaagaaagaaaaaaaggcgcctctcaatcgtcaaatatcagtagatgcattggttttattaactgatattttctcttcaaaggaaaggctgattcagtcttgcacaggcgaaagatccagtgggtcccattggttctctgtgtctcctgctacacaaattactgacggaaagatttgagccttcattgtgaccacatccacagagaccatagtccagagagagcaattggggcctgaatcaactgctggtgtttgttgagcagaaacagtgagtctctgacttcccaccaacagctaacctgatatggaagagccaagaggcatctcagatttgtcaacattgctttaatgagctgaggaacttctcatggtaaactcagcagctgagtaacaggatgatggcaccacaacaggtagataatcaaggcaggaggtcaaagcactggagccaacacccgcccaggatggggtataaaagggttgggaggagaggaggcttcagtctcagtggctcagccttcccagctgatctgaagctcctgtgcagcctcagccctacaccatgacctccttctacagcacctcctcatgccctctgggttgcaccatggctcctggagcaagaaatgtctttgtctctcctatcgatgttgggtgccagcctgtggcagaggccaatgctgcctccatgtgcctcttggccaacgtggcacacgccaacagagtccgtgtggggtcgactcccctgggccgccccagcctctgtctgcccccaaccagtcacactgcttgtcccttgccagggacctgtcacattcccggcaacatcggaatctgtggggcctacggcaaaaacaccctgaatggccatgagaaggagaccatgaagttcctgaatgaccgcctggccaactacctggagaaggtgcgccagctggagcaggagaatgcagagctggagaccacactcctcgagaggagcaagtgccacgagtccaccgtgtgccccgactaccagtcctacttccgtacaatcgaggagctccagcagaaggtgaggtgtgggatcgcctgggcatgctgggtctgagaaggcagaagccttcgcaggaggaatctgcataaggtccagagagctttgggttcttggtttctcttggacatgagcgtaaataccacacatggagtgggagcttagagtatggtgctttgtgtgtgaaccgtctttccgttttcctcagatcctgtgcagcaaggctgagaatgccaggctgattgtacaaattgacaacgcgaagctggctgctgatgactttaggatcaagctggagagtgagcgctcccttcaccagctggtggaggcggacaagtgcgggacgcagaagctcctggatgacgcgaccctggccaaggccgacctggaggcccagcaggagtccctgaaggaggagcagctctccctcaagagcaaccacgagcaggaagtaaagattctgaggagtcagctgggggagaagttccggatcgagctggacattgagcccaccattgacctgaacagggtgttgggggagatgcgggctcagtacgaggccatggtggagaccaaccaccaggatgtggaacagtggttccaagcccagtctgaaggcatcagcctgcaggccatgtcctgctccgaggagctgcagtgctgccagtcggagatcctggagctgagatgcacggtgaatgccctggaggtggagcgccaagcccagcacaccttgaaggactgtctgcagaactccctgtgtgaagcggaggaccgctacggcacagagctggcccagatgcagagcctcattagcaacttggaagagcagttgtctgagatccgggccgacctggagcggcagaaccaggagtaccaggtgctgctggacgtgaaggcccggttggagaacgagattgccacataccggaaccttctggagagcgaggactgcaagtacgtgtgatctgggcaattc

SEQ ID NO: 728628 - DNA, 3022 bp, Homo sapiens
tttctcatctgtacattgaggcaatgagtaaccacctcataggtggtaagggttagataggaaagaacacagtagaatgcctagcacacctaagtactcaatcaatgttagttctggacctttcatttgaatactgcttgagctctgtgcccaatctccctttcctggatcaaataagatttttctttgttagtgatttctttctagatacttccttggccagaactatagatcctctgtctttcactaactcttgttgatctatggttctcattcaagtttgtgtagaacatccagagatttcagaggcattgtttactcctgatgaacagggaacattgcgtgtccaggaaccagcacactgcctgagttatgggggatattcaggaagcatgctgaaccaatgaatgaatgaacaaatgaatgaatagctgattctgactagtcaaccaaaacttaattagcgccattgcttccagatgttattgcttctcaagggagtatgcaatgtgaaagaagaaagaaaaaaaggcgcctctcaatcgtcaaatatcagtagatgcattggttttattaactgatattttctcttcaaaggaaaggctgattcagtcttgcacaggcgaaagatccagtgggtcccattggttctctgtgtctcctgctacacaaattactgacggaaagatttgagccttcattgtgaccacatccacagagaccatagtccagagagagcaattggggcctgaatcaactgctggtgtttgttgagcagaaacagtgagtctctgacttcccaccaacagctaacctgatatggaagagccaagaggcatctcagatttgtcaacattgctttaatgagctgaggaacttctcatggtaaactcagcagctgagtaacaggatgatggcaccacaacaggtagataatcaaggcaggaggtcaaagcactggagccaacacccgcccaggatggggtataaaagggttgggaggagaggaggcttcagtctcagtggctcagccttcccagctgatctgaagctcctgtgcagcctcagccctacaccatgacctccttctacagcacctcctcatgccctctgggttgcaccatggctcctggagcaagaaatgtctttgtctctcctatcgatgttgggtgccagcctgtggcagaggccaatgctgcctccatgtgcctcttggccaacgtggcacacgccaacagagtccgtgtggggtcgactcccctgggccgccccagcctctgtctgcccccaaccagtcacactgcttgtcccttgccagggacctgtcacattcccggcaacatcggaatctgtggggcctacggcaaaaacaccctgaatggccatgagaaggagaccatgaagttcctgaatgaccgcctggccaactacctggagaaggtgcgccagctggagcaggagaatgcagagctggagaccacactcctcgagaggagcaagtgccacgagtccaccgtgtgccccgactaccagtcctacttccgtacaatcgaggagctccagcagaaggtgaggtgtgggatcgcctgggcatgctgggtctgagaaggcagaagccttcgcaggaggaatctgcataaggtccagagagctttgggttcttggtttctcttggacatgagcgtaaataccacacatggagtgggagcttagagtatggtgctttgtgtgtgaaccgtctttccgttttcctcagatcctgtgcagcaaggctgagaatgccaggctgattgtacaaattgacaacgcgaagctggctgctgatgactttaggatcaagctggagagtgagcgctcccttcaccagctggtggaggcggacaagtgcgggacgcagaagctcctggatgacgcgaccctggccaaggccgacctggaggcccagcaggagtccctgaaggaggagcagctctccctcaagagcaaccacgagcaggaagtaaagattctgaggagtcagctgggggagaagttccggatcgagctggacattgagcccaccattgacctgaacagggtgttgggggagatgcgggctcagtacgaggccatggtggagaccaaccaccaggatgtggaacagtggttccaagcccagtctgaaggcatcagcctgcaggccatgtcctgctccgaggagctgcagtgctgccagtcggagatcctggagctgagatgcacggtgaatgccctggaggtggagcgccaagcccagcacaccttgaaggactgtctgcagaactccctgtgtgaagcggaggaccgctacggcacagagctggcccagatgcagagcctcattagcaacttggaagagcagttgtctgagatccgggccgacctggagcggcagaaccaggagtaccaggtgctgctggacgtgaaggcccggttggagaacgagattgccacataccggaaccttactcccctgcaatccctgttccacgcctgcctcctgtacttcttgtccaagctgtggccctgtcaccggtgggtctccctctggccatggagccagcatggggagatgattctgaaggcccgagttaggagattgaggctggttgcactggggtcaggagtgccctcaccttgcccagtcttccttcaagactagactcactgaggcattttccctaaatcaaccggtagcagatacttccaaggagtggctccctgcctatgcctctaagctgtattttttgttgttgctaaaatgttgtaattatcttccatgaaagcaattatttttcctggtgtctcttcttggtacttttagttctattccagtgtttcagaatctccaaaaatgtaactgggttccctgcattaaatggtcaataaacctccttcctgcaccaagtgctgtctccccggtgttggttgtatgtgagatgtcggagagtcctggtcgtcaggtcctgtgtcctcactggctctgacatcttgcttccaggag

SEQ ID NO: 728629 - DNA, 1737 bp, Homo sapiens
tttctcatctgtacattgaggcaatgagtaaccacctcataggtggtaagggttagataggaaagaacacagtagaatgcctagcacacctaagtactcaatcaatgttagttctggacctttcatttgaatactgcttgagctctgtgcccaatctccctttcctggatcaaataagatttttctttgttagtgatttctttctagatacttccttggccagaactatagatcctctgtctttcactaactcttgttgatctatggttctcattcaagtttgtgtagaacatccagagatttcagaggcattgtttactcctgatgaacagggaacattgcgtgtccaggaaccagcacactgcctgagttatgggggatattcaggaagcatgctgaaccaatgaatgaatgaacaaatgaatgaatagctgattctgactagtcaaccaaaacttaattagcgccattgcttccagatgttattgcttctcaagggagtatgcaatgtgaaagaagaaagaaaaaaaggcgcctctcaatcgtcaaatatcagtagatgcattggttttattaactgatattttctcttcaaaggaaaggctgattcagtcttgcacaggcgaaagatccagtgggtcccattggttctctgtgtctcctgctacacaaattactgacggaaagatttgagccttcattgtgaccacatccacagagaccatagtccagagagagcaattggggcctgaatcaactgctggtgtttgttgagcagaaacagtgagtctctgacttcccaccaacagctaacctgatatggaagagccaagaggcatctcagatttgtcaacattgctttaatgagctgaggaacttctcatggtaaactcagcagctgagtaacaggatgatggcaccacaacaggtagataatcaaggcaggaggtcaaagcactggagccaacacccgcccaggatggggtataaaagggttgggaggagaggaggcttcagtctcagtggctcagccttcccagctgatctgaagctcctgtgcagcctcagccctacaccatgacctccttctacagcacctcctcatgccctctgggttgcaccatggctcctggagcaagaaatgtctttgtctctcctatcgatgttgggtgccagcctgtggcagaggccaatgctgcctccatgtgcctcttggccaacgtggcacacgccaacagagtccgtgtggggtcgactcccctgggccgccccagcctctgtctgcccccaaccagtcacactgcttgtcccttgccagggacctgtcacattcccggcaacatcggaatctgtggggcctacggcaaaaacaccctgaatggccatgagaaggagaccatgaagttcctgaatgaccgcctggccaactacctggagaaggtgcgccagctggagcaggagaatgcagagctggagaccacactcctcgagaggagcaagtgccacgagtccaccgtgtgccccgactaccagtcctacttccgtacaatcgaggagctccagcagaagatcctgtgcagcaaggctgagaatgccaggctgattgtacaaattgacaacgcgaagctggctgctgatgactttaggatcaagtaagtcaggatgaggagggtcagtgtgacttctctcctgctgtatttccaagggcccgccccattactcagtctatattgtagg

SEQ ID NO: 728630 - DNA, 2258 bp, Homo sapiens
tttctcatctgtacattgaggcaatgagtaaccacctcataggtggtaagggttagataggaaagaacacagtagaatgcctagcacacctaagtactcaatcaatgttagttctggacctttcatttgaatactgcttgagctctgtgcccaatctccctttcctggatcaaataagatttttctttgttagtgatttctttctagatacttccttggccagaactatagatcctctgtctttcactaactcttgttgatctatggttctcattcaagtttgtgtagaacatccagagatttcagaggcattgtttactcctgatgaacagggaacattgcgtgtccaggaaccagcacactgcctgagttatgggggatattcaggaagcatgctgaaccaatgaatgaatgaacaaatgaatgaatagctgattctgactagtcaaccaaaacttaattagcgccattgcttccagatgttattgcttctcaagggagtatgcaatgtgaaagaagaaagaaaaaaaggcgcctctcaatcgtcaaatatcagtagatgcattggttttattaactgatattttctcttcaaaggaaaggctgattcagtcttgcacaggcgaaagatccagtgggtcccattggttctctgtgtctcctgctacacaaattactgacggaaagatttgagccttcattgtgaccacatccacagagaccatagtccagagagagcaattggggcctgaatcaactgctggtgtttgttgagcagaaacagtgagtctctgacttcccaccaacagctaacctgatatggaagagccaagaggcatctcagatttgtcaacattgctttaatgagctgaggaacttctcatggtaaactcagcagctgagtaacaggatgatggcaccacaacaggtagataatcaaggcaggaggtcaaagcactggagccaacacccgcccaggatggggtataaaagggttgggaggagaggaggcttcagtctcagtggctcagccttcccagctgatctgaagctcctgtgcagcctcagccctacaccatgacctccttctacagcacctcctcatgccctctgggttgcaccatggctcctggagcaagaaatgtctttgtctctcctatcgatgttgggtgccagcctgtggcagaggccaatgctgcctccatgtgcctcttggccaacgtggcacacgccaacagagtccgtgtggggtcgactcccctgggccgccccagcctctgtctgcccccaaccagtcacactgcttgtcccttgccagggacctgtcacattcccggcaacatcggaatctgtggggcctacggcaaaaacaccctgaatggccatgagaaggagaccatgaagttcctgaatgaccgcctggccaactacctggagaaggtgcgccagctggagcaggagaatgcagagctggagaccacactcctcgagaggagcaagtgccacgagtccaccgtgtgccccgactaccagtcctacttccgtacaatcgaggagctccagcagaagatcctgtgcagcaaggctgagaatgccaggctgattgtacaaattgacaacgcgaagctggctgctgatgactttaggatcaagctggagagtgagcgctcccttcaccagctggtggaggcggacaagtgcgggacgcagaagctcctggatgacgcgaccctggccaaggccgacctggaggcccagcaggagtccctgaaggaggagcagctctccctcaagagcaaccacgagcaggaagtaaagattctgaggagtcagctgggggagaagttccggatcgagctggacattgagcccaccattgacctgaacagggtgttgggggagatgcgggctcagtacgaggccatggtggagaccaaccaccaggatgtggaacagtggttccaagcccaggtgagtgggggttacagagccagggagtacctggcctccatctgagcagggaggtgactgtgtttctctgtgctccagtctgaaggcatcagcctgcaggccatgtcctgctccgaggagctgcagtgctgccagtcggagatcctggagctgagatgcacggtgaatgccctggaggtggagcgccaagcccagcacaccttggtacgtgtccttcaccctcactgcactgcaaatgccccatgccatgtcctggtagtagcatctcttaaagtctcacaaatcag

SEQ ID NO: 728631 - DNA, 2418 bp, Homo sapiens
tttctcatctgtacattgaggcaatgagtaaccacctcataggtggtaagggttagataggaaagaacacagtagaatgcctagcacacctaagtactcaatcaatgttagttctggacctttcatttgaatactgcttgagctctgtgcccaatctccctttcctggatcaaataagatttttctttgttagtgatttctttctagatacttccttggccagaactatagatcctctgtctttcactaactcttgttgatctatggttctcattcaagtttgtgtagaacatccagagatttcagaggcattgtttactcctgatgaacagggaacattgcgtgtccaggaaccagcacactgcctgagttatgggggatattcaggaagcatgctgaaccaatgaatgaatgaacaaatgaatgaatagctgattctgactagtcaaccaaaacttaattagcgccattgcttccagatgttattgcttctcaagggagtatgcaatgtgaaagaagaaagaaaaaaaggcgcctctcaatcgtcaaatatcagtagatgcattggttttattaactgatattttctcttcaaaggaaaggctgattcagtcttgcacaggcgaaagatccagtgggtcccattggttctctgtgtctcctgctacacaaattactgacggaaagatttgagccttcattgtgaccacatccacagagaccatagtccagagagagcaattggggcctgaatcaactgctggtgtttgttgagcagaaacagtgagtctctgacttcccaccaacagctaacctgatatggaagagccaagaggcatctcagatttgtcaacattgctttaatgagctgaggaacttctcatggtaaactcagcagctgagtaacaggatgatggcaccacaacaggtagataatcaaggcaggaggtcaaagcactggagccaacacccgcccaggatggggtataaaagggttgggaggagaggaggcttcagtctcagtggctcagccttcccagctgatctgaagctcctgtgcagcctcagccctacaccatgacctccttctacagcacctcctcatgccctctgggttgcaccatggctcctggagcaagaaatgtctttgtctctcctatcgatgttgggtgccagcctgtggcagaggccaatgctgcctccatgtgcctcttggccaacgtggcacacgccaacagagtccgtgtggggtcgactcccctgggccgccccagcctctgtctgcccccaaccagtcacactgcttgtcccttgccagggacctgtcacattcccggcaacatcggaatctgtggggcctacggcaaaaacaccctgaatggccatgagaaggagaccatgaagttcctgaatgaccgcctggccaactacctggagaaggtgcgccagctggagcaggagaatgcagagctggagaccacactcctcgagaggagcaagtgccacgagtccaccgtgtgccccgactaccagtcctacttccgtacaatcgaggagctccagcagaagatcctgtgcagcaaggctgagaatgccaggctgattgtacaaattgacaacgcgaagctggctgctgatgactttaggatcaagctggagagtgagcgctcccttcaccagctggtggaggcggacaagtgcgggacgcagaagctcctggatgacgcgaccctggccaaggccgacctggaggcccagcaggagtccctgaaggaggagcagctctccctcaagagcaaccacgagcaggaagtaaagattctgaggagtcagctgggggagaagttccggatcgagctggacattgagcccaccattgacctgaacagggtgttgggggagatgcgggctcagtacgaggccatggtggagaccaaccaccaggatgtggaacagtggttccaagcccaggtgagtgggggttacagagccagggagtacctggcctccatctgagcagggaggtgactgtgtttctctgtgctccagtctgaaggcatcagcctgcaggccatgtcctgctccgaggagctgcagtgctgccagtcggagatcctggagctgagatgcacggtgaatgccctggaggtggagcgccaagcccagcacaccttgaaggactgtctgcagaactccctgtgtgaagcggaggaccgctacggcacagagctggcccagatgcagagcctcattagcaacttggaagagcagttgtctgagatccgggccgacctggagcggcagaaccaggagtaccaggtgctgctggacgtgaaggcccggttggagaacgagattgccacataccggaaccttctggagagcgaggactgcaagtacgtgtgatctgggcaattc

SEQ ID NO: 728632 - DNA, 2913 bp, Homo sapiens
tttctcatctgtacattgaggcaatgagtaaccacctcataggtggtaagggttagataggaaagaacacagtagaatgcctagcacacctaagtactcaatcaatgttagttctggacctttcatttgaatactgcttgagctctgtgcccaatctccctttcctggatcaaataagatttttctttgttagtgatttctttctagatacttccttggccagaactatagatcctctgtctttcactaactcttgttgatctatggttctcattcaagtttgtgtagaacatccagagatttcagaggcattgtttactcctgatgaacagggaacattgcgtgtccaggaaccagcacactgcctgagttatgggggatattcaggaagcatgctgaaccaatgaatgaatgaacaaatgaatgaatagctgattctgactagtcaaccaaaacttaattagcgccattgcttccagatgttattgcttctcaagggagtatgcaatgtgaaagaagaaagaaaaaaaggcgcctctcaatcgtcaaatatcagtagatgcattggttttattaactgatattttctcttcaaaggaaaggctgattcagtcttgcacaggcgaaagatccagtgggtcccattggttctctgtgtctcctgctacacaaattactgacggaaagatttgagccttcattgtgaccacatccacagagaccatagtccagagagagcaattggggcctgaatcaactgctggtgtttgttgagcagaaacagtgagtctctgacttcccaccaacagctaacctgatatggaagagccaagaggcatctcagatttgtcaacattgctttaatgagctgaggaacttctcatggtaaactcagcagctgagtaacaggatgatggcaccacaacaggtagataatcaaggcaggaggtcaaagcactggagccaacacccgcccaggatggggtataaaagggttgggaggagaggaggcttcagtctcagtggctcagccttcccagctgatctgaagctcctgtgcagcctcagccctacaccatgacctccttctacagcacctcctcatgccctctgggttgcaccatggctcctggagcaagaaatgtctttgtctctcctatcgatgttgggtgccagcctgtggcagaggccaatgctgcctccatgtgcctcttggccaacgtggcacacgccaacagagtccgtgtggggtcgactcccctgggccgccccagcctctgtctgcccccaaccagtcacactgcttgtcccttgccagggacctgtcacattcccggcaacatcggaatctgtggggcctacggcaaaaacaccctgaatggccatgagaaggagaccatgaagttcctgaatgaccgcctggccaactacctggagaaggtgcgccagctggagcaggagaatgcagagctggagaccacactcctcgagaggagcaagtgccacgagtccaccgtgtgccccgactaccagtcctacttccgtacaatcgaggagctccagcagaagatcctgtgcagcaaggctgagaatgccaggctgattgtacaaattgacaacgcgaagctggctgctgatgactttaggatcaagctggagagtgagcgctcccttcaccagctggtggaggcggacaagtgcgggacgcagaagctcctggatgacgcgaccctggccaaggccgacctggaggcccagcaggagtccctgaaggaggagcagctctccctcaagagcaaccacgagcaggaagtaaagattctgaggagtcagctgggggagaagttccggatcgagctggacattgagcccaccattgacctgaacagggtgttgggggagatgcgggctcagtacgaggccatggtggagaccaaccaccaggatgtggaacagtggttccaagcccaggtgagtgggggttacagagccagggagtacctggcctccatctgagcagggaggtgactgtgtttctctgtgctccagtctgaaggcatcagcctgcaggccatgtcctgctccgaggagctgcagtgctgccagtcggagatcctggagctgagatgcacggtgaatgccctggaggtggagcgccaagcccagcacaccttgaaggactgtctgcagaactccctgtgtgaagcggaggaccgctacggcacagagctggcccagatgcagagcctcattagcaacttggaagagcagttgtctgagatccgggccgacctggagcggcagaaccaggagtaccaggtgctgctggacgtgaaggcccggttggagaacgagattgccacataccggaaccttactcccctgcaatccctgttccacgcctgcctcctgtacttcttgtccaagctgtggccctgtcaccggtgggtctccctctggccatggagccagcatggggagatgattctgaaggcccgagttaggagattgaggctggttgcactggggtcaggagtgccctcaccttgcccagtcttccttcaagactagactcactgaggcattttccctaaatcaaccggtagcagatacttccaaggagtggctccctgcctatgcctctaagctgtattttttgttgttgctaaaatgttgtaattatcttccatgaaagcaattatttttcctggtgtctcttcttggtacttttagttctattccagtgtttcagaatctccaaaaatgtaactgggttccctgcattaaatggtcaataaacctccttcctgcaccaagtgctgtctccccggtgttggttgtatgtgagatgtcggagagtcctggtcgtcaggtcctgtgtcctcactggctctgacatcttgcttccaggag

SEQ ID NO: 728633 - DNA, 2180 bp, Homo sapiens
tttctcatctgtacattgaggcaatgagtaaccacctcataggtggtaagggttagataggaaagaacacagtagaatgcctagcacacctaagtactcaatcaatgttagttctggacctttcatttgaatactgcttgagctctgtgcccaatctccctttcctggatcaaataagatttttctttgttagtgatttctttctagatacttccttggccagaactatagatcctctgtctttcactaactcttgttgatctatggttctcattcaagtttgtgtagaacatccagagatttcagaggcattgtttactcctgatgaacagggaacattgcgtgtccaggaaccagcacactgcctgagttatgggggatattcaggaagcatgctgaaccaatgaatgaatgaacaaatgaatgaatagctgattctgactagtcaaccaaaacttaattagcgccattgcttccagatgttattgcttctcaagggagtatgcaatgtgaaagaagaaagaaaaaaaggcgcctctcaatcgtcaaatatcagtagatgcattggttttattaactgatattttctcttcaaaggaaaggctgattcagtcttgcacaggcgaaagatccagtgggtcccattggttctctgtgtctcctgctacacaaattactgacggaaagatttgagccttcattgtgaccacatccacagagaccatagtccagagagagcaattggggcctgaatcaactgctggtgtttgttgagcagaaacagtgagtctctgacttcccaccaacagctaacctgatatggaagagccaagaggcatctcagatttgtcaacattgctttaatgagctgaggaacttctcatggtaaactcagcagctgagtaacaggatgatggcaccacaacaggtagataatcaaggcaggaggtcaaagcactggagccaacacccgcccaggatggggtataaaagggttgggaggagaggaggcttcagtctcagtggctcagccttcccagctgatctgaagctcctgtgcagcctcagccctacaccatgacctccttctacagcacctcctcatgccctctgggttgcaccatggctcctggagcaagaaatgtctttgtctctcctatcgatgttgggtgccagcctgtggcagaggccaatgctgcctccatgtgcctcttggccaacgtggcacacgccaacagagtccgtgtggggtcgactcccctgggccgccccagcctctgtctgcccccaaccagtcacactgcttgtcccttgccagggacctgtcacattcccggcaacatcggaatctgtggggcctacggcaaaaacaccctgaatggccatgagaaggagaccatgaagttcctgaatgaccgcctggccaactacctggagaaggtgcgccagctggagcaggagaatgcagagctggagaccacactcctcgagaggagcaagtgccacgagtccaccgtgtgccccgactaccagtcctacttccgtacaatcgaggagctccagcagaagatcctgtgcagcaaggctgagaatgccaggctgattgtacaaattgacaacgcgaagctggctgctgatgactttaggatcaagctggagagtgagcgctcccttcaccagctggtggaggcggacaagtgcgggacgcagaagctcctggatgacgcgaccctggccaaggccgacctggaggcccagcaggagtccctgaaggaggagcagctctccctcaagagcaaccacgagcaggaagtaaagattctgaggagtcagctgggggagaagttccggatcgagctggacattgagcccaccattgacctgaacagggtgttgggggagatgcgggctcagtacgaggccatggtggagaccaaccaccaggatgtggaacagtggttccaagcccagtctgaaggcatcagcctgcaggccatgtcctgctccgaggagctgcagtgctgccagtcggagatcctggagctgagatgcacggtgaatgccctggaggtggagcgccaagcccagcacaccttggtacgtgtccttcaccctcactgcactgcaaatgccccatgccatgtcctggtagtagcatctcttaaagtctcacaaatcag

SEQ ID NO: 728634 - DNA, 2340 bp, Homo sapiens
tttctcatctgtacattgaggcaatgagtaaccacctcataggtggtaagggttagataggaaagaacacagtagaatgcctagcacacctaagtactcaatcaatgttagttctggacctttcatttgaatactgcttgagctctgtgcccaatctccctttcctggatcaaataagatttttctttgttagtgatttctttctagatacttccttggccagaactatagatcctctgtctttcactaactcttgttgatctatggttctcattcaagtttgtgtagaacatccagagatttcagaggcattgtttactcctgatgaacagggaacattgcgtgtccaggaaccagcacactgcctgagttatgggggatattcaggaagcatgctgaaccaatgaatgaatgaacaaatgaatgaatagctgattctgactagtcaaccaaaacttaattagcgccattgcttccagatgttattgcttctcaagggagtatgcaatgtgaaagaagaaagaaaaaaaggcgcctctcaatcgtcaaatatcagtagatgcattggttttattaactgatattttctcttcaaaggaaaggctgattcagtcttgcacaggcgaaagatccagtgggtcccattggttctctgtgtctcctgctacacaaattactgacggaaagatttgagccttcattgtgaccacatccacagagaccatagtccagagagagcaattggggcctgaatcaactgctggtgtttgttgagcagaaacagtgagtctctgacttcccaccaacagctaacctgatatggaagagccaagaggcatctcagatttgtcaacattgctttaatgagctgaggaacttctcatggtaaactcagcagctgagtaacaggatgatggcaccacaacaggtagataatcaaggcaggaggtcaaagcactggagccaacacccgcccaggatggggtataaaagggttgggaggagaggaggcttcagtctcagtggctcagccttcccagctgatctgaagctcctgtgcagcctcagccctacaccatgacctccttctacagcacctcctcatgccctctgggttgcaccatggctcctggagcaagaaatgtctttgtctctcctatcgatgttgggtgccagcctgtggcagaggccaatgctgcctccatgtgcctcttggccaacgtggcacacgccaacagagtccgtgtggggtcgactcccctgggccgccccagcctctgtctgcccccaaccagtcacactgcttgtcccttgccagggacctgtcacattcccggcaacatcggaatctgtggggcctacggcaaaaacaccctgaatggccatgagaaggagaccatgaagttcctgaatgaccgcctggccaactacctggagaaggtgcgccagctggagcaggagaatgcagagctggagaccacactcctcgagaggagcaagtgccacgagtccaccgtgtgccccgactaccagtcctacttccgtacaatcgaggagctccagcagaagatcctgtgcagcaaggctgagaatgccaggctgattgtacaaattgacaacgcgaagctggctgctgatgactttaggatcaagctggagagtgagcgctcccttcaccagctggtggaggcggacaagtgcgggacgcagaagctcctggatgacgcgaccctggccaaggccgacctggaggcccagcaggagtccctgaaggaggagcagctctccctcaagagcaaccacgagcaggaagtaaagattctgaggagtcagctgggggagaagttccggatcgagctggacattgagcccaccattgacctgaacagggtgttgggggagatgcgggctcagtacgaggccatggtggagaccaaccaccaggatgtggaacagtggttccaagcccagtctgaaggcatcagcctgcaggccatgtcctgctccgaggagctgcagtgctgccagtcggagatcctggagctgagatgcacggtgaatgccctggaggtggagcgccaagcccagcacaccttgaaggactgtctgcagaactccctgtgtgaagcggaggaccgctacggcacagagctggcccagatgcagagcctcattagcaacttggaagagcagttgtctgagatccgggccgacctggagcggcagaaccaggagtaccaggtgctgctggacgtgaaggcccggttggagaacgagattgccacataccggaaccttctggagagcgaggactgcaagtacgtgtgatctgggcaattc

SEQ ID NO: 728635 - DNA, 932 bp, Homo sapiens
gacaggggatacccggcgactcctacttccgtacaatcgaggagctccagcagaaggtgaggtgtgggatcgcctgggcatgctgggtctgagaaggcagaagccttcgcaggaggaatctgcataaggtccagagagctttgggttcttggtttctcttggacatgagcgtaaataccacacatggagtgggagcttagagtatggtgctttgtgtgtgaaccgtctttccgttttcctcagatcctgtgcagcaaggctgagaatgccaggctgattgtacaaattgacaacgcgaagctggctgctgatgactttaggatcaagctggagagtgagcgctcccttcaccagctggtggaggcggacaagtgcgggacgcagaagctcctggatgacgcgaccctggccaaggccgacctggaggcccagcaggagtccctgaaggaggagcagctctccctcaagagcaaccacgagcaggaagtaaagattctgaggagtcagctgggggagaagttccggatcgagctggacattgagcccaccattgacctgaacagggtgttgggggagatgcgggctcagtacgaggccatggtggagaccaaccaccaggatgtggaacagtggttccaagcccaggtgagtgggggttacagagccagggagtacctggcctccatctgagcagggaggtgactgtgtttctctgtgctccagtctgaaggcatcagcctgcaggccatgtcctgctccgaggagctgcagtgctgccagtcggagatcctggagctgagatgcacggtgaatgccctggaggtggagcgccaagcccagcacaccttggtacgtgtccttcaccctcactgcactgcaaatgccccatgccatgtcctggtagtagcatctcttaaagtctcacaaatcag

SEQ ID NO: 728636 - DNA, 1092 bp, Homo sapiens
gacaggggatacccggcgactcctacttccgtacaatcgaggagctccagcagaaggtgaggtgtgggatcgcctgggcatgctgggtctgagaaggcagaagccttcgcaggaggaatctgcataaggtccagagagctttgggttcttggtttctcttggacatgagcgtaaataccacacatggagtgggagcttagagtatggtgctttgtgtgtgaaccgtctttccgttttcctcagatcctgtgcagcaaggctgagaatgccaggctgattgtacaaattgacaacgcgaagctggctgctgatgactttaggatcaagctggagagtgagcgctcccttcaccagctggtggaggcggacaagtgcgggacgcagaagctcctggatgacgcgaccctggccaaggccgacctggaggcccagcaggagtccctgaaggaggagcagctctccctcaagagcaaccacgagcaggaagtaaagattctgaggagtcagctgggggagaagttccggatcgagctggacattgagcccaccattgacctgaacagggtgttgggggagatgcgggctcagtacgaggccatggtggagaccaaccaccaggatgtggaacagtggttccaagcccaggtgagtgggggttacagagccagggagtacctggcctccatctgagcagggaggtgactgtgtttctctgtgctccagtctgaaggcatcagcctgcaggccatgtcctgctccgaggagctgcagtgctgccagtcggagatcctggagctgagatgcacggtgaatgccctggaggtggagcgccaagcccagcacaccttgaaggactgtctgcagaactccctgtgtgaagcggaggaccgctacggcacagagctggcccagatgcagagcctcattagcaacttggaagagcagttgtctgagatccgggccgacctggagcggcagaaccaggagtaccaggtgctgctggacgtgaaggcccggttggagaacgagattgccacataccggaaccttctggagagcgaggactgcaagtacgtgtgatctgggcaattc

SEQ ID NO: 728637 - DNA, 1587 bp, Homo sapiens
gacaggggatacccggcgactcctacttccgtacaatcgaggagctccagcagaaggtgaggtgtgggatcgcctgggcatgctgggtctgagaaggcagaagccttcgcaggaggaatctgcataaggtccagagagctttgggttcttggtttctcttggacatgagcgtaaataccacacatggagtgggagcttagagtatggtgctttgtgtgtgaaccgtctttccgttttcctcagatcctgtgcagcaaggctgagaatgccaggctgattgtacaaattgacaacgcgaagctggctgctgatgactttaggatcaagctggagagtgagcgctcccttcaccagctggtggaggcggacaagtgcgggacgcagaagctcctggatgacgcgaccctggccaaggccgacctggaggcccagcaggagtccctgaaggaggagcagctctccctcaagagcaaccacgagcaggaagtaaagattctgaggagtcagctgggggagaagttccggatcgagctggacattgagcccaccattgacctgaacagggtgttgggggagatgcgggctcagtacgaggccatggtggagaccaaccaccaggatgtggaacagtggttccaagcccaggtgagtgggggttacagagccagggagtacctggcctccatctgagcagggaggtgactgtgtttctctgtgctccagtctgaaggcatcagcctgcaggccatgtcctgctccgaggagctgcagtgctgccagtcggagatcctggagctgagatgcacggtgaatgccctggaggtggagcgccaagcccagcacaccttgaaggactgtctgcagaactccctgtgtgaagcggaggaccgctacggcacagagctggcccagatgcagagcctcattagcaacttggaagagcagttgtctgagatccgggccgacctggagcggcagaaccaggagtaccaggtgctgctggacgtgaaggcccggttggagaacgagattgccacataccggaaccttactcccctgcaatccctgttccacgcctgcctcctgtacttcttgtccaagctgtggccctgtcaccggtgggtctccctctggccatggagccagcatggggagatgattctgaaggcccgagttaggagattgaggctggttgcactggggtcaggagtgccctcaccttgcccagtcttccttcaagactagactcactgaggcattttccctaaatcaaccggtagcagatacttccaaggagtggctccctgcctatgcctctaagctgtattttttgttgttgctaaaatgttgtaattatcttccatgaaagcaattatttttcctggtgtctcttcttggtacttttagttctattccagtgtttcagaatctccaaaaatgtaactgggttccctgcattaaatggtcaataaacctccttcctgcaccaagtgctgtctccccggtgttggttgtatgtgagatgtcggagagtcctggtcgtcaggtcctgtgtcctcactggctctgacatcttgcttccaggag

SEQ ID NO: 728638 - DNA, 854 bp, Homo sapiens
gacaggggatacccggcgactcctacttccgtacaatcgaggagctccagcagaaggtgaggtgtgggatcgcctgggcatgctgggtctgagaaggcagaagccttcgcaggaggaatctgcataaggtccagagagctttgggttcttggtttctcttggacatgagcgtaaataccacacatggagtgggagcttagagtatggtgctttgtgtgtgaaccgtctttccgttttcctcagatcctgtgcagcaaggctgagaatgccaggctgattgtacaaattgacaacgcgaagctggctgctgatgactttaggatcaagctggagagtgagcgctcccttcaccagctggtggaggcggacaagtgcgggacgcagaagctcctggatgacgcgaccctggccaaggccgacctggaggcccagcaggagtccctgaaggaggagcagctctccctcaagagcaaccacgagcaggaagtaaagattctgaggagtcagctgggggagaagttccggatcgagctggacattgagcccaccattgacctgaacagggtgttgggggagatgcgggctcagtacgaggccatggtggagaccaaccaccaggatgtggaacagtggttccaagcccagtctgaaggcatcagcctgcaggccatgtcctgctccgaggagctgcagtgctgccagtcggagatcctggagctgagatgcacggtgaatgccctggaggtggagcgccaagcccagcacaccttggtacgtgtccttcaccctcactgcactgcaaatgccccatgccatgtcctggtagtagcatctcttaaagtctcacaaatcag

SEQ ID NO: 728639 - DNA, 1014 bp, Homo sapiens
gacaggggatacccggcgactcctacttccgtacaatcgaggagctccagcagaaggtgaggtgtgggatcgcctgggcatgctgggtctgagaaggcagaagccttcgcaggaggaatctgcataaggtccagagagctttgggttcttggtttctcttggacatgagcgtaaataccacacatggagtgggagcttagagtatggtgctttgtgtgtgaaccgtctttccgttttcctcagatcctgtgcagcaaggctgagaatgccaggctgattgtacaaattgacaacgcgaagctggctgctgatgactttaggatcaagctggagagtgagcgctcccttcaccagctggtggaggcggacaagtgcgggacgcagaagctcctggatgacgcgaccctggccaaggccgacctggaggcccagcaggagtccctgaaggaggagcagctctccctcaagagcaaccacgagcaggaagtaaagattctgaggagtcagctgggggagaagttccggatcgagctggacattgagcccaccattgacctgaacagggtgttgggggagatgcgggctcagtacgaggccatggtggagaccaaccaccaggatgtggaacagtggttccaagcccagtctgaaggcatcagcctgcaggccatgtcctgctccgaggagctgcagtgctgccagtcggagatcctggagctgagatgcacggtgaatgccctggaggtggagcgccaagcccagcacaccttgaaggactgtctgcagaactccctgtgtgaagcggaggaccgctacggcacagagctggcccagatgcagagcctcattagcaacttggaagagcagttgtctgagatccgggccgacctggagcggcagaaccaggagtaccaggtgctgctggacgtgaaggcccggttggagaacgagattgccacataccggaaccttctggagagcgaggactgcaagtacgtgtgatctgggcaattc

SEQ ID NO: 728640 - DNA, 1509 bp, Homo sapiens
gacaggggatacccggcgactcctacttccgtacaatcgaggagctccagcagaaggtgaggtgtgggatcgcctgggcatgctgggtctgagaaggcagaagccttcgcaggaggaatctgcataaggtccagagagctttgggttcttggtttctcttggacatgagcgtaaataccacacatggagtgggagcttagagtatggtgctttgtgtgtgaaccgtctttccgttttcctcagatcctgtgcagcaaggctgagaatgccaggctgattgtacaaattgacaacgcgaagctggctgctgatgactttaggatcaagctggagagtgagcgctcccttcaccagctggtggaggcggacaagtgcgggacgcagaagctcctggatgacgcgaccctggccaaggccgacctggaggcccagcaggagtccctgaaggaggagcagctctccctcaagagcaaccacgagcaggaagtaaagattctgaggagtcagctgggggagaagttccggatcgagctggacattgagcccaccattgacctgaacagggtgttgggggagatgcgggctcagtacgaggccatggtggagaccaaccaccaggatgtggaacagtggttccaagcccagtctgaaggcatcagcctgcaggccatgtcctgctccgaggagctgcagtgctgccagtcggagatcctggagctgagatgcacggtgaatgccctggaggtggagcgccaagcccagcacaccttgaaggactgtctgcagaactccctgtgtgaagcggaggaccgctacggcacagagctggcccagatgcagagcctcattagcaacttggaagagcagttgtctgagatccgggccgacctggagcggcagaaccaggagtaccaggtgctgctggacgtgaaggcccggttggagaacgagattgccacataccggaaccttactcccctgcaatccctgttccacgcctgcctcctgtacttcttgtccaagctgtggccctgtcaccggtgggtctccctctggccatggagccagcatggggagatgattctgaaggcccgagttaggagattgaggctggttgcactggggtcaggagtgccctcaccttgcccagtcttccttcaagactagactcactgaggcattttccctaaatcaaccggtagcagatacttccaaggagtggctccctgcctatgcctctaagctgtattttttgttgttgctaaaatgttgtaattatcttccatgaaagcaattatttttcctggtgtctcttcttggtacttttagttctattccagtgtttcagaatctccaaaaatgtaactgggttccctgcattaaatggtcaataaacctccttcctgcaccaagtgctgtctccccggtgttggttgtatgtgagatgtcggagagtcctggtcgtcaggtcctgtgtcctcactggctctgacatcttgcttccaggag

SEQ ID NO: 728641 - DNA, 224 bp, Homo sapiens
gacaggggatacccggcgactcctacttccgtacaatcgaggagctccagcagaagatcctgtgcagcaaggctgagaatgccaggctgattgtacaaattgacaacgcgaagctggctgctgatgactttaggatcaagtaagtcaggatgaggagggtcagtgtgacttctctcctgctgtatttccaagggcccgccccattactcagtctatattgtagg

SEQ ID NO: 728642 - DNA, 745 bp, Homo sapiens
gacaggggatacccggcgactcctacttccgtacaatcgaggagctccagcagaagatcctgtgcagcaaggctgagaatgccaggctgattgtacaaattgacaacgcgaagctggctgctgatgactttaggatcaagctggagagtgagcgctcccttcaccagctggtggaggcggacaagtgcgggacgcagaagctcctggatgacgcgaccctggccaaggccgacctggaggcccagcaggagtccctgaaggaggagcagctctccctcaagagcaaccacgagcaggaagtaaagattctgaggagtcagctgggggagaagttccggatcgagctggacattgagcccaccattgacctgaacagggtgttgggggagatgcgggctcagtacgaggccatggtggagaccaaccaccaggatgtggaacagtggttccaagcccaggtgagtgggggttacagagccagggagtacctggcctccatctgagcagggaggtgactgtgtttctctgtgctccagtctgaaggcatcagcctgcaggccatgtcctgctccgaggagctgcagtgctgccagtcggagatcctggagctgagatgcacggtgaatgccctggaggtggagcgccaagcccagcacaccttggtacgtgtccttcaccctcactgcactgcaaatgccccatgccatgtcctggtagtagcatctcttaaagtctcacaaatcag

SEQ ID NO: 728643 - DNA, 905 bp, Homo sapiens
gacaggggatacccggcgactcctacttccgtacaatcgaggagctccagcagaagatcctgtgcagcaaggctgagaatgccaggctgattgtacaaattgacaacgcgaagctggctgctgatgactttaggatcaagctggagagtgagcgctcccttcaccagctggtggaggcggacaagtgcgggacgcagaagctcctggatgacgcgaccctggccaaggccgacctggaggcccagcaggagtccctgaaggaggagcagctctccctcaagagcaaccacgagcaggaagtaaagattctgaggagtcagctgggggagaagttccggatcgagctggacattgagcccaccattgacctgaacagggtgttgggggagatgcgggctcagtacgaggccatggtggagaccaaccaccaggatgtggaacagtggttccaagcccaggtgagtgggggttacagagccagggagtacctggcctccatctgagcagggaggtgactgtgtttctctgtgctccagtctgaaggcatcagcctgcaggccatgtcctgctccgaggagctgcagtgctgccagtcggagatcctggagctgagatgcacggtgaatgccctggaggtggagcgccaagcccagcacaccttgaaggactgtctgcagaactccctgtgtgaagcggaggaccgctacggcacagagctggcccagatgcagagcctcattagcaacttggaagagcagttgtctgagatccgggccgacctggagcggcagaaccaggagtaccaggtgctgctggacgtgaaggcccggttggagaacgagattgccacataccggaaccttctggagagcgaggactgcaagtacgtgtgatctgggcaattc

SEQ ID NO: 728644 - DNA, 1400 bp, Homo sapiens
gacaggggatacccggcgactcctacttccgtacaatcgaggagctccagcagaagatcctgtgcagcaaggctgagaatgccaggctgattgtacaaattgacaacgcgaagctggctgctgatgactttaggatcaagctggagagtgagcgctcccttcaccagctggtggaggcggacaagtgcgggacgcagaagctcctggatgacgcgaccctggccaaggccgacctggaggcccagcaggagtccctgaaggaggagcagctctccctcaagagcaaccacgagcaggaagtaaagattctgaggagtcagctgggggagaagttccggatcgagctggacattgagcccaccattgacctgaacagggtgttgggggagatgcgggctcagtacgaggccatggtggagaccaaccaccaggatgtggaacagtggttccaagcccaggtgagtgggggttacagagccagggagtacctggcctccatctgagcagggaggtgactgtgtttctctgtgctccagtctgaaggcatcagcctgcaggccatgtcctgctccgaggagctgcagtgctgccagtcggagatcctggagctgagatgcacggtgaatgccctggaggtggagcgccaagcccagcacaccttgaaggactgtctgcagaactccctgtgtgaagcggaggaccgctacggcacagagctggcccagatgcagagcctcattagcaacttggaagagcagttgtctgagatccgggccgacctggagcggcagaaccaggagtaccaggtgctgctggacgtgaaggcccggttggagaacgagattgccacataccggaaccttactcccctgcaatccctgttccacgcctgcctcctgtacttcttgtccaagctgtggccctgtcaccggtgggtctccctctggccatggagccagcatggggagatgattctgaaggcccgagttaggagattgaggctggttgcactggggtcaggagtgccctcaccttgcccagtcttccttcaagactagactcactgaggcattttccctaaatcaaccggtagcagatacttccaaggagtggctccctgcctatgcctctaagctgtattttttgttgttgctaaaatgttgtaattatcttccatgaaagcaattatttttcctggtgtctcttcttggtacttttagttctattccagtgtttcagaatctccaaaaatgtaactgggttccctgcattaaatggtcaataaacctccttcctgcaccaagtgctgtctccccggtgttggttgtatgtgagatgtcggagagtcctggtcgtcaggtcctgtgtcctcactggctctgacatcttgcttccaggag

SEQ ID NO: 728645 - DNA, 667 bp, Homo sapiens
gacaggggatacccggcgactcctacttccgtacaatcgaggagctccagcagaagatcctgtgcagcaaggctgagaatgccaggctgattgtacaaattgacaacgcgaagctggctgctgatgactttaggatcaagctggagagtgagcgctcccttcaccagctggtggaggcggacaagtgcgggacgcagaagctcctggatgacgcgaccctggccaaggccgacctggaggcccagcaggagtccctgaaggaggagcagctctccctcaagagcaaccacgagcaggaagtaaagattctgaggagtcagctgggggagaagttccggatcgagctggacattgagcccaccattgacctgaacagggtgttgggggagatgcgggctcagtacgaggccatggtggagaccaaccaccaggatgtggaacagtggttccaagcccagtctgaaggcatcagcctgcaggccatgtcctgctccgaggagctgcagtgctgccagtcggagatcctggagctgagatgcacggtgaatgccctggaggtggagcgccaagcccagcacaccttggtacgtgtccttcaccctcactgcactgcaaatgccccatgccatgtcctggtagtagcatctcttaaagtctcacaaatcag

SEQ ID NO: 728646 - DNA, 827 bp, Homo sapiens
gacaggggatacccggcgactcctacttccgtacaatcgaggagctccagcagaagatcctgtgcagcaaggctgagaatgccaggctgattgtacaaattgacaacgcgaagctggctgctgatgactttaggatcaagctggagagtgagcgctcccttcaccagctggtggaggcggacaagtgcgggacgcagaagctcctggatgacgcgaccctggccaaggccgacctggaggcccagcaggagtccctgaaggaggagcagctctccctcaagagcaaccacgagcaggaagtaaagattctgaggagtcagctgggggagaagttccggatcgagctggacattgagcccaccattgacctgaacagggtgttgggggagatgcgggctcagtacgaggccatggtggagaccaaccaccaggatgtggaacagtggttccaagcccagtctgaaggcatcagcctgcaggccatgtcctgctccgaggagctgcagtgctgccagtcggagatcctggagctgagatgcacggtgaatgccctggaggtggagcgccaagcccagcacaccttgaaggactgtctgcagaactccctgtgtgaagcggaggaccgctacggcacagagctggcccagatgcagagcctcattagcaacttggaagagcagttgtctgagatccgggccgacctggagcggcagaaccaggagtaccaggtgctgctggacgtgaaggcccggttggagaacgagattgccacataccggaaccttctggagagcgaggactgcaagtacgtgtgatctgggcaattc

SEQ ID NO: 728647 - DNA, 1322 bp, Homo sapiens
gacaggggatacccggcgactcctacttccgtacaatcgaggagctccagcagaagatcctgtgcagcaaggctgagaatgccaggctgattgtacaaattgacaacgcgaagctggctgctgatgactttaggatcaagctggagagtgagcgctcccttcaccagctggtggaggcggacaagtgcgggacgcagaagctcctggatgacgcgaccctggccaaggccgacctggaggcccagcaggagtccctgaaggaggagcagctctccctcaagagcaaccacgagcaggaagtaaagattctgaggagtcagctgggggagaagttccggatcgagctggacattgagcccaccattgacctgaacagggtgttgggggagatgcgggctcagtacgaggccatggtggagaccaaccaccaggatgtggaacagtggttccaagcccagtctgaaggcatcagcctgcaggccatgtcctgctccgaggagctgcagtgctgccagtcggagatcctggagctgagatgcacggtgaatgccctggaggtggagcgccaagcccagcacaccttgaaggactgtctgcagaactccctgtgtgaagcggaggaccgctacggcacagagctggcccagatgcagagcctcattagcaacttggaagagcagttgtctgagatccgggccgacctggagcggcagaaccaggagtaccaggtgctgctggacgtgaaggcccggttggagaacgagattgccacataccggaaccttactcccctgcaatccctgttccacgcctgcctcctgtacttcttgtccaagctgtggccctgtcaccggtgggtctccctctggccatggagccagcatggggagatgattctgaaggcccgagttaggagattgaggctggttgcactggggtcaggagtgccctcaccttgcccagtcttccttcaagactagactcactgaggcattttccctaaatcaaccggtagcagatacttccaaggagtggctccctgcctatgcctctaagctgtattttttgttgttgctaaaatgttgtaattatcttccatgaaagcaattatttttcctggtgtctcttcttggtacttttagttctattccagtgtttcagaatctccaaaaatgtaactgggttccctgcattaaatggtcaataaacctccttcctgcaccaagtgctgtctccccggtgttggttgtatgtgagatgtcggagagtcctggtcgtcaggtcctgtgtcctcactggctctgacatcttgcttccaggag

SEQ ID NO: 728648 - DNA, 536 bp, Homo sapiens; identical to SEQ ID NO: 166391

SEQ ID NO: 728649 - DNA, 317 bp, Homo sapiens
tcagtgtactcttctgctttgtaggagtgagatgaccgggaggaagaggaggaggatctggacgtgcctctcgctctccggtgcttcttctgcttctttgatcctttataagttttctgttttctcagctgacctttccctcgagtggctggagtctcgggaattcactgattctctagatttacctcgctgaagatctctctccttatgttttttatgacgttcaatatcaaggcggagatcaacaggatcatctctgtattttccctcagccttgatattgaacgtcataaaaaaaaaaaagggcggccgctcgc

SEQ ID NO: 728650 - DNA, 759 bp, Homo sapiens
aagtgtcaccggtcacactttaattccagtctaaaattaaagtcttcagtctccacattccctactttccaaattcagctttcccgggaggtctggagcagctgcctctctggggagatgctggaggtctcggaatcacctcacgcggcctcagggcccagttggagccaccccaagtgacaccagcaggcagatgaccagagagcctgagcctccggccccgagtctgtgaagcctagccgctgggctggagaagccactgtgggcaccaccgtgggggaaacaggcccgttgccctggcctctttgccctgggccagcctttgtgaagtgggcccctcttctgggccccttgagtaggttccatggcattttctgaactcctggacctcgtgggtggcctgggcaggttccaggttctccagacgatggctctgatggtctccatcatgtggctgtgtacccagagcatgctggagaacttctcggccgccgtgcccagccaccgctgctgggcacccctcctggacaacagcacggctcaggccagcatcctagggagcttgagtcctgaggccctcctggctatttccatcccgccgggccccaacagaggccccaccagtgccgccgcttccgccagccacagtggcagctcttggaccccaatgccacggccaccagctggagcgaggccgacacggagccgtgtgtggatggctgggtctatgaccgcagcatcttcacctccacaatcgtg

SEQ ID NO: 728651 - DNA, 652 bp, Homo sapiens
gagaattcttgtgtatgaaataaaatacatacaaaaatgtatacacacgttctttcctttgcaatattttttttcaaaaatggtagcagaatgttttctgtttttttctctcgattttcccttcttttatttattcatttatttgtttgtttttttgagacagtctgactcttgtcacccaggctggagtgtagtggcacagtctcagctcactgaaaccgctgccttgaggtagggattcaagtgattctcctgcttcagccacccgagtagctgggatcacaggcgtgccccaccacacccagctaatttttgcattttttgtagagatgggtttttgctgtgttggccagattggtcttgaactcctggcctcaagtgatctgcccaccttggcctcctaaggtgctggggttccaggtgtccctggtgtactaacctaatgttttttatgcttgcaaattatattaattatcttatgaatcactgcaacagaaatgcctatgtaaattaaaatgtaaaactatttacattttctgagttcataaggctcagagtcttaacatttttccttggatttttataataatagtatacattgtaaaatttttgataattagtaaaactaaaagtgtgacattttcataggaaa

SEQ ID NO: 728652 - DNA, 446 bp, Homo sapiens
ctcaaccagaggagccgggggtaaggtaaagggctctcctggggccagggactggggcacgtggcagccagctggcctggaaggcaggggcctaagggctggtagtgggttcccccagccgcggaaatagctggaactttgcccccgactcaggctcctgggaaggacaagtgcccggggcccctgtccctggagaggatcttgaccaggcaggtgtttgtcccgccattaggcaaggttctgaaatccctgggtgcctggcccagtacgtgtgttgaggactggaaggactcagtagatgaggtcccctcctccgaggaaagagctagtaaatagacaaacaggcaaaacagaggctagaaaaatacaaattaagaccctgcatgtgggctggaagggttagggcgtgatgcatgactggagttctttgtgttttcattcatcca

SEQ ID NO: 728653 - DNA, 256 bp, Homo sapiens
tgagccatatatcccaatgagcagccaaaatcacaagaaaaataactttgactttgaaaacaaataagttagaaatgcagtgtttgcacttcgtggtttatgtttgctttggtggcctctcattcccacttagcctcagtctccagggcctgggctccaccaaggaagactccatctgctctctctatttgcacactgggaacttttttccccaaggtacaggatatgattcagggtttatggatgacctccctac

SEQ ID NO: 728654 - DNA, 495 bp, Homo sapiens
gtgagctctgtcgtctctaagcccaccatgggtttaatcattcatcatcaaatcatccctaggctttaaatagtgaggaaaaatcaaggtgcagttttataaataaattcactgaaaggtcacatattgcatttgtctaacccagactccacagaggtgcgacccaggagagaaaggaagaaggtctacattcctcgaaactcatccagcacaattcattgaccatactgaataaggacatggtgagtttgaactttgccctactacaaagacctcttacgtacaaaataatttcctcctgtattaaatgcatgggacaaagttttagttaatgcaaaatttagtttatatcatatttgctccctcatattctcacaaatctaaattgccatgctcttccacagaggcaagaaaaaagtaatgcctaactcgtgggctctaatcatggaggttatgggatagcaaatatgcaactcctaaaagacctaaccacct

SEQ ID NO: 728655 - DNA, 813 bp, Homo sapiens
ggttagatctagaggatcccgctccaccgacggggtggtggtggggataatgataggggtggggatggtagcagtgatgctggtagcgatgtggatactggtgtggccacggtggtggcagtagctgtggagatggcagtggttacaatagtggggtgatggtgagggctgtagtgatgacggtggcggcagtggcagtgatatggtgatgatggtcatgagagaaatggtgatgatgttgggtggaggaggtggtggtggcgattgtggagatggtgatgttagcaatggtggtcgtgattgtagcagtgatgtggctgctgctggtggcatatggagtaaatgactgctaacgaaatcattccaaacccgagagttcatggcttcatgaagagctgtcaaatttatttagatgaacaaacaatcataagaagttcaaagacaaaccattttcagccaacatggcctctcctgagaaaggtgagaaacttaaactaattcattttttcctttaagaaattaacaaggcctacaaggaatttcccctttgcataccccaacccatgatggttttaagttttcctctgctaatcttgagaagagtttctgtaacactataattaggacttgctcctacacagcaaccattccctgctcatggtgagcaaaattagacacccctccagacaatgtcattatcatggttaagttctgagtttggcaagggcataaaaacatttgaagaaaccacttctacatcacatccccccttactcccacccaatacttacatacttccagcgttcttgcaga

SEQ ID NO: 728656 - DNA, 1018 bp, Homo sapiens
gttatcctacaaaataaggaccttaaccgcagaaatacaaagttggtaactgcatgcaagcagtttggctctgtacaaggagggagtttgtaataatcaaagctaccctataatgcaacatgccacctggcgagacagcaccctgtcaagccgcatgactccttcatggagaaaagagggaggatcagaatatgagtggctgacacattttaggcactcaagcatttgctgatgtgatggtggtggtggggataatgataggggtggggatggtagcagtgatgctggtagcgatgtggatactggtgtggccacggtggtggcagtagctgtggagatggcagtggttacaatagtggggtgatggtgagggctgtagtgatgacggtggcggcagtggcagtgatatggtgatgatggtcatgagagaaatggtgatgatgttgggtggaggaggtggtggtggcgattgtggagatggtgatgttagcaatggtggtcgtgattgtagcagtgatgtggctgctgctggtggcatatggagtaaatgactgctaacgaaatcattccaaacccgagagttcatggcttcatgaagagctgtcaaatttatttagatgaacaaacaatcataagaagttcaaagacaaaccattttcagccaacatggcctctcctgagaaaggtgagaaacttaaactaattcattttttcctttaagaaattaacaaggcctacaaggaatttcccctttgcataccccaacccatgatggttttaagttttcctctgctaatcttgagaagagtttctgtaacactataattaggacttgctcctacacagcaaccattccctgctcatggtgagcaaaattagacacccctccagacaatgtcattatcatggttaagttctgagtttggcaagggcataaaaacatttgaagaaaccacttctacatcacatccccccttactcccacccaatacttacatacttccagcgttcttgcaga

SEQ ID NO: 728657 - DNA, 906 bp, Homo sapiens
gttatcctacaaaataaggaccttaaccgcagaaatacaaagttggtaactgcatgcaagcagtttggctctgtacaaggagggagtttgtaataatcaaagctaccctataatgcaacatgccacctggcgagacagcaccctgtcaagccgcatgactccttcatggagaaaagagggaggatcagaatatgagtggctgacacattttaggcactcaagcatttgctgatgtgatggtggtggtggggataatgataggggtggggatggtagcagtgatgctggtagcgatgtggatactggtgtggccacggtggtggcagtagctgtggagatggcagtggttacaatagtggggtgatggtgagggctgtagtgatgacggtggcggcagtggcagtgatatggtgatgatggtcatgagagaaatggtgatgatgttgggtggaggaggtggtggtggcgattgtggagatggtgatgttagcaatggtggtcgtgattgtagcagtgatgtggctgctgctggtggcatatggagtaaatgactgctaacgaaatcattccaaacccgagagttcatggcttcatgaagagctgtcaaatttatttagatgaacaaacaatcataagaagttcaaagacaaaccattttcagccaacatggcctctcctgagaaaggtgagaaacttaaactaattcattttttcctttaagaaattaacaaggcctacaaggaatttcccctttgcataccccaaccccgaacacggatatatccgtgttcggggttgagagggggctaaacaaatggaggaagggaaaggggtaaacagcgttgcccaaggggagacctcagaggctctgacttgctgaagaaactacccagtagtggagatatg

SEQ ID NO: 728658 - DNA, 701 bp, Homo sapiens
ggttagatctagaggatcccgctccaccgacggggtggtggtggggataatgataggggtggggatggtagcagtgatgctggtagcgatgtggatactggtgtggccacggtggtggcagtagctgtggagatggcagtggttacaatagtggggtgatggtgagggctgtagtgatgacggtggcggcagtggcagtgatatggtgatgatggtcatgagagaaatggtgatgatgttgggtggaggaggtggtggtggcgattgtggagatggtgatgttagcaatggtggtcgtgattgtagcagtgatgtggctgctgctggtggcatatggagtaaatgactgctaacgaaatcattccaaacccgagagttcatggcttcatgaagagctgtcaaatttatttagatgaacaaacaatcataagaagttcaaagacaaaccattttcagccaacatggcctctcctgagaaaggtgagaaacttaaactaattcattttttcctttaagaaattaacaaggcctacaaggaatttcccctttgcataccccaaccccgaacacggatatatccgtgttcggggttgagagggggctaaacaaatggaggaagggaaaggggtaaacagcgttgcccaaggggagacctcagaggctctgacttgctgaagaaactacccagtagtggagatatg

SEQ ID NO: 728659 - DNA, 1055 bp, Homo sapiens; identical to SEQ ID NO: 176348

SEQ ID NO: 728660 - DNA, 301 bp, Homo sapiens; identical to SEQ ID NO: 176349

SEQ ID NO: 728661 - DNA, 377 bp, Homo sapiens
agcgaggttgcctggagagagcgcctgggcgcagaagggttaacgggccaccgggggctcgcagagcaggagggtgctctcggacggtgtgtcccccactgcactcctgaacttggaggacagggtcgccgcgagggacgcagagagcaccctccacgcccagatgcctgcgtagtttttgtgaccagtccgctcctgcctccccctggggcagtagagggggagcgatggagaactggactggcaggccctggctgtatctgctgctgcttctgtccctccctcagctctgcttggatcaggaggtgagttctggacaagtgagcagctgcagcctgcctgccaccctttcatctccccctaggctcccaccccat

SEQ ID NO: 728662 - DNA, 979 bp, Homo sapiens
tggaagtgagggaaaggggaccactgggaggggcaggggaagtgatgagtaacttctgctttctgagaagttggtagtcaggatatgggagccggctgggggcggagggcagtgttgcaacaccccctctggctccagtctgacgtccctcccctggcctttggtttgcaggccctggctgtatctgctgctgcttctgtccctccctcagctctgcttggatcaggaggtgttgtccggacactctcttcagacacctacagaggagggccagggccccgaaggtgtctggggaccttgggtccagtgggcctcttgctcccagccctgcggggtgggggtgcagcgcaggagccggacatgtcagctccctacagtgcagctccacccgagtctgcccctccctccccggcccccaagacatccagaagccctcctcccccggggccagggtcccagaccccagacttctccagaaaccctccccttgtacaggacacagtctcggggaaggggtggcccacttcgaggtcccgcttcccacctagggagagaggagacccaggagattcgagcggccaggaggtcccggcttcgagaccccatcaagccaggaatgttcggttatgggagagtgccctttgcattgccactgcaccggaaccgcaggcaccctcggagcccacccagatctgagctgtccctgatctcttctagaggggaagagcctattccgtcccctactccaagagcagagccattctccgcaaacggcagcccccaaactgagctccctcccacagaactgtctgtccacaccccatccccccaagcagaacctctaagccctgaaactgctcagacagaggtggcccccagaaccaggcctgccccctacggcatcaccccagagcccaggcctctggcacagagcccccctcacccacgcactccttaggagaaggtggcttcttccgtg

SEQ ID NO: 728663 - DNA, 656 bp, Homo sapiens
atgaagagctttttgctgttcagctgagtttaacttgaattactttttttaatgaaaggtaaaatagcacaaaattagcagcaaaaagatgttcattaacaagaagcacagtggcttggtgttcagttaaattgaattttcaaccatgttttcgacccgcaaaggcatccttccctgtctttttagtaatgaaagggtttcttctcttccaccgctgcagtcaggagcagcagagctaacatggttgtcttacagacgtttaatgtactgtggtcataattaaactaaaggattcttaggggagaattggccctcagttgaattttcctcttccctaatgtgtgtggaatgaacaagatgattgggaaatagctattttcacacttactacgttacaagatgctctattgctgatctcaggaacaagcttcactgcccaccagtcaattttacagaatgttcttgctaggacagcagtacctcttagctcctcatagccttaaaatctcttcttactttccctagaaaaaagaaagctggctgtgcacagtggctcacatctgtaatcctagcactttgggaggccgaggcgggtggatcatgaggtcaggaattcaagaccagcctggccaagagagtgaaaccccatcgctact

SEQ ID NO: 728664 - DNA, 481 bp, Homo sapiens
gacagagaagaaagccctggaattctagcttcaaatagctaataagcaccatttctttttcttcataaggtgtgctaccagaggggaatctgaataagcagcattcatttttaaccaggagcttcctctgcagttgaaattctgccttgctgctgcagacgcctctgtatgcatgacttgaggcttctgcctctcgagcttgtagctttcagaagcaataagtgaaggcagggaacgtttttatctagcacagggcttaaccctgttttccagccaatatcaggaaatgtccttgttttaatagggcccaagataatcactataaaaattataaaagtcactttttaatctctgaataatctcaagaaggaaagagagaagacagcatgagacctcctagtaaaacaggtgccccctcgaagtctggaggaggttgtgtttagaataaatcaaagcaagcagttgtacagcaggcagcctc

SEQ ID NO: 728665 - DNA, 306 bp, Homo sapiens
gggcacctgtcttcagcctttaatgatctagggcagccattctctctgaaggctgagggagcctggaggggcaggagaggcaaggcaggtccctgtggtcagagagcgccttctggatacagccacggtttgctttcattatgcaaggcacagaggaatgtgatgctagacacagcactaccgccgagacaggagcgagacagtgctgtgggatgcccagggttaaaaaaagttgccgcggtggctcacgcctgtaatcccagcactttgagaggccgaggtgggcagatcacctgaggtcaggag

SEQ ID NO: 728666 - DNA, 768 bp, Homo sapiens
agcggacagggcggggacatgaccgcggcgccgggagggtcagcgcagcccgctggccccggcccgcgcctgggtttcagcaccgcggacagcggcgtcggcatgagctgggctaaaccccggtcccgccgtacccatgaaggaccacgacgccatcaagctcttcgtggggcagatcccgcggggcttggacgagcaggacctcaagccgctgttcgaggagttcggccgcatctacgagctgacggtgctgaaggaccggctcaccggcctccacaaaggctgtgccttcctcacctactgcgcccgggactctgctctcaaggcccagagtgcactgcacgagcagaagaccctgccagggatgaatcgtccgatccaagtgaagccagctgccagtgagggccgaggagaggaccgaaagctgtttgtggggatgctgggcaagcagcagggtgaggaggacgtcagacgcctgttccagccctttggccacatcgaggagtgcacggtcctgcggagtcctgacggcaccagtaaaggctgtgcctttgtgaagttcgggagtcaaggggaagctcaggcggccatccggggtctgcacggcagccggaccatggcgggcgcctcgtccagcctcgtggtcaagctggcggacaccgaccgggagcgcgcgctgcggcggatgcagcagatggccggacacctgggacgccttccaccccgcgccactgccgctaggggcctgcggcgcctacaccacggcgg

SEQ ID NO: 728667 - DNA, 661 bp, Homo sapiens
ccacgcgtcgcggacgcgtgggtcgacccacgcgtccggggaaggccgctgtttttccctcctggcactcagctgcctgccccccaacaataattcctcacctcccacgcacccagctcttggcagtttacaaagaccttttgcgtccccattacctcatgtgatccccacaacacccatgagaggaagatgaatcgtccgatccaagtgaagccagctgccagtgagggccgaggaggctcctgaacaggatgatctcagatcccccctcaaacaacagctggaactctgttctctatcttctagaggaccgaaagctgtttgtggggatgctgggcaagcagcagggtgaggaggacgtcagacgcctgttccagccctttggccacatcgaggagtgcacggtcctgcggagtcctgacggcaccagtaaaggctgtgcctttgtgaagttcgggagtcaaggggaagctcaggcggccatccggggtctgcacggcagccggaccatggcgggcgcctcgtccagcctcgtggtcaagctggcggacaccgaccgggagcgcgcgctgcggcggatgcagcagatggccggacacctgggacgccttccaccccgcgccactgccgctaggggcctgcggcgcctacaccacggcgg

SEQ ID NO: 728668 - DNA, 836 bp, Homo sapiens
agcggacagggcggggacatgaccgcggcgccgggagggtcagcgcagcccgctggccccggcccgcgcctgggtttcagcaccgcggacagcggcgtcggcatgagctgggctaaaccccggtcccgccgtacccatgaaggaccacgacgccatcaagctcttcgtggggcagatcccgcggggcttggacgagcaggacctcaagccgctgttcgaggagttcggccgcatctacgagctgacggtgctgaaggaccggctcaccggcctccacaaaggctgtgccttcctcacctactgcgcccgggactctgctctcaaggcccagagtgcactgcacgagcagaagaccctgccagggatgaatcgtccgatccaagtgaagccagctgccagtgagggccgaggaggctcctgaacaggatgatctcagatcccccctcaaacaacagctggaactctgttctctatcttctagaggaccgaaagctgtttgtggggatgctgggcaagcagcagggtgaggaggacgtcagacgcctgttccagccctttggccacatcgaggagtgcacggtcctgcggagtcctgacggcaccagtaaaggctgtgcctttgtgaagttcgggagtcaaggggaagctcaggcggccatccggggtctgcacggcagccggaccatggcgggcgcctcgtccagcctcgtggtcaagctggcggacaccgaccgggagcgcgcgctgcggcggatgcagcagatggccggacacctgggacgccttccaccccgcgccactgccgctaggggcctgcggcgcctacaccacggcgg

SEQ ID NO: 728669 - DNA, 593 bp, Homo sapiens
ccacgcgtcgcggacgcgtgggtcgacccacgcgtccggggaaggccgctgtttttccctcctggcactcagctgcctgccccccaacaataattcctcacctcccacgcacccagctcttggcagtttacaaagaccttttgcgtccccattacctcatgtgatccccacaacacccatgagaggaagatgaatcgtccgatccaagtgaagccagctgccagtgagggccgaggagaggaccgaaagctgtttgtggggatgctgggcaagcagcagggtgaggaggacgtcagacgcctgttccagccctttggccacatcgaggagtgcacggtcctgcggagtcctgacggcaccagtaaaggctgtgcctttgtgaagttcgggagtcaaggggaagctcaggcggccatccggggtctgcacggcagccggaccatggcgggcgcctcgtccagcctcgtggtcaagctggcggacaccgaccgggagcgcgcgctgcggcggatgcagcagatggccggacacctgggacgccttccaccccgcgccactgccgctaggggcctgcggcgcctacaccacggcgg

SEQ ID NO: 728670 - DNA, 761 bp, Homo sapiens
tgtgggtttccttcttgagggattgtggggtatctatgagttctctaatggaaacatttattttatgttttcctttagatgagagtcaaaaagcatgctagggatcacctgcttgctgctgccttataaccatgtatgtcggacttcaggcctgctggagtgtctttgctacagtcgtgagagacttgggggaagagaccacatccaggaaccatgaatatgtaatgatggatttgtgccacaggagggtggttcttggagccatcacccacacagggtcacgaaggtggctgaactgggaagaacctgcaccagggaagtcagcccgatagtcatactgtgaatagaactttagtttcagtgaagcatccacttgtcacattaagttaatgtgattcacttaaatggttattgtttgggggtaaatttgatttgtaaactttgggggaaggctgtaaaattatctaataagctatagctcaaatatattttaaaaccctcagtggcttctcattaccctttagaacagagtctaagccacttagtaggccaaaaagaccatacattatctgaccactgattagcttttcaagctcatcttctgtcggttcagttttttgttgttgttgttgcaggcatgaagacctctgtcctgttcctcacacaaaccaagtcaagcttgctcctgattcacagactttaacacttgctccctctgtcctccatcttcacagggctaactacttttgaagattcgtatc

SEQ ID NO: 728671 - DNA, 3022 bp, Homo sapiens
  misc_feature (1876)..(1876): n is a, c, g, or t
  misc_feature (2024)..(2024): n is a, c, g, or t
  misc_feature (2281)..(2281): n is a, c, g, or t
  misc_feature (2442)..(2442): n is a, c, g, or t
tagtcctcctgctacaccactgaccaacaggaaagtttgtgtctccagagtggacacatccataaagaggccaaacccagtcaaggtctaagcatctgatggctataactttgcttctttgaaagataataaaaagcttctgacctcccatcaacagccaacctgatttcaaagagccaagaggcctcagattcgtcaacattcctttaacgagctgagaaacttttcatggtaaactcagcagctgagtaacaggatgatggcaccacaacaggtagataatcaaggcaggaggtcaaagcattggagccaacacccgcccaggatggggtataaaagggctgggaggagaggaggcttcagtctcagtggttcagctttcccagctgatctgaagctcctgtgcagcctcagcccaacaccatgacctcttcctacagcagctcctcatgccctctgggttgcaccatggctcctggagcaagaaatgtctctgtctctcccatcgacattgggtgccagcctggggcagaggccaacattgcccccatgtgccttttggccaacgtggcacatgccaaccgagtccgtgtggggtccactcccctgggccgccccagcctctgtctgccgcctacctgccacactgcttgtcccttgccagggacctgccacattcctggcaacattggaatctgtggggcctatggtgaaaacaccctgaatggccatgagaaggagaccatgcagttcctgaatgaccgcctggccaactacctggagaaggtgcgccagctggagcaggagaatgcggagctggaggccacactcctcgagaggagcaagtgccacgagtccaccgtgtgccccgactaccagtcttacttccacaccatcgaggagctccaacagaaggtgaggtgtgggatcgcttgggtgtgctgggtctgagatggcagaggcaagacaggaggaatccatgtaaagctcagagaactttgggttcttggtttctcttggacatgatcatagacaccacacgtggagaaggagcctagggcatgatgctttgtgtgtgaactgtcttcctgttctcctcagatcctgtgcagcaaggccgagaatgccaggctgattgtacaaattgacaatgccaagctggctgccgatgactttaggatcaagctggagagtgagcgctccctgcgccagctggtggaggcagacaagtgtgggacacagaagctcctggatgatgcgaccctggccaaggccgacctggaggcccagcaggagtccctgaaggaggagcagctctccctcaagagcaaccacgagcaggaagtaaagattctgaggagtcagctgggggagaagctccggattgagctggacattgagcccaccattgacctgaacagggtgctgggggagatgcgggctcagtatgaggccatgttggagaccaaccgccaggatgtggaacagtggttccaagcccagtctgaaggcatcagcctgcaggacatgtcctgctccgaggagctgcagtgctgccagtcggagatcctggagctgagatgcacggtgaatgccctggaggtggagcgccaagcccagcacaccttgaaggactgtctgcagaactccctgtgtgaagccgaggaccgcttcggcacggagctggcccagatgcagagcctcatcagcaacgtggaggagcagctgtctgagatccgggccgacctggagcggcaaaaccaggagtaccaggtgctgctggacgtgaagacccggctggagaatgagattgccacgtaccggaaccttctggaaagcgaggactgcaaactcccctgcaatccgtgctccacgnctccctcctgcgtgactgccccctgtgctcctcgcccaagctgtggcccctgcaccacctgtgggcccacctgtggagccagcaccaccggaagccgattctgaattcctgtggacccacaggggctggctaaggcgagggatacccnaagagagatgcttgttatacctttagaaaatctggcttctaactttctgtatgtataggcctgtccaaaggctatgagataccagggacagtggaatcttgatggaaatccttcctttcctgctcttggttttcccaggtgagctctatgccctcagtggctggattgcagccacccatggtggctcagaatatctggattggagaggcataaggttgaaaagcattttggagtaggaacacggcatgatttaaaantgcacttgcacttcaagaacaccaactttaacttgaaatttttatagtttatgacaaaggaagtgaagaacagacttcactgtctgagatttcccacatttcttgggttgtttctaacattggcagcctggattatggccctagggagagggaaatagaancagaattgtacctgaccctgtcttttctaattcccttctcctatcctcctgcctccctatcttggaaactgattaagtggaaactttccttgtatcaaatcctgagttttctctacttcagggtttctagctttgacaaaggaccaggcttgccttttctgtggcaacacagcctcttacatatggcttccatagcttcttgctatgtgaaaggaactttcagattaagaaatttctctcttttttctctataaattctgactctccagacttgtctggctataacccctgtccctgtctaattctcccagtctaaaatctaaacaatgacttcatttttttctagtactttctcctgaagtattgaaacctattgattcaatgggtagagatttgctaagtatgatgtgcttccacctcttctcttcatactctctaccttccttaccatgattcagccacactggcctttctgttccttggacatgcctggagacctgtccctgctcttccttctctctggggtgctcttcccctccttataaatgttcaggtcagcggaaatgttccttcctctgag

SEQ ID NO: 728672 - DNA, 2836 bp, Homo sapiens
  misc_feature (1690)..(1690): n is a, c, g, or t
  misc_feature (1838)..(1838): n is a, c, g, or t
  misc_feature (2095)..(2095): n is a, c, g, or t
  misc_feature (2256)..(2256): n is a, c, g, or t
tagtcctcctgctacaccactgaccaacaggaaagtttgtgtctccagagtggacacatccataaagaggccaaacccagtcaaggtctaagcatctgatggctataactttgcttctttgaaagataataaaaagcttctgacctcccatcaacagccaacctgatttcaaagagccaagaggcctcagattcgtcaacattcctttaacgagctgagaaacttttcatggtaaactcagcagctgagtaacaggatgatggcaccacaacaggtagataatcaaggcaggaggtcaaagcattggagccaacacccgcccaggatggggtataaaagggctgggaggagaggaggcttcagtctcagtggttcagctttcccagctgatctgaagctcctgtgcagcctcagcccaacaccatgacctcttcctacagcagctcctcatgccctctgggttgcaccatggctcctggagcaagaaatgtctctgtctctcccatcgacattgggtgccagcctggggcagaggccaacattgcccccatgtgccttttggccaacgtggcacatgccaaccgagtccgtgtggggtccactcccctgggccgccccagcctctgtctgccgcctacctgccacactgcttgtcccttgccagggacctgccacattcctggcaacattggaatctgtggggcctatggtgaaaacaccctgaatggccatgagaaggagaccatgcagttcctgaatgaccgcctggccaactacctggagaaggtgcgccagctggagcaggagaatgcggagctggaggccacactcctcgagaggagcaagtgccacgagtccaccgtgtgccccgactaccagtcttacttccacaccatcgaggagctccaacagaagatcctgtgcagcaaggccgagaatgccaggctgattgtacaaattgacaatgccaagctggctgccgatgactttaggatcaagctggagagtgagcgctccctgcgccagctggtggaggcagacaagtgtgggacacagaagctcctggatgatgcgaccctggccaaggccgacctggaggcccagcaggagtccctgaaggaggagcagctctccctcaagagcaaccacgagcaggaagtaaagattctgaggagtcagctgggggagaagctccggattgagctggacattgagcccaccattgacctgaacagggtgctgggggagatgcgggctcagtatgaggccatgttggagaccaaccgccaggatgtggaacagtggttccaagcccagtctgaaggcatcagcctgcaggacatgtcctgctccgaggagctgcagtgctgccagtcggagatcctggagctgagatgcacggtgaatgccctggaggtggagcgccaagcccagcacaccttgaaggactgtctgcagaactccctgtgtgaagccgaggaccgcttcggcacggagctggcccagatgcagagcctcatcagcaacgtggaggagcagctgtctgagatccgggccgacctggagcggcaaaaccaggagtaccaggtgctgctggacgtgaagacccggctggagaatgagattgccacgtaccggaaccttctggaaagcgaggactgcaaactcccctgcaatccgtgctccacgnctccctcctgcgtgactgccccctgtgctcctcgcccaagctgtggcccctgcaccacctgtgggcccacctgtggagccagcaccaccggaagccgattctgaattcctgtggacccacaggggctggctaaggcgagggatacccnaagagagatgcttgttatacctttagaaaatctggcttctaactttctgtatgtataggcctgtccaaaggctatgagataccagggacagtggaatcttgatggaaatccttcctttcctgctcttggttttcccaggtgagctctatgccctcagtggctggattgcagccacccatggtggctcagaatatctggattggagaggcataaggttgaaaagcattttggagtaggaacacggcatgatttaaaantgcacttgcacttcaagaacaccaactttaacttgaaatttttatagtttatgacaaaggaagtgaagaacagacttcactgtctgagatttcccacatttcttgggttgtttctaacattggcagcctggattatggccctagggagagggaaatagaancagaattgtacctgaccctgtcttttctaattcccttctcctatcctcctgcctccctatcttggaaactgattaagtggaaactttccttgtatcaaatcctgagttttctctacttcagggtttctagctttgacaaaggaccaggcttgccttttctgtggcaacacagcctcttacatatggcttccatagcttcttgctatgtgaaaggaactttcagattaagaaatttctctcttttttctctataaattctgactctccagacttgtctggctataacccctgtccctgtctaattctcccagtctaaaatctaaacaatgacttcatttttttctagtactttctcctgaagtattgaaacctattgattcaatgggtagagatttgctaagtatgatgtgcttccacctcttctcttcatactctctaccttccttaccatgattcagccacactggcctttctgttccttggacatgcctggagacctgtccctgctcttccttctctctggggtgctcttcccctccttataaatgttcaggtcagcggaaatgttccttcctctgag

SEQ ID NO: 728673 - DNA, 888 bp, Homo sapiens
atcactggattggtgtaaggcttacataaacttaaaccacttttacacttaagcactttatatgtggttgagctttacaccaacattagcttcctgttgtttatcttgcctacaaagtatctgtaatataatagttcatcacaatagtctatatgacaaaaacaggaggttagaacatcccctcacctaaaagaggttacaatcttggtcaaaaagtattaactttgacatgttacatgtttaaccttttttcttaaaataactttgataagaaaattatagttgtatgctataagggtacacacagttagagtggccagttttgcacattggattatacttctctacctaaaatctaatattttaaaactatgatcattaaattgctgactttgagggagacgaacagtatatacttttaagtactaatcagacaagatcataaataatgtgcctttataggggaagaaagattaataattaaaaaattccataaataaagattgctagtctgtattaatccaaattttttctgttcttaaatctctttgcctgaattctgtatctctcctcccctacccccaaagcataacctttattctctggagacaaattgtgactgcacaggttggctctgcacacatatgccagctggcaaatgttacttaatgacttattatctaactattggaagccaaagactagaaaacctacaatcccttctgctaaatatgtgctggcaaggtcccagttaagaaaagtctagttttatgccagttacttttatcttactttcatataagaatttgtgacaaaaacaaagcactactatcatttgctatgggttgctctgatcatgtcaatagtctcatattcccagtcttaaca

SEQ ID NO: 728674 - DNA, 413 bp, Homo sapiens
acagacagcgaggctctcaggtcaccggcaccagtggcaccacccacagggactgcagggaagggcgggcaggctcccgttcgttctcccagcacccagtttccagacgaagcctccctgggatcctggcttcccacggctctgcactgtccctttctcagaacttaacgtgggcatttcctgagtcctcttcctccggatgagctggtttcggcctgggatcccagcgtccccacaccctctggtgaccaccacatggcccagcagccacacagcacccggcacccacctgggcgtctgaggctggaggaagctctgccctttctttcgagtcatgggggtggggcggtgtgcgtcactttgggcccatggatggtgggtgccatgcggccacgtcagagcagggcatggtg

SEQ ID NO: 728675 - DNA, 565 bp, Homo sapiens
ttctctgatgactggtgatgctgagcttttcttcatatacgtgtaggccatgtgtatgtcttcttttaaaaaaagtctattcatgtctttgcccaccttttaatgggatcttcttgtttttgctgttgttgaagtgtctgaattccttgtatattctggatatcagttccctatcagataaatagtttgcaaacattttctctcattctacaggctgtctcttcaatctcctgctgatttcttttgctctgctgaagctttttggtttcgataaggcccatttgtctatttctgttttagttgcctgtgtttttgaggtcttagtcactgattctttgcctatatcaatgtccagaagagttttccctaggttttattctagtatttttatagtttcaggtcttaacgtttaagtctttaatccatcttgagttgattttttgtatatggtgagagactggggtccaatttcattcttatgcacagggcaatccaatttttccagcaccatttctttaagagggtatcctttctctgatgtatgttgttggtagcgttgtcaaag

SEQ ID NO: 728676 - DNA, 642 bp, Homo sapiens
tttttgagaaaatgacaagctgattataatatttatatgaaattgtaagcaatggaaactagcaaaacaattttgaaaaagaacaaagttggaggacttcgtatcttaggtcaagacttattacaaagctacagtaatcaaggctatggtcatgacaaaatatatgcaatgacagaatgcatagatcagtggactgggatagatagagcaaaaatagatccacacatatctagtcaattcagcagcaaatactggaactggatattcatatgcaaaaaaaatgaagttcaacccatatgtctcatcacacacaaaaattaactcaaagtggatcattgacctaaacgtagacctaaagctataaaacttctgaaggaaacctaggagaaaatctttgtgactgtgacataggcaaagatttcttagataagatgattcataggataaaaagttgatgaactgggcttcatcaaaacaaaaacttatttgttcaaaaccttctttgaaaaatactgtggagaaaatgaaatgacagggcacagactgggagaaaatatttgaaaaaattaaaatctgataaaggatttgtttacagaatatataaagaactgtcattagtcactaagaaaaaacccaaacaac

SEQ ID NO: 728677 - DNA, 766 bp, Homo sapiens
tagaggaccccggttcgccatgtagcatggatacatatgcattctagggttagcatcaaaggctggagggagtcaggaggcaaaacatatgctgaaccgataagggatctagaactgtttatcccaaagaaaagaaaatgaggccacataaatatcttctaatatttggggtacttttatatgaacatgggagaaggcatttgtgtttctcaaggcagcagaacagaattgaatatataaattcatagaatttttaagctgggcaagaccttaggagctcattcggcccaaggagtacatataacttttcatctgtatgccagctccaaccaattggcatgttaagaaggattctgaggatgaatctaagctcagaggggaggggaaaatgtggtcactgatagtgatatctgttgtggaagagaagggccatatctactcaagtaccatgttttagtcttcattaatgtggtctgtaggtttttaacctctgggtggtggatccctgggaggccacaaagtcattgcaagaggtaaacaaatctgtatatgcagcaagtgcttttggcaagctactctgagtaaataatatatcttacatcatatgtgctactatttttctaattctatacatacattataatgataaaatgctaatttatttaaaagagttattgaattcatagtagcttttaagtttgtgtttttgtgttttattaatgagtggacttaaaacatataattatattatgtgtgggaaggttgg

SEQ ID NO: 728678 - DNA, 515 bp, Homo sapiens
taaatccatactaacataggtacagtgacctaaagccctgggagctgcaccccacgtcccgtgtgacaaagtgtgtgcaggcatcactgaagggggaaaaggctgtgtgtgtgtgtgtgtgtgtgtgtgtttgtgtgtgtgcgcgcgcaccagcgccatgtggcttcccgggtggtgcagattctgtctctctctcaaacctcagcttcatgattcagcagcgctgacgtcaatttacaagaatgaaaagtgagaggagggtttgtgtgtgcaagagactgagttgggggcccaggtgcagtggaggtgtcctccccactgagcgggtgagccagggcagtgtggggcgggcaccatgggaaaggaggcactctttggaatgacaaggactgtgtgtgggtgtggggacagcctgtgaccagcctccaagccacccttgagctgaaaactctggcccccgttttccagatgaggaaatggaggctcagacaagtgcaaccacctactcaaggtca

SEQ ID NO: 728679 - DNA, 315 bp, Homo sapiens
ggaagatcttccaatgagctgtgaactggtcttccgggaggacttacaggaggctggaaacggggcctggcgcgcgcttccctctcagtgcgaggctgactggttggactcgccgggctctactgtgggccccacgctatgtttagacgcccgacgtgtcccattttattgaactcgtcctgccccccaagtagggacgatttacctccattttctagataaggcactgggggctccgcgaggggatgtggcggactggagcccagctgcactcctgacgggactgaatgcggggctgagggaggcaacaggaag

SEQ ID NO: 728680 - DNA, 339 bp, Homo sapiens
tcatcgcaggcatacatgacttggcagatactcatggtgatacggtgaaccgtgcgtgagagaggacttacaggaggctggaaacggggcctggcgcgcgcttccctctcagtgcgaggctgactggttggactcgccgggctctactgtgggccccacgctatgtttagacgcccgacgtgtcccattttattgaactcgtcctgccccccaagtagggacgatttacctccattttctagataaggcactgggggctccgcgaggggatgtggcggactggagcccagctgcactcctgacgggactgaatgcggggctgagggaggcaacaggaag

SEQ ID NO: 728681 - DNA, 383 bp, Homo sapiens; identical to SEQ ID NO: 428525
  misc_feature (375)..(375): n is a, c, g, or t

SEQ ID NO: 728682 - DNA, 412 bp, Homo sapiens
ataagaaggcgagaggagcaggttctcatggggcagccaatgcaagggctggggccacctggagcctggtgtgtccttcgggcagctggtgtggctggagcaggggatgccaagcctgctgagggcttcatgggccgcagggaggagtttggtttttctcctgagggcactggggagccacagcagagtttagagcagaagaaggacacaatttgtgccctgtgttcgtggtgagcggcgagcagggagggctgcctggaggcgggtaaggacctcagagcggaattctgccacagtgaagctttggaggaaatctttcttccttttctcttcttttcccatcacgggttgagaaattggagggaggggcattgctggggcttcctgtgcccgcgtgtgcggggggtcctgg

SEQ ID NO: 728683 - DNA, 295 bp, Homo sapiens
taacgcgctgatagcctcctaacgcgctgatagcctcctaacgcgctgatagcctcctaacgcgctgatagcctcccaaagtgctgggattacgggcgtgagccaccacgcccggtaattttgccatcttttatcaggctttctgtgtcgaggacgctacccacatagagtagaagctgaagggaagggatgtgaagtgacctcaccctcagcttctagctcatggtgtcaaggcttgtgtgatcttagacacgtctgcctcttctgagcctgtttcttcatctgtaaaacaggg

SEQ ID NO: 728684 - DNA, 616 bp, Homo sapiens
tcctgggttcaagcgatcctccctcctcagcctcttgagtaactgggactacaggtgcacacctggatgattttaaaatatttttttagagatggcctctccctgtgttgcccaagctggtctcaaactcctgggctcaagagatcctcccacctcagcttcccaaagcattaggattacaggtgtgagccaccgtgcctggtctgaatttcttgctttacatgttagctgggaagtagatgccctcaagaatggtggagcatatgagctgtccctctaggtcagtcccatggccacccagctccagccctgtctctaggtgtgtgaatcccttttgcacaacagagagcctggggaggtggaaggtcttggtgacaccttgtgagttattcacactggctgtgggtgacagagccagaggtgggagcacagagctctcacagcacagaggagtaaggagttgaagctgcagaaacaatgctgaggcctgaggtggaggaaaaggggtacaaggggaagactaggaagaaacctgtggtacagaagcaggcaccaggcaaggcctcagtcagtaggacgcaggccagggaagacagtgaggagagcgacgcagaac

SEQ ID NO: 728685 - DNA, 217 bp, Homo sapiens
agatggagagagaatgaatgcagccagtgtgcaatgtgtcatgtcctctaaatgttcaagtccctcaagtcatagatccacctattttttctcaagttaatatctctacacctagttttaattccctgtcatgtatacaggactcacacattttatcttcaacttaggccttctctctccactcccccttctctctccaatcccggaccgagctgat

SEQ ID NO: 728686 - DNA, 550 bp, Homo sapiens
aatgaccccactaacaagctccttttataaaaccattttaatttagaaagcttattctatatttagcttaggctgaattcttcttttcacctccccttcctcaaaagaatgcacagaaaaaaatcattcaggttaataagagcagtgagctgagactccagcctggctctgcttagtaaaccgtgggtgtggatttagaaggcatactttctcctaaacccttctatgaacatgtacttccccgtccccttagttcagtaagtttaccactcaattactctctcaaactacctctttcaagcttaaaagagcactaatgcggttaaactgatgaataaagctcactttctaccggctttccatttgaccaagtctgtattacttaaaacaaaacaccctaactcctaaaagccatttcttcctttaaaccattttatcccacttgcgacgtccccgcagacacagacttggaattgcttacgtgtagtccgtgttattctttcctacatggatgggttgttttcagtttgcttgcagtatttctgacatt

SEQ ID NO: 728687 - DNA, 655 bp, Homo sapiens
ccacgggacagcacacagccccccacggaacggcacacacacccatggaacagcacacacactcccacgaacagcacacacactcccacgaacagcacacacactcccacggaacagcacacacacccacggaacggcacacacacccacggaacagcacacacactcccacggaacagcacacacacccacggaacggcacacactcccacggaacggcacactctcccacggaacagcacactctcccacggaacagcacacaacaatcccacggaacagcacacacacccacggtaatggcacacatctcccacgcggggccgctgggtttcctgcagtttctcctcctccaggcctttccctggaccctggtccagtccgtcatttgagcacaggtgcctgttagaacgagaccttcttgttaggacgatgagtgtcccagccaccacctcttttggactccgggaggcctggaacgttctgaacgctccgtggggctccagtcttctccgcagccagggcagcagggtttgctgtctgtcctgcaggcagatgaggagtcagggctggggcctgtgtgggggctctcctgagcgcacagccgccgaggtggagcgtgttctgcctgagcgccgacctggtcgggggaatc

SEQ ID NO: 728688 - DNA, 737 bp, Homo sapiens
ccacgggacagcacacagccccccacggaacggcacacacacccatggaacagcacacacactcccacgaacagcacacacactcccacgaacagcacacacactcccacggaacagcacacacacccacggaacggcacacacacccacggaacagcacacacactcccacggaacagcacacacacccacggaacggcacacactcccacggaacggcacactctcccacggaacagcacactctcccacggaacagcacacaacaatcccacggaacagcacacacacccacggtaatggcacacactcccacggaacagcagactctcccacggaacagcacacacactcccacagacagcacacacacacccacggaacagcacactctcccacgcggggccgctgggtttcctgcagtttctcctcctccaggcctttccctggaccctggtccagtccgtcatttgagcacaggtgcctgttagaacgagaccttcttgttaggacgatgagtgtcccagccaccacctcttttggactccgggaggcctggaacgttctgaacgctccgtggggctccagtcttctccgcagccagggcagcagggtttgctgtctgtcctgcaggcagatgaggagtcagggctggggcctgtgtgggggctctcctgagcgcacagccgccgaggtggagcgtgttctgcctgagcgccgacctggtcgggggaatc

SEQ ID NO: 728689 - DNA, 171 bp, Homo sapiens; identical to SEQ ID NO: 187408

SEQ ID NO: 728690 - DNA, 342 bp, Homo sapiens; identical to SEQ ID NO: 611333

SEQ ID NO: 728691 - DNA, 529 bp, Homo sapiens
atttgctgtatttgtacctggtcctttgctcaaatgcctgttttaaaaaaagtcctagacctataatcacacattagattttaaaatatgccctttcagctgtctaacctacatctacacagaattagtacgtgtattttttttttaagacagggtttgctctgttgcccaggatggagtacagtggcacaatcacagctcacttcagtctcaaccgcccaggctcaagcaatccccctgcctcagcctcccaaatagctgagactataagctacgcaagcattttgacaagatacaggagggttggcacagagatttaaagaagccaagttctaacacaggacagcacagagacaccaatacacgggacaaaatatacccaggctgggaggatgagctgccactgattggggatgtggtgtgtaacaaactgagtactaggggccgggcacagtggctcacgcctgtaatcccagcactttgagaggccaaggcaggggaatcacaaggtcaggagtttgtgaccatc

SEQ ID NO: 728692 - DNA, 375 bp, Homo sapiens
taatttttttatatttttagtagagacagggtttcaccatgttggccaggctggtgttgaactcctgacctcagatgatccacctgcctcagcctcccaaagtgctgggattataagctacgcaagcattttgacaagatacaggagggttggcacagagatttaaagaagccaagttctaacacaggacagcacagagacaccaatacacgggacaaaatatacccaggctgggaggatgagctgccactgattggggatgtggtgtgtaacaaactgagtactaggggccgggcacagtggctcacgcctgtaatcccagcactttgagaggccaaggcaggggaatcacaaggtcaggagtttgtgaccatc

SEQ ID NO: 728693 - DNA, 306 bp, Homo sapiens; identical to SEQ ID NO: 138542

SEQ ID NO: 728694 - DNA, 552 bp, Homo sapiens
ttgagattaagtaaataatgctgttggtcacgaatggaataatatattacctgttcttatgttgaaaagttatcaaaaataaactttcagcagcaaccacaatttacataaattcgaatacaaattaagacaaaaaattggggtaggctcatcctccattctcactttgtttatagtgagacctgtgatagtcacatttgaaattaatcttaaagtctttagttagagatagtttcctacctttaatcattgttactaaactgtttaaaaactgggagggaaaattgaaaagtctgccacactggacatttctttgtttcaaaaattgagtgttttataggcgtctgggtactctgggaggattccaagctgcttgtcatgttgatactctcaaacctgtacttgagtcagggagacagccataactacatacaataaaagcataaagggggaattagaactaggggagagtattgacaggtgggactcacctaattcaaggctaccagtaggtatttgtatgctgtgtacctttctagtctttttagtaac

SEQ ID NO: 728695 - DNA, 460 bp, Homo sapiens
tcgccgaataactacatcgaggctgcaggcgcttgggatggggcgacggtataacggggtccaacccccgaaagcggctgcctttccgccaggctatagcatttcggagatcaaaaccaagtgagctatgactgaaaggtaatttacagcaagtctatttaaaaaaaaaacaaacaaacagccaatgcattatcaattagagtcctgctgggccatattaacacagattccacttaaaagagacaatcaaaggctcagcaacgcataggaatacatttatgctcttcaaggagccaaagaaaatgcaagaacatcttccctagaaaggcttcctaccctcgcataatactttaccactgctcttaatcaaaccaggctgacagaatttcagacattagcagggtcttcccacaattcacagggatggggaaagccatgttacctgtcttaaacaaagcag

SEQ ID NO: 728696 - DNA, 658 bp, Homo sapiens
ggcgctcagaggaccccgcattactccatggctagattataatttcatatgggaaagaactactccttttatttctttggatctctgtcctctaagagtttagaacaaaacctctaaaatagtcaacaaatatgtgttgaggagagaaagaagctgggagaaacgctgaaaagatactgacagtgggttataaaatagcagaaggtctctgcaaggaacacagcaggacagaaatgtagaagtattgctctaaaaactcaacagaaaaaaaaaagctacctaaaaaatgagctattaaaagcaggagatcaaaaccaagtgagctatgactgaaaggtaatttacagcaagtctatttaaaaaaaaaacaaacaaacagccaatgcattatcaattagagtcctgctgggccatattaacacagattccacttaaaagagacaatcaaaggctcagcaacgcataggaatacatttatgctcttcaaggagccaaagaaaatgcaagaacatcttccctagaaaggcttcctaccctcgcataatactttaccactgctcttaatcaaaccaggctgacagaatttcagacattagcagggtcttcccacaattcacagggatggggaaagccatgttacctgtcttaaacaaagcag

SEQ ID NO: 728697 - DNA, 451 bp, Homo sapiens
tattttaaagttccagttcttttttccccctattaaactctagactccttaaggataagatccatatctgatttccaacatgtattgaaatctccacctctagagacatctgagatcagtccagccacagaatcagggacataagataactcagttggactctccaactctgactcttatttctttttcttgtcttattgcactggctaggacatccaatacaatgttagatgcaagtggtgataacagacatccttattttgtccctggctctaataggaacgcttccaatgctccacaggaaagtgtgatgtatgctataaatttctggtccctaccctttatcaaattagaaaactgcccctaccttctcctctacaacttaagctggaataaggcacaagggtgattggatcaaagtggaataaaccagggacttgagactgaggta

SEQ ID NO: 728698 - DNA, 438 bp, Homo sapiens
  misc_feature (72)..(72): n is a, c, g, or t
cctagggggaggtggtgatgttgggagtgggatctcctgagtccttgttgggcagaattggtgaggccaggnatggcagggaaaagtggtaacaagcctctctgcccatctacttccaatccctctctcccttactgattttttgatgccctgtcttctgggcccctaggagggatgagagaggagtagccccctttttcagagagtttggggtctacctcagagctctccctgtcaaaaagcagctgcaagcctcgcaagggtggagtggggggagactgaggaccagtagtacctgcagggtgcccgtggctgtggccagtgtcccttagccaacctgctgggctcaccagttccccgtctgatctgcctgtgcgcctcccattcttctctacccagaacctgtcatgggctggggctcagattttcctggctttg

SEQ ID NO: 728699 - DNA, 726 bp, Homo sapiens
ttactcggaacacagaaagaaggcaatggtgttttatgaaactaacaatgaaggaaccctattatatcctttatttctcctattacttgcctatattaatcaaccacttatgctggatataataacataaaagtaaaggtagagatagggccacccataattccttttcttctcagtccttccctactcatcagtaagcagaaggtagaatgttggtagaatatgtattcatcaagaagtgaaatacaaaccactgagttcgtttgtacagagtttctactgttctagcaaaaacaaactacacatgcaagtgcaactacaaaatgactgtataatttcagtttccacaaatgaggtaaatattcttatatttgcattttaaatggacactacacaacatatagggatgaacagtaaaatacaggctaatgatttaaaattctaatttttctttgcttagactgacattagatgataaatttttttaaaatatgacaagttgaaggagacactacaaagaaagaaaaaaggtatatattttagtacctttagcagcacattttccctgcttttttttttttttttttttttttgaggcggagtctcgctctgttgctcaggctggagtgcaatggcttgatcttggctcactgcaagttccgcctcccaagttcatgcccttctcctgcctcagcctcctgagtagctgggactatgggtgcccgc

SEQ ID NO: 728700 - DNA, 739 bp, Homo sapiens
tgtttgtgtgtaggggatgtggtagatcctggtggagtgaggatcggggttagttcctatggccctgaccaatagcctatactaaagatcaaagtcctccataagagttttgggctacagatagtgggagaaaaacagagagaagagatgggaagtcaatgcccaaccctgtcccatcataattgggttcagacccctcacatcaggaaatggcctcctacacagagagagaaatcttggactgcttaacctcctataactcacccctttccacacttaactctcttctcccccaaggcaaagctcctgtcctatttttcctgatctcactccaccatcagatgaaaatgtggagaggccagccagggaaagcactggggggaccaggcctcagactttcccaggaattagggggttagatgtggaaataggaactctgagcaccacttctggtggtgaagtgccatgaggccatgagcctgtgtcccgaggtggggtagggtcggggggaagcagccctgtatctaggatcatttgggagaggagctgggggtagggcattgtggttgaagccagataacattcccaaggtcacacaattcgaaagcagtcaattctagagttgggatagttcagatgggctgagcaaggctcaaaggcagtgccttcgaggacttgctctcaccccagctgggccaggaggagatgttcaaaaagcctcatgtaaggttgtgacatg

SEQ ID NO: 728701 - DNA, 458 bp, Homo sapiens
  misc_feature (32)..(32): n is a, c, g, or t
  misc_feature (47)..(47): n is a, c, g, or t
  misc_feature (53)..(53): n is a, c, g, or t
tacgtccacagagacattcactcattctctgnaagctgaatggaatnctttgncctcttcaaaaaattaaaactcttggtgacaatcaatctgttggagatgtttcactttctccactggagaaaattaaaattacctggattatcaaaacagttatgtttctctaaagtctgagactgatagtcctaaatttggtgtctttgattatagactggacttataaaatatagactggacttacagactttgattatagactggtcttattatgacctataaaaaacgctgtcttcagatgacaaatcccaactaagcatcattgaaaacaagcaaaaaaagggaactatattgtggttttggctattcctaatcctatctgactcaggctagcgtaaggtagcattgtgtcttcttttatacaactgtgctattagcagtaatgagtactgattccagac

SEQ ID NO: 728702 - DNA, 736 bp, Homo sapiens
ccacccatgccccagctggggttggcatttcagagtttgcagaatctttgtgtggcttgataggttggtccctcgtcctctaatgagtcacctgcctttcactcaacacacagaaaacaaggcaaatgctgtaaatcccatccctcctcctcgcctcctgtgcagctcggggggcacgcaagaggaagtgttaaaaagatttcattcaatgactgaattccatgctgagcaaaagcctaggatgcaagttgaaatgtggcttcaaaagccaccatcaacgaagaattacaggaaaagggcagtcaagtggtaaaagattccactcactcaacatctatcacttatacaacagctgggccacatccaatttagagtggcggaagaaagtaaaatcaatcagaaatccaatctagcactgtcatatactttctaatagtctagcccattaaatttgccaatggttaaggtagtcatgaaaatccattacaaataccggtaaaaagccctaccaaatatcaataaacgaatgtactctgaaggcagtctccatagaaattttacttaataataataatacaaaactctatttgtgatgccaatgacatctgtccaaaaaggtgtcatgaaatcagctcttttacaaatcatctcaactttgaactagatgttagcaggttgtgcaatcccgagatggtctccacagtatgaccactattcctgaaattaagccaggaat

SEQ ID NO: 728703 - DNA, 480 bp, Homo sapiens; identical to SEQ ID NO: 393738

SEQ ID NO: 728704 - DNA, 1017 bp, Homo sapiens; identical to SEQ ID NO: 338967

SEQ ID NO: 728705 - DNA, 877 bp, Homo sapiens
ggcgcctgtgcacacagacaacaatgggtcacagttacagaacctgggctcaggtgtgccctctctcgtttctcagctgggggccaacacatttgtaactgtgtttccatgaaaaaacgcatcctaggttccaaacaactaatatactgatgaacctttagaatgaactggacatttttccttgagagaacagctttgaaatgaggaccctgtggtccaacccttctcaatcatggctcccccaaaataactccaatgtgaactgttcaggggtagggggagggggagagcaacagaataacctaatcttaagaattcctctctaatccccagctcagaaagcgtcttttacagtcatcccctctgcagtgtcccagactaagcaaacaaacaaaaaaacatagagccatccccaaagaccaatatgcttgcaatccaagatgggcaagcgacccatctccagtccacatttcagggagacaacagaaaatttttctgattcttcacaaatgggaagaatcaaaagtgaactgttaccagaagcagaaggctgactgcacagccactgtgatgagtttccaagccttgcacaaatacgccgagaacgctgtggctgtacgaactgccttcaatcagacccgacctggccatgtgttatcaaggtcactccttcaggtatgactactccaagcctcaaatctctgtaaaacccaaggagatccacaagatcatctgctccagcgactcccttccccatttcacagattcctcagagaggggcagggatcaacgctaggcatttagttggagggctggatccagcccccaaatctttatccttgcgatcctctagagaggatcctctagatcttgcgtc

SEQ ID NO: 728706 - DNA, 535 bp, Homo sapiens; identical to SEQ ID NO: 153147

SEQ ID NO: 728707 - DNA, 748 bp, Homo sapiens
ctgcacatgctacctacatcagcccagccatgacagagccacaccaggaccgtgggctctattcgaaggagggatgggtgagagggggcatcccacccaagacctctgattccgggccaatctagcttaatgccggcattgggagttttgccccagtcggcacctgctggatgtgtggaccctggattgaaaggaggcgcttcggctgctggatgtgtggaccctggattgaaaggaggcgcttcggctgctggatgtgtggaccctggagtgaaaggaggcgcttcggctgctggatgtgtggaccctggattgaaaggaggcgcttcggctgctggatgtgtggaccctggagtgaaaagaggcgcttcggctgctggatgtgtggaccctggagtgaaaggaggcgcttcggctgctggatgtgtggaccctggagtgaaaggaggcgcttcggctgctggatgcctggaccctggagtgaaaggaggcactttggctgtgcagacctgctccattctcctccgcgtccacagcgcagaagaacaccagcttccatttctaaaaccattatttaaaagtcaagttcttttggtataatgtgcctaatgtgtttggctttctctaggtcaccatttaacatcttactctgcaacactacggtcctagttaagaccaaattcacagccaccaggtatctttacaaattaaccaagattggccaggcgcagtggctcatgcctgtaat

SEQ ID NO: 728708 - DNA, 343 bp, Homo sapiens; identical to SEQ ID NO: 118740

SEQ ID NO: 728709 - DNA, 1039 bp, Homo sapiens
tgtttatcgatgccaccctcagccaccgaagtatttgtggtggctgagagtggcttgtttaaaaaaaatgcagagtgcagggctgagagggagtggtagttcatgctggggcaaaagccagatgttcagtgtgatcttctgggctttgcttgctgagcttgtcatggggacactatgtgggcagcacggaggttggggtaccagatgtgcttcctgtcctcagtaaagaacttggagtatgttgttcctcaaatatcttttgatgaatgggtgctccaggagtttctactgacaggctacattttatccatatgcagaggggcagcccttctcttttgttcttgaagtattctttcgctgtgacagtgtctcatccagcagctgcaatgccacagctagggggttgtctttcagctggtgggatgaattacgcacaggcatctaccttgctgttctttggccctgtagcttgcatttgtgagttcacagggaaaggtgcgagatgctacccgtgactgtggcattcactctgggaagaactgcttggactggctctaactaacaccttatgcacactttcagggagtagaggccttacatttgctttgatattaacagcccagtttttctgtcattgtgataaagcaggaatgtgtgattatttttcttttatttctatttttaaaaaatgcttattatgtcctccacttaggtacatgtctgttgtgaacagctcattcctgtaaaatgctgctcatcattgctgcaagtcagtgcaacaaactgtgcatatgaattactgttgaaagaggtattggtttagcagcacaaatgattgggttatatttctctcaaactaagggacgtttgggagaggtggggagataattttcccatctgtttcctgaactctgttagatatccaggggcagagctgtttgttactctagctgaatctttatgtagaaaaaggatggcctgattattcattcagtcagagagatatttgttctttcgattaatatttgtggaatatata

SEQ ID NO: 728710 - DNA, 245 bp, Homo sapiens
ctcattcctcctggtatggaaaacctcagagacttgaagatggggatatgatgaacattctgtttgccagttgtttgtgtgatgaacacaggaatataccggatgcgccagtctcaacacgatttctcctccaccctaaactccctctttcagagcagcccttggagatgctcttcctaagccctcattaagtccatctgtgaatttagctaagcctgccttgaacttgtctactatttcagctt

SEQ ID NO: 728711 - DNA, 565 bp, Homo sapiens
  misc_feature (283)..(283): n is a, c, g, or t
  misc_feature (495)..(495): n is a, c, g, or t
cgcgaggtcatcaacgtttatccattttgaatgcttctatgcttcgtatatcgctctgtctatatttttgatcttcgttgaatttggaaaagccctgcggagagttcttgtgattccctttgtacttccctgacactaacacatgccctgcacacccatcatgttgcatcagtgtccatggtggtggtataaaattctcgagcttatctcctcttttaaatactgagtaaatacataagctttttctaagcttatgtatttactattaccactatgatctcanctttatttaagagcaatttaaaatgcagttcccataggtgtctttttttacctctcctaagaatatacaggcttgcctggattaagaccctatgatctctatgtagactgacttaaaatccaatggaatgaacaaaaatatttaggatgcttattggtagttgccccttttacacacttgctcccccaacttcaagcatttagcgatgagancagaccaatgtgagtgtgtaaaggaatatagtagatttcacttgcagtctaggtagtgtcagacactgca

SEQ ID NO: 728712 - DNA, 648 bp, Homo sapiens
actcctgcctcagcctcccaaagtgctgaatttacaggcgtgagccaccgcgccagccattttgtgtgattctaaattttttaaacttcccttgaatgttgccttttcagcctcccgtctctcttccatccccctcctttgtccatccctctcccacctacatcccatagctctgtccgtctctgaccacgtctttttccttttcgctgactttctcactcactgtctgtctctcattttctccacagctggcccccaagaggaccctttccaagtccccagctgggggccctgtgtagacctggagtggacacgcccctccttcccttcatgattcgtttgtagcgcaggtaaccagcgaagcatccctgttcattcctggaggggcaaccgtccctcattccacctccccagcaccaccttggcccctggatgaggaaggagcattccttcctggaagagcctggctaagcaatatctctggttctttcttctcccacctgggcctcctgggtcatctgggccatcaccctgcctctgcattagctgcaagcaaaatctttctctctgcccctttccccttttctccagattctttgcagaccatgcctttgcatgccttctgtgagcgggttggggagggaaggg

SEQ ID NO: 728713 - DNA, 380 bp, Homo sapiens
tttacagcatggcaataaaggctctctatgttcagggggtgagagaagagactagatgcattgtctcagatgtctcctgacttcctgagaaatgccactttgcagatatggggctgcttttcacactggctaagtcagttcatggcaaaatatgagggaattcagtgtgtttcagacactaaccaaagtccatccttcctttctccttccgtccctcccttcctccctttctcactcactctctctttctttttaatgccatggagtaccatatttttcaaagttccaacaaagatgcactacatttagacaatgtggaaatggccctcagccttctctccctgaagtctgtggccagcaaaaatctggactttacttca

SEQ ID NO: 728714 - DNA, 399 bp, Homo sapiens
atagaggctaggagggaggataacactggcccgcaggagggtcgctgggatagtaaatgtgattctttttgtgggagagctgttgcaaacctgtaatgaaagacagcacagaaaagcctttttgtgctgggcagcacttctcagatggtgatttatacataaagataaggtctccctaaatgcaagagcaggactcagtgtcgtggtcttttgcaaattgcaatacaaaggtaaaaacctgtgggtctgaggggaggctcgtgtctgggccctgggttggtggagaggcagggtccctgggagatgtgtagctggggggacttgctcaccgcagcagagctgggcctcctggaggctgcctagggcctgagcatgcagggcactggggtaagcacagag

SEQ ID NO: 728715 - DNA, 1143 bp, Homo sapiens
ccagagatactaagaaaaatgttatatagcttgaattaataatagcttgaagtctacttaattttgtattcatttcctggtcataatatgagatctctgagtaaatgtccgagtttggaaagaatgaatagaaaagtcctcattagttaataaataatactaggcggctcacacacaaggtttgccatggggactagtgaaatatgtgaaagcatgtagtcctcagagactaattccacaataacaacatcccgcttccagactctgagttgagtgcccagatttagacaagctcgacagtgctctaatagaaatgaaatcatttgattggcgtcattgaaaagaatagtggtttctcctctcttccattaagtttaaagagaacaggaaaaattccctattttcatattcagcttcttccttcattcatttagttctataaatttgcatcagcatatttttctataatactatcaacccatgttaaagtaattgaagaattggggcaatgttttggctgaaacaggtaaatatgaagaagtgatttggttcataatcttacttccaattaagttctctccaaaagagggcagaataatcactgtggcaaaagcaacttagttaagaatgcattatattatttaaaaaaccgttaagtcctttccttgtatacagaaagacttatttagtaataatatgctgggaggagtctacattgacagtgtctaagtctcattttcattcagtcataaattattagaaaaataaggtaagagagagtaacatttgattttattcttggacagggtaatacctgattctataatgatacaatttttgttgttatgaatatatgacacacacacacacacacacacacacacacacacatgcagacaaaaaaaaggagatggataattggtaaattgtgatcatttcaagctttgtagacagtcaaatttgataggactgggacacatattaaagccagattcattgtaacaatgtgggagataaggaaattttcaactttgccttggatagctaggtcccctgagcttactaagtctggttacatgtatgagactgagccagaacctgagttgtgtatgagtgtagtgaaacagaaaatggccagtccac

SEQ ID NO: 728716 - DNA, 1013 bp, Homo sapiens
cgattttgtcaaccttgccttcagtttgtcactaccttcacttttcttttaattccatattttaaaagtcatttttaagttaaagttattaatgcatgtgggaaaatgttcaaatagttcaaaagaacatgaaaataacaaaaatctccttttctctccctcacacgatttcctacccctagatttttctctctagaaatctaagcacttcttgtatatatagaaatgttttatgcataaacaaatatatgtatgttattttaaataatggaatcatgctaatacacattgttcatcagattacttttttatttttaaatttctactttaactaggtaaattatcataagatgtagaaagaaaagaaaggttaagactaatccccaaccattatttcccatctcttcaatgtatccagtgttaacactccacatatatgtttccatggtaccttatcttagttataacacccgtttgatcatattgtctgtattgtctgttttttgtttttgttttttttttaatcacctaagccatgaactctttgcaaagttggatggtggcttggcttggtcattacaatgtccctggtacctgacacactgactggcacacagcaagcattcagtataaaattaaggcaatcacccagatggaagaacacatagatgaagaaattaatgccattttctttgtaggaaacattccattaaaaagctaaaattgatcctgagtgttgcactatgatgcaaaatcaagaaaacagattattttatactaaagagaggagaaaattcaaatggaatacaaacgtggaaatgtgcctggagtgagtgtatgctttctgttgccactataacagcaagggacatggatccttaagtgactgtggaatataaatgaaaattctctacatgtttacatggctggctgagaaatgtactcagcacaacgttcaacagatatctattgagcggcctgtatgtaggggctctgggttgagctctatgggc

SEQ ID NO: 728717 - DNA, 918 bp, Homo sapiens
ggattggacaagcttggtctgggggagtgaagaccattcaacatcagctgcaggagagcatgtttaaagctatgagaagagatgcagcaatagtggtggcatttattggagtcaaggaagtcttcccaggaaggggactgaagcctgaaggatgagcaggaatcaatgtagtgaagtgggtgggaggaaccaagtgtggccccaggcagaacttcaggaacaaaggccagaggcaagcggccacatggtggactgcaggagctgaggagttcagcctggctggagtggagagtgcaagtgggtgggtcagaaagatgatgctagaggtggcccaccctggaagagtttgtttcagatacgtcaccctgactccactccagaccgttaatgagacgggggagaaatcagtgaccagatagaaggctctttcagcaaacgggcaagagatcaagtgcctgacctagaggaatggtagtgggaacggcaagaaattgctagctttgcacaatgattaggactagagtggagagattttttggaagaggtaatgattgactgaatgctttagaacatggctcagttcttcctcagctttgctggtctttctgtacaacttggaaagaatgtggtcattgttctggttatatataaatgcttttgtgtaggtgtaagtaggtatatttgttagttttaggagataaggtcttgctctgttgcccaggctggagtgcagtggcaccatatcggttcactgctgcctcgaactccggggtcaagtgatcctccaactcagtgtctgaagagtagggactacacaggtgcatgccaccacacctagataatgtctgtcttatctttttttgcgacaggatctcactttgttgcccaggctggtcacaaactcctggcttcaagcaa

SEQ ID NO: 728718 - DNA, 651 bp, Homo sapiens
catctcaaaaaaaaaaagctttacagtgaaaaatctgccttccaccttccccacatcctctcattctttgaataataggtagccatcattattagttacttatatgtaattccagagtgtattcacttcctaggacttccttaagaaattccacaaaccagttggcttataacaacagaaatttgttctctcacagttttggaagctagaagtccagaaatcaaggtgtcagtagagccatgccttcctctgaaggcttgaggggagaatccttccttgtttcttcgggcttctgggggttgctggcaatcttcagcgttcttggcttggctcactgaaatctctgtctccatctttccctcgtgtccctatctccctgtttcttctgctcttgtaaagacagcagtcatataggatttagggcccaccttaacatccagtgtgacctcatcttaatataactattttttttttttcagtcttgctctgtcatccaggctggagtgcactggcaggatctcagctcactgcaacctccacctcccaggttcaagcaattctcctgcctcagtctcctgagtagctgggaatacaggtgcctgccaccacacctggctaatttttgtatttttagtggagatggggtttcac

SEQ ID NO: 728719 - DNA, 1125 bp, Homo sapiens
attattgcattaaataggttttctaagccttctgatctttttgtccttgcggataccaataattcaaatattcagctgctttatgttgtcccaaatgtcttaaaggctttgtttattcttttttatttttgtcttactggattgtttcagacctgtattcaagttctaaaatttttttgttccacttagtctagtctattgttaaatcttttgaatgtattttatatttccttcaataaattcttcaattccagaatttatgttagggtttttttaaaaataaaaatctatcaccttgtaaaatttttcatttatatcctgaattgtttcactgagttctttgtattggttttcagatttctcttgcacctcactgaccatatttaaaaatcagtattttgagttccttatctgagactttaagaatttcattctggttatgatctattagtggagaactgttgtgttcattctggggtgtcatacttccttgtttttcatgtttcctgtgagactctgaatttctatcaagtttccagttgatgccaataatgctgattccacacagcctttctcaaccagcattcattatctgaaccatggaacacagagaatgttttgagaagctcttttctcaattctcccaaggatggtacctaaccagaaccattctagatacaaatcaggacactgattccttacatgcaattagtgcctttggtttagggcttaatttttttgaggaaacttggttgagaaagctgtctttgtaaagctgctaaagagaaaggctcagactctgaaaaagctagctttatagagaaaactacaccattaccacctttaattctaaccggtcttttgtatcaataatatcatatcgatgataatgaaataattggactaatagtgttttggtctacgaaatatcatctattaattcagtaattatttgtggagtacctgctattgcttagcactgtgatgctgaaaacatttgaagaataaatgatgaaataattattcataacttttaagcaccttcttcctgttgttcatcattaaacttaagtgaaatatctgtacatgactcagatactttagaaaaatattctcagcaaaaaa

SEQ ID NO: 728720 - DNA, 479 bp, Homo sapiens
taaagcattgatcctctaagaatttgttttgtgtagctcaaatatttctcatctgcttttaaaaaaaagttgattttacaaaatttgctgggagtggtaggggcggctcatgcctgtaatcttagcacttttggaggccgaggcaggaggattgcttgagcccaggagttcaaaaccagcctgggcgatagtgagaccctgtctcttagaaactacatatatattttacaaatttatttttctttgaggcagagtctcgttctgtcacccaggctggagtccagtagcatgatctcgacttgttgcaacctctgcctctgtggttcgaggtatttcggggtgcctcagccacttaagtagctaggattacaggtgtgtttcacttcacttagcaaatttttgtatttttggtagtttcaccatgttggccaggctggtctcgaactcctagcctcaagtgatctgcccgcctggacttc

SEQ ID NO: 728721 - DNA, 811 bp, Homo sapiens
ggcgccgcgggtcaggcagctgcgtgcgcgtctcctccaggcagcaaggggaacccgaggccgccggcgcccggaccatgtcgtctccggggccgtcgcagccgccggccgaggacccgccctggcccgcgcgcctcctgcgtgcgcctctggggctgctgcggctggaccccagcgggggcgcgctgctgctatgcggcctcgtagcgctgctgggctggagctggctgcggaggcgccgggcgcggggcatcccgcccgggcccacgccctggcctctggtgggcaacttcggtcacgtgctgctgcctcccttcctccggcggcggagctggctgagcagcaggaccagggccgcagggattgatccctcggtcataggcccgcaggtgctcctggctcacctagcccgcgtgtacggcagcatcttcagcttctttatcggccactacctggtggtggtcctcagcgacttccacagcgtgcgcgaggcgctggtgcagcaggccgaggtcttcagcgaccgcccgcgggtgccgctcatctccatcgtgaccaaggagaaggaactttttcaagagtgaagaataaaaagggaggatgtgaatttatttcaagatgatcatcaaaggatgaaggaacagatgaggtgtgagtggacttcccagatcaagaaatggacagcattatcagcctgaagaaaagaggccactgtgactacagtcaagatgctcagctcagcaagacttgaggacagctcaaaccatctttggctactgtgcccagtagcaaaggagtaaatgtgatactg

SEQ ID NO: 728722 - DNA, 852 bp, Homo sapiens
ttgggctctcatgccctgtgctaggttgtgcctttacatgatgcatgccctcttcaccctactcaggctctaatgtcctgagccagatctcccacccatttggtacagtacttttaactaaactacagagctcatttgaattttccctctaatgctccttttctgttccaggattcaatccaggatgccacattgcttttagttgtaatagttctttatttgttttttatctttcatgaccttgacattttttatgagtattggtcagttattttgtagaatgtctctcattttggatttatctgatatgttctcatgattcgattgcaattatgtatttttggcaagaataccacaaacatgatgctgttgtttccttgtctcagtggattgtattcagaggtataggatgtcaattaatcttattaactggtgatgttaaccttgatcacttgattaagatagtgtaccagatttttccattgtaaaattattatttattcatttgggggagatactttattctcttgtgggagatactttgaatctatgccaatttcctgtttcttctcacttttgcccattgattttagccattagtggatcttgcctgatgtaattattgctgtggtgttggtctaatggtgatttttaacttttgtcagtccttctacacttattcattgtaattttttttttttgagatggagtctccctgttgtcacctggactggagtgcaatggcacaatctcggctcactgcaacctctgcctccccagttccagcaattcttctgcctcagcctcccaagtagctgagattacaggcacccaccaccacgcctgactaat

SEQ ID NO: 728723 - DNA, 1054 bp, Homo sapiens
gaagtgagccttgaaaatctgcaaaatgacgaggttgcattgtgcaaattgaagctattatgagaatgttcaggtcaaaaaaattacctgacaaattcatgcacaggatctcacaaggaacacaaatgtgttcgttggctttaaaaaaatcacattaacattcatgttgatatacaaaaactcttctccatctgttttgtgtgagttttaccaagaaaccaaacaactggaaggtacccacgttgaagatggcaaaactaccaactgccatttgcatgaattgttgagcatgactagtattaaaaaaacttaaaaattgatataacttttgttcctacaaattggcaaaggattttataaactagtaagtcagcattagcaaaagtgcgaaaatggcactatcagatactagtggtaagagcataaactgaatattttgaataccctacaaaactaggacagtgtcctagaatttgtaatggcataaaccagaaacaacataaataaaggaacagaatttacagtacttccatgtgatgggacaccatgaactcattaatattcaaaaaacatttaagtttaaaaatgctcagaactaaagtaacatttaaaaaacaggctagctcatctacacacaacatagtaacatggtaacaatctcataaaaaatactatatgtatagagaaagaaccagaaggaaatgctctcaaatataagaaatgtaaataaggtggttagtttttagttttcttcaccctgttcagtacttctgagtatctcctatgagctcattaatctttaattttaatcatcttatttttaaaaaacaaggaccatcttgatatatgtttacttttattaaggaaaaagaatctatgaacacaggaacagaaatcaggagatcttagctctcgccctttcagtgccacaaagctgttttgtgaacctgtaaataatccatttggagtctccatgtttctcaattgtaaaatgacgatgtgctgcttctacacatttcacagggtcattgcaagaataaaatgagacaatgag

SEQ ID NO: 728724 - DNA, 723 bp, Homo sapiens
ttaaccagatctaaaaaaaaccctctcaaatatgtaatctattattttcagaagccctaagagaaaggcaaataatctcttctctatagtaactgaggggaaaacagtttaccatatttgttctgaaataacaaaacccaaggaggaacaactctctctgaggtaagagggcatcacaggagggatttcaatccttcctagtactgggaggagaaagtgcccttttctccaagaggaaagaatctatttatcatcaaacaaacaatgtgggagagttcatagctgcacaagtgttttctgggcgaagtaaaatgaatcatggattaagctatttggaaaaaagtgtgaaaacagaggagttgataccaaattaaaacgacttttggaaatatcatgtacgtatggaacaagtgcaaagggaaccactgactcagcgtcagaaatgccttgtggggctttgccgggagggacttacagtatatctttgacatcactgcgccggctcttccctccctacccggagagaggaagacttttctaagaggaagccaggccacatcagatgcccccagatggcaggacacacaagggacacatatctccggaaagaggaggcacatggttgggcaatctcgacccatgaagggggaaaagaaaagggctaaactgaagctagtgcagcttttgttctgcctggagcagttcaggctgagcatggcttct

SEQ ID NO: 728725 - DNA, 493 bp, Homo sapiens
cactatagctctgggactaggcagacctggggtcaagtcctttttccttggcccagaaatttcatcttgagcctcagtttctttctctttaaaatggggctagtgggacctacccctaggttctatatggagattatatgatgtaatgatccaacctgtacttgggaagcacttagtcaattgccactactgtttctcagcagatcttccagtaacaactaccaccacctgttgagtacccagtggtttatacacacaagcttattggatacccagggcaagctaaaggagttgttcttgttctattgtgattctcattttataaaaaagaaaactgagatttcaagaagtgccgtgtaccttgctccctgggggtctcagagctggggttagagtccacatcacagccctggggcttgcccttcatcctgccctaccatggcatggagctggctctcctccttctcagcccacaaacaatgtccactaggca

SEQ ID NO: 728726 - DNA, 585 bp, Homo sapiens
caattctggaattcgggaaaagaattctaaattcacgtcttctgacgtcacagcactttccctgttcatggaggcccgttcactccttgtacagtcagttttctaagggcagggcgtggaggtgaacttcctcccaggactgggagctggatgaacagtgaagagtaaagccacgggaagccccagtcaccacactcacagtgtaacacagagaaaagacacaagaaaaggaggaaatggagatcaaaatgtcactgccgctgtttgaatctgtagctcaagccccattcaaggggagcctcatttttgacacaggcttgctggtttttccaaatccctgttgactcttaagctgcctaagcggtttacaaggatgagcctccattcacaacaatttctatttaaggaaaaaccattggggatgggcgcggtggctcatgcctgtaattgcagcaccctgggagggtgaggtgggcagactgcctgagcccagcagttcaagaccagcctgggcaacatagtgaaaccctcccgcttctacaaaaagtacaaaaatggccaggcgtgatggctcaagcctgtaat

SEQ ID NO: 728727 - DNA, 723 bp, Homo sapiens
ggctctgaggaggtcctggtgaggtccccaagctcaggctgcggaggcttcttgggaaagtcactcagcggaggctgggaggcctttttgggaaaggcgctggagtcgcgcttcggctcgctggactgaggcttccagaggggagtctgagcggcctcgctgaactcaggctgcggcacggacttcttagggaggccaccgacctgaggctgcggaggctttttggggtacacgttgaactcaggctgcgcaggcttcttgggaaaggtactcaactcaggctgcggggacctcggggtagcctcaccgggctcgggttgccagagcttcctggggaatgcgccggatttgggttcggaggggggtctggcggggtgactgagttcgtcgggctgcaggggtttccgggccggcgcaccaggctccggcagcgaggccttcaaaggggcctcaccgacctcaggctgcaggggcttccttggaaacggagtggcccccagctgtgggaacttcttggagaggtcactcaactccagtttggacggcttcttggggaggtcagtgacctcaggcggcgggggcttcttggggaggtcagtgacctcaggcggcgggggcttcttggggaggtcagtgacctcaggcggcgggggcttcttggggaggtcagtgacctcaggcggcgggggcttcaaggacactgcaccaaactcaggcagcggg

SEQ ID NO: 728728 - DNA, 618 bp, Homo sapiens
catccgcaacagccccacagacaccatcctgttcatccgggccgctcgccgcgtgcattcaggcacttaccaggtgacggtgcgcattgagaacatggaggacaaggccacgctggtgctgcaggttgttgacaagccaagtcctccccaggatctccgggtgactgacgcctggggtcttaatgtggctctggagtggaagccaccccaggatgtcggcaacacggagctctgggggtacacagtgcagaaagccgacaagaagaccatggagtggttcaccgtcttggagcattaccgccgcacccactgcgtggtgccagagctcatcattggcaatggctactacttccgcgtcttcagccagaatatggttggctttagtgacagagcggccaccaccaaggagcccgtctttatccccagaccaggcatcacctatgagccacccaactataaggccctggacttctccgaggccccaagcttcacccagcccctggtgaaccgctcggtcatcgcgggctacactgctatgctctgctgtgctgtccggggtagccccaagcccaagatttcctggttcaagaatggcctggacctgggagaagacgcccg

SEQ ID NO: 728729 - DNA, 530 bp, Homo sapiens
taaagcaatgtgagtccactgaggaggaagagaccctgggatttcaccctctgggttagtctctgtctcaccctgttagaatgtcacgagggactgtactgtcccctctgtcaccagggaagccacaatgagagcttgaaagggtgctgtcaagataaatgtcatccttcttaaaatacatatgattgcctttttgggtgcctcacagagccccagagtgtgagacctgaaagaatgttcagcatctagctccatgtccctgcaaccactctctgtttgccttctgcattctgcactctgcggggcctttgcagccagactgctgtgtcaatgttactttcttgtcactttcctaccctgatggtcacactagcccaccccaagctccgacattgaggttttcatctctgcagggagaggttccaatgtccaccccacccccaggtacccgcctcttcccacagaagcaattttagaattttgcaaaattcttttccccttattgagattaatatttaagattaaaaaaa

SEQ ID NO: 728730 - DNA, 742 bp, Homo sapiens
gagaagagggaccatctgttccttatgtcccttttccctttcagctttttattttgaaaagtttcatacctactgatactctggaaaaattgtgcaattgaacatatacccttcatgtagattttctcattattaccattttattacatttgctcactcacattctttatgtgattttttttttgctagaccatttgaaaatttgaaaagtaagctacagatgttttgacacttcatctctaaatactttagcatgtacctcttcaaaacaagaacattgtcttacataagcacagtatcattacatgcaagaagtttaatattagtaaataacatatactttataatctttattcaagcttcctcaacttttttgcattttggcaagtggtggttctggtaagatgtctagagttcaattcaggatcatgcattgaatttaattgccttgtctctttatattccttaatctagaacagatccagtcgttacattgacatttttcgatgagtcttaatagaatgtttcacaatttgttttctcaccattttttttggagagacaagagtctcactctgtcgcccaggctggagtgcagtggcgtgacctcagctcgctgcaacctctgcctcccgggttcaaatgagtctcctgcttcagctgcccaagcagctgggactacaggtgtgtgccattatgcctagctaatttttgtaatttttagtagataatgggatttcac

SEQ ID NO: 728731 - DNA, 708 bp, Homo sapiens; identical to SEQ ID NO: 93101

SEQ ID NO: 728732 - DNA, 281 bp, Homo sapiens
gttgcttccaaatcttggctgttgtgaatagtgctgcagtaaacatgagagtgcagatatctcttccacatactgattccatttcctttggatatattcccagtagtgagattgctggatcatatggtagttccattaattactgctaaaagctaaacatcagatttttatacatatagatggcatacattcatcagaaatatatcgtgcttcataaatacttgtacttttggctgcacattataatgtagtatggcatagtatcgagtaatagcatatca

SEQ ID NO: 728733 - DNA, 236 bp, Homo sapiens
cgcctgggcaacaagagcgaaactccgtctcaaaaaaaaaaaaaaaaaaaaaagttaagatggtaaatttaatgttacatattgtaccacaataaaataaaatcctgccaatacaacaatattgcaggactaatacagcaaccaccttccttctcagaggttctaaggggaagtaagagctacaaaacatttttattctattaatttaaaaatatcctgtcccataaatcatattt

SEQ ID NO: 728734 - DNA, 326 bp, Homo sapiens
cgcctgggcaacaagagcgaaactccgtctcaaaaaaaaaaaaaaaaaaaaaagttaagatggtaaatttaatgttacatattgtaccacaataaaataaaatcctgccaatacaacaatattgcaggactaatacagcaaccaccttccttctcagaggttctaaggggaagtaagagctacaaaacactattttgagcttctctttctccctttcctagatacataaagctagataaccgaaagtgattaacaaagaaacatttatgaccaaatagctgcattaactggtgagtcaacctaacatttaaagaagaattaatacc

SEQ ID NO: 728735 - DNA, 5613 bp, Homo sapiens; identical to SEQ ID NO: 87626
  misc_feature (1)..(2): n is a, c, g, or t
  misc_feature (36)..(36): n is a, c, g, or t
  misc_feature (889)..(889): n is a, c, g, or t
  misc_feature (3773)..(3774): n is a, c, g, or t

SEQ ID NO: 728736 - DNA, 902 bp, Homo sapiens
atatcttaaaatccacattttctaaatgaacacctccaggaattcctcccatttagtcaactatgtgttgaatatttaggcttcagtttcttgacttttaaaataattaaacatataaacaagttagaaaaactagtttattatgcccagagaaagtagtactgcttatgaatttctcgatctaactttctgcaaaggaaggctgtaaaaacaccaaatctggactctccgtagggtagttctgatctaggaacacatcacaattaaattgtataacactacgcttgaagatttatacaaacacacactgtttttaaaacttcacttagatctggttagagtattcacttcttcttcttaaggaatggtcaaaatgtaatgaatcaagaaaaggctttgtatttcaagaatttttttaaaacaatttgtatatactgtaaatgtcaagcaataggaggttggttaaataaattatggttaacaatagattgcaaaccatatagtgattaaaataattattaggtaacttgaaaaatgcttaatggaaaaagttttaaaattagattccaggataccatgctctaaataagccaaattttggggtaaaaaaaataaaaaaccatgaaaccagacatagaagcagaacctaaagcatatttatcaaaatatctttgtttaaaaaaaatgtcttcagtggtcgtcttggctggtgggattttaggtcattttaattatctttataaaactttattctctcgaattttaaaattaacatctatttctcttataattaaaaattaaatgttatattttttaaaaagtatagtttatttattccagtagtaaaacattattgaaaaaccaagagaaaagcaagaagaacacgagagagagagaaaaat

SEQ ID NO: 728737 - DNA, 541 bp, Homo sapiens
actcacttcacctcttagtcttccagagaggatctttcatcctgccatcctgaggcttctatttttgaccaatagctctaaagaccacgggttcccataacaacctgatatccctttctcatccctgccatccctgaataaggcttctaatttattatgctttaacaagttttcaaatagcaagcgagacacgctggaatagttgagagagccccatgctctaaataagccaaattttggggtaaaaaaaataaaaaaccatgaaaccagacatagaagcagaacctaaagcatatttatcaaaatatctttgtttaaaaaaaatgtcttcagtggtcgtcttggctggtgggattttaggtcattttaattatctttataaaactttattctctcgaattttaaaattaacatctatttctcttataattaaaaattaaatgttatattttttaaaaagtatagtttatttattccagtagtaaaacattattgaaaaaccaagagaaaagcaagaagaacacgagagagagagaaaaat

SEQ ID NO: 728738 - DNA, 619 bp, Homo sapiens
catgggcaatgagaaatcctacttataattcaggcaaatatatggggctcgtatctaatgtttaattaatgggagagaaataaaatcctctggatacttgggagttctccatgaccatatctagcctgatcactgtaatgaaacctacgtttgtaagcagaaatagaaagaaatttggaacaactcttggtaaataaactcagtgatgatacaacctcttccacgtggtgttcacactcacaccggcagttgaatacagcagccacggggtttcttctggagactgacttcagcaacacctttccccttttagttaataatttttttaattgtaagtctttctaaattttaaatttttaaaattttttcacctcttaatcagttctgttcatctttatttctattacttacctcttccttctactgcctttctcttggattctcttaggtaacaaaaataaaaaactcttgtatcgtactaaagaggcctcataagtaattcccaccaccccaccattgcacgtgaatttctttgttttttattttagagaaagagtctcactccttcacaaacacaatgccactcacaggctggagtgcagtggcataattattgctc

SEQ ID NO: 728739 - DNA, 839 bp, Homo sapiens
aagtcaaagtaatatcaaatcctaaattcagttgatctgggccgagcatggtggctcatgcctgtaatcccaccactttgggtggccgaggggggcagattacttgggctcaggagtcggagaccagcctgggcaacatggcgagatcctgtctctgcaaaatatacaaaaattagctgggtgtggtgtcagatgcctgtagtcccagctacttgtgaggctgaggtgggaggatcgtttgagcctgcaaggtggaggttgcagtgagctcagatggtgccactgcactccagcctgggtgacagagtcagaccctatctcaaaaaaataaaaaataaataaaaaatcagttgaactatatggaaacttctgtacctgtgtcaacggtgcatcttatctaatactatatgatactgtaatctaatattatctctgataattcaaaaatgctaataaactctgctcaaatgtgttagtttttcatacttcatcctatgccaggaaatgttttgaacttcaccaaagctttgctaatgtctccctaccataaggctgtcagctgaaaatagcaaattactgcccgactcccattgaccataatatccattccgcatgatcctagttctttaatttactggaagtctttactgttttgtggtacctactaatcagagactcaaagcctatagatacagaaatgtaacagtaaatctcaacctaaggctaatttgcaaataaaattacaaaatcaacttagaacccaaagactcactaagtgatatgcttttgatgttttgaaggttttaaaaggttataaattccattaaattttagcatac

SEQ ID NO: 728740 - DNA, 516 bp, Homo sapiens
tggagttttgccatgttgcccaggtcggtctcaaactcctggactcaagcaatccacctgtctcagcctcccaaagggctagggtacaggcatgcgacaccgcacttggctaggaataataatattttaaaacaacaacaacaacaatgtaaagttttcattctctggaaatccaattataaattccaagcatgggaaaaaaatgactcataacaaggagaaaagtcacttagtaaaaacagatccagacatgacagaagtaataaaataagccaacaaaaacattaaacagctattacagatatgctgtaaatgtatatgaagatagaggaaagcatgaacctgatcaagagtgacataaaaagacccaatttgaaattatagagatggaaaatacaatattttacatgaaaaatgtactgggtggtattgacagcagattagatactgccaaaaaaagtatctgtgaacttgaagacatagcaaaagaaactaactatccaaagtgaagcacag

SEQ ID NO: 728741 - DNA, 439 bp, Homo sapiens
ggctttgaacacaatctggccttcagatgcagttgagacattacagtaatcatcaaaataatcccatctccaccatgcttattttgcaaaagcagtatagggccttcctctcatccctccatagtggttggaaacagcaatcaaattatagcagcgaggccctgcgcttggattaatcagaaattccaatacagccaagtcattgataggaaaatcaactaagttatctaacttgtttctcaaggatctactgtaagaaaaatcacttgagatgcaacagctactggaggcagggatcatacatccaatttcttagtggtggcttcttgacgatttggataccaggaatctttatcacttagttttcttttgttgaaaagggtctgaggcagtcttttaatttcgcaaaagttttttttttttcaaggaagtttatatt

SEQ ID NO: 728742 - DNA, 309 bp, Homo sapiens
gttcctaaaagattatttcagagtccactgttgtgggctgacttgaatgctctcaaaattcgtaagttgaagccctgacccccaggacctcagaacgtgactgtgcttggacacagggactttccagaggtgattaaggtgaagtgaggtcactggatggccctcctcctatctgactggtgtcctgatggggacgcggacacccacacaggaacggacccggggagaacaacacatcgtctctgcgccagggagagaggcgtccggggaacccagccgtgcccacgcatttatctccgccttccggct

SEQ ID NO: 728743 - DNA, 300 bp, Homo sapiens; identical to SEQ ID NO: 1755

SEQ ID NO: 728744 - DNA, 305 bp, Homo sapiens
atcatataccaatgccttcctttatttctttaaacattttaacatactcattttataatttttatttaaaatttctgtatctgaagtccttgtgagtctggtcttgaggtttgaagattttgctaattcttattcgtgctggctcagttccttgcgtgttttggatttttttttttttacttttaaatgtgtttaagttgacatataattgtacatattcatggggtacatactgatgtttcaatatatataatgtatagtcatcagatcagggcaattagtacatcctccatctcaaacattta

SEQ ID NO: 728745 - DNA, 478 bp, Homo sapiens
ggcaaaaaaccaaatagcttaccctctttaaatttcccttttaacttccttacaaaactccctaaacacccatttacgactttgtccatcaaatatggtccaacctaagcttggtttgcatggctcctacttccctttcacccttcccacttaggcagtgtctcccaagtcccactgcagtttctatttgtctcctgactgttactgtatcagttcttacctaaataacataacaactgatctccctactttttgcctatgccctcaaatgtgctcattgttgatctatctccctgttaggtgttctttttctcctctttagaaagcagccaaggaaaccagggttctctcaaagtggaaaatactggaacttatgtactgttatcataatgatagttggtgttttgaattataagaatgattccaggtggtttctaaatcatccaataaagctgtattcactctgtaaaaaaaatta

SEQ ID NO: 728746 - DNA, 521 bp, Homo sapiens
ctatccggggcaattgtagcgtttgggtccttttacccctatgtcccccggctatacttttaaaacagctttagctgttctttatcttgtgcacatgatacaaaatatgttcccgtacaatatggggctgtcacttcttgccaacccagcaccctcttcctcttctaacctgctttctgaggcttctgctcttcacctcctgctcgctgatggaaacctccagggcaaagctgaaggtttcttggggaagccaggaaagccagtatttcctatgtgtcagatctgcttggcttccaagaagggatgcatgggctttttggccagtgtttccaggaggctctgggcttcctgcttcttccccgcttcccccagagttcacagatgttgaagtttctgaaggttgacgtcactggaagtctgaccacaaacaagttggctgttactgtatttgaaacccagtacctttggcagctcacctctaaccagtaaaataagaggattccatggtttcagcagttgtc

SEQ ID NO: 728747 - DNA, 495 bp, Homo sapiens; identical to SEQ ID NO: 114429

SEQ ID NO: 728748 - DNA, 1175 bp, Homo sapiens
aaaagagccaaaaatgtgctcccaggtgcaaaaccccagccccatcagaattgcttctcagcactttgggtaactgttttgcactaacagcttcctccttgtcttttccctgggaacatgggagcactgacacagaactcaactggtccagccctttgggaggcccaggtgggcagatcacctgaagtcaggagtttgagaccagcctgggcaacatggtgaaaccctgtctctactaaaaatacaaaaattatccagtcgtggtggtgcatgcctgtagtcccagctactctggaggctgaggcaggagaatcacttgaacctgagaggtgaaggttgtagtgagccaagatcgtaccactgcactccggcctgggcaacaagagcgagactttgtctcaaacagaaacaaaacaagaaaaacaaaaagaacttaaccagttctccccagatctcagcgtgcatgcatatatagagtttagtaaaatgtgtttcaaaaaaagaaggataaaagaaagtttgaagtaagatttgtaaaagaatgaacactttaggttttgtgtgtgagtgcaaaatgtaaacacggcatttgaaattttttggtattgaaatccttaatgcctgttagtttctttatggttttatacaattgagataggttctgaagtttttttgttgtttgcttttagaaatttttaaaaatacaaaaaaaaagcgcagaaacattttcatctgggttactgtgtttatagactattctatgactcaagacaactaggacaccatcattttccagataagaaataacagttcaagttcattagggaaattatcttcccagtccaagcaagcaataatgttatcaacttacaatattggacaatcttcatattctatgagatgcctttaaaatttctttggatttaatgctgctcttggtcagttgttcaaatgaaacattgtaatttcatgttaacgacaagagtctcacgggagtctctttagatgctgcaggaactgagaggatagaagacctctctatacatctacattgcccattggagtaaagcactttacagagagatggatgccgctttgggatttggggtctatgtaatgctgatttttttcaaacctgtttggaaatattacttctttgggatggctgaaataac

SEQ ID NO: 728749 - DNA, 685 bp, Homo sapiens
ttgaatctcactttaaaaatgaaccacacaaaacttcaagaaacgaaatagaaatcaacatttactgcccgtaatattgctcatggttatagctagtatcacatagtgatttacaaaccatgaaattccagatttaaatctgttgcactacaaaaatgtctaaatgatgtctgctaaatttgtgagttatagaagtacagaaataagtcattttcatttcaaatgcagtgaatttctaatttcatggtatcatatttttttcctttgcagttttggtaagactcccccattactttgctaagacttgctttctcaaccagtgggatgaaacgagtgccagtgtgttgactgagccttcttaggacttaaggggctctgggagaggccaaggcagcagttgaaaactgcagcttcacctggcctttgggctgttttccctggcccacacagtgtggctggttaaaacattctgaatttgatgccaacatttttaaaaattgggagatttgcatgaaaatccagaattcgggtaacttttgaatgatctgaagatctggcaacagtagacctgacccacctttgtgcacgggacttaactgagaggatctgagtagcagacaccctaagagcatgtcattgtcttctcaccagttactctccagttggctagagtcccctccgagca

SEQ ID NO: 728750 - DNA, 645 bp, Homo sapiens
gctactcagaatgatgtgcaactgaaaacttatgagctgtttatttccaaaattttttttttaaaattttcaaactgcccggtaactaaagccatgaaaccccaaccttgaacaagaggggaatgctgtatatatgtttgaatcatattccattgggaataatttacataagatatacagcatagctatatctgtataaacaacacaggtttgaactgtgcgaatcttcttacagatgaaacttaagattgttaactaaaaaaaagatggtagaaaattacatatagttttattttatgtcttaaataataataatcaggaaatttggataaatatataaaaagttattagcagccaggcatggtgactcactcctgtaatctcaacactttgggaggctgagacgggcagatcacctgagggcaggagttcaagaccagttctagccaacgtggtgaaactccgcctctactagaaaaacaaaaattagctggacgtggcagcacatgcctgtagtcccagctactcatgaggctgaggcaggaaaattgctttaacccgggaggcaaaggtttcaatgagtggagattgcgccagtgtactccagctcatcagcctgggtgacaaaaaaagactccgtcccca

SEQ ID NO: 728751 - DNA, 1680 bp, Homo sapiens
gcagcaaagcagaagcagacaactaggcacaaagcaacagagttttaaagttttcttctcctgctactacttagcatgtcttacatgaggagtatttacctttgtttagccaggagcagagatgcatcctgaatgtacacgatggcttctaacttggcagcgtgaattttcagctgagcaggtactgctcggagacttgtaaccaaaccgcctctgatggagcacggctggtctcccaccatgtgtgtgaatagtttgggggcttcttatgccacgctgctctacctgcaggaataaaggctaggacaaaggagaggatgcttgctatggtttgtctggctggggcctgtgcgagcgactcaccgcactgatgctgtgtgactccccagctcacatttaaggctggtcacggggctggcgcagatccccactcctcagttagcgcacggtttaaaggagaaaccagactccctgacctaaatcactcccagtcctctctggatgcgggacagctgtcgactagcagtgacacaaccagccatcaagtggagaatcgttgcgactgcagtctgtgtgcaggtggagcccgggagaatgacagtctaatttcggtcatccaacggcttttccttattttcctaaataatcgtgctcgctaagtatacagttgtctggattagcctgcctgccatgcagtcctcatcaactctggctggaaatcagggtgccaggcaagccgcctttagccctggctcctttctgcgtgatgctatgcagctaggatgggtcatgctgacaacaaagaaggaagcagaaagcatcactttctcttctcttgtgatgttagcggaacataactcttcttcgcagtgatgcccttgtgtgtggtgtatgtgtgtgtgtgtgtgtgtgtgttttaattcatctaatcgaagagcccaacaaatatcatcatggatgtgatttttaataatttggaaaaaacaaaaaaagacagcctgtggagacagcgattcgaaacagcggcacatttaggttattgccaatttgaaatacttggtttgtgaagctgagccctaagggacaagctcggtaactgaggaagagatcgtagataaagaaataaaaatgacaagcgtaatggaggctctgcgaagggactgtcagagcatcagttcatggatggcaatttcaccaggctgagattgaataattcatagattgaaattaccctgctttcacctttcccatttaagccggcatgatctgaatctctcataaattttcaagataaagtaaaatgccaatttgaatctgaagagcttttaaaaccagatgctgcatccctgaatctttcggtatctttcacaattatcctatgagaacagcacttcatcacgaagcaccattaccagggaaaattacggtgattacaatagcaacaatagaataccatcaaatgatctctaatttacctaatttgctaagactgactgtacggttttgatatccattgtatgtcaccatgcccggcacccgtgaagctatctcgcactggaacaaaagtggcatcgtgtgtgtgtgtgtgtatgtgtgtatgtgcacgcacaccctgctaccttaactgtgaatgcctagcaaagaacattctcctaggttacaatatttctttcctttggt

SEQ ID NO: 728752 - DNA, 483 bp, Homo sapiens; identical to SEQ ID NO: 129163

SEQ ID NO: 728753 - DNA, 569 bp, Homo sapiens
caaggatgtggctggagaaaaacagggcaagtggaggtattggagggacccaccaaaatgaaaagcagcctgtccagagctgtaggagttgaaacagttttctgggatgatgatgacaggctatgaaaaggacaggaaggtacctgatgggcgagaagcttaaggcaacaaccgggaaactaggaaaccgttggcccaggttttgtaccaattgtgctgaggtcatccaggcaaaacctcaagaatgaagacatctaatttcaagaagggacaaagggatccccaataattgggaagtcacatcacaccttgttcttggctaatacacaacagaaggtgaagtatgttttccaaatgccccttgtaatgaaacagttattgaatgtcttcccaggacaaactgggaaggagagcacccatctaccgccgttcccgcagtcctgcagtcctgcaggtgggccagtcctgccaacactccagctcccctcacagagcataaactgaatcaggtggccgaaccaccggaagccagagtccccagtgtccgcgcccacacaggggtgggtagg

SEQ ID NO: 728754 - DNA, 392 bp, Homo sapiens
  misc_feature (278)..(278): n is a, c, g, or t
  misc_feature (333)..(333): n is a, c, g, or t
  misc_feature (380)..(380): n is a, c, g, or t
ggagtattaaaagtgcccgcacttgaaatcttactgcgtgtcctgaagagagccctgtccctttcccatgagatgctgagccgtgatctgtactcgggaagcacacagatctcctgtctccaccctggcgtgttctgacaggtgcagccgctgtgtcaccagcaccccggcaagggagaccgcctccgtcgcccctccctggcccacgccctcccagacccggccctcgtcgccgctgtgtcgctggtgagggcgaagtgttgctcaggcccgggctngacgcagagccagagctgtccccagaggagcagagggtcctgggaaaggaagctnaaaaaggaacggaagaaagaggagaggcagcgtcttcggggaggcanggcttttttgcc

SEQ ID NO: 728755 - DNA, 315 bp, Homo sapiens; identical to SEQ ID NO: 71793

SEQ ID NO: 728756 - DNA, 1087 bp, Homo sapiens
aggttacacttgtgaagaaatttgctggaaattaatggaattgctgactttttacagtcaggctgcctacctgaaattttggacttagttcttaaaggtaaaaaggtgcaattttgaagtgctcaaaatctgttcttgtatttcataatcgagaacttctgtgtcaagtaagaaatactcttcacacactatattttttttgagggaaacagatagtgctattcagaaatagtcattctgaaatttcttattaattggtcaccaaagggtggacatatagaggagaacatttacatgcatggtgttttaattataaaattaatttttatctagaaatattaaagtaatttattaaatacagactgattatggatttttagcagacaaaaccaattactgtttactctgtgccttgaggccttgctcttttcacatactattctttttttttttcctgagtttcgctcttgctgcccaggctggagtgcaatggtacaatcttggctcactgcagcctttgcctcctgggttcaagtgattctcttgcctcagcctcctgagtagctgggactacaggcatgtgccaccacacccggctaatttttgtatttttgggtagagacaggtttcatcgtcttggtcaggctggcctcgaactcctgactgcaggtggtccacctgcttcggcctcccaaagtgctgggatcacaggcatgagccaccgcacctggccttcacacactatcgtttaatcctcaatatctgtaaactttggtgacacatccatttaaaattcaaaaaaccatcttggcttagcacatgactgaaaatgaaaaaatatcaaggcaaccacaacatgtcatgctttttcttcttttgaaacatcatcacagttgataattggtttactgtttatgacttttctgctagactgtagtctccatgaaagcaggatacttactaggtttttcttattcaccatggtatccccacctagcacagtttccagcaacattgagtagtcagtatgtattaatcaaataaataaaataataaataaataaatgtgttcataatatttattgct

SEQ ID NO: 728757 - DNA, 788 bp, Homo sapiens
ctcacccgccttcagagacttcttggcccatcttagctggaagggatctgttccagcgctgagcttttattttgcttagcatctactcagatgccttgactgtgtgtgtctcacagtcctactgactgacaaactccctgggggccgagatggcatggattcaggtctcagatgctctatggcacctgggagcatcttacacaggtgaagtgctcagtgatgatctggggtcactattctctgcagatcagcatgtctgagaggtaggggctcacagactgtggaactggtgtaagacctttgtcttttcccagctactaacaggtcctgcttgtcacagcccttccatgatacaaagttaagtcattttgtgtctgacacaggcaaaggaaaatgacaggcccttgccttcccggtcctcaagggtcagctgtaagatgatgtcataaagccggatcaggtcctggggccgggggaagcacttgctgtcatcctctggctgctgctgcagcagagccctctgcagacctttggccatgctctcattacgcttgattgccattgacagcttgatgtaagtcaggtaggtggaatgcaccacacgtcagctcaagttatactcagagaagcagaggaactgggaggactgcactacgagttggggctgacccagaggaagtcgggggtgagttggggcaaggccacagcaggccatttggcctgggcttcaagggaccctgtaatcccaactacttggcaggctgaggcaggagaatcacttgaatccg

SEQ ID NO: 728758 - DNA, 560 bp, Homo sapiens
tttttctcttaatctgccttactattttctaatgtagttactgatcaaacttagcagtaacccactcattttgtgtgtaggcaaaagcaactatgaataaacagaagaagtctcccacagtgggtaaatgtgtggacctgggtttgaaacctgatgaaacttgctggctgtgaccccttgggccagggattaactgctgtcactcttagttccctcaaccctcaggtgcatgtgattatattcactgcctgatatggtttggctctgtgtccccacccaactctcatcttgtagctcccataattcccacgtgttgtgggagggacccggtgggaggtgatggaatcatgggggtgggtctttcctgtgctgttcttgtgatagtgaatgtgtctcatgagatctgatggttttaaaaacgggagtcctcctgcacaagttctctctttgcctgctgccatccacataagatgtaacttcctcctcctttccttctgctgtgattgtgtatcctccccagccacatggaactgtaagttcaataaacttctttcttttgt

SEQ ID NO: 728759 - DNA, 499 bp, Homo sapiens; identical to SEQ ID NO: 84064

SEQ ID NO: 728760 - DNA, 1303 bp, Homo sapiens
cggctggccgagctcaatcagttccatctccgtgggcatgtaacccatagtcctcatgagattccccagatccttacaagagatgaacccatctcggtccttatcgaactcaagaaatgcttcccgcagctcttcaatctcatcttgtcccagtggtctttcccgctgtttctcagcaatgcctttcctcaagaagatgcaggcggggcccatggggaactgcatggaggggtggggtggagctcgcagggcaccagtctcaagatggcccctcctccctgctccctgtcggagctcagcctccttatcttctccagcactcctttgccacctcttcctgcctctcttggcttctccttcggtcccggtgtcttagagctgtgacagctgggctggaaatccgcatgaacttgggtggccgtgtagactttgatgactttgtggagctgatgacccccaaattgcttgcagaaacagctgggatgatcggtgtccaggagatgcgggatgccttcaaggagtttgacacgaatggagatggggagatcaccctggtggagctacagcaggccatgcagagactcctgggggagcggctcaccccccgggagatctctgaggttgtccgggaggctgatgttaatggagacggcacagttgactttgaagagtttgtgaagatgatgtctcgctgaggaggtcctggaagctccagaccctctccacctggtcaacatggagcaagcgcttgtggagaaccaaagcccaaaagccccagatccccttaaagcagagagggagggcaggcgggagggagggcattggcatgcggcgctgtgcatggggtgagacccagagcggtatctttgccaggatgggggcgtctgcagaactaggttaagaaggaagagtctgtggatggaaataggaagcgtgggagggtccagttgccacccccaaaaattccaatgattcttgacatcttttcacttcacgtagtcctaagtccctgtgacctgccagagtctcttccccagcttccccttgggtgaaaatagtctcttctcctgttgggtatcaaaaggttcagaacgtagtctctactcttcccctgcctgcatcaactgttgcaaatcccgtttctctctcccggtaaggggacaaattatactttattcaggtgatggttacatgaacagcccagacttcaccactacgcaatatatccatgtaacaaaaccgcacttgtactccctaaatctatagaaatacaaaatgaaataaaacggatgcaaatcagtca

SEQ ID NO: 728761 - DNA, 1262 bp, Homo sapiens
ggagaagccaagagaggcaggaagaggtggcaaaggagtgctggagaagataaggaggctgagctccgacagggagcagggaggaggggccatcttgagactggtgccctgcgagctccaccccacccctccatgcagttccccatgggccccgcctgcatcttcttgaggaaaggcattgctgagaaacagcgggaaagaccactgggacaagatgagattgaagagctgcgggaagcatttcttgagttcgataaggaccgagatgggttcatctcttgtaaggatctggggaatctcatgaggacgatgggttacatgcccacggagatggaactgattgagctcggccagcaaatccgcatgaacttgggtggccgtgtagactttgatgactttgtggagctgatgacccccaaattgcttgcagaaacagctgggatgatcggtgtccaggagatgcgggatgccttcaaggagtttgacacgaatggagatggggagatcaccctggtggagctacagcaggccatgcagagactcctgggggagcggctcaccccccgggagatctctgaggttgtccgggaggctgatgttaatggagacggcacagttgactttgaagagtttgtgaagatgatgtctcgctgaggaggtcctggaagctccagaccctctccacctggtcaacatggagcaagcgcttgtggagaaccaaagcccaaaagccccagatccccttaaagcagagagggagggcaggcgggagggagggcattggcatgcggcgctgtgcatggggtgagacccagagcggtatctttgccaggatgggggcgtctgcagaactaggttaagaaggaagagtctgtggatggaaataggaagcgtgggagggtccagttgccacccccaaaaattccaatgattcttgacatcttttcacttcacgtagtcctaagtccctgtgacctgccagagtctcttccccagcttccccttgggtgaaaatagtctcttctcctgttgggtatcaaaaggttcagaacgtagtctctactcttcccctgcctgcatcaactgttgcaaatcccgtttctctctcccggtaaggggacaaattatactttattcaggtgatggttacatgaacagcccagacttcaccactacgcaatatatccatgtaacaaaaccgcacttgtactccctaaatctatagaaatacaaaatgaaataaaacggatgcaaatcagtca

SEQ ID NO: 728762 - DNA, 869 bp, Homo sapiens
gaggtagctctattaaacatgccaacttgacagatgagaaactgaggcacagggttaagtaacttgccacagagatctgattcccatttcatagatggagaaatggaagcatagagggattaagtaatttcccagggatcaccagcagtgcctgccacataggaagggctcaaaaaataatgttgggggcttttacaacgagatgccttactggggattttttttttctttgcagagtttgtgaagatgatgtctcgctgaggaggtcctggaagctccagaccctctccacctggtcaacatggagcaagcgcttgtggagaaccaaagcccaaaagccccagatccccttaaagcagagagggagggcaggcgggagggagggcattggcatgcggcgctgtgcatggggtgagacccagagcggtatctttgccaggatgggggcgtctgcagaactaggttaagaaggaagagtctgtggatggaaataggaagcgtgggagggtccagttgccacccccaaaaattccaatgattcttgacatcttttcacttcacgtagtcctaagtccctgtgacctgccagagtctcttccccagcttccccttgggtgaaaatagtctcttctcctgttgggtatcaaaaggttcagaacgtagtctctactcttcccctgcctgcatcaactgttgcaaatcccgtttctctctcccggtaaggggacaaattatactttattcaggtgatggttacatgaacagcccagacttcaccactacgcaatatatccatgtaacaaaaccgcacttgtactccctaaatctatagaaatacaaaatgaaataaaacggatgcaaatcagtca

SEQ ID NO: 728763 - DNA, 1065 bp, Homo sapiens
cccgcagcgccctcgcccagccccggctgcgtttccctgcccatgacccgctcgtggggacccccggcccggcccggaacttttctccccaacccccaaacccacgactcacttccacaccgtcttccccagcgtcccccgacccacttcatcctttccggccatccctcggaccttgacccccctgtccgcgccttcaaggctcccaactcaggcaccaggtccgcacctctcccgcgccccagagccggaaatttctccctcccagaccccgcgctgctcttctaacttctagatcttttctctcgcttctcagctgaatctctctgaccattcctctactggagcccccaatgaaagccgcaaacctatacccttgacgcccatacctgcctcagtttccccatccacacctggacgcaggccctgccgccctgagaccacagtccaaccccagaccatccctctggcctctgctgaatctcccagagtgtgtccatctggggatctaatcttcacccttcttgaagtctccgatctgtccctgatcccatccatgctcaggccttaggtctggccattcacacacacacacacccccacaccccactcccacacacagttcctactgtcttcagtccatggggatctcatcacccactcccagccccagctccagctgccctcacctctctagcagctctcacccctctgagtctacctaacctggagggggcttgaggggcacttcagggccctgccccctaatgtaacccctctctcaccccggcacaacctgggcttccacagtctggagctgccctacccccagattctctgagcactttcccccatccccagggccacagatccccttccttacttgttggggggaggtctggagcacctcgccaatgcccttcccccatccggctgggtccttccagttatttatttgtgtatttatttatttatctatttattattctatttaatctcttggcctcacccagggaccgtctggcttccccagctggactgggaggtcaggaagccaggcaagga

SEQ ID NO: 728764 - DNA, 430 bp, Homo sapiens
aggggttgcagtcagccgagatcgcaccactgcacttcagccacctgggtgacagagcgagactctgtttcaaaaataaataaataaataaaatagaattctgaattttatttttaataattattttgtaaaaagaatgtcttgttttttggagttgttgaatttattgaattgacaaaaattatgtacaagagggtacaacatgatgtgattgaagtatgtatacgttacaaaatggctaaatcaagctaaataacatcacctcccagacttatttttttatggtgagaacacttaaaaaatctgctctcttagtgatttccaagtgtatgttatgttattaactataggtaccatgttgtcccatgggatatcctgaacttattcttcctctctaaaaatgacattctctgtcctttggcatctgccc

SEQ ID NO: 728765 - DNA, 679 bp, Homo sapiens
aaccactcatggcaagacgggggcccaccggctggctggctcctcaccaaactctactccgcattgactgtgggctcttgttctagaggcacccgcatcctcaggatgaaatgtgagtacaagagcagagactgccggtgctggtgtgtgcagcctctgattcaacagaaatctggaagtgttcacagcttggcccggagaagatcgttttaaatctacagctttaaaatgtggttgaaaaggagcccaggttggattctgccagcaggtccgctggccgctgttacctccccactgtcaacgcctaggtctctgcctccagccctgtttcagcctgtccttgaggatttgcttcacctcatttactgagcttgccacagattcattacctggcatcagagctcccctctcactgagcctgcccagaagggtgccagtatactagccagatgccgctggagggactccacaataaagcctggctattaaagacttcaacagtctcataaagtcactttgccagctgtagagcacacaagtgcccacagatccaagcctccttccttccccaaagaaacaccttggataaagtcttggaatatcatccattagcacatggctccagccaacacatgaattcccttacaccagcacatggtctctctttcctgttcattca

SEQ ID NO: 728766 - DNA, 3124 bp, Homo sapiens; identical to SEQ ID NO: 381387

SEQ ID NO: 728767 - DNA, 2004 bp, Homo sapiens; identical to SEQ ID NO: 381388

SEQ ID NO: 728768 - DNA, 596 bp, Homo sapiens; identical to SEQ ID NO: 58830
  misc_feature (47)..(47): n is a, c, g, or t

SEQ ID NO: 728769 - DNA, 1319 bp, Homo sapiens; identical to SEQ ID NO: 81283
  misc_feature (494)..(494): n is a, c, g, or t

SEQ ID NO: 728770 - DNA, 1964 bp, Homo sapiens; identical to SEQ ID NO: 81284
  misc_feature (494)..(494): n is a, c, g, or t

SEQ ID NO: 728771 - DNA, 2110 bp, Homo sapiens
atggacgcggcactgctccacagcctgctggaggccaactgcagcctggcgctggctgaagagctgctcttggacggctgggggccacccctggaccccgagggtccctactcctactgcaacacgaccttggaccagatcggaacgtgctggccccgcagcgctgccggagccctcgtggagaggccgtgccccgagtacttcaacggcgtcaagtacaacacgacccggaatgcctatcgagaatgcttggagaatgggacgtgggcctcaaagatcaactactcacagtgtgagcccattttggatgacaagcagaggaagtatgacctgcactaccgcatcgcccttgtcgtcaactacctgggccactgcgtatctgtggcagccctggtggccgccttcctgcttttcctggccctgcggagcattcgctgtctgcggaatgtgattcactggaacctcatcaccacctttatcctgcgaaatgtcatgtggttcctgctgcagctcgttgaccatgaagtgcacgagagcaatgaggtctggtgccgctgcatcaccaccatcttcaactacttcgtggtgaccaacttcttctggatgtttgtggaaggctgctacctgcacacggccattgtcatgacctactccactgagcgcctgcgcaagtgcctcttcctcttcatcggatggtgcatccccttccccatcatcgtcgcctgggccatcggcaagctctactatgagaatgaacagtgctggtttggcaaggagcctggcgacctggtggactacatctaccaaggccccatcattctcgtgctcctgatcaatttcgtatttctgttcaacatcgtcaggatcctaatgacaaagttacgcgcgtccaccacatccgagacaatccagtacaggaaggcagtgaaggccaccctggtgctcctgcccctcctgggcatcacctacatgctcttcttcgtcaatcccggggaggacgacctgtcacagatcatgttcatctatttcaactccttcctgcagtcgttccagggtttcttcgtgtctgtcttctactgcttcttcaatggagaggtgcgctcagccgtgaggaagaggtggcaccgctggcaggaccatcactcccttcgagtccccatggcccgggccatgtccatccctacatcacccacacggatcagcttccacagcatcaagcagacggccgctgtgtgacccctcggtcgcccacctgcacagctcccctgtcctcctccaccttcttcctctgggttctctgtgctgggcaggctctcgtggggcaggagatgggaggggagagaccagctctccagcctggcaggaaagagggggtgcggcagccaagggggactgcaagggacagggatgagtgggggccaccaggctcagcgcaagaggaagcagagggaattcacaggaccccctgagaagagccagtcagatgtctgcaggcatttgcccatcccagcctctctggccagggccttactgggcccagagcagagaaggacctgtccaacacacacagctatttatagtagcagacacagggctcccctgccctactcatggagccagcagccaggcaatggtgtggccctgcactggcccttggactccacactcagtggtgccctgcagttgggtgggttaacgccaagcaaaggatcagtttggctgccttatcccagggctgtcacctagagaggctcacttgtaccccaccctgttcctgtgtcccctccccagccatcctccccgccttgggggctccatgaaggatgcaggcttccaggcctggcttcctctcttgggagaccccttctctgcctagtccacagattaggcaatcaaggaagacgccatcagggaagccacatccttagtcaaccagttgcatcgtgcggggcaaaatgaggagcagaggcatggaggagggaggcgtgggatgggaatagcagaaccaccatgtcttcagtgattgaaactcataccccattgccctttgccctccagtctccccttcagaaacatctctgctctctgtgaaataaaccatgcctcttgg

SEQ ID NO: 728772 - DNA, 480 bp, Homo sapiens; identical to SEQ ID NO: 83598

SEQ ID NO: 728773 - DNA, 2261 bp, Homo sapiens
ggggctggccagggtgtgaccaccgtgctgggcagcaggctccagtccctaacccccagccactactggcatgaggggtccctcagggcccccaggcctcctctacgtcccacacctcctcctctgcctgctctgcctcctcccaccgccgctccaatacgcagccgggcagagccagatgcccaaagaccagcccctgtgggcacttctggagcagtactgccacaccatcatgaccctcaccaacctctcaggtccctactcctactgcaacacgaccttggaccagatcggaacgtgctggccccgcagcgctgccggagccctcgtggagaggccgtgccccgagtacttcaacggcgtcaagtacaacacgacccggaatgcctatcgagaatgcttggagaatgggacgtgggcctcaaagatcaactactcacagtgtgagcccattttggatgacaagcagaggaagtatgacctgcactaccgcatcgcccttgtcgtcaactacctgggccactgcgtatctgtggcagccctggtggccgccttcctgcttttcctggccctgcggagcattcgctgtctgcggaatgtgattcactggaacctcatcaccacctttatcctgcgaaatgtcatgtggttcctgctgcagctcgttgaccatgaagtgcacgagagcaatgaggtctggtgccgctgcatcaccaccatcttcaactacttcgtggtgaccaacttcttctggatgtttgtggaaggctgctacctgcacacggccattgtcatgacctactccactgagcgcctgcgcaagtgcctcttcctcttcatcggatggtgcatccccttccccatcatcgtcgcctgggccatcggcaagctctactatgagaatgaacagtgctggtttggcaaggagcctggcgacctggtggactacatctaccaaggccccatcattctcgtgctcctgatcaatttcgtatttctgttcaacatcgtcaggatcctaatgacaaagttacgcgcgtccaccacatccgagacaatccagtacaggaaggcagtgaaggccaccctggtgctcctgcccctcctgggcatcacctacatgctcttcttcgtcaatcccggggaggacgacctgtcacagatcatgttcatctatttcaactccttcctgcagtcgttccagggtttcttcgtgtctgtcttctactgcttcttcaatggagaggtgcgctcagccgtgaggaagaggtggcaccgctggcaggaccatcactcccttcgagtccccatggcccgggccatgtccatccctacatcacccacacggatcagcttccacagcatcaagcagacggccgctgtgtgacccctcggtcgcccacctgcacagctcccctgtcctcctccaccttcttcctctgggttctctgtgctgggcaggctctcgtggggcaggagatgggaggggagagaccagctctccagcctggcaggaaagagggggtgcggcagccaagggggactgcaagggacagggatgagtgggggccaccaggctcagcgcaagaggaagcagagggaattcacaggaccccctgagaagagccagtcagatgtctgcaggcatttgcccatcccagcctctctggccagggccttactgggcccagagcagagaaggacctgtccaacacacacagctatttatagtagcagacacagggctcccctgccctactcatggagccagcagccaggcaatggtgtggccctgcactggcccttggactccacactcagtggtgccctgcagttgggtgggttaacgccaagcaaaggatcagtttggctgccttatcccagggctgtcacctagagaggctcacttgtaccccaccctgttcctgtgtcccctccccagccatcctccccgccttgggggctccatgaaggatgcaggcttccaggcctggcttcctctcttgggagaccccttctctgcctagtccacagattaggcaatcaaggaagacgccatcagggaagccacatccttagtcaaccagttgcatcgtgcggggcaaaatgaggagcagaggcatggaggagggaggcgtgggatgggaatagcagaaccaccatgtcttcagtgattgaaactcataccccattgccctttgccctccagtctccccttcagaaacatctctgctctctgtgaaataaaccatgcctcttgg

SEQ ID NO: 728774 - DNA, 1811 bp, Homo sapiens
ggggctggccagggtgtgaccaccgtgctgggcagcaggctccagtccctaacccccagccactactggcatgaggggtccctcagggcccccaggcctcctctacgtcccacacctcctcctctgcctgctctgcctcctcccaccgccgctccaatacgcagccgggcagagccagatgcccaaagaccagcccctgtgggcacttctggagcagtactgccacaccatcatgaccctcaccaacctctcaggtccctactcctactgcaacacgaccttggaccagatcggaacgtgctggccccgcagcgctgccggagccctcgtggagaggccgtgccccgagtacttcaacggcgtcaagtacaacacgacccggaatgcctatcgagaatgcttggagaatgggacgtgggcctcaaagatcaactactcacagtgtgagcccattttggatgacaagcagaggaagtatgacctgcactaccgcatcgcccttgtcgtcaactacctgggccactgcgtatctgtggcagccctggtggccgccttcctgcttttcctggccctgcggagcattcgctgtctgcggaatgtgattcactggaacctcatcaccacctttatcctgcgaaatgtcatgtggttcctgctgcagctcgttgaccatgaagtgcacgagagcaatgaggtctggtgccgctgcatcaccaccatcttcaactacttcgtggtgaccaacttcttctggatgtttgtggaaggctgctacctgcacacggccattgtcatgacctactccactgagcgcctgcgcaagtgcctcttcctcttcatcggatggtgcatccccttccccatcatcgtcgcctgggccatcggcaagctctactatgagaatgaacagtgctggtttggcaaggagcctggcgacctggtggactacatctaccaaggccccatcattctcgtgctcctgatcaatttcgtatttctgttcaacatcgtcaggatcctaatgacaaagttacgcgcgtccaccacatccgagacaatccagtacaggaaggcagtgaaggccaccctggtgctcctgcccctcctgggcatcacctacatgctcttcttcgtcaatcccggggaggacgacctgtcacagatcatgttcatctatttcaactccttcctgcagtcgttccagggtttcttcgtgtctgtcttctactgcttcttcaatggagaggtgcgctcagccgtgaggaagaggtggcaccgctggcaggaccatcactcccttcgagtccccatggcccgggccatgtccatccctacatcacccacacggatcagcttccacagcatcaagcagacggccgctgtgtgacccctcggtcgcccacctgcacagctcccctgtcctcctccaccttcttcctctgggttctctgtgctgggcaggctctcgtggggcaggagatgggaggggagagaccagctctccagcctggcaggaaagagggggtgcggcagccaagggggactgcaagggacagggatgagtgggggccaccaggctcagcgcaagaggaagcagagggaattcacaggaccccctgagaagagccagtcagatgtctgcaggcatttgcccatcccagttaactgattgaaagacatttttagtatgatatatatttttagtgccttttatgggatcctgctatatttaggggccttctagaattctgcttgcttggtgctgaatcttgctggttgatttttcctagttccttttctttgtttttctc

SEQ ID NO: 728775 - DNA, 870 bp, Homo sapiens
ggggctggccagggtgtgaccaccgtgctgggcagcaggctccagtccctaacccccagccactactggcatgaggggtccctcagggcccccaggcctcctctacgtcccacacctcctcctctgcctgctctgcctcctcccaccgccgctccaatacgcagccgggcagagccagatgcccaaagaccagcccctgtgggcacttctggagcagtactgccacaccatcatgaccctcaccaacctctcaggtccctactcctactgcaacacgaccttggaccagatcggaacgtgctggccccgcagcgctgccggagccctcgtggagaggccgtgccccgagtacttcaacggcgtcaagtacaacacgacccggaatgcctatcgagaatgcttggagaatgggacgtgggcctcaaagatcaactactcacagtgtgagcccattttggatgacaagcagaggaagtatgacctgcactaccgcatcgcccttgtcgtcaactacctgggccactgcgtatctgtggcagccctggtggccgccttcctgcttttcctggccctgcggagcattcgctgtctgcggaatgtgattcactggaacctcatcaccacctttatcctgcgaaatgtcatgtggttcctgctgcagctcgttgaccatgaagtgcacgagagcaatgaggtctggtgccgctgcatcaccaccatcttcaactacttcgtggcagccccacctcttgagagcccccagtgccggagcagaaaggaccctggacccagaggcagatactgcggggtggtagaaaaggtagagtaggctgtggcaatggaataaaacacgattaaaaacgttaaaaa

SEQ ID NO: 728776 - DNA, 581 bp, Homo sapiens
ggggctggccagggtgtgaccaccgtgctgggcagcaggctccagtccctaacccccagccactactggcatgaggggtccctcagggcccccaggcctcctctacgtcccacacctcctcctctgcctgctctgcctcctcccaccgccgctccaatacgcagccgggcagagccagatgcccaaagaccagcccctgtgggcacttctggagcagtactgccacaccatcatgaccctcaccaacctctcaggctggtcttgaattcctgtgctcaagcaatctgcctaccttggcttccccaagtgctgagattatgggtgtgagccactgcacctggccaagaatccgaatggattcaaagataccttgaaataattcctcaatgcaacacacacacatatgccagggttggtcaaatgggaagagagccttggcctgaagacagggacctgggctttcctcagctcttctgccaaggtatctgtcctttcttagtgactcactgggctgaagtctagagcattccaatgggtgctggggatgggttagtgaaccaggaccagccctgcccttgggg

SEQ ID NO: 728777 - DNA, 2488 bp, Homo sapiens
ggggctggccagggtgtgaccaccgtgctgggcagcaggctccagtccctaacccccagccactactggcatgaggggtccctcagggcccccaggcctcctctacgtcccacacctcctcctctgcctgctctgcctcctcccaccgccgctccaatacgcagccgggcagagccagatgcccaaagaccagcccctgtgggcacttctggagcagtactgccacaccatcatgaccctcaccaacctctcaggctggtcttgaattcctgtgctcaagcaatctgcctaccttggcttccccaagtgctgagattatgggtgtgagccactgcacctggccaagaatccgaatggattcaaagataccttgaaataattcctcaatgcaacacacacacatatgccagggttggtcaaatgggaagagagccttggcctgaagacagggacctgggctttcctcagctcttctgccaaggtccctactcctactgcaacacgaccttggaccagatcggaacgtgctggccccgcagcgctgccggagccctcgtggagaggccgtgccccgagtacttcaacggcgtcaagtacaacacgacccggaatgcctatcgagaatgcttggagaatgggacgtgggcctcaaagatcaactactcacagtgtgagcccattttggatgacaagcagaggaagtatgacctgcactaccgcatcgcccttgtcgtcaactacctgggccactgcgtatctgtggcagccctggtggccgccttcctgcttttcctggccctgcggagcattcgctgtctgcggaatgtgattcactggaacctcatcaccacctttatcctgcgaaatgtcatgtggttcctgctgcagctcgttgaccatgaagtgcacgagagcaatgaggtctggtgccgctgcatcaccaccatcttcaactacttcgtggtgaccaacttcttctggatgtttgtggaaggctgctacctgcacacggccattgtcatgacctactccactgagcgcctgcgcaagtgcctcttcctcttcatcggatggtgcatccccttccccatcatcgtcgcctgggccatcggcaagctctactatgagaatgaacagtgctggtttggcaaggagcctggcgacctggtggactacatctaccaaggccccatcattctcgtgctcctgatcaatttcgtatttctgttcaacatcgtcaggatcctaatgacaaagttacgcgcgtccaccacatccgagacaatccagtacaggaaggcagtgaaggccaccctggtgctcctgcccctcctgggcatcacctacatgctcttcttcgtcaatcccggggaggacgacctgtcacagatcatgttcatctatttcaactccttcctgcagtcgttccagggtttcttcgtgtctgtcttctactgcttcttcaatggagaggtgcgctcagccgtgaggaagaggtggcaccgctggcaggaccatcactcccttcgagtccccatggcccgggccatgtccatccctacatcacccacacggatcagcttccacagcatcaagcagacggccgctgtgtgacccctcggtcgcccacctgcacagctcccctgtcctcctccaccttcttcctctgggttctctgtgctgggcaggctctcgtggggcaggagatgggaggggagagaccagctctccagcctggcaggaaagagggggtgcggcagccaagggggactgcaagggacagggatgagtgggggccaccaggctcagcgcaagaggaagcagagggaattcacaggaccccctgagaagagccagtcagatgtctgcaggcatttgcccatcccagcctctctggccagggccttactgggcccagagcagagaaggacctgtccaacacacacagctatttatagtagcagacacagggctcccctgccctactcatggagccagcagccaggcaatggtgtggccctgcactggcccttggactccacactcagtggtgccctgcagttgggtgggttaacgccaagcaaaggatcagtttggctgccttatcccagggctgtcacctagagaggctcacttgtaccccaccctgttcctgtgtcccctccccagccatcctccccgccttgggggctccatgaaggatgcaggcttccaggcctggcttcctctcttgggagaccccttctctgcctagtccacagattaggcaatcaaggaagacgccatcagggaagccacatccttagtcaaccagttgcatcgtgcggggcaaaatgaggagcagaggcatggaggagggaggcgtgggatgggaatagcagaaccaccatgtcttcagtgattgaaactcataccccattgccctttgccctccagtctccccttcagaaacatctctgctctctgtgaaataaaccatgcctcttgg

SEQ ID NO: 728778 - DNA, 2038 bp, Homo sapiens
ggggctggccagggtgtgaccaccgtgctgggcagcaggctccagtccctaacccccagccactactggcatgaggggtccctcagggcccccaggcctcctctacgtcccacacctcctcctctgcctgctctgcctcctcccaccgccgctccaatacgcagccgggcagagccagatgcccaaagaccagcccctgtgggcacttctggagcagtactgccacaccatcatgaccctcaccaacctctcaggctggtcttgaattcctgtgctcaagcaatctgcctaccttggcttccccaagtgctgagattatgggtgtgagccactgcacctggccaagaatccgaatggattcaaagataccttgaaataattcctcaatgcaacacacacacatatgccagggttggtcaaatgggaagagagccttggcctgaagacagggacctgggctttcctcagctcttctgccaaggtccctactcctactgcaacacgaccttggaccagatcggaacgtgctggccccgcagcgctgccggagccctcgtggagaggccgtgccccgagtacttcaacggcgtcaagtacaacacgacccggaatgcctatcgagaatgcttggagaatgggacgtgggcctcaaagatcaactactcacagtgtgagcccattttggatgacaagcagaggaagtatgacctgcactaccgcatcgcccttgtcgtcaactacctgggccactgcgtatctgtggcagccctggtggccgccttcctgcttttcctggccctgcggagcattcgctgtctgcggaatgtgattcactggaacctcatcaccacctttatcctgcgaaatgtcatgtggttcctgctgcagctcgttgaccatgaagtgcacgagagcaatgaggtctggtgccgctgcatcaccaccatcttcaactacttcgtggtgaccaacttcttctggatgtttgtggaaggctgctacctgcacacggccattgtcatgacctactccactgagcgcctgcgcaagtgcctcttcctcttcatcggatggtgcatccccttccccatcatcgtcgcctgggccatcggcaagctctactatgagaatgaacagtgctggtttggcaaggagcctggcgacctggtggactacatctaccaaggccccatcattctcgtgctcctgatcaatttcgtatttctgttcaacatcgtcaggatcctaatgacaaagttacgcgcgtccaccacatccgagacaatccagtacaggaaggcagtgaaggccaccctggtgctcctgcccctcctgggcatcacctacatgctcttcttcgtcaatcccggggaggacgacctgtcacagatcatgttcatctatttcaactccttcctgcagtcgttccagggtttcttcgtgtctgtcttctactgcttcttcaatggagaggtgcgctcagccgtgaggaagaggtggcaccgctggcaggaccatcactcccttcgagtccccatggcccgggccatgtccatccctacatcacccacacggatcagcttccacagcatcaagcagacggccgctgtgtgacccctcggtcgcccacctgcacagctcccctgtcctcctccaccttcttcctctgggttctctgtgctgggcaggctctcgtggggcaggagatgggaggggagagaccagctctccagcctggcaggaaagagggggtgcggcagccaagggggactgcaagggacagggatgagtgggggccaccaggctcagcgcaagaggaagcagagggaattcacaggaccccctgagaagagccagtcagatgtctgcaggcatttgcccatcccagttaactgattgaaagacatttttagtatgatatatatttttagtgccttttatgggatcctgctatatttaggggccttctagaattctgcttgcttggtgctgaatcttgctggttgatttttcctagttccttttctttgtttttctc

SEQ ID NO: 728779 - DNA, 1097 bp, Homo sapiens
ggggctggccagggtgtgaccaccgtgctgggcagcaggctccagtccctaacccccagccactactggcatgaggggtccctcagggcccccaggcctcctctacgtcccacacctcctcctctgcctgctctgcctcctcccaccgccgctccaatacgcagccgggcagagccagatgcccaaagaccagcccctgtgggcacttctggagcagtactgccacaccatcatgaccctcaccaacctctcaggctggtcttgaattcctgtgctcaagcaatctgcctaccttggcttccccaagtgctgagattatgggtgtgagccactgcacctggccaagaatccgaatggattcaaagataccttgaaataattcctcaatgcaacacacacacatatgccagggttggtcaaatgggaagagagccttggcctgaagacagggacctgggctttcctcagctcttctgccaaggtccctactcctactgcaacacgaccttggaccagatcggaacgtgctggccccgcagcgctgccggagccctcgtggagaggccgtgccccgagtacttcaacggcgtcaagtacaacacgacccggaatgcctatcgagaatgcttggagaatgggacgtgggcctcaaagatcaactactcacagtgtgagcccattttggatgacaagcagaggaagtatgacctgcactaccgcatcgcccttgtcgtcaactacctgggccactgcgtatctgtggcagccctggtggccgccttcctgcttttcctggccctgcggagcattcgctgtctgcggaatgtgattcactggaacctcatcaccacctttatcctgcgaaatgtcatgtggttcctgctgcagctcgttgaccatgaagtgcacgagagcaatgaggtctggtgccgctgcatcaccaccatcttcaactacttcgtggcagccccacctcttgagagcccccagtgccggagcagaaaggaccctggacccagaggcagatactgcggggtggtagaaaaggtagagtaggctgtggcaatggaataaaacacgattaaaaacgttaaaaa

SEQ ID NO: 728780 - DNA, 2167 bp, Homo sapiens
ggggctggccagggtgtgaccaccgtgctgggcagcaggctccagtccctaacccccagccactactggcatgaggggtccctcagggcccccaggcctcctctacgtcccacacctcctcctctgcctgctctgcctcctcccaccgccgctccaatacgtccctactcctactgcaacacgaccttggaccagatcggaacgtgctggccccgcagcgctgccggagccctcgtggagaggccgtgccccgagtacttcaacggcgtcaagtacaacacgacccggaatgcctatcgagaatgcttggagaatgggacgtgggcctcaaagatcaactactcacagtgtgagcccattttggatgacaagcagaggaagtatgacctgcactaccgcatcgcccttgtcgtcaactacctgggccactgcgtatctgtggcagccctggtggccgccttcctgcttttcctggccctgcggagcattcgctgtctgcggaatgtgattcactggaacctcatcaccacctttatcctgcgaaatgtcatgtggttcctgctgcagctcgttgaccatgaagtgcacgagagcaatgaggtctggtgccgctgcatcaccaccatcttcaactacttcgtggtgaccaacttcttctggatgtttgtggaaggctgctacctgcacacggccattgtcatgacctactccactgagcgcctgcgcaagtgcctcttcctcttcatcggatggtgcatccccttccccatcatcgtcgcctgggccatcggcaagctctactatgagaatgaacagtgctggtttggcaaggagcctggcgacctggtggactacatctaccaaggccccatcattctcgtgctcctgatcaatttcgtatttctgttcaacatcgtcaggatcctaatgacaaagttacgcgcgtccaccacatccgagacaatccagtacaggaaggcagtgaaggccaccctggtgctcctgcccctcctgggcatcacctacatgctcttcttcgtcaatcccggggaggacgacctgtcacagatcatgttcatctatttcaactccttcctgcagtcgttccagggtttcttcgtgtctgtcttctactgcttcttcaatggagaggtgcgctcagccgtgaggaagaggtggcaccgctggcaggaccatcactcccttcgagtccccatggcccgggccatgtccatccctacatcacccacacggatcagcttccacagcatcaagcagacggccgctgtgtgacccctcggtcgcccacctgcacagctcccctgtcctcctccaccttcttcctctgggttctctgtgctgggcaggctctcgtggggcaggagatgggaggggagagaccagctctccagcctggcaggaaagagggggtgcggcagccaagggggactgcaagggacagggatgagtgggggccaccaggctcagcgcaagaggaagcagagggaattcacaggaccccctgagaagagccagtcagatgtctgcaggcatttgcccatcccagcctctctggccagggccttactgggcccagagcagagaaggacctgtccaacacacacagctatttatagtagcagacacagggctcccctgccctactcatggagccagcagccaggcaatggtgtggccctgcactggcccttggactccacactcagtggtgccctgcagttgggtgggttaacgccaagcaaaggatcagtttggctgccttatcccagggctgtcacctagagaggctcacttgtaccccaccctgttcctgtgtcccctccccagccatcctccccgccttgggggctccatgaaggatgcaggcttccaggcctggcttcctctcttgggagaccccttctctgcctagtccacagattaggcaatcaaggaagacgccatcagggaagccacatccttagtcaaccagttgcatcgtgcggggcaaaatgaggagcagaggcatggaggagggaggcgtgggatgggaatagcagaaccaccatgtcttcagtgattgaaactcataccccattgccctttgccctccagtctccccttcagaaacatctctgctctctgtgaaataaaccatgcctcttgg

SEQ ID NO: 728781 - DNA, 1717 bp, Homo sapiens
ggggctggccagggtgtgaccaccgtgctgggcagcaggctccagtccctaacccccagccactactggcatgaggggtccctcagggcccccaggcctcctctacgtcccacacctcctcctctgcctgctctgcctcctcccaccgccgctccaatacgtccctactcctactgcaacacgaccttggaccagatcggaacgtgctggccccgcagcgctgccggagccctcgtggagaggccgtgccccgagtacttcaacggcgtcaagtacaacacgacccggaatgcctatcgagaatgcttggagaatgggacgtgggcctcaaagatcaactactcacagtgtgagcccattttggatgacaagcagaggaagtatgacctgcactaccgcatcgcccttgtcgtcaactacctgggccactgcgtatctgtggcagccctggtggccgccttcctgcttttcctggccctgcggagcattcgctgtctgcggaatgtgattcactggaacctcatcaccacctttatcctgcgaaatgtcatgtggttcctgctgcagctcgttgaccatgaagtgcacgagagcaatgaggtctggtgccgctgcatcaccaccatcttcaactacttcgtggtgaccaacttcttctggatgtttgtggaaggctgctacctgcacacggccattgtcatgacctactccactgagcgcctgcgcaagtgcctcttcctcttcatcggatggtgcatccccttccccatcatcgtcgcctgggccatcggcaagctctactatgagaatgaacagtgctggtttggcaaggagcctggcgacctggtggactacatctaccaaggccccatcattctcgtgctcctgatcaatttcgtatttctgttcaacatcgtcaggatcctaatgacaaagttacgcgcgtccaccacatccgagacaatccagtacaggaaggcagtgaaggccaccctggtgctcctgcccctcctgggcatcacctacatgctcttcttcgtcaatcccggggaggacgacctgtcacagatcatgttcatctatttcaactccttcctgcagtcgttccagggtttcttcgtgtctgtcttctactgcttcttcaatggagaggtgcgctcagccgtgaggaagaggtggcaccgctggcaggaccatcactcccttcgagtccccatggcccgggccatgtccatccctacatcacccacacggatcagcttccacagcatcaagcagacggccgctgtgtgacccctcggtcgcccacctgcacagctcccctgtcctcctccaccttcttcctctgggttctctgtgctgggcaggctctcgtggggcaggagatgggaggggagagaccagctctccagcctggcaggaaagagggggtgcggcagccaagggggactgcaagggacagggatgagtgggggccaccaggctcagcgcaagaggaagcagagggaattcacaggaccccctgagaagagccagtcagatgtctgcaggcatttgcccatcccagttaactgattgaaagacatttttagtatgatatatatttttagtgccttttatgggatcctgctatatttaggggccttctagaattctgcttgcttggtgctgaatcttgctggttgatttttcctagttccttttctttgtttttctc

SEQ ID NO: 728782 - DNA, 776 bp, Homo sapiens
ggggctggccagggtgtgaccaccgtgctgggcagcaggctccagtccctaacccccagccactactggcatgaggggtccctcagggcccccaggcctcctctacgtcccacacctcctcctctgcctgctctgcctcctcccaccgccgctccaatacgtccctactcctactgcaacacgaccttggaccagatcggaacgtgctggccccgcagcgctgccggagccctcgtggagaggccgtgccccgagtacttcaacggcgtcaagtacaacacgacccggaatgcctatcgagaatgcttggagaatgggacgtgggcctcaaagatcaactactcacagtgtgagcccattttggatgacaagcagaggaagtatgacctgcactaccgcatcgcccttgtcgtcaactacctgggccactgcgtatctgtggcagccctggtggccgccttcctgcttttcctggccctgcggagcattcgctgtctgcggaatgtgattcactggaacctcatcaccacctttatcctgcgaaatgtcatgtggttcctgctgcagctcgttgaccatgaagtgcacgagagcaatgaggtctggtgccgctgcatcaccaccatcttcaactacttcgtggcagccccacctcttgagagcccccagtgccggagcagaaaggaccctggacccagaggcagatactgcggggtggtagaaaaggtagagtaggctgtggcaatggaataaaacacgattaaaaacgttaaaaa

SEQ ID NO: 728783 - DNA, 2387 bp, Homo sapiens
aaatagattatttctattttattcatcacagaggcagctacatatatttgaaaaatattagggcatatattatgaggcatattatttatcctatccatagatgatataaaaatccaaatggactatttatttattttttattattttttgtaggctggtcttgaattcctgtgctcaagcaatctgcctaccttggcttccccaagtgctgagattatgggtgtgagccactgcacctggccaagaatccgaatggattcaaagataccttgaaataattcctcaatgcaacacacacacatatgccagggttggtcaaatgggaagagagccttggcctgaagacagggacctgggctttcctcagctcttctgccaaggtccctactcctactgcaacacgaccttggaccagatcggaacgtgctggccccgcagcgctgccggagccctcgtggagaggccgtgccccgagtacttcaacggcgtcaagtacaacacgacccggaatgcctatcgagaatgcttggagaatgggacgtgggcctcaaagatcaactactcacagtgtgagcccattttggatgacaagcagaggaagtatgacctgcactaccgcatcgcccttgtcgtcaactacctgggccactgcgtatctgtggcagccctggtggccgccttcctgcttttcctggccctgcggagcattcgctgtctgcggaatgtgattcactggaacctcatcaccacctttatcctgcgaaatgtcatgtggttcctgctgcagctcgttgaccatgaagtgcacgagagcaatgaggtctggtgccgctgcatcaccaccatcttcaactacttcgtggtgaccaacttcttctggatgtttgtggaaggctgctacctgcacacggccattgtcatgacctactccactgagcgcctgcgcaagtgcctcttcctcttcatcggatggtgcatccccttccccatcatcgtcgcctgggccatcggcaagctctactatgagaatgaacagtgctggtttggcaaggagcctggcgacctggtggactacatctaccaaggccccatcattctcgtgctcctgatcaatttcgtatttctgttcaacatcgtcaggatcctaatgacaaagttacgcgcgtccaccacatccgagacaatccagtacaggaaggcagtgaaggccaccctggtgctcctgcccctcctgggcatcacctacatgctcttcttcgtcaatcccggggaggacgacctgtcacagatcatgttcatctatttcaactccttcctgcagtcgttccagggtttcttcgtgtctgtcttctactgcttcttcaatggagaggtgcgctcagccgtgaggaagaggtggcaccgctggcaggaccatcactcccttcgagtccccatggcccgggccatgtccatccctacatcacccacacggatcagcttccacagcatcaagcagacggccgctgtgtgacccctcggtcgcccacctgcacagctcccctgtcctcctccaccttcttcctctgggttctctgtgctgggcaggctctcgtggggcaggagatgggaggggagagaccagctctccagcctggcaggaaagagggggtgcggcagccaagggggactgcaagggacagggatgagtgggggccaccaggctcagcgcaagaggaagcagagggaattcacaggaccccctgagaagagccagtcagatgtctgcaggcatttgcccatcccagcctctctggccagggccttactgggcccagagcagagaaggacctgtccaacacacacagctatttatagtagcagacacagggctcccctgccctactcatggagccagcagccaggcaatggtgtggccctgcactggcccttggactccacactcagtggtgccctgcagttgggtgggttaacgccaagcaaaggatcagtttggctgccttatcccagggctgtcacctagagaggctcacttgtaccccaccctgttcctgtgtcccctccccagccatcctccccgccttgggggctccatgaaggatgcaggcttccaggcctggcttcctctcttgggagaccccttctctgcctagtccacagattaggcaatcaaggaagacgccatcagggaagccacatccttagtcaaccagttgcatcgtgcggggcaaaatgaggagcagaggcatggaggagggaggcgtgggatgggaatagcagaaccaccatgtcttcagtgattgaaactcataccccattgccctttgccctccagtctccccttcagaaacatctctgctctctgtgaaataaaccatgcctcttgg

SEQ ID NO: 728784 - DNA, 1937 bp, Homo sapiens
aaatagattatttctattttattcatcacagaggcagctacatatatttgaaaaatattagggcatatattatgaggcatattatttatcctatccatagatgatataaaaatccaaatggactatttatttattttttattattttttgtaggctggtcttgaattcctgtgctcaagcaatctgcctaccttggcttccccaagtgctgagattatgggtgtgagccactgcacctggccaagaatccgaatggattcaaagataccttgaaataattcctcaatgcaacacacacacatatgccagggttggtcaaatgggaagagagccttggcctgaagacagggacctgggctttcctcagctcttctgccaaggtccctactcctactgcaacacgaccttggaccagatcggaacgtgctggccccgcagcgctgccggagccctcgtggagaggccgtgccccgagtacttcaacggcgtcaagtacaacacgacccggaatgcctatcgagaatgcttggagaatgggacgtgggcctcaaagatcaactactcacagtgtgagcccattttggatgacaagcagaggaagtatgacctgcactaccgcatcgcccttgtcgtcaactacctgggccactgcgtatctgtggcagccctggtggccgccttcctgcttttcctggccctgcggagcattcgctgtctgcggaatgtgattcactggaacctcatcaccacctttatcctgcgaaatgtcatgtggttcctgctgcagctcgttgaccatgaagtgcacgagagcaatgaggtctggtgccgctgcatcaccaccatcttcaactacttcgtggtgaccaacttcttctggatgtttgtggaaggctgctacctgcacacggccattgtcatgacctactccactgagcgcctgcgcaagtgcctcttcctcttcatcggatggtgcatccccttccccatcatcgtcgcctgggccatcggcaagctctactatgagaatgaacagtgctggtttggcaaggagcctggcgacctggtggactacatctaccaaggccccatcattctcgtgctcctgatcaatttcgtatttctgttcaacatcgtcaggatcctaatgacaaagttacgcgcgtccaccacatccgagacaatccagtacaggaaggcagtgaaggccaccctggtgctcctgcccctcctgggcatcacctacatgctcttcttcgtcaatcccggggaggacgacctgtcacagatcatgttcatctatttcaactccttcctgcagtcgttccagggtttcttcgtgtctgtcttctactgcttcttcaatggagaggtgcgctcagccgtgaggaagaggtggcaccgctggcaggaccatcactcccttcgagtccccatggcccgggccatgtccatccctacatcacccacacggatcagcttccacagcatcaagcagacggccgctgtgtgacccctcggtcgcccacctgcacagctcccctgtcctcctccaccttcttcctctgggttctctgtgctgggcaggctctcgtggggcaggagatgggaggggagagaccagctctccagcctggcaggaaagagggggtgcggcagccaagggggactgcaagggacagggatgagtgggggccaccaggctcagcgcaagaggaagcagagggaattcacaggaccccctgagaagagccagtcagatgtctgcaggcatttgcccatcccagttaactgattgaaagacatttttagtatgatatatatttttagtgccttttatgggatcctgctatatttaggggccttctagaattctgcttgcttggtgctgaatcttgctggttgatttttcctagttccttttctttgtttttctc

SEQ ID NO: 728785 - DNA, 996 bp, Homo sapiens
aaatagattatttctattttattcatcacagaggcagctacatatatttgaaaaatattagggcatatattatgaggcatattatttatcctatccatagatgatataaaaatccaaatggactatttatttattttttattattttttgtaggctggtcttgaattcctgtgctcaagcaatctgcctaccttggcttccccaagtgctgagattatgggtgtgagccactgcacctggccaagaatccgaatggattcaaagataccttgaaataattcctcaatgcaacacacacacatatgccagggttggtcaaatgggaagagagccttggcctgaagacagggacctgggctttcctcagctcttctgccaaggtccctactcctactgcaacacgaccttggaccagatcggaacgtgctggccccgcagcgctgccggagccctcgtggagaggccgtgccccgagtacttcaacggcgtcaagtacaacacgacccggaatgcctatcgagaatgcttggagaatgggacgtgggcctcaaagatcaactactcacagtgtgagcccattttggatgacaagcagaggaagtatgacctgcactaccgcatcgcccttgtcgtcaactacctgggccactgcgtatctgtggcagccctggtggccgccttcctgcttttcctggccctgcggagcattcgctgtctgcggaatgtgattcactggaacctcatcaccacctttatcctgcgaaatgtcatgtggttcctgctgcagctcgttgaccatgaagtgcacgagagcaatgaggtctggtgccgctgcatcaccaccatcttcaactacttcgtggcagccccacctcttgagagcccccagtgccggagcagaaaggaccctggacccagaggcagatactgcggggtggtagaaaaggtagagtaggctgtggcaatggaataaaacacgattaaaaacgttaaaaa

SEQ ID NO: 728786 - DNA, 1660 bp, Homo sapiens
atggacgcggcactgctccacagcctgctggaggccaactgcagcctggcgctggctgaagagctgctcttggacggctgggggccacccctggaccccgagggtccctactcctactgcaacacgaccttggaccagatcggaacgtgctggccccgcagcgctgccggagccctcgtggagaggccgtgccccgagtacttcaacggcgtcaagtacaacacgacccggaatgcctatcgagaatgcttggagaatgggacgtgggcctcaaagatcaactactcacagtgtgagcccattttggatgacaagcagaggaagtatgacctgcactaccgcatcgcccttgtcgtcaactacctgggccactgcgtatctgtggcagccctggtggccgccttcctgcttttcctggccctgcggagcattcgctgtctgcggaatgtgattcactggaacctcatcaccacctttatcctgcgaaatgtcatgtggttcctgctgcagctcgttgaccatgaagtgcacgagagcaatgaggtctggtgccgctgcatcaccaccatcttcaactacttcgtggtgaccaacttcttctggatgtttgtggaaggctgctacctgcacacggccattgtcatgacctactccactgagcgcctgcgcaagtgcctcttcctcttcatcggatggtgcatccccttccccatcatcgtcgcctgggccatcggcaagctctactatgagaatgaacagtgctggtttggcaaggagcctggcgacctggtggactacatctaccaaggccccatcattctcgtgctcctgatcaatttcgtatttctgttcaacatcgtcaggatcctaatgacaaagttacgcgcgtccaccacatccgagacaatccagtacaggaaggcagtgaaggccaccctggtgctcctgcccctcctgggcatcacctacatgctcttcttcgtcaatcccggggaggacgacctgtcacagatcatgttcatctatttcaactccttcctgcagtcgttccagggtttcttcgtgtctgtcttctactgcttcttcaatggagaggtgcgctcagccgtgaggaagaggtggcaccgctggcaggaccatcactcccttcgagtccccatggcccgggccatgtccatccctacatcacccacacggatcagcttccacagcatcaagcagacggccgctgtgtgacccctcggtcgcccacctgcacagctcccctgtcctcctccaccttcttcctctgggttctctgtgctgggcaggctctcgtggggcaggagatgggaggggagagaccagctctccagcctggcaggaaagagggggtgcggcagccaagggggactgcaagggacagggatgagtgggggccaccaggctcagcgcaagaggaagcagagggaattcacaggaccccctgagaagagccagtcagatgtctgcaggcatttgcccatcccagttaactgattgaaagacatttttagtatgatatatatttttagtgccttttatgggatcctgctatatttaggggccttctagaattctgcttgcttggtgctgaatcttgctggttgatttttcctagttccttttctttgtttttctc

SEQ ID NO: 728787 - DNA, 719 bp, Homo sapiens
atggacgcggcactgctccacagcctgctggaggccaactgcagcctggcgctggctgaagagctgctcttggacggctgggggccacccctggaccccgagggtccctactcctactgcaacacgaccttggaccagatcggaacgtgctggccccgcagcgctgccggagccctcgtggagaggccgtgccccgagtacttcaacggcgtcaagtacaacacgacccggaatgcctatcgagaatgcttggagaatgggacgtgggcctcaaagatcaactactcacagtgtgagcccattttggatgacaagcagaggaagtatgacctgcactaccgcatcgcccttgtcgtcaactacctgggccactgcgtatctgtggcagccctggtggccgccttcctgcttttcctggccctgcggagcattcgctgtctgcggaatgtgattcactggaacctcatcaccacctttatcctgcgaaatgtcatgtggttcctgctgcagctcgttgaccatgaagtgcacgagagcaatgaggtctggtgccgctgcatcaccaccatcttcaactacttcgtggcagccccacctcttgagagcccccagtgccggagcagaaaggaccctggacccagaggcagatactgcggggtggtagaaaaggtagagtaggctgtggcaatggaataaaacacgattaaaaacgttaaaaa

SEQ ID NO: 728788 - DNA, 1202 bp, Homo sapiens
gaaaaggataaggaagaggcccctggagagaggcaacagcatcagggaaggacctgttttggaagcagacagttccttgtcatgagggtggcagtcgacccatgagagcagaaagcagaggaggggatggtcccagaagcccagggttggtccctgggagccagctgagcctctgccttccccacaggtgcgctcagccgtgaggaagaggtggcaccgctggcaggaccatcactcccttcgagtccccatggcccgggccatgtccatccctacatcacccacacggatcagcttccacagcatcaagcagacggccgctgtgtgacccctcggtcgcccacctgcacagctcccctgtcctcctccaccttcttcctctgggttctctgtgctgggcaggctctcgtggggcaggagatgggaggggagagaccagctctccagcctggcaggaaagagggggtgcggcagccaagggggactgcaagggacagggatgagtgggggccaccaggctcagcgcaagaggaagcagagggaattcacaggaccccctgagaagagccagtcagatgtctgcaggcatttgcccatcccagcctctctggccagggccttactgggcccagagcagagaaggacctgtccaacacacacagctatttatagtagcagacacagggctcccctgccctactcatggagccagcagccaggcaatggtgtggccctgcactggcccttggactccacactcagtggtgccctgcagttgggtgggttaacgccaagcaaaggatcagtttggctgccttatcccagggctgtcacctagagaggctcacttgtaccccaccctgttcctgtgtcccctccccagccatcctccccgccttgggggctccatgaaggatgcaggcttccaggcctggcttcctctcttgggagaccccttctctgcctagtccacagattaggcaatcaaggaagacgccatcagggaagccacatccttagtcaaccagttgcatcgtgcggggcaaaatgaggagcagaggcatggaggagggaggcgtgggatgggaatagcagaaccaccatgtcttcagtgattgaaactcataccccattgccctttgccctccagtctccccttcagaaacatctctgctctctgtgaaataaaccatgcctcttgg

SEQ ID NO: 728789 - DNA, 752 bp, Homo sapiens
gaaaaggataaggaagaggcccctggagagaggcaacagcatcagggaaggacctgttttggaagcagacagttccttgtcatgagggtggcagtcgacccatgagagcagaaagcagaggaggggatggtcccagaagcccagggttggtccctgggagccagctgagcctctgccttccccacaggtgcgctcagccgtgaggaagaggtggcaccgctggcaggaccatcactcccttcgagtccccatggcccgggccatgtccatccctacatcacccacacggatcagcttccacagcatcaagcagacggccgctgtgtgacccctcggtcgcccacctgcacagctcccctgtcctcctccaccttcttcctctgggttctctgtgctgggcaggctctcgtggggcaggagatgggaggggagagaccagctctccagcctggcaggaaagagggggtgcggcagccaagggggactgcaagggacagggatgagtgggggccaccaggctcagcgcaagaggaagcagagggaattcacaggaccccctgagaagagccagtcagatgtctgcaggcatttgcccatcccagttaactgattgaaagacatttttagtatgatatatatttttagtgccttttatgggatcctgctatatttaggggccttctagaattctgcttgcttggtgctgaatcttgctggttgatttttcctagttccttttctttgtttttctc

SEQ ID NO: 728790 - DNA, 482 bp, Homo sapiens
gatctgggatgcagtggattaacaagggatgacgtatgactcttctgtgtttgtcagcatctaggctaggccctgatcccagggaacctgtgctgcaaatgtccactcattcattcattcgttcatttgttcatccatcaacctcctttcttcacaggtagacatgtatgcaggtgccatcttcatccagcagtctttgcacctggatctgtacctggccatagttgggctactggccatcactgctgtatacacggttgctggtggcctggctgctgtgatctacacggatgccctgcagacgctgatcatgcttataggagcgctcaccttgatgggctacagtttcgccgcggttggtgggatggaaggactgaaggagaagtacttcttggccctggctagcaaccggagtgagaacagcagctgcgggctgccccgggaagatgccttccatattttccgagatccgctgacatctg

SEQ ID NO: 728791 - DNA, 586 bp, Homo sapiens
  misc_feature (3)..(4): n is a, c, g, or t
  misc_feature (6)..(6): n is a, c, g, or t
  misc_feature (15)..(15): n is a, c, g, or t
tcnntntttgccagnaatgttggaagtggacatttcattggcctggcagggtcaggtgctgctacgggcatttctgtatcagcttatgaacttaatggcttgttttctgtgctgatgttggcctggatcttcctacccatctacattgctggtcaggtcaccacgatgccagaatacctacggaagcgcttcggtggcatcagaatccccatcatcctggctgtactctacctatttatctacatcttcaccaagatctcggtagacatgtatgcaggtgccatcttcatccagcagtctttgcacctggatctgtacctggccatagttgggctactggccatcactgctgtatacacggttgctggtggcctggctgctgtgatctacacggatgccctgcagacgctgatcatgcttataggagcgctcaccttgatgggctacagtttcgccgcggttggtgggatggaaggactgaaggagaagtacttcttggccctggctagcaaccggagtgagaacagcagctgcgggctgccccgggaagatgccttccatattttccgagatccgctgacatctg

SEQ ID NO: 728792 - DNA, 897 bp, Homo sapiens
gcctttcacagagacacgtgcatgctgtaaaaatgagtctcggagacctgtgttaactcttgtggtcgtctttgaacccagatctgcctgctgtcatggtcttgttttaatcactgctgaggaggggagggggcacaactggatgaagtgatgacatgatgtttaggagacacagaactaggaagcatcgcaaaggccttctttttccactctcctcttccttcccgaatccattccccatgttaaaaaaggaaatttgaaggccagcacaggtgaaccactcagcgagtaagagactacaccagaggtggagttcaggccaggctgcctcagggcgcagagggaaatccaaatgggtaccttgttgtgagctgggggccaagtcctgactgtgttttcttgagcagggcttgttttctgtgctgatgttggcctggatcttcctacccatctacattgctggtcaggtcaccacgatgccagaatacctacggaagcgcttcggtggcatcagaatccccatcatcctggctgtactctacctatttatctacatcttcaccaagatctcggtagacatgtatgcaggtgccatcttcatccagcagtctttgcacctggatctgtacctggccatagttgggctactggccatcactgctgtatacacggttgctggtggcctggctgctgtgatctacacggatgccctgcagacgctgatcatgcttataggagcgctcaccttgatgggctacagtttcgccgcggttggtgggatggaaggactgaaggagaagtacttcttggccctggctagcaaccggagtgagaacagcagctgcgggctgccccgggaagatgccttccatattttccgagatccgctgacatctg

SEQ ID NO: 728793 - DNA, 1517 bp, Homo sapiens; identical to SEQ ID NO: 87905
  misc_feature (1284)..(1284): n is a, c, g, or t
  misc_feature (1299)..(1299): n is a, c, g, or t
  misc_feature (1436)..(1436): n is a, c, g, or t
  misc_feature (1512)..(1513): n is a, c, g, or t

SEQ ID NO: 728794 - DNA, 657 bp, Homo sapiens
  misc_feature (504)..(504): n is a, c, g, or t
  misc_feature (506)..(506): n is a, c, g, or t
cttcccatgggtgttggtcatccttctcttctctaagacagattgggactggccaggacccgactgttctcttcccctcaagctccctggcgagtggcctgttgcacagggttagggccacctgggaggggcaggagaggaaggaagccttgccttcctggaagtggtcatgggctgtggtccaggattctggctcagagttgcaccactgggttttatattcacttggatctttagttgttttggcgcctactgaggtctgaagtttgaatcctgcagtcaattgggatggtggcttgtaccccaaagtgccattgcaacccttgtccttcctgaggaaagggtggcagttgccctgtggaattcctgccctgctccccgtgggtgtccaggctgacagaagttgggtgagtggggccagctggatctaagccgtgtgagcattgggtggaggagtctgtctgcttagccctggagccatgggctgggaggcactcatgaggntncccatcagtctgagcagtctgcttgggccctatcatgagctgtgtgggtaggtggggagagtaactcctgtcctggcccctgccttggaggccagcgcactgcatgtctgcccagaatgtgtgttttggccagtgtccagccaggtccagt

SEQ ID NO: 728795 - DNA, 2804 bp, Homo sapiens; identical to SEQ ID NO: 53679

SEQ ID NO: 728796 - DNA, 2750 bp, Homo sapiens; identical to SEQ ID NO: 53680

SEQ ID NO: 728797 - DNA, 2745 bp, Homo sapiens
accactttcacaatctgctagcaaaggttatgcagcgcgtgaacatgatcatggcagaatcaccaggcctcatcaccatctgccttttaggatatctactcagtgctgaatgtacagtttttcttgatcatgaaaacgccaacaaaattctgaatcggccaaagaggtataattcaggtaaattggaagagtttgttcaagggaaccttgagagagaatgtatggaagaaaagtgtagttttgaagaagcacgagaagtttttgaaaacactgaaagaacaactgaattttggaagcagtatgttgatggagatcagtgtgagtccaatccatgtttaaatggcggcagttgcaaggatgacattaattcctatgaatgttggtgtccctttggatttgaaggaaagaactgtgaattagatgtaacatgtaacattaagaatggcagatgcgagcagttttgtaaaaatagtgctgataacaaggtggtttgctcctgtactgagggatatcgacttgcagaaaaccagaagtcctgtgaaccagcagtgccatttccatgtggaagagtttctgtattctactgaagctgaaaccattttggataacatcactcaaagcacccaatcatttaatgacttcactcgggttgttggtggagaagatgccaaaccaggtcaattcccttggcaggttgttttgaatggtaaagttgatgcattctgtggaggctctatcgttaatgaaaaatggattgtaactgctgcccactgtgttgaaactggtgttaaaattacagttgtcgcaggtgaacataatattgaggagacagaacatacagagcaaaagcgaaatgtgattcgaattattcctcaccacaactacaatgcagctattaataagtacaaccatgacattgcccttctggaactggacgaacccttagtgctaaacagctacgttacacctatttgcattgctgacaaggaatacacgaacatcttcctcaaatttggatctggctatgtaagtggctggggaagagtcttccacaaagggagatcagctttagttcttcagtaccttagagttccacttgttgaccgagccacatgtcttcgatctacaaagttcaccatctataacaacatgttctgtgctggcttccatgaaggaggtagagattcatgtcaaggagatagtgggggaccccatgttactgaagtggaagggaccagtttcttaactggaattattagctggggtgaagagtgtgcaatgaaaggcaaatatggaatatataccaaggtatcccggtatgtcaactggattaaggaaaaaacaaagctcacttaatgaaagatggatttccaaggttaattcattggaattgaaaattaacagggcctctcactaactaatcactttcccatcttttgttagatttgaatatatacattctatgatcattgctttttctctttacaggggagaatttcatattttacctgagcaaattgattagaaaatggaaccactagaggaatataatgtgttaggaaattacagtcatttctaagggcccagcccttgacaaaattgtgaagttaaattctccactctgtccatcagatactatggttctccactatggcaactaactcactcaattttccctccttagcagcattccatcttcccgatcttctttgcttctccaaccaaaacatcaatgtttattagttctgtatacagtacaggatctttggtctactctatcacaaggccagtaccacactcatgaagaaagaacacaggagtagctgagaggctaaaactcatcaaaaacactactccttttcctctaccctattcctcaatcttttaccttttccaaatcccaatccccaaatcagtttttctctttcttactccctctctcccttttaccctccatggtcgttaaaggagagatggggagcatcattctgttatacttctgtacacagttatacatgtctatcaaacccagacttgcttccatagtggagacttgcttttcagaacatagggatgaagtaaggtgcctgaaaagtttgggggaaaagtttctttcagagagttaagttattttatatatataatatatatataaaatatataatatacaatataaatatatagtgtgtgtgtgtatgcgtgtgtgtagacacacacgcatacacacatataatggaagcaataagccattctaagagcttgtatggttatggaggtctgactaggcatgatttcacgaaggcaagattggcatatcattgtaactaaaaaagctgacattgacccagacatattgtactctttctaaaaataataataataatgctaacagaaagaagagaaccgttcgtttgcaatctacagctagtagagactttgaggaagaattcaacagtgtgtcttcagcagtgttcagagccaagcaagaagttgaagttgcctagaccagaggacataagtatcatgtctcctttaactagcataccccgaagtggagaagggtgcagcaggctcaaaggcataagtcattccaatcagccaactaagttgtccttttctggtttcgtgttcaccatggaacattttgattatagttaatccttctatcttgaatcttctagagagttgctgaccaactgacgtatgtttccctttgtgaattaataaactggtgttctggttcat

SEQ ID NO: 728798 - DNA, 2691 bp, Homo sapiens
accactttcacaatctgctagcaaaggttatgcagcgcgtgaacatgatcatggcagaatcaccaggcctcatcaccatctgccttttaggatatctactcagtgctgaatgtacagtttttcttgatcatgaaaacgccaacaaaattctgaatcggccaaagaggtataattcaggtaaattggaagagtttgttcaagggaaccttgagagagaatgtatggaagaaaagtgtagttttgaagaagcacgagaagtttttgaaaacactgaaagaacaactgaattttggaagcagtatgttgatggagatcagtgtgagtccaatccatgtttaaatggcggcagttgcaaggatgacattaattcctatgaatgttggtgtccctttggatttgaaggaaagaactgtgaattagatgtaacatgtaacattaagaatggcagatgcgagcagttttgtaaaaatagtgctgataacaaggtggtttgctcctgtactgagggatatcgacttgcagaaaaccagaagtcctgtgaaccagcagtgccatttccatgtggaagagtttctgtattctactgaagctgaaaccattttggataacatcactcaaagcacccaatcatttaatgacttcactcgggttgttggtggagaagatgccaaaccaggtcaattcccttggcaggttgttttgaatggtaaagttgatgcattctgtggaggctctatcgttaatgaaaaatggattgtaactgctgcccactgtgttgaaactggtgttaaaattacagttgtcgcaggtgaacataatattgaggagacagaacatacagagcaaaagcgaaatgtgattcgaattattcctcaccacaactacaatgcagctattaataagtacaaccatgacattgcccttctggaactggacgaacccttagtgctaaacagctacgttacacctatttgcattgctgacaaggaatacacgaacatcttcctcaaatttggatctggctatgtaagtggctggggaagagtcttccacaaagggagatcagctttagttcttcagtaccttagagttccacttgttgaccgagccacatgtcttcgatctacaaagttcaccatctataacaacatgttctgtgctggcttccatgaaggaggtagagattcatgtcaaggagatagtgggggaccccatgttactgaagtggaagggaccagtttcttaactggaattattagctggggtgaagagtgtgcaatgaaaggcaaatatggaatatataccaaggtatcccggtatgtcaactggattaaggaaaaaacaaagctcacttaatgaaagatggatttccaaggttaattcattggaattgaaaattaacagggcctctcactaactaatcactttcccatcttttgttagatttgaatatatacattctatgatcattgctttttctctttacaggggagaatttcatattttacctgagcaaattgattagaaaatggaaccactagaggaatataatgtgttaggaaattacagtcatttctaagggcccagcccttgacaaaattgtgaagttaaattctccactctgtccatcagatactatggttctccactatggcaactaactcactcaattttccctccttagcagcattccatcttcccgatcttctttgcttctccaaccaaaacatcaatgtttattagttctgtatacagtacaggatctttggtctactctatcacaaggccagtaccacactcatgaagaaagaacacaggagtagctgagaggctaaaactcatcaaaaacactactccttttcctctaccctattcctcaatcttttaccttttccaaatcccaatccccaaatcagtttttctctttcttactccctctctcccttttaccctccatggtcgttaaaggagagatggggagcatcattctgttatacttctgtacacagttatacatgtctatcaaacccagacttgcttccatagtggagacttgcttttcagaacatagggatgaagtaaggtgcctgaaaagtttgggggaaaagtttctttcagagagttaagttattttatatatataatatatatataaaatatataatatacaatataaatatatagtgtgtgtgtgtatgcgtgtgtgtagacacacacgcatacacacatataatggaagcaataagccattctaagagcttgtatggttatggaggtctgactaggcatgatttcacgaaggcaagattggcatatcattgtaactaaaaaagctgacattgacccagacatattgtactctttctacagctagtagagactttgaggaagaattcaacagtgtgtcttcagcagtgttcagagccaagcaagaagttgaagttgcctagaccagaggacataagtatcatgtctcctttaactagcataccccgaagtggagaagggtgcagcaggctcaaaggcataagtcattccaatcagccaactaagttgtccttttctggtttcgtgttcaccatggaacattttgattatagttaatccttctatcttgaatcttctagagagttgctgaccaactgacgtatgtttccctttgtgaattaataaactggtgttctggttcat

SEQ ID NO: 728799 - DNA, 2748 bp, Homo sapiens
accactttcacaatctgctagcaaaggttatgcagcgcgtgaacatgatcatggcagaatcaccaggcctcatcaccatctgccttttaggatatctactcagtgctgaatgtacagtttttcttgatcatgaaaacgccaacaaaattctgaatcggccaaagaggtataattcaggtaaattggaagagtttgttcaagggaaccttgagagagaatgtatggaagaaaagtgtagttttgaagaagcacgagaagtttttgaaaacactgaaagaacaactgaattttggaagcagtatgttgatggagatcagtgtgagtccaatccatgtttaaatggcggcagttgcaaggatgacattaattcctatgaatgttggtgtccctttggatttgaaggaaagaactgtgaattagatgtaacatgtaacattaagaatggcagatgcgagcagttttgtaaaaatagtgctgataacaaggtggtttgctcctgtactgagggatatcgacttgcattcacaaacttctaagctcacccgtgctgagactgtttttcctgatgtggactatgtaaattctactgaagctgaaaccattttggataacatcactcaaagcacccaatcatttaatgacttcactcgggttgttggtggagaagatgccaaaccaggtcaattcccttggcaggttgttttgaatggtaaagttgatgcattctgtggaggctctatcgttaatgaaaaatggattgtaactgctgcccactgtgttgaaactggtgttaaaattacagttgtcgcaggtgaacataatattgaggagacagaacatacagagcaaaagcgaaatgtgattcgaattattcctcaccacaactacaatgcagctattaataagtacaaccatgacattgcccttctggaactggacgaacccttagtgctaaacagctacgttacacctatttgcattgctgacaaggaatacacgaacatcttcctcaaatttggatctggctatgtaagtggctggggaagagtcttccacaaagggagatcagctttagttcttcagtaccttagagttccacttgttgaccgagccacatgtcttcgatctacaaagttcaccatctataacaacatgttctgtgctggcttccatgaaggaggtagagattcatgtcaaggagatagtgggggaccccatgttactgaagtggaagggaccagtttcttaactggaattattagctggggtgaagagtgtgcaatgaaaggcaaatatggaatatataccaaggtatcccggtatgtcaactggattaaggaaaaaacaaagctcacttaatgaaagatggatttccaaggttaattcattggaattgaaaattaacagggcctctcactaactaatcactttcccatcttttgttagatttgaatatatacattctatgatcattgctttttctctttacaggggagaatttcatattttacctgagcaaattgattagaaaatggaaccactagaggaatataatgtgttaggaaattacagtcatttctaagggcccagcccttgacaaaattgtgaagttaaattctccactctgtccatcagatactatggttctccactatggcaactaactcactcaattttccctccttagcagcattccatcttcccgatcttctttgcttctccaaccaaaacatcaatgtttattagttctgtatacagtacaggatctttggtctactctatcacaaggccagtaccacactcatgaagaaagaacacaggagtagctgagaggctaaaactcatcaaaaacactactccttttcctctaccctattcctcaatcttttaccttttccaaatcccaatccccaaatcagtttttctctttcttactccctctctcccttttaccctccatggtcgttaaaggagagatggggagcatcattctgttatacttctgtacacagttatacatgtctatcaaacccagacttgcttccatagtggagacttgcttttcagaacatagggatgaagtaaggtgcctgaaaagtttgggggaaaagtttctttcagagagttaagttattttatatatataatatatatataaaatatataatatacaatataaatatatagtgtgtgtgtgtatgcgtgtgtgtagacacacacgcatacacacatataatggaagcaataagccattctaagagcttgtatggttatggaggtctgactaggcatgatttcacgaaggcaagattggcatatcattgtaactaaaaaagctgacattgacccagacatattgtactctttctaaaaataataataataatgctaacagaaagaagagaaccgttcgtttgcaatctacagctagtagagactttgaggaagaattcaacagtgtgtcttcagcagtgttcagagccaagcaagaagttgaagttgcctagaccagaggacataagtatcatgtctcctttaactagcataccccgaagtggagaagggtgcagcaggctcaaaggcataagtcattccaatcagccaactaagttgtccttttctggtttcgtgttcaccatggaacattttgattatagttaatccttctatcttgaatcttctagagagttgctgaccaactgacgtatgtttccctttgtgaattaataaactggtgttctggttcat

SEQ ID NO: 728800 - DNA, 2694 bp, Homo sapiens
accactttcacaatctgctagcaaaggttatgcagcgcgtgaacatgatcatggcagaatcaccaggcctcatcaccatctgccttttaggatatctactcagtgctgaatgtacagtttttcttgatcatgaaaacgccaacaaaattctgaatcggccaaagaggtataattcaggtaaattggaagagtttgttcaagggaaccttgagagagaatgtatggaagaaaagtgtagttttgaagaagcacgagaagtttttgaaaacactgaaagaacaactgaattttggaagcagtatgttgatggagatcagtgtgagtccaatccatgtttaaatggcggcagttgcaaggatgacattaattcctatgaatgttggtgtccctttggatttgaaggaaagaactgtgaattagatgtaacatgtaacattaagaatggcagatgcgagcagttttgtaaaaatagtgctgataacaaggtggtttgctcctgtactgagggatatcgacttgcattcacaaacttctaagctcacccgtgctgagactgtttttcctgatgtggactatgtaaattctactgaagctgaaaccattttggataacatcactcaaagcacccaatcatttaatgacttcactcgggttgttggtggagaagatgccaaaccaggtcaattcccttggcaggttgttttgaatggtaaagttgatgcattctgtggaggctctatcgttaatgaaaaatggattgtaactgctgcccactgtgttgaaactggtgttaaaattacagttgtcgcaggtgaacataatattgaggagacagaacatacagagcaaaagcgaaatgtgattcgaattattcctcaccacaactacaatgcagctattaataagtacaaccatgacattgcccttctggaactggacgaacccttagtgctaaacagctacgttacacctatttgcattgctgacaaggaatacacgaacatcttcctcaaatttggatctggctatgtaagtggctggggaagagtcttccacaaagggagatcagctttagttcttcagtaccttagagttccacttgttgaccgagccacatgtcttcgatctacaaagttcaccatctataacaacatgttctgtgctggcttccatgaaggaggtagagattcatgtcaaggagatagtgggggaccccatgttactgaagtggaagggaccagtttcttaactggaattattagctggggtgaagagtgtgcaatgaaaggcaaatatggaatatataccaaggtatcccggtatgtcaactggattaaggaaaaaacaaagctcacttaatgaaagatggatttccaaggttaattcattggaattgaaaattaacagggcctctcactaactaatcactttcccatcttttgttagatttgaatatatacattctatgatcattgctttttctctttacaggggagaatttcatattttacctgagcaaattgattagaaaatggaaccactagaggaatataatgtgttaggaaattacagtcatttctaagggcccagcccttgacaaaattgtgaagttaaattctccactctgtccatcagatactatggttctccactatggcaactaactcactcaattttccctccttagcagcattccatcttcccgatcttctttgcttctccaaccaaaacatcaatgtttattagttctgtatacagtacaggatctttggtctactctatcacaaggccagtaccacactcatgaagaaagaacacaggagtagctgagaggctaaaactcatcaaaaacactactccttttcctctaccctattcctcaatcttttaccttttccaaatcccaatccccaaatcagtttttctctttcttactccctctctcccttttaccctccatggtcgttaaaggagagatggggagcatcattctgttatacttctgtacacagttatacatgtctatcaaacccagacttgcttccatagtggagacttgcttttcagaacatagggatgaagtaaggtgcctgaaaagtttgggggaaaagtttctttcagagagttaagttattttatatatataatatatatataaaatatataatatacaatataaatatatagtgtgtgtgtgtatgcgtgtgtgtagacacacacgcatacacacatataatggaagcaataagccattctaagagcttgtatggttatggaggtctgactaggcatgatttcacgaaggcaagattggcatatcattgtaactaaaaaagctgacattgacccagacatattgtactctttctacagctagtagagactttgaggaagaattcaacagtgtgtcttcagcagtgttcagagccaagcaagaagttgaagttgcctagaccagaggacataagtatcatgtctcctttaactagcataccccgaagtggagaagggtgcagcaggctcaaaggcataagtcattccaatcagccaactaagttgtccttttctggtttcgtgttcaccatggaacattttgattatagttaatccttctatcttgaatcttctagagagttgctgaccaactgacgtatgtttccctttgtgaattaataaactggtgttctggttcat

SEQ ID NO: 728801 - DNA, 2779 bp, Homo sapiens
accactttcacaatctgctagcaaaggttatgcagcgcgtgaacatgatcatggcagaatcaccaggcctcatcaccatctgccttttaggatatctactcagtgctgaatgtacagtttttcttgatcatgaaaacgccaacaaaattctgaatcggccaaagaggtataattcaggtaaattggaagagtttgttcaagggaaccttgagagagaatgtatggaagaaaagtgtagttttgaagaagcacgagaagtttttgaaaacactgaaagaacaatggagatcagtgtgagtccaatccatgtttaaatggcggcagttgcaaggatgacattaattcctatgaatgttggtgtccctttggatttgaaggaaagaactgtgaattagatgtaacatgtaacattaagaatggcagatgcgagcagttttgtaaaaatagtgctgataacaaggtggtttgctcctgtactgagggatatcgacttgcagaaaaccagaagtcctgtgaaccagcagtgccatttccatgtggaagagtttctgtttcacaaacttctaagctcacccgtgctgagactgtttttcctgatgtggactatgtaaattctactgaagctgaaaccattttggataacatcactcaaagcacccaatcatttaatgacttcactcgggttgttggtggagaagatgccaaaccaggtcaattcccttggcaggttgttttgaatggtaaagttgatgcattctgtggaggctctatcgttaatgaaaaatggattgtaactgctgcccactgtgttgaaactggtgttaaaattacagttgtcgcaggtgaacataatattgaggagacagaacatacagagcaaaagcgaaatgtgattcgaattattcctcaccacaactacaatgcagctattaataagtacaaccatgacattgcccttctggaactggacgaacccttagtgctaaacagctacgttacacctatttgcattgctgacaaggaatacacgaacatcttcctcaaatttggatctggctatgtaagtggctggggaagagtcttccacaaagggagatcagctttagttcttcagtaccttagagttccacttgttgaccgagccacatgtcttcgatctacaaagttcaccatctataacaacatgttctgtgctggcttccatgaaggaggtagagattcatgtcaaggagatagtgggggaccccatgttactgaagtggaagggaccagtttcttaactggaattattagctggggtgaagagtgtgcaatgaaaggcaaatatggaatatataccaaggtatcccggtatgtcaactggattaaggaaaaaacaaagctcacttaatgaaagatggatttccaaggttaattcattggaattgaaaattaacagggcctctcactaactaatcactttcccatcttttgttagatttgaatatatacattctatgatcattgctttttctctttacaggggagaatttcatattttacctgagcaaattgattagaaaatggaaccactagaggaatataatgtgttaggaaattacagtcatttctaagggcccagcccttgacaaaattgtgaagttaaattctccactctgtccatcagatactatggttctccactatggcaactaactcactcaattttccctccttagcagcattccatcttcccgatcttctttgcttctccaaccaaaacatcaatgtttattagttctgtatacagtacaggatctttggtctactctatcacaaggccagtaccacactcatgaagaaagaacacaggagtagctgagaggctaaaactcatcaaaaacactactccttttcctctaccctattcctcaatcttttaccttttccaaatcccaatccccaaatcagtttttctctttcttactccctctctcccttttaccctccatggtcgttaaaggagagatggggagcatcattctgttatacttctgtacacagttatacatgtctatcaaacccagacttgcttccatagtggagacttgcttttcagaacatagggatgaagtaaggtgcctgaaaagtttgggggaaaagtttctttcagagagttaagttattttatatatataatatatatataaaatatataatatacaatataaatatatagtgtgtgtgtgtatgcgtgtgtgtagacacacacgcatacacacatataatggaagcaataagccattctaagagcttgtatggttatggaggtctgactaggcatgatttcacgaaggcaagattggcatatcattgtaactaaaaaagctgacattgacccagacatattgtactctttctaaaaataataataataatgctaacagaaagaagagaaccgttcgtttgcaatctacagctagtagagactttgaggaagaattcaacagtgtgtcttcagcagtgttcagagccaagcaagaagttgaagttgcctagaccagaggacataagtatcatgtctcctttaactagcataccccgaagtggagaagggtgcagcaggctcaaaggcataagtcattccaatcagccaactaagttgtccttttctggtttcgtgttcaccatggaacattttgattatagttaatccttctatcttgaatcttctagagagttgctgaccaactgacgtatgtttccctttgtgaattaataaactggtgttctggttcat

SEQ ID NO: 728802 - DNA, 2725 bp, Homo sapiens; identical to SEQ ID NO: 53683

SEQ ID NO: 728803 - DNA, 2720 bp, Homo sapiens
accactttcacaatctgctagcaaaggttatgcagcgcgtgaacatgatcatggcagaatcaccaggcctcatcaccatctgccttttaggatatctactcagtgctgaatgtacagtttttcttgatcatgaaaacgccaacaaaattctgaatcggccaaagaggtataattcaggtaaattggaagagtttgttcaagggaaccttgagagagaatgtatggaagaaaagtgtagttttgaagaagcacgagaagtttttgaaaacactgaaagaacaatggagatcagtgtgagtccaatccatgtttaaatggcggcagttgcaaggatgacattaattcctatgaatgttggtgtccctttggatttgaaggaaagaactgtgaattagatgtaacatgtaacattaagaatggcagatgcgagcagttttgtaaaaatagtgctgataacaaggtggtttgctcctgtactgagggatatcgacttgcagaaaaccagaagtcctgtgaaccagcagtgccatttccatgtggaagagtttctgtattctactgaagctgaaaccattttggataacatcactcaaagcacccaatcatttaatgacttcactcgggttgttggtggagaagatgccaaaccaggtcaattcccttggcaggttgttttgaatggtaaagttgatgcattctgtggaggctctatcgttaatgaaaaatggattgtaactgctgcccactgtgttgaaactggtgttaaaattacagttgtcgcaggtgaacataatattgaggagacagaacatacagagcaaaagcgaaatgtgattcgaattattcctcaccacaactacaatgcagctattaataagtacaaccatgacattgcccttctggaactggacgaacccttagtgctaaacagctacgttacacctatttgcattgctgacaaggaatacacgaacatcttcctcaaatttggatctggctatgtaagtggctggggaagagtcttccacaaagggagatcagctttagttcttcagtaccttagagttccacttgttgaccgagccacatgtcttcgatctacaaagttcaccatctataacaacatgttctgtgctggcttccatgaaggaggtagagattcatgtcaaggagatagtgggggaccccatgttactgaagtggaagggaccagtttcttaactggaattattagctggggtgaagagtgtgcaatgaaaggcaaatatggaatatataccaaggtatcccggtatgtcaactggattaaggaaaaaacaaagctcacttaatgaaagatggatttccaaggttaattcattggaattgaaaattaacagggcctctcactaactaatcactttcccatcttttgttagatttgaatatatacattctatgatcattgctttttctctttacaggggagaatttcatattttacctgagcaaattgattagaaaatggaaccactagaggaatataatgtgttaggaaattacagtcatttctaagggcccagcccttgacaaaattgtgaagttaaattctccactctgtccatcagatactatggttctccactatggcaactaactcactcaattttccctccttagcagcattccatcttcccgatcttctttgcttctccaaccaaaacatcaatgtttattagttctgtatacagtacaggatctttggtctactctatcacaaggccagtaccacactcatgaagaaagaacacaggagtagctgagaggctaaaactcatcaaaaacactactccttttcctctaccctattcctcaatcttttaccttttccaaatcccaatccccaaatcagtttttctctttcttactccctctctcccttttaccctccatggtcgttaaaggagagatggggagcatcattctgttatacttctgtacacagttatacatgtctatcaaacccagacttgcttccatagtggagacttgcttttcagaacatagggatgaagtaaggtgcctgaaaagtttgggggaaaagtttctttcagagagttaagttattttatatatataatatatatataaaatatataatatacaatataaatatatagtgtgtgtgtgtatgcgtgtgtgtagacacacacgcatacacacatataatggaagcaataagccattctaagagcttgtatggttatggaggtctgactaggcatgatttcacgaaggcaagattggcatatcattgtaactaaaaaagctgacattgacccagacatattgtactctttctaaaaataataataataatgctaacagaaagaagagaaccgttcgtttgcaatctacagctagtagagactttgaggaagaattcaacagtgtgtcttcagcagtgttcagagccaagcaagaagttgaagttgcctagaccagaggacataagtatcatgtctcctttaactagcataccccgaagtggagaagggtgcagcaggctcaaaggcataagtcattccaatcagccaactaagttgtccttttctggtttcgtgttcaccatggaacattttgattatagttaatccttctatcttgaatcttctagagagttgctgaccaactgacgtatgtttccctttgtgaattaataaactggtgttctggttcat

SEQ ID NO: 728804 - DNA, 2666 bp, Homo sapiens
accactttcacaatctgctagcaaaggttatgcagcgcgtgaacatgatcatggcagaatcaccaggcctcatcaccatctgccttttaggatatctactcagtgctgaatgtacagtttttcttgatcatgaaaacgccaacaaaattctgaatcggccaaagaggtataattcaggtaaattggaagagtttgttcaagggaaccttgagagagaatgtatggaagaaaagtgtagttttgaagaagcacgagaagtttttgaaaacactgaaagaacaatggagatcagtgtgagtccaatccatgtttaaatggcggcagttgcaaggatgacattaattcctatgaatgttggtgtccctttggatttgaaggaaagaactgtgaattagatgtaacatgtaacattaagaatggcagatgcgagcagttttgtaaaaatagtgctgataacaaggtggtttgctcctgtactgagggatatcgacttgcagaaaaccagaagtcctgtgaaccagcagtgccatttccatgtggaagagtttctgtattctactgaagctgaaaccattttggataacatcactcaaagcacccaatcatttaatgacttcactcgggttgttggtggagaagatgccaaaccaggtcaattcccttggcaggttgttttgaatggtaaagttgatgcattctgtggaggctctatcgttaatgaaaaatggattgtaactgctgcccactgtgttgaaactggtgttaaaattacagttgtcgcaggtgaacataatattgaggagacagaacatacagagcaaaagcgaaatgtgattcgaattattcctcaccacaactacaatgcagctattaataagtacaaccatgacattgcccttctggaactggacgaacccttagtgctaaacagctacgttacacctatttgcattgctgacaaggaatacacgaacatcttcctcaaatttggatctggctatgtaagtggctggggaagagtcttccacaaagggagatcagctttagttcttcagtaccttagagttccacttgttgaccgagccacatgtcttcgatctacaaagttcaccatctataacaacatgttctgtgctggcttccatgaaggaggtagagattcatgtcaaggagatagtgggggaccccatgttactgaagtggaagggaccagtttcttaactggaattattagctggggtgaagagtgtgcaatgaaaggcaaatatggaatatataccaaggtatcccggtatgtcaactggattaaggaaaaaacaaagctcacttaatgaaagatggatttccaaggttaattcattggaattgaaaattaacagggcctctcactaactaatcactttcccatcttttgttagatttgaatatatacattctatgatcattgctttttctctttacaggggagaatttcatattttacctgagcaaattgattagaaaatggaaccactagaggaatataatgtgttaggaaattacagtcatttctaagggcccagcccttgacaaaattgtgaagttaaattctccactctgtccatcagatactatggttctccactatggcaactaactcactcaattttccctccttagcagcattccatcttcccgatcttctttgcttctccaaccaaaacatcaatgtttattagttctgtatacagtacaggatctttggtctactctatcacaaggccagtaccacactcatgaagaaagaacacaggagtagctgagaggctaaaactcatcaaaaacactactccttttcctctaccctattcctcaatcttttaccttttccaaatcccaatccccaaatcagtttttctctttcttactccctctctcccttttaccctccatggtcgttaaaggagagatggggagcatcattctgttatacttctgtacacagttatacatgtctatcaaacccagacttgcttccatagtggagacttgcttttcagaacatagggatgaagtaaggtgcctgaaaagtttgggggaaaagtttctttcagagagttaagttattttatatatataatatatatataaaatatataatatacaatataaatatatagtgtgtgtgtgtatgcgtgtgtgtagacacacacgcatacacacatataatggaagcaataagccattctaagagcttgtatggttatggaggtctgactaggcatgatttcacgaaggcaagattggcatatcattgtaactaaaaaagctgacattgacccagacatattgtactctttctacagctagtagagactttgaggaagaattcaacagtgtgtcttcagcagtgttcagagccaagcaagaagttgaagttgcctagaccagaggacataagtatcatgtctcctttaactagcataccccgaagtggagaagggtgcagcaggctcaaaggcataagtcattccaatcagccaactaagttgtccttttctggtttcgtgttcaccatggaacattttgattatagttaatccttctatcttgaatcttctagagagttgctgaccaactgacgtatgtttccctttgtgaattaataaactggtgttctggttcat

SEQ ID NO: 728805 - DNA, 2723 bp, Homo sapiens
accactttcacaatctgctagcaaaggttatgcagcgcgtgaacatgatcatggcagaatcaccaggcctcatcaccatctgccttttaggatatctactcagtgctgaatgtacagtttttcttgatcatgaaaacgccaacaaaattctgaatcggccaaagaggtataattcaggtaaattggaagagtttgttcaagggaaccttgagagagaatgtatggaagaaaagtgtagttttgaagaagcacgagaagtttttgaaaacactgaaagaacaatggagatcagtgtgagtccaatccatgtttaaatggcggcagttgcaaggatgacattaattcctatgaatgttggtgtccctttggatttgaaggaaagaactgtgaattagatgtaacatgtaacattaagaatggcagatgcgagcagttttgtaaaaatagtgctgataacaaggtggtttgctcctgtactgagggatatcgacttgcattcacaaacttctaagctcacccgtgctgagactgtttttcctgatgtggactatgtaaattctactgaagctgaaaccattttggataacatcactcaaagcacccaatcatttaatgacttcactcgggttgttggtggagaagatgccaaaccaggtcaattcccttggcaggttgttttgaatggtaaagttgatgcattctgtggaggctctatcgttaatgaaaaatggattgtaactgctgcccactgtgttgaaactggtgttaaaattacagttgtcgcaggtgaacataatattgaggagacagaacatacagagcaaaagcgaaatgtgattcgaattattcctcaccacaactacaatgcagctattaataagtacaaccatgacattgcccttctggaactggacgaacccttagtgctaaacagctacgttacacctatttgcattgctgacaaggaatacacgaacatcttcctcaaatttggatctggctatgtaagtggctggggaagagtcttccacaaagggagatcagctttagttcttcagtaccttagagttccacttgttgaccgagccacatgtcttcgatctacaaagttcaccatctataacaacatgttctgtgctggcttccatgaaggaggtagagattcatgtcaaggagatagtgggggaccccatgttactgaagtggaagggaccagtttcttaactggaattattagctggggtgaagagtgtgcaatgaaaggcaaatatggaatatataccaaggtatcccggtatgtcaactggattaaggaaaaaacaaagctcacttaatgaaagatggatttccaaggttaattcattggaattgaaaattaacagggcctctcactaactaatcactttcccatcttttgttagatttgaatatatacattctatgatcattgctttttctctttacaggggagaatttcatattttacctgagcaaattgattagaaaatggaaccactagaggaatataatgtgttaggaaattacagtcatttctaagggcccagcccttgacaaaattgtgaagttaaattctccactctgtccatcagatactatggttctccactatggcaactaactcactcaattttccctccttagcagcattccatcttcccgatcttctttgcttctccaaccaaaacatcaatgtttattagttctgtatacagtacaggatctttggtctactctatcacaaggccagtaccacactcatgaagaaagaacacaggagtagctgagaggctaaaactcatcaaaaacactactccttttcctctaccctattcctcaatcttttaccttttccaaatcccaatccccaaatcagtttttctctttcttactccctctctcccttttaccctccatggtcgttaaaggagagatggggagcatcattctgttatacttctgtacacagttatacatgtctatcaaacccagacttgcttccatagtggagacttgcttttcagaacatagggatgaagtaaggtgcctgaaaagtttgggggaaaagtttctttcagagagttaagttattttatatatataatatatatataaaatatataatatacaatataaatatatagtgtgtgtgtgtatgcgtgtgtgtagacacacacgcatacacacatataatggaagcaataagccattctaagagcttgtatggttatggaggtctgactaggcatgatttcacgaaggcaagattggcatatcattgtaactaaaaaagctgacattgacccagacatattgtactctttctaaaaataataataataatgctaacagaaagaagagaaccgttcgtttgcaatctacagctagtagagactttgaggaagaattcaacagtgtgtcttcagcagtgttcagagccaagcaagaagttgaagttgcctagaccagaggacataagtatcatgtctcctttaactagcataccccgaagtggagaagggtgcagcaggctcaaaggcataagtcattccaatcagccaactaagttgtccttttctggtttcgtgttcaccatggaacattttgattatagttaatccttctatcttgaatcttctagagagttgctgaccaactgacgtatgtttccctttgtgaattaataaactggtgttctggttcat

SEQ ID NO: 728806 - DNA, 2669 bp, Homo sapiens
accactttcacaatctgctagcaaaggttatgcagcgcgtgaacatgatcatggcagaatcaccaggcctcatcaccatctgccttttaggatatctactcagtgctgaatgtacagtttttcttgatcatgaaaacgccaacaaaattctgaatcggccaaagaggtataattcaggtaaattggaagagtttgttcaagggaaccttgagagagaatgtatggaagaaaagtgtagttttgaagaagcacgagaagtttttgaaaacactgaaagaacaatggagatcagtgtgagtccaatccatgtttaaatggcggcagttgcaaggatgacattaattcctatgaatgttggtgtccctttggatttgaaggaaagaactgtgaattagatgtaacatgtaacattaagaatggcagatgcgagcagttttgtaaaaatagtgctgataacaaggtggtttgctcctgtactgagggatatcgacttgcattcacaaacttctaagctcacccgtgctgagactgtttttcctgatgtggactatgtaaattctactgaagctgaaaccattttggataacatcactcaaagcacccaatcatttaatgacttcactcgggttgttggtggagaagatgccaaaccaggtcaattcccttggcaggttgttttgaatggtaaagttgatgcattctgtggaggctctatcgttaatgaaaaatggattgtaactgctgcccactgtgttgaaactggtgttaaaattacagttgtcgcaggtgaacataatattgaggagacagaacatacagagcaaaagcgaaatgtgattcgaattattcctcaccacaactacaatgcagctattaataagtacaaccatgacattgcccttctggaactggacgaacccttagtgctaaacagctacgttacacctatttgcattgctgacaaggaatacacgaacatcttcctcaaatttggatctggctatgtaagtggctggggaagagtcttccacaaagggagatcagctttagttcttcagtaccttagagttccacttgttgaccgagccacatgtcttcgatctacaaagttcaccatctataacaacatgttctgtgctggcttccatgaaggaggtagagattcatgtcaaggagatagtgggggaccccatgttactgaagtggaagggaccagtttcttaactggaattattagctggggtgaagagtgtgcaatgaaaggcaaatatggaatatataccaaggtatcccggtatgtcaactggattaaggaaaaaacaaagctcacttaatgaaagatggatttccaaggttaattcattggaattgaaaattaacagggcctctcactaactaatcactttcccatcttttgttagatttgaatatatacattctatgatcattgctttttctctttacaggggagaatttcatattttacctgagcaaattgattagaaaatggaaccactagaggaatataatgtgttaggaaattacagtcatttctaagggcccagcccttgacaaaattgtgaagttaaattctccactctgtccatcagatactatggttctccactatggcaactaactcactcaattttccctccttagcagcattccatcttcccgatcttctttgcttctccaaccaaaacatcaatgtttattagttctgtatacagtacaggatctttggtctactctatcacaaggccagtaccacactcatgaagaaagaacacaggagtagctgagaggctaaaactcatcaaaaacactactccttttcctctaccctattcctcaatcttttaccttttccaaatcccaatccccaaatcagtttttctctttcttactccctctctcccttttaccctccatggtcgttaaaggagagatggggagcatcattctgttatacttctgtacacagttatacatgtctatcaaacccagacttgcttccatagtggagacttgcttttcagaacatagggatgaagtaaggtgcctgaaaagtttgggggaaaagtttctttcagagagttaagttattttatatatataatatatatataaaatatataatatacaatataaatatatagtgtgtgtgtgtatgcgtgtgtgtagacacacacgcatacacacatataatggaagcaataagccattctaagagcttgtatggttatggaggtctgactaggcatgatttcacgaaggcaagattggcatatcattgtaactaaaaaagctgacattgacccagacatattgtactctttctacagctagtagagactttgaggaagaattcaacagtgtgtcttcagcagtgttcagagccaagcaagaagttgaagttgcctagaccagaggacataagtatcatgtctcctttaactagcataccccgaagtggagaagggtgcagcaggctcaaaggcataagtcattccaatcagccaactaagttgtccttttctggtttcgtgttcaccatggaacattttgattatagttaatccttctatcttgaatcttctagagagttgctgaccaactgacgtatgtttccctttgtgaattaataaactggtgttctggttcat

SEQ ID NO: 728807 - DNA, 2877 bp, Homo sapiens; identical to SEQ ID NO: 413943

SEQ ID NO: 728808 - DNA, 2823 bp, Homo sapiens
gtggcatccttccctttctaatcagagattttcttcctcagagattttggcctagatttgcaaaatgatgaccacatctttgatttgggggattgctatagcagcatgctgttgtctatggcttattcttggaattaggagaaggcaaacgggtgaaccacctctagagaatggattaattccatacctgggctgtgctctgcaatttggtgccaatcctcttgagttcctcagagcaaatcaaaggaaacatggtcatgtttttacctgcaaactaatgggaaaatatgtccatttcatcacaaatcccttgtcataccataaggtgttgtgccacggaaaatattttgattggaaaaaatttcactttgctacttctgcgaaggcatttgggcacagaagcattgacccgatggatggaaataccactgaaaacataaacgacactttcatcaaaaccctgcagggccatgccttgaattccctcacggaaagcatgatggaaaacctccaacgtatcatgagacctccagtctcctctaactcaaagaccgctgcctgggtgacagaagggatgtattctttctgctaccgagtgatgtttgaagctgggtatttaactatctttggcagagatcttacaaggcgggacacacagaaagcacatattctaaacaatcttgacaacttcaagcaattcgacaaagtctttccagccctggtagcaggcctccccattcacatgttcaggactgcgcacaatgcccgggagaaactggcagagagcttgaggcacgagaacctccaaaagagggaaagcatctcagaactgatcagcctgcgcatgtttctcaatgacactttgtccacctttgatgatctggagaaggccaagacacacctcgtggtcctctgggcatcgcaagcaaacaccattccagcgactttctggagtttatttcaaatgattaggaacccagaagcaatgaaagcagctactgaagaagtgaaaagaacattagagaatgctggtcaaaaagtcagcttggaaggcaatcctatttgtttgagtcaagcagaactgaatgacctgccagtattagatagtataatcaaggaatcgctgaggctttccagtgcctccctcaacatccggacagctaaggaggatttcactttgcaccttgaggacggttcctacaacatccgaaaagatgacatcatagctctttacccacagttaatgcacttagatccagaaatctacccagaccctttgacttttaaatatgataggtatcttgatgaatacatgccctttggatcgggagctacaatatgtcctggaagattgttcgctatccacgaaatcaagcaatttttgattctgatgctttcttattttgaattggagcttatagagggccaagctaaatgtccacctttggaccagtcccgggcaggcttgggcattttgccgccattgaatgatattgaatttaaatataaattcaagcatttgtgaatacatggctggaataagaggacactagatgatattacaggactgcagaacaccctcaccacacagtccctttggacaaatgcatttagtggtggtagaaatgattcaccaggtccaatgttgttcaccagtgcttgcttgtgaatcttaacattttggtgacagtttccagatgctatcacagactctgctagtgaaaagaactagtttctaggagcacaataatttgttttcatttgtataagtccatgaatgttcatatagccagggattgaagtttattattttcaaaggaaaacacctttattttattttttttcaaaatgaagatacacattacagccaggtgtggtagcaggcacctgtagtcttagctactcgagaggccaaagaaggaggatggcttgagcccaggagttcaagaccagcctggacagcttagtgagatcccgtctccgaagaaaagatatgtattctaattggcagattgttttttcctaaggaaactgctttatttttataaaactgcctgacaattatgaaaaaatgttcaaattcacgttctagtgaaactgcattatttgttgactagatggtggggttcttcgggtgtgatcatatatcataaaggatatttcaaatgattatgattagttatgtcttttaataaaaaggaaatatttttcaacttcttctatatccaaaattcagggctttaaacatgattatcttgatttcccaaaaacactaaaggtggttttattttcccttcatgttttaacttattgttgctgaaaactctatgtccggctttaactatcttctctatatttttatttcattcacattaatgagaagagttttctcagagattaaaaaaggtagtttttctgtcattgttaaatacacattatcactgaaaaaatgtagcttttatgatgtatgttttaaagttaaaactggatggaaatagccatttggaagctttggttatgaaacatgtggagtgtattaagtgcagcttgacattatgttttatttaaatgctttttatcgctaaatgacttgcagatgaaaaaaactaaggtgactcgagtgtttaaatgcctgtgtacaacaatgctttgataaaatattttaaggtatgagttatcagctctatgtcaattgatatttctgtgtagtatttatatttaaattatatttacctttttgcttattttacaaatattaagaaaatattctaacatttgataattttgaaatgattcatctttcagaaataaaagtatgaatct

SEQ ID NO: 728809 - DNA, 2822 bp, Homo sapiens
gtggcatccttccctttctaatcagagattttcttcctcagagattttggcctagatttgcaaaatgatgaccacatctttgatttgggggattgctatagcagcatgctgttgtctatggcttattcttggaattaggagaaggcaaacgggtgaaccacctctagagaatggattaattccatacctgggctgtgctctgcaatttggtgccaatcctcttgagttcctcagagcaaatcaaaggaaacatggtcatgtttttacctgcaaactaatgggaaaatatgtccatttcatcacaaatcccttgtcataccataaggtgttgtgccacggaaaatattttgattggaaaaaatttcactttgctacttctgcgaaggcatttgggcacagaagcattgacccgatggatggaaataccactgaaaacataaacgacactttcatcaaaaccctgcagggccatgccttgaattccctcacggaaagcatgatggaaaacctccaacgtatcatgagacctccagtctcctctaactctttgaagctgggtatttaactatctttggcagagatcttacaaggcgggacacacagaaagcacatattctaaacaatcttgacaacttcaagcaattcgacaaagtctttccagccctggtagcaggcctccccattcacatgttcaggactgcgcacaatgcccgggagaaactggcagagagcttgaggcacgagaacctccaaaagagggaaagcatctcagaactgatcagcctgcgcatgtttctcaatgacactttgtccacctttgatgatctggagaaggccaagacacacctcgtggtcctctgggcatcgcaagcaaacaccattccagcgactttctggagtttatttcaaatgattaggaacccagaagcaatgaaagcagctactgaagaagtgaaaagaacattagagaatgctggtcaaaaagtcagcttggaaggcaatcctatttgtttgagtcaagcagaactgaatgacctgccagtattagatagtataatcaaggaatcgctgaggctttccagtgcctccctcaacatccggacagctaaggaggatttcactttgcaccttgaggacggttcctacaacatccgaaaagatgacatcatagctctttacccacagttaatgcacttagatccagaaatctacccagaccctttgacttttaaatatgataggtatcttgatgaaaacgggaagacaaagactaccttctattgtaatggactcaagttaaagtattactacatgccctttggatcgggagctacaatatgtcctggaagattgttcgctatccacgaaatcaagcaatttttgattctgatgctttcttattttgaattggagcttatagagggccaagctaaatgtccacctttggaccagtcccgggcaggcttgggcattttgccgccattgaatgatattgaatttaaatataaattcaagcatttgtgaatacatggctggaataagaggacactagatgatattacaggactgcagaacaccctcaccacacagtccctttggacaaatgcatttagtggtggtagaaatgattcaccaggtccaatgttgttcaccagtgcttgcttgtgaatcttaacattttggtgacagtttccagatgctatcacagactctgctagtgaaaagaactagtttctaggagcacaataatttgttttcatttgtataagtccatgaatgttcatatagccagggattgaagtttattattttcaaaggaaaacacctttattttattttttttcaaaatgaagatacacattacagccaggtgtggtagcaggcacctgtagtcttagctactcgagaggccaaagaaggaggatggcttgagcccaggagttcaagaccagcctggacagcttagtgagatcccgtctccgaagaaaagatatgtattctaattggcagattgttttttcctaaggaaactgctttatttttataaaactgcctgacaattatgaaaaaatgttcaaattcacgttctagtgaaactgcattatttgttgactagatggtggggttcttcgggtgtgatcatatatcataaaggatatttcaaatgattatgattagttatgtcttttaataaaaaggaaatatttttcaacttcttctatatccaaaattcagggctttaaacatgattatcttgatttcccaaaaacactaaaggtggttttattttcccttcatgttttaacttattgttgctgaaaactctatgtccggctttaactatcttctctatatttttatttcattcacattaatgagaagagttttctcagagattaaaaaaggtagtttttctgtcattgttaaatacacattatcactgaaaaaatgtagcttttatgatgtatgttttaaagttaaaactggatggaaatagccatttggaagctttggttatgaaacatgtggagtgtattaagtgcagcttgacattatgttttatttaaatgctttttatcgctaaatgacttgcagatgaaaaaaactaaggtgactcgagtgtttaaatgcctgtgtacaacaatgctttgataaaatattttaaggtatgagttatcagctctatgtcaattgatatttctgtgtagtatttatatttaaattatatttacctttttgcttattttacaaatattaagaaaatattctaacatttgataattttgaaatgattcatctttcagaaataaaagtatgaatct

SEQ ID NO: 728810 - DNA, 2768 bp, Homo sapiens; identical to SEQ ID NO: 413944

SEQ ID NO: 728811 - DNA, 2815 bp, Homo sapiens
gtggcatccttccctttctaatcagagattttcttcctcagagattttggcctagatttgcaaaatgatgaccacatctttgatttgggggattgctatagcagcatgctgttgtctatggcttattcttggaattaggagaaggcaaacgggtgaaccacctctagagaatggattaattccatacctgggctgtgctctgcaatttggtgccaatcctcttgagttcctcagagcaaatcaaaggaaacatggtcatgtttttacctgcaaactaatgggaaaatatgtccatttcatcacaaatcccttgtcataccataaggtgttgtgccacggaaaatattttgattggaaaaaatttcactttgctacttctgcgaaggcatttgggcacagaagcattgacccgatggatggaaataccactgaaaacataaacgacactccaacgtatcatgagacctccagtctcctctaactcaaagaccgctgcctgggtgacagaagggatgtattctttctgctaccgagtgatgtttgaagctgggtatttaactatctttggcagagatcttacaaggcgggacacacagaaagcacatattctaaacaatcttgacaacttcaagcaattcgacaaagtctttccagccctggtagcaggcctccccattcacatgttcaggactgcgcacaatgcccgggagaaactggcagagagcttgaggcacgagaacctccaaaagagggaaagcatctcagaactgatcagcctgcgcatgtttctcaatgacactttgtccacctttgatgatctggagaaggccaagacacacctcgtggtcctctgggcatcgcaagcaaacaccattccagcgactttctggagtttatttcaaatgattaggaacccagaagcaatgaaagcagctactgaagaagtgaaaagaacattagagaatgctggtcaaaaagtcagcttggaaggcaatcctatttgtttgagtcaagcagaactgaatgacctgccagtattagatagtataatcaaggaatcgctgaggctttccagtgcctccctcaacatccggacagctaaggaggatttcactttgcaccttgaggacggttcctacaacatccgaaaagatgacatcatagctctttacccacagttaatgcacttagatccagaaatctacccagaccctttgacttttaaatatgataggtatcttgatgaaaacgggaagacaaagactaccttctattgtaatggactcaagttaaagtattactacatgccctttggatcgggagctacaatatgtcctggaagattgttcgctatccacgaaatcaagcaatttttgattctgatgctttcttattttgaattggagcttatagagggccaagctaaatgtccacctttggaccagtcccgggcaggcttgggcattttgccgccattgaatgatattgaatttaaatataaattcaagcatttgtgaatacatggctggaataagaggacactagatgatattacaggactgcagaacaccctcaccacacagtccctttggacaaatgcatttagtggtggtagaaatgattcaccaggtccaatgttgttcaccagtgcttgcttgtgaatcttaacattttggtgacagtttccagatgctatcacagactctgctagtgaaaagaactagtttctaggagcacaataatttgttttcatttgtataagtccatgaatgttcatatagccagggattgaagtttattattttcaaaggaaaacacctttattttattttttttcaaaatgaagatacacattacagccaggtgtggtagcaggcacctgtagtcttagctactcgagaggccaaagaaggaggatggcttgagcccaggagttcaagaccagcctggacagcttagtgagatcccgtctccgaagaaaagatatgtattctaattggcagattgttttttcctaaggaaactgctttatttttataaaactgcctgacaattatgaaaaaatgttcaaattcacgttctagtgaaactgcattatttgttgactagatggtggggttcttcgggtgtgatcatatatcataaaggatatttcaaatgattatgattagttatgtcttttaataaaaaggaaatatttttcaacttcttctatatccaaaattcagggctttaaacatgattatcttgatttcccaaaaacactaaaggtggttttattttcccttcatgttttaacttattgttgctgaaaactctatgtccggctttaactatcttctctatatttttatttcattcacattaatgagaagagttttctcagagattaaaaaaggtagtttttctgtcattgttaaatacacattatcactgaaaaaatgtagcttttatgatgtatgttttaaagttaaaactggatggaaatagccatttggaagctttggttatgaaacatgtggagtgtattaagtgcagcttgacattatgttttatttaaatgctttttatcgctaaatgacttgcagatgaaaaaaactaaggtgactcgagtgtttaaatgcctgtgtacaacaatgctttgataaaatattttaaggtatgagttatcagctctatgtcaattgatatttctgtgtagtatttatatttaaattatatttacctttttgcttattttacaaatattaagaaaatattctaacatttgataattttgaaatgattcatctttcagaaataaaagtatgaatct

SEQ ID NO: 728812 - DNA, 2761 bp, Homo sapiens; identical to SEQ ID NO: 413945

SEQ ID NO: 728813 - DNA, 2760 bp, Homo sapiens
gtggcatccttccctttctaatcagagattttcttcctcagagattttggcctagatttgcaaaatgatgaccacatctttgatttgggggattgctatagcagcatgctgttgtctatggcttattcttggaattaggagaaggcaaacgggtgaaccacctctagagaatggattaattccatacctgggctgtgctctgcaatttggtgccaatcctcttgagttcctcagagcaaatcaaaggaaacatggtcatgtttttacctgcaaactaatgggaaaatatgtccatttcatcacaaatcccttgtcataccataaggtgttgtgccacggaaaatattttgattggaaaaaatttcactttgctacttctgcgaaggcatttgggcacagaagcattgacccgatggatggaaataccactgaaaacataaacgacactccaacgtatcatgagacctccagtctcctctaactctttgaagctgggtatttaactatctttggcagagatcttacaaggcgggacacacagaaagcacatattctaaacaatcttgacaacttcaagcaattcgacaaagtctttccagccctggtagcaggcctccccattcacatgttcaggactgcgcacaatgcccgggagaaactggcagagagcttgaggcacgagaacctccaaaagagggaaagcatctcagaactgatcagcctgcgcatgtttctcaatgacactttgtccacctttgatgatctggagaaggccaagacacacctcgtggtcctctgggcatcgcaagcaaacaccattccagcgactttctggagtttatttcaaatgattaggaacccagaagcaatgaaagcagctactgaagaagtgaaaagaacattagagaatgctggtcaaaaagtcagcttggaaggcaatcctatttgtttgagtcaagcagaactgaatgacctgccagtattagatagtataatcaaggaatcgctgaggctttccagtgcctccctcaacatccggacagctaaggaggatttcactttgcaccttgaggacggttcctacaacatccgaaaagatgacatcatagctctttacccacagttaatgcacttagatccagaaatctacccagaccctttgacttttaaatatgataggtatcttgatgaaaacgggaagacaaagactaccttctattgtaatggactcaagttaaagtattactacatgccctttggatcgggagctacaatatgtcctggaagattgttcgctatccacgaaatcaagcaatttttgattctgatgctttcttattttgaattggagcttatagagggccaagctaaatgtccacctttggaccagtcccgggcaggcttgggcattttgccgccattgaatgatattgaatttaaatataaattcaagcatttgtgaatacatggctggaataagaggacactagatgatattacaggactgcagaacaccctcaccacacagtccctttggacaaatgcatttagtggtggtagaaatgattcaccaggtccaatgttgttcaccagtgcttgcttgtgaatcttaacattttggtgacagtttccagatgctatcacagactctgctagtgaaaagaactagtttctaggagcacaataatttgttttcatttgtataagtccatgaatgttcatatagccagggattgaagtttattattttcaaaggaaaacacctttattttattttttttcaaaatgaagatacacattacagccaggtgtggtagcaggcacctgtagtcttagctactcgagaggccaaagaaggaggatggcttgagcccaggagttcaagaccagcctggacagcttagtgagatcccgtctccgaagaaaagatatgtattctaattggcagattgttttttcctaaggaaactgctttatttttataaaactgcctgacaattatgaaaaaatgttcaaattcacgttctagtgaaactgcattatttgttgactagatggtggggttcttcgggtgtgatcatatatcataaaggatatttcaaatgattatgattagttatgtcttttaataaaaaggaaatatttttcaacttcttctatatccaaaattcagggctttaaacatgattatcttgatttcccaaaaacactaaaggtggttttattttcccttcatgttttaacttattgttgctgaaaactctatgtccggctttaactatcttctctatatttttatttcattcacattaatgagaagagttttctcagagattaaaaaaggtagtttttctgtcattgttaaatacacattatcactgaaaaaatgtagcttttatgatgtatgttttaaagttaaaactggatggaaatagccatttggaagctttggttatgaaacatgtggagtgtattaagtgcagcttgacattatgttttatttaaatgctttttatcgctaaatgacttgcagatgaaaaaaactaaggtgactcgagtgtttaaatgcctgtgtacaacaatgctttgataaaatattttaaggtatgagttatcagctctatgtcaattgatatttctgtgtagtatttatatttaaattatatttacctttttgcttattttacaaatattaagaaaatattctaacatttgataattttgaaatgattcatctttcagaaataaaagtatgaatct

SEQ ID NO: 728814 - DNA, 2706 bp, Homo sapiens
gtggcatccttccctttctaatcagagattttcttcctcagagattttggcctagatttgcaaaatgatgaccacatctttgatttgggggattgctatagcagcatgctgttgtctatggcttattcttggaattaggagaaggcaaacgggtgaaccacctctagagaatggattaattccatacctgggctgtgctctgcaatttggtgccaatcctcttgagttcctcagagcaaatcaaaggaaacatggtcatgtttttacctgcaaactaatgggaaaatatgtccatttcatcacaaatcccttgtcataccataaggtgttgtgccacggaaaatattttgattggaaaaaatttcactttgctacttctgcgaaggcatttgggcacagaagcattgacccgatggatggaaataccactgaaaacataaacgacactccaacgtatcatgagacctccagtctcctctaactctttgaagctgggtatttaactatctttggcagagatcttacaaggcgggacacacagaaagcacatattctaaacaatcttgacaacttcaagcaattcgacaaagtctttccagccctggtagcaggcctccccattcacatgttcaggactgcgcacaatgcccgggagaaactggcagagagcttgaggcacgagaacctccaaaagagggaaagcatctcagaactgatcagcctgcgcatgtttctcaatgacactttgtccacctttgatgatctggagaaggccaagacacacctcgtggtcctctgggcatcgcaagcaaacaccattccagcgactttctggagtttatttcaaatgattaggaacccagaagcaatgaaagcagctactgaagaagtgaaaagaacattagagaatgctggtcaaaaagtcagcttggaaggcaatcctatttgtttgagtcaagcagaactgaatgacctgccagtattagatagtataatcaaggaatcgctgaggctttccagtgcctccctcaacatccggacagctaaggaggatttcactttgcaccttgaggacggttcctacaacatccgaaaagatgacatcatagctctttacccacagttaatgcacttagatccagaaatctacccagaccctttgacttttaaatatgataggtatcttgatgaatacatgccctttggatcgggagctacaatatgtcctggaagattgttcgctatccacgaaatcaagcaatttttgattctgatgctttcttattttgaattggagcttatagagggccaagctaaatgtccacctttggaccagtcccgggcaggcttgggcattttgccgccattgaatgatattgaatttaaatataaattcaagcatttgtgaatacatggctggaataagaggacactagatgatattacaggactgcagaacaccctcaccacacagtccctttggacaaatgcatttagtggtggtagaaatgattcaccaggtccaatgttgttcaccagtgcttgcttgtgaatcttaacattttggtgacagtttccagatgctatcacagactctgctagtgaaaagaactagtttctaggagcacaataatttgttttcatttgtataagtccatgaatgttcatatagccagggattgaagtttattattttcaaaggaaaacacctttattttattttttttcaaaatgaagatacacattacagccaggtgtggtagcaggcacctgtagtcttagctactcgagaggccaaagaaggaggatggcttgagcccaggagttcaagaccagcctggacagcttagtgagatcccgtctccgaagaaaagatatgtattctaattggcagattgttttttcctaaggaaactgctttatttttataaaactgcctgacaattatgaaaaaatgttcaaattcacgttctagtgaaactgcattatttgttgactagatggtggggttcttcgggtgtgatcatatatcataaaggatatttcaaatgattatgattagttatgtcttttaataaaaaggaaatatttttcaacttcttctatatccaaaattcagggctttaaacatgattatcttgatttcccaaaaacactaaaggtggttttattttcccttcatgttttaacttattgttgctgaaaactctatgtccggctttaactatcttctctatatttttatttcattcacattaatgagaagagttttctcagagattaaaaaaggtagtttttctgtcattgttaaatacacattatcactgaaaaaatgtagcttttatgatgtatgttttaaagttaaaactggatggaaatagccatttggaagctttggttatgaaacatgtggagtgtattaagtgcagcttgacattatgttttatttaaatgctttttatcgctaaatgacttgcagatgaaaaaaactaaggtgactcgagtgtttaaatgcctgtgtacaacaatgctttgataaaatattttaaggtatgagttatcagctctatgtcaattgatatttctgtgtagtatttatatttaaattatatttacctttttgcttattttacaaatattaagaaaatattctaacatttgataattttgaaatgattcatctttcagaaataaaagtatgaatct

SEQ ID NO: 728815 - DNA, 1496 bp, Homo sapiens
agtctgggcgtagagggtgcagggagcagacgggaggatctcaggccagggacgatggcggctctgcaggagaagaagacgtgtggccagcgcatggaggagttccagcgttactgctggaacccggacacggggcagatgctgggccgcaccctgtcccggtgggtgtggatcagcctgtactacgtggccttctacgtggtgatgactgggctcttcgccctgtgcctctatgtgctgatgcagacagtggacccgtacacaccggactaccaagaccagctacggtcaccaggggtaaccttaaggccggatgtttacggggagaaaggcctggaaattgtctacaacgtctctgataacagaacctgggcagacctcacacagactctccacgccttcctagcaggctactctccagcagcccaggaggacagcatcaactgcacctccgagcagtacttcttccaggagagtttccgcgctcccaaccacaccaagttctcctgcaagttcacggcagatatgctgcagaactgctcaggcctggcggatcccaacttcggctttgaagaaggaaagccatgttttattattaaaatgaacaggatcgtcaagttcctccccagcaacggctcggcccccagagtggactgcgccttcctggaccagccccgcgagctcggccagccgctgcaggtcaagtactaccctcccaacggcaccttcagtctgcactacttcccttattacgggaagaaagcccagccccactacagcaaccccctggtggcagcgaagctcctcaacatccccaggaacgctgaggtcgccatcgtgtgcaaggtcatggcagagcacgtgaccttcaacaatccccacgacccgtatgaagggaaagtggagttcaaactcaagattgagaagtgaaacgtttgcgcaggggtcctgggcacgcctgcggggtcgctcaaggacaccctcctggttgggcttaccttgcccgtcagttccctgccaaatcatccccaaagtggtttggagcaacggtgttgtcagtgtgcgaactccagagaagcgcccacatctgaaggacctgctcgcgagtatcagttcttccttgttgaattcttacagtttttagatggaatttgctgctataagaatgtccagctaccatgggaacgcaaggcagcaactctctaattaaccaggtcataaaaacgattcgtcttctatgtagacatcactttcttactataatttatttttctacacttcaatatgaactgccccccccacattaatataaaaactactaatgcactgatatgaaacacggcttacactaatgacattctgaattcttgcttttaaaattgcaattcctaagttgtaaacataaaatatattaaagttactcttattgtatgtaaaaaaagaaatcgtgtttcctgatatgggagaaattaaataaaaaccaaacgcttccttaa

SEQ ID NO: 728816 - DNA, 1288 bp, Homo sapiens; identical to SEQ ID NO: 63371

SEQ ID NO: 728817 - DNA, 1283 bp, Homo sapiens
agcgggcgcgggggcgcccctgcccaccgctcccggcagggcttttggtggccatgggggataaggggcgttgactcacccgggcggggctccgggagttgcacagaccaaggccctgtgcctccctctacagccctcagggagctcattgaggagctggtcaacatcacccagaaccagaaggctccgctctgcaatggcagcatggtatggagcatcaacctgacagctggcatgtactgtgcagccctggaatccctgatcaacgtgtcaggctgcagtgccatcgagaagacccagaggatgctgagcggattctgcccgcacaaggtctcagctgggcagttttccagcttgcatgtccgagacaccaaaatcgaggtggcccagtttgtaaaggacctgctcttacatttaaagaaactttttcgcgagggacggttcaactgaaacttcgaaagcatcattatttgcagagacaggacctgactattgaagttgcagattcatttttctttctgatgtcaaaaatgtcttgggtaggcgggaaggagggttagggaggggtaaaattccttagcttagacctcagcctgtgctgcccgtcttcagcctagccgacctcagccttccccttgcccagggctcagcctggtgggcctcctctgtccagggccctgagctcggtggacccagggatgacatgtccctacacccctcccctgccctagagcacactgtagcattacagtgggtgccccccttgccagacatgtggtgggacagggacccacttcacacacaggcaactgaggcagacagcagctcaggcacacttcttcttggtcttatttattattgtgtgttatttaaatgagtgtgtttgtcaccgttggggattggggaagactgtggctgctggcacttggagccaagggttcagagactcagggccccagcactaaagcagtggaccccaggagtccctggtaataagtactgtgtacagaattctgctacctcactggggtcctggggcctcggagcctcatccgaggcagggtcaggagaggggcagaacagccgctcctgtctgccagccagcagccagctctcagccaacgagtaatttattgtttttcctcgtatttaaatattaaatatgttagcaaagagttaatatatagaagggtaccttgaacactgggggaggggacattgaacaagttgtttcattgactatcaaactgaagccagaaataaagttggtgacagataggcct

SEQ ID NO: 728818 - DNA, 4090 bp, Homo sapiens; identical to SEQ ID NO: 414265

SEQ ID NO: 728819 - DNA, 1917 bp, Homo sapiens
  misc_feature (420)..(420): n is a, c, g, or t
  misc_feature (516)..(516): n is a, c, g, or t
cgctgaggctctggcacctgaaggagccctgggaggatggcgatgttgcctatggatgcagctgcctccgtaagtatcctcttgcagctggtccagcgatgctctcttctccccttccaggctctccttccttctcagacaagatgtcttatcagaaaaagcagcccacccctcagcccccagtggactgcgtgaagacctctggcggcggtggcggtggcggcggcaggcggcggtggtggctgcggcttcttcggcggcggcggctcagggggcggtagcagcggttctggctgcggctactccggcggcggtggctactctggcggcggctgcggcgggggctcctccggcggcgggggcgggggcggcattggaggctgcggagggggctccggtgggagcgtcaagtactccggnggcggcggctcctccggcgggggctctggctgtttctccagcggtgggggcggctccggctgcttctcctccggtggcggcggctcctccgggggnggctccggctgcttctccagcggtgggggcggctcctccgggggcggctccggctgcttctcctccggcggcggcggcttctcgggccaggcggtccagtgccagagctacggaggcgtctctagcggcggctcctccgggggcggctccggctgcttctccagcggcgggggcggcggctctgtctgcggctactctggcggcggctctggcggcggctctggctgcggcggaggctcctctggcggcagcggctccggctacgtctcctcgcagcaggtcactcagacctcgtgcgcgccccagccgagttacggaggggggtcgtccggcggcggcggcagcggcggaagcggctgcttctccagcggcgggggcggcgggagctccggctgcggcggcggctcctccgggattggcagcggctgcatcatcagtggcgggggctccgtctgcggaggtggttcctctggaggcggcggcggcggctcctccgtgggtggctccgggagtggcaagggcgtcccgatctgccaccagacccagcagaagcaggcgcctacctggccgtccaaatagatcccccagggtaccacggaggcgaaggagttggaggtgttttccaggggcaccgatgggcttagagctctcatgatgctacccgaggtttgcaaatccttcatgtcttaacctacctggaagaagccattgagctctccggctgcatctagttctgctgtttagcctctttggtttctgtacaactacctcccaaccccagtgcctcagtcaataaatttgcaaattcatgagaaaaaacaaaaaaaaaaaaaaaaaaaaaaaaaaaaaaaaaaaaaaaaaaaaaaaaaaaaaaaaaagaaacaaaaaaaagaaagaaaaaaacacaaaacgaacaaacagacaacaaaaacaataacaacaccacagaagaacaccagggaaagcggacggtgggcgcgcgccatgcatcactcactccaccacgaggccgcaccggcacaactgaccacagccacaccaccgagcttatcgttatcgccaagccacgccgagacccactagtagagtgagaaacaattaatacagacccgacgcgacgcggacgcccatctctattcaatacactccgaagaaaaaccaaccctaccacccacgacaccatcgccacgacatcacatatacactaacacactacaccaacagacacaacccccactgactacgacccttgcacaaacaccaatcagacaagcccgcgccactacccccacacatccacgaacaacgcgtcttgtttcaccacggatatcatcaccaacaaaccaatccaactcgtcacccccgtccatccgcacgccacacactcagaagagcccaaac

SEQ ID NO: 728820 - DNA, 1828 bp, Homo sapiens
  misc_feature (331)..(331): n is a, c, g, or t
  misc_feature (427)..(427): n is a, c, g, or t
ctctcctcactcacccttcctggtgctttgggctctccttccttctcagacaagatgtcttatcagaaaaagcagcccacccctcagcccccagtggactgcgtgaagacctctggcggcggtggcggtggcggcggcaggcggcggtggtggctgcggcttcttcggcggcggcggctcagggggcggtagcagcggttctggctgcggctactccggcggcggtggctactctggcggcggctgcggcgggggctcctccggcggcgggggcgggggcggcattggaggctgcggagggggctccggtgggagcgtcaagtactccggnggcggcggctcctccggcgggggctctggctgtttctccagcggtgggggcggctccggctgcttctcctccggtggcggcggctcctccgggggnggctccggctgcttctccagcggtgggggcggctcctccgggggcggctccggctgcttctcctccggcggcggcggcttctcgggccaggcggtccagtgccagagctacggaggcgtctctagcggcggctcctccgggggcggctccggctgcttctccagcggcgggggcggcggctctgtctgcggctactctggcggcggctctggcggcggctctggctgcggcggaggctcctctggcggcagcggctccggctacgtctcctcgcagcaggtcactcagacctcgtgcgcgccccagccgagttacggaggggggtcgtccggcggcggcggcagcggcggaagcggctgcttctccagcggcgggggcggcgggagctccggctgcggcggcggctcctccgggattggcagcggctgcatcatcagtggcgggggctccgtctgcggaggtggttcctctggaggcggcggcggcggctcctccgtgggtggctccgggagtggcaagggcgtcccgatctgccaccagacccagcagaagcaggcgcctacctggccgtccaaatagatcccccagggtaccacggaggcgaaggagttggaggtgttttccaggggcaccgatgggcttagagctctcatgatgctacccgaggtttgcaaatccttcatgtcttaacctacctggaagaagccattgagctctccggctgcatctagttctgctgtttagcctctttggtttctgtacaactacctcccaaccccagtgcctcagtcaataaatttgcaaattcatgagaaaaaacaaaaaaaaaaaaaaaaaaaaaaaaaaaaaaaaaaaaaaaaaaaaaaaaaaaaaaaaaagaaacaaaaaaaagaaagaaaaaaacacaaaacgaacaaacagacaacaaaaacaataacaacaccacagaagaacaccagggaaagcggacggtgggcgcgcgccatgcatcactcactccaccacgaggccgcaccggcacaactgaccacagccacaccaccgagcttatcgttatcgccaagccacgccgagacccactagtagagtgagaaacaattaatacagacccgacgcgacgcggacgcccatctctattcaatacactccgaagaaaaaccaaccctaccacccacgacaccatcgccacgacatcacatatacactaacacactacaccaacagacacaacccccactgactacgacccttgcacaaacaccaatcagacaagcccgcgccactacccccacacatccacgaacaacgcgtcttgtttcaccacggatatcatcaccaacaaaccaatccaactcgtcacccccgtccatccgcacgccacacactcagaagagcccaaac

SEQ ID NO: 728821 - DNA, 527 bp, Homo sapiens
atggcgtttgatcttacggtaccacctagtggacaagatagtgcactgcatgagaccattgctacagccagaaaacagggagatcttgaggcatggcaatatccggtaatgttacaaccgatgccggccgggaaaggcagtcaagcaggagttaaacaatatggacctaactctccttatatgagaacattattaaattccattgctcatggaaatagacttatttcttatgattgggaaattctggctaaatcttccctttcaccctctcagtatctccagtttaaaacctggtggattgatggggtacaagaacaggtacgaaaaaatcaggctactaatcctgttgcttatatagatgaagaccaattgctaggaagaggtccaaactgggacactattaaccaacaatcagtaatgaaaatgaggctattgaacaactataagggctatttgcctcagggcctgggaaaacattcaggacccaggaacctcatgcccttcttttagttcaatcagacaaggct

SEQ ID NO: 728822 - DNA, 470 bp, Homo sapiens
tactgtacattccaacttttttgaaataattaagtagaagtcggccagtgcggtggctcacgcctgtagtcccagctacttgggaggctgaggcacaattgcttgaacccgggaggcggaggttgcggtgagtcgagatcacaccactgcactccagccttggcgatagagggagactccatctcaaaaaaataaaataaaataaaaataaataagatttaaaaaataaaaaaaagagggttgctgcatctgagactgcaggttctactctgggttctggaaagaggacagaccagaactaggctctccttggtaccagcagagagccaagggactgcagcacaggagggaaggaagcccctggaggccagttagggcagccactagcagtgccttcatgagaaaagtaccctccagattcaatgcagccctggggacacttgtcctggcaagaaaagagtgtcctcgtg

SEQ ID NO: 728823 - DNA, 672 bp, Homo sapiens; identical to SEQ ID NO: 30557

SEQ ID NO: 728824 - DNA, 726 bp, Homo sapiens; identical to SEQ ID NO: 30556

SEQ ID NO: 728825 - DNA, 672 bp, Homo sapiens; identical to SEQ ID NO: 30558

SEQ ID NO: 728826 - DNA, 618 bp, Homo sapiens
attattttgctcagaggtttgtggactttgcatactgattctttcctgtttccaagtacatttgcttttaggctatttttattcactttaaaggaattttaataactttctgttgacagcatggacagctggtcttgagaattaaagaaaattcacttgctgactgaggaaggaagtgacatcaatgagcttctaaagtcagcccagcgggggaaattggctggtgagagagtagcctttcattgcactgtatttatcgagcgatgccttgagatgcaaattgctgtatcaatcaaacctgtggtgcctacctccaaccaacccagtgcaaactgaaggaacaatgccctgaaacactgagaatatgctctctcaccaagcctatacttcattctctgtcaaacctcagtttctttgtctagaaaatgaaggaccaggtactaatatagatagtgtagacatgctatctcagtacgtttgtcccaaagagagctatcaattgctttttatcccctactgagagctatttagaaataggaatttttagctgtcatacttagctactaccttgatcctttgttttaaaaccctgtattcattgtttataactacactgca

SEQ ID NO: 728827 - DNA, 743 bp, Homo sapiens
gatcttccgggcttcacgaattcggctcgaggaacaccatgctacatattgttacacctctgttaaacatgtattttaccccatatgctcatccattctctctctatatctatctagatctcgatatctatctatagatatatctatatctatatgtatagatagatatctagatatatctagctattgagatctagatctagatatagatgtctatagatatagatataactagctattgagatctagatagatagttgtctagataagtatctagacagattgatatagatatatacagagaatattaggtccatactctctctctctctatatatatacacacacatatctattaggtatatagtatatacctaatacttttggatcacttgagaataatgtatatacgtcattgccctttagtcctaaatacttcaatgtgtatttcctaggaataagaatatccatttaaaagaatcatgttatacttcttatcttcagttcatttacttagtcactatttcttgaattgaaccaaactattagaacacccattatcctggtctgatctgacccactgctaacggaattacaggagtgaaaaattcaaagtttcatttgcatttcaggttttggtctttgagagtaccatagaatcaagttttgcaaatcagctttgaatttgactcaccatgggtttgtttgattcagttcaactgttctaaaaacctctttgtcaa

SEQ ID NO: 728828 - DNA, 1128 bp, Homo sapiens
attctatcagcagcctgccaaatggattgaagttgggaaaaatctgaggccgggggatcagcaataagtggcacgtactaaaatctcaagaataaaaccctgacctgttttaagcacctggagacaagcagagcctcttgtggagacagatgtatcagatcttcacctgacttcatttgatatctgaatcatagaactatttcatacccccttcttccaagtccaagctctcctggcatcttgtggttaggactgtatctcgttacttctgcttatcctgcagtggctctgggcttgtttgataatcaaactgagccggcccttatttttaatttttaacccatcctaatggggcttttttatttggaaatgattttaaacttatagaaatgctgcaagaataagaatggtacatagaacaccatgctacatattgttacacctctgttaaacatgtattttaccccatatgctcatccattctctctctatatctatctagatctcgatatctatctatagatatatctatatctatatgtatagatagatatctagatatatctagctattgagatctagatctagatatagatgtctatagatatagatataactagctattgagatctagatagatagttgtctagataagtatctagacagattgatatagatatatacagagaatattaggtccatactctctctctctctatatatatacacacacatatctattaggtatatagtatatacctaatacttttggatcacttgagaataatgtatatacgtcattgccctttagtcctaaatacttcaatgtgtatttcctaggaataagaatatccatttaaaagaatcatgttatacttcttatcttcagttcatttacttagtcactatttcttgaattgaaccaaactattagaacacccattatcctggtctgatctgacccactgctaacggaattacaggagtgaaaaattcaaagtttcatttgcatttcaggttttggtctttgagagtaccatagaatcaagttttgcaaatcagctttgaatttgactcaccatgggtttgtttgattcagttcaactgttctaaaaacctctttgtcaa

SEQ ID NO: 728829 - DNA, 482 bp, Homo sapiens
gcgcttcatatataagacgatgaaagtggaaagggttatacattatgaaagctctttttcaaaaacaaactgtgtggaaataaattaaccggttattttaaaacgccagtttgcaagttcttcaagtctctggtgttttgactttaggattcctctaaaacacagaaacaaagggtaaaaatcaggtggccgtccaaaatgacttcgggcgccccacttagagagacgccttggttcaggtagcccgctggggtcgaaggccccattttcccccgatctatcgggcttcgcggcggaagtcttcgttcaggcaggggatgccctaggagggaaggaggcgacggtgcccaaggacgtcggaagccggggatctccgcttccctcgggccccggctaggttaccagtgctggcccgcggcgcgggtgcccagttgcgcctgggacactgcgggcacggctgtggcggcaacggcagcggccgc

SEQ ID NO: 728830 - DNA, 632 bp, Homo sapiens
cttgtgtcttaatgtgggaaacagaactttctaagtaatctctggagtttgtagcttagaccaggccttcaaaagtcttttctgttttcctttgctacaatttgcttgttatttctctgccggtcacagatgacctggactgactgaatgcttttgtggtaaggaactgatctggccattttcatataacaaaaatcaaagtcaacaattttgtatcaggctgcctaaatgaaccctattgtttccagttcttaaaaatttaagggctatctaagaaaagtttaagcaaaaccctcattccaaacatgcgaccttataataagaacttcctttaaagatgagcagcaaggttgggtatctgatttcactaagtaatattctattgtggtcagaaatgggtaatttgcatcatttggtcactatcaatatttgtgttggagtctgcaagatatttcaacaaagtaagccaaaccactatcttaggggattgttgctggactttggaatataaggctgaacagtgatgtgaagtcatgtttgggggctggaagaagtgataaatgcaaaggttggtgctaaattaggaaccccttgaaggagcaagctgattaaaaaaaaaagctggcagacaa

SEQ ID NO: 728831 - DNA, 558 bp, Homo sapiens
aaaaaaatgctttatatgtagtaaaatgtgtagatcttatgatacatgtatatagtcattgtaactgattgcagtcaaggtgtagaacacatccatcactccagcaattttttcgcagtattccattcagttaatatcatctcccatgagaggcaccattgttataatttctgccactatatattagttatattagttttactttttttgaatattgtaagtagaattctgattccatttattaatgattcttttttgtgtatacctggcatctttcatgaaataatgttgtgaaattcatttgtattagtagttcctttttattgcagcagagtaatgcattttatgactatactacaacttgtttacaataggatttatttattatatcataaagatatatgcagccagatcatagaccccctaatatataaagagaatgcatcttcaggtatcttcagcacacatttattcatcttttacccaaatgggaataattaataatgatcaattttgagttatttggttcagatgattttgactattagtaatattaac

SEQ ID NO: 728832 - DNA, 4224 bp, Homo sapiens; identical to SEQ ID NO: 32178

SEQ ID NO: 728833 - DNA, 4187 bp, Homo sapiens
atgcaaaagtccaggacagtgggccactttcagtcttcaaagagaaagataagaaattctggattttcaaaatccttttgaagccttttaagccattgattattattattcctaaagaaaatgaagataattacatatttttgcatttgggcagtagcatgggccattccagttcctcaaagcaaaccactggagagacatgtcgaaaaatccatgaatttgcatctcctagcaagatcaaatgtgtcagtacaggatgagttaaatgccagtggaaccatcaaagaaagtggtgtcctggtgcatgaaggtgatagaggaaggcaagagaatacccaagatggtcacaagggagaagggaatggctctaagtgggcagaagtaggagggaagagtttttctacatattccacattagcaaacgaagaggggaatattgagggctggaatggggacacaggaaaagcagaaacatatggtcatgatggaatacatgggaaagaagaaaacatcacagcaaatggcatccagggacaagtaagcatcattgacaatgctggagccacaaacagaagcaacactaatggaaatactgataagaatacccaaaatggggatgttggcgatgcaggtcacaatgaggatgtcgctgttgtccaagaagatggacctcaagtagctggaagcaataacagtacagacaatgaggatgaaataattgagaattcctgtagaaacgagggtaatacaagtgaaataacacctcagatcaacagcaagagaaatgggactaaggaagctgaggtaacaccaggcactggagaagatgctggcctggataattccgatgggagtcctagtgggaatggagcagatgaggatgaagacgagggttctggtgatgatgaagatgaagaagcagggaatggaaaagacagtagtaataacagcaagggccaggagggccaggaccatgggaaagaagatgatcatgatagtagcataggtcaaaattcggatagtaaagaatattatgaccctgaaggcaaagaagatccccataatgaagttgatggagacaagacctccaagagtgaggagaattctgctggtattccagaagacaatggcagccaaagaatagaggacacccagaagctcaaccatagagaaagcaaacgcgtagaaaatagaatcaccaaagaatcagagacacatgctgttgggaagagccaagataagggaatagaaatcaagggtcccagcagtggcaacagaaatattaccaaagaagttgggaaaggcaacgaaggtaaagaggataaaggacaacatggaatgatcttgggcaaaggcaatgtcaagacacaaggagaggttgtcaacatagaaggacctggccaaaaatcagaaccaggaaataaagttggacacagcaatacaggtagtgacagcaatagtgatggatatgacagttatgattttgatgataagtccatgcaaggagatgatcccaatagcagtgatgaatctaatggcaatgatgatgctaattcagaaagtgacaataacagcagtagccgaggagatgcttcttataactctgatgaatcaaaagataatggcaatggcagtgactcaaaaggagcagaagatgatgacagtgatagcacatcagacactaataatagtgacagtaatggcaatggtaacaatgggaatgatgacaatgacaaatcagacagtggcaaaggtaaatcagatagcagtgacagtgatagtagtgatagcagcaatagcagtgatagtagtgacagcagtgacagtgacagcagtgatagcaacagtagcagtgatagtgacagcagtgacagtgacagcagtgatagcagtgacagtgatagtagtgatagcagcaatagcagtgacagtagtgacagcagtgatagcagtgacagtagtgatagtagtgacagcagtgacagcaagtcagacagcagcaaatcagagagcgacagcagtgatagtgacagtaagtcagacagcagtgacagcaacagcagtgacagtagtgacaacagtgatagcagcgacagcagcaatagcagtaacagcagtgatagtagtgacagcagtgatagcagtgacagcagcagtagcagtgacagcagcagtagcagtgacagcagcaacagcagtgatagtagtgacagtagtgacagcagcaatagcagtgagagcagtgatagtagtgacagcagtgatagtgacagcagtgatagtagtgacagcagtaatagtaacagcagcgatagtgacagcagcaacagcagcgatagcagtgacagcagtgatagcagtgacagcagcaacagcagtgacagtagcgatagcagtgacagcagcaacagcagtgacagcagtgatagcagtgacagcagtgatagtagtgacagcagcaacagcagtgatagcaacgacagcagcaatagcagtgacagcagtgatagcagcaacagcagtgatagcagcaacagcagtgatagcagtgatagcagtgacagcagtgatagcgacagcagcaatagcagtgacagcagtaatagtagtgacagcagcgatagcagcaacagcagtgatagcagcgacagcagcgatagcagtgacagcagtgatagcgacagcagcaatagaagtgacagtagtaatagtagtgacagcagcgatagcagtgacagcagcaacagcagtgacagcagtgatagtagtgacagcagtgacagcaacgaaagcagcaatagcagtgacagcagtgatagcagcaacagcagtgatagtgacagcagtgatagcagcaacagcagtgacagcagtgatagcagcaacagcagtgatagcagtgaaagcagtaatagtagtgacaacagcaatagcagtgacagcagcaacagcagtgacagcagtgatagcagtgacagcagtaatagtagtgacagcagcaatagcggtgacagcagcaacagcagtgacagcagtgatagcaatagcagcgacagcagtgacagcagcaacagcagcgatagcagtgacagcagtgatagcagtgacagcagtgacagcagtgatagcagcaacagcagtgatagcagtgacagcagtgacagcagtgatagcagtaatagtagtgacagcagcaacagcagtgacagcagcgatagcagtgacagcagcgatagcagtgacagcagtgacagcagcaatagcagtgacagcagtgacagcagcgacagcagtgatagcagtgacagcagtggcagcagcgacagcagtgatagcagtgacagcagtgatagcagcgatagcagtgacagcagcgacagcagtgacagcagtgacagcagtgaaagcagcgacagcagcgatagcagcgacagcagtgacagcagcgacagcagtgacagcagcgatagcagcgacagcagcgacagcagcgatagcagtgacagcagcaatagcagtgatagcagcgacagcagtgatagcagtgacagcagcgacagcagcgatagcagcgacagcagtgatagtagtgatagcagtgacagcagtgacagcagcgacagcagtgacagcagcgacagcagtgacagcagcgacagcagtgacagcaatgaaagcagcgacagcagtgacagcagcgatagcagtgacagcagcaacagcagtgacagcagcgacagcagtgatagcagtgacagcacatctgacagcaatgatgagagtgacagccagagcaagtctggtaacggtaacaacaatggaagtgacagtgacagtgacagtgaaggcagtgacagtaaccactcaaccagtgatgattagaacaaaagaaaaacccataagattccttttgtgaaaagtttggtaatgggataggaaaaaaagatttccaagaaagtaaagaaaggggagaaataaacataagacgtatgtaaacaaaaacaactgggggaatcaaatcaaacagttggattcagaaccaagacctaactcctgcagagacagactctgaatgcatgacctttggtacatgcctgttaatattcatgttctgaaaatattttgttaaaagtgtaaatctaaacataaaagaacaattaaaatattctttaatacttcacacagaa

SEQ ID NO: 728834 - DNA, 4224 bp, Homo sapiens; identical to SEQ ID NO: 32178

SEQ ID NO: 728835 - DNA, 4187 bp, Homo sapiens; identical to SEQ ID NO: 728833

SEQ ID NO: 728836 - DNA, 1320 bp, Homo sapiens
ggctcgggctccggctccggctccgggcgccgaccaggtccccttggcccccgccgcgcgccctccaacctgctgctgccgccgccgcgccccccaggctctgccagctacccgcgctctgagcccggggccagattcccatggaagcgccgcgatgttcgccccccggctgctggatttccagaagacgaaatacgcgaggttcatgaaccaccgagtccctgcccacaagaggtaccagcccacagagtatgaacatgcggccaactgtgccacccatgctttctggatcatccccagcatcctgggcagctccaacctctacttcctgtcggacgatgactgggagaccatctctgcctggatctacggcctcggcctctgcggcctcttcgtggtgtccactgtgtttcacaccatctcctggaagaagagccacctcaggatggtggaacactgtctacacatgttcgaccggatggtcatctatttcttcatagcggcttcctacgcaccctggctgaaccttcgggagctgggcccctgggcctcccacatgcgctggctggtctggattatggcttccgtgggcaccatctatgtcttcttcttccatgagcggtacaagcttgtggagcttctctgctacgtcgtaatgggcttcttccccgccctggtcatcctctccatgcccaacaccgagggcatctgggagctggtgaccggaggggtcttctactgcctgggcatggtcttcttcaagagtgacgggaggatcccctttgcccacgccatctggcatctctttgtagcatttggtgctggtacccactactatgccatctggaggtacctctatctgcccagcaccctgcagaccaaggtgtccaaatgaggtgacccagacttgagaggtcgtttgggctttaggagtggagcacgtttctgcgaacgttaacccagagcacagcgccaaggcctgtcttccctttattgggtagagttcttgatggctccaaggtgacttctggtgacagccagatcgtccctcgagtccccagcgagaaagaaagcatttagccattcttacagaggagaaattaaccctgtaatgtgtttctattttagatgagtgtttcctaatacaagcaacattaacatcttcagaaaaggaagcaggcatggtcctgggaaaattggggaatgacgggccaatctgtgtttcctaaggtcctgaagaatctggcaaagagtcctgtgggttgttttatacctgggtggccagggcctccctctctgttaccaaagtccaggctggcg

SEQ ID NO: 728837 - DNA, 387 bp, Homo sapiens; identical to SEQ ID NO: 745

SEQ ID NO: 728838 - DNA, 3215 bp, Homo sapiens; identical to SEQ ID NO: 23786

SEQ ID NO: 728839 - DNA, 452 bp, Homo sapiens
cattaatggtacaccataaatggtagatctcaaaagtaatgatttcaatttttaaaataatttttttcaaatgcgcatatctgatatttcagagaatcacttcgtacaaagtgatggaagcccagtatgaagacctgagtttggaagaatcatgaagttgtttgagcttctgctttgtccttttgcctgtctttccctcattcctgccagcaatggatagtgtcttttctcagattgatgcagatttgccagagatgagatgatctttctttaggttttctggctttctgatcttcccttcctagaaattagagaagctaagtatttggcttcaagtactttcctttctaggcctgagaatatacgtatgttcataattaacaaacccaaggcaagaactgtccagagaaagaacatgagtggaatataaatgcttatatgtatgggttccc

SEQ ID NO: 728840 - DNA, 474 bp, Homo sapiens
ttggaacatgtgggggatctccctaagctctggccacagcaaagcaaggaggtgtgtgcaagaggaggcttccggactgggcattcccctgtcgcccttcctgccctggggtggccatagctggtgactcttcctaccttgctggtcccacctcacctgcattgaggggacggggagggagggatctgagggatgaaggtagatttctgagactctctcctaagccagaaagacgttcttaacacccctgcagtgtgaaagctggtccagctctacaactgttggtaccaatgtgcaaacacaccagccctgccatctggacccagcactcagaaacaccatacacccctggccgacgccatcatgcccctggatctgctataggccacactgaccacatgctcctggattcgctaattcactcacacacccattgcatcaccagtgcggtcacatggattgaaagaattaata

SEQ ID NO: 728841 - DNA, 726 bp, Homo sapiens; identical to SEQ ID NO: 558511
  misc_feature (68)..(68): n is a, c, g, or t
  misc_feature (71)..(71): n is a, c, g, or t
  misc_feature (76)..(76): n is a, c, g, or t
  misc_feature (81)..(81): n is a, c, g, or t
  misc_feature (93)..(93): n is a, c, g, or t
  misc_feature (124)..(124): n is a, c, g, or t
  misc_feature (536)..(536): n is a, c, g, or t
  misc_feature (599)..(599): n is a, c, g, or t
  misc_feature (634)..(634): n is a, c, g, or t

SEQ ID NO: 728842 - DNA, 472 bp, Homo sapiens
  misc_feature (68)..(68): n is a, c, g, or t
  misc_feature (71)..(71): n is a, c, g, or t
  misc_feature (76)..(76): n is a, c, g, or t
  misc_feature (81)..(81): n is a, c, g, or t
  misc_feature (93)..(93): n is a, c, g, or t
  misc_feature (124)..(124): n is a, c, g, or t
gtcaagtgatataacctattgtaaactgactatcaaactcctgggaaaacaaatttggaaaatgcttnatnatatnaattngtcaacaatttntaagatatgacattaaaagctcaggcagtanaagcaaaaatatatcaaacctaaaaacttctgtaccacaaaggtcacaaccaacagggtaaaaggcaaactgtagaataaaagaaaataccagttgagtgtcccttatttgaaatgcttgggatgtgtttcagattttgtaatatttgcactattcttactggttgagcatctcgaattcaaacacctgagtctgcgatgctccaataagcatttcctttgagtgtcatgttggcactcaaaaagtttcagactttggagcatttgggatttcagatttttggatcagagacattcaacctatagttgcacatcatactgtgatacgtctaggtcgggatcctctaga

SEQ ID NO: 728843 - DNA, 451 bp, Homo sapiens
ggattatttcaatatttttgtaataaaaaatatagggtatacacataggcatcatcacattttttatagaccctggaatccgtttaaaatactttaagcatcataattacttgggatgtcagaaactggtcccacaaattccatcagcctgcctcagcagattgaaaacatttgtctcttgcaagatcaccctactttgcaagttggtgcccccaggaaccctggcccaggggtgctatcagaatatcaggtgaagagagaatcagcttaaatagaaagggcttgtcaagactggccaatgtttcccaggaaatcaaagatgtaaatgattactttcatccatccattataacaaacctgaccacagtggaagctgtcttaaacttccttccctggttttatattaacccaactgatagattaagtattagtcaaaccactaaaaaaaaaa

SEQ ID NO: 728844 - DNA, 465 bp, Homo sapiens; identical to SEQ ID NO: 21112

SEQ ID NO: 728845 - DNA, 1653 bp, Homo sapiens; identical to SEQ ID NO: 49205

SEQ ID NO: 728846 - DNA, 1467 bp, Homo sapiens; identical to SEQ ID NO: 49206

SEQ ID NO: 728847 - DNA, 550 bp, Homo sapiens
tcagcctcccgagtagctgggactacaggcacctgccaccatgcctggctaattttttgtatttttagtagagacgggatttcaccgtgtgagccaggatggtctggatctcctgacctcgtgatccacccgccttggcctcccaaagtgttgggattataggcacgagccactgcgcccagcaagatttttttttttaaagctcagataaagtattatggaggcgaagaagtaggtaactcactggagtacttgagaaaggcatcatatttcagctgggtcctgaagaatgagattttccatataagaagcagaggaggaacattctaggtaaaaggaagggcatatgcaaaaacacgagggttgtgaaaggacctgattggactgagatacaggaataagcacggaggatatctctggggatctttttccctaatacacagttatagttatatccatattgggtttcttgactgttgacttcaggaggttctcaactcaggcaggcccccaatttccagaggagataaccttaaccaatgttttgggt

SEQ ID NO: 728848 - DNA, 642 bp, Homo sapiens
  misc_feature (547)..(547): n is a, c, g, or t
  misc_feature (550)..(550): n is a, c, g, or t
  misc_feature (583)..(583): n is a, c, g, or t
  misc_feature (623)..(623): n is a, c, g, or t
tgagacacagttttgctctttgcccaggctggagtgcaatgcaatggcatgatcttggctcaccgcaacctccgcctcctggtttcaagtgattctcctgccccagcctcccgggtagctgggattacaggcgcccgccaccacacccagctaatttttgtattttcagtagaatcagggtttcaccatgttggccaggctggtctggaactcctgacctcaggtgatctgcccaactcggtctcctaaagtgctgggattacaggcatgggccaccacgctcggcccagacagctcattttaaagccaatctgaccatatcacatccccacatctaacctcagaaagcttcgcattttccttagggccaacacggaactccttcccaagccccgcaggacctgcctcctccctggtcccagggccgctctcttgcctcatctgcagttgactaagctgcagccagtccagccttctcatcgacccggataactcagcctcaggatctctgctcctgtggttccctgcccccagctagcccagcccntcngtctcaagccttgctcagatctgcctcccccangggaggctccagcagccccgcccggcacatgtggcatcanggccactcacccggggtca

SEQ ID NO: 728849 - DNA, 780 bp, Homo sapiens
  misc_feature (664)..(664): n is a, c, g, or t
  misc_feature (693)..(693): n is a, c, g, or t
  misc_feature (761)..(761): n is a, c, g, or t
aatttctattctgccatcttagaagttatttagttaaaaacagttcaatacattcaaatctacagtaaatgtctgacaatctcttttaagatgaattataggggacaattggtttgccaggagcatgctaaggtcaagaccctaaacataacatagtacaatgaacataattccaattgcttttttctgtttaatattaaaaagaaaagatttttttgtctacgtgcttttttcagattttcttcaagtgttgacatgtaataaacttaagtagaagcatcagaaatagcataatgatttgctgctaccaagacaggattgatctgaatttgatttagccatagaaatacctcctgtgagaggaaggccaggtgtagtttagaggaggcagatttgggcattgccactccctggttttcttatctcaggtaagttacttagtgatatggtttggctgtgtccccacccaaatctcatcttgatttgtaactcccacaattcccatgcgttgtaggaagaatctggtgggaggtgattgaattatgggggtgggtctttcctgtgctgttcttgtgatagtgaatgagtctcatgagacctggtgctttaaaaacaagaatttacctgcacaagctctctctgtgcctgcttctccttcgccttntaacatgattgtaagtttcctgaggcctncctagaagcaaaagctgctgtgcttcctgtaccatctacaggaccgtgagccaattaaacctcttttntttataaattaaaaaaggc

SEQ ID NO: 728850 - DNA, 994 bp, Homo sapiens
ctgcctggctcccttaggaggtggatgacttctttgagcatgagaggaccttcctgttggagtatcacacccgtatccgagatgcctgcctgcgggccgaccgcgtcatgcgcgcccacaagtgtacgcagggcccaaggggtcctggatccccctgcccctctccccagcggttcaactccttgggggagagaagagagcagggcgtgccttgttgtttgtctgtggccacaagcaccaaggcttgacatgcagatgtaggggctctgatgggggctgttccccaacaggcctggcagacgattatatccctatctcagctgcgctgagcagtctgggaacacaggaagtcaaccagctaaggacgtgaggactccccccacccctaccctctccctgtgcctgtaataccatgtcttcccatgaggggtcactctgtagatgtctactgtcagctctaggtgggaggtgtaggctctcctgttgggggatggtgttgggaaggaaaggggagagggagattcccaaggagaggctgagacagagaggctttgagctgttcctcagccccctaccctaactccctccctactgcttcctaggagcttcctcaaattggcagagctctttgaacggctgagggtgagtactgccttctgtgctcaaaggctttcctggtgagctttgcagggaagatgagtcctggcagagggaagagctccaggatcatcttgggttcagtgataacttgggcccagtggcaagttgggcttacactccagactagtttaacaaaaggtggggtgaagacaaggatccagcttcgtgtgtgtgttggggggtgcaggggcatgcacatgtatgcacgtgtgcagcagcggagggttgggaggcacaagggtgtgcccaaacctctggcaggctgcacccagctgccagcacactgcccgggcacacatgttccccactcttccctaagaaagtcactggagtg

SEQ ID NO: 728851 - DNA, 2317 bp, Homo sapiens; identical to SEQ ID NO: 70799

SEQ ID NO: 728852 - DNA, 652 bp, Homo sapiens
ccctggtgctgtatctgccatcttttcacactgggtgtgacccgaagagacagcctgaggtccgtcctcactcactgtgtttcaggaactgagggtcagctggcagtgggatgaggctggcccccttctccgctttcgttccgggaggcctcccgtagagcggtaggggctcgagatggcatttcgtttggggcacgagctggtccgggaggtctgggatctctggttctgacctctgggcacctgctgcagctgtggctgaggcccagaaatgtgaagggcctccatccactccagtagtgaccccaacgtggggttcaatgtggaggggggaggggctgctgcggcagctgcaggagcagaagtgccacaccttgttcttctcatgcccgcatccatgcttgcagctgggaagggggcaggaatcagcgaggtgacctgggctgagtcctgggaatgggaagaggtggcaggaaggggatctgaggaggagaacagggggcctggtggtctgtgcttcttcccagacatgggagctgtagaggggacccctgcagcagatgctaagggggccagtaggcccaggcagtcttgggacttgtgtgtctcctgctgtgcatccatactgggtgctttagaaacggcaggcaga

SEQ ID NO: 728853 - DNA, 1061 bp, Homo sapiens
cagtgaagtatcagaaagcagtgtcagcaacacagaggaagtgccagggtctctgtgtctcagaaagttttcttgcatgttctttggagcagtttcttctgaccagcaagaacacttcaaccaccctttcgacagtctggcaagagcaagtgacagtgaagaggacatgaataatggcagtttctctatattctaatgcttaatgatggctgagctgggccccagcccagtgactggctcatttgcccctcaagcacgagtttgcatgtttagtgtctaaaagaggttgtccaggacttccttttaatggaggatgggcttttaaaccacatcatcttgtacaacaaccatatctagaaatagctgtttgtcaagtgtatgtaacttgctttaaatccattatgctacttgtgaggcagaagagttttctgtgaaggaaaaaagcccattagagttcttcaattcaatgcacgttcaccctagagcttttaacatctttgctagttttataaaggtatttaaactttattcaacagccatttagagtgccatcaagatggcttgaaatggaattttgtgatttgtagtcaggtatcttttgtatttgattgcaaacatttggattttagttttctcatgtaataccatggccttttttgtgcattgttttttatattttaagactttaagtagaataaaccctggaaaaaagatcaagagtaaaaatatatagtcactttcacttggcttttttagacggagtctcactttgtcactcaggctcaagtgcagtggtgcaatctctgctcactgcaacatctgcctcccaggtccaagcgattctcctgcctcagcctcccgtgcagctgggattgcaggtgcgtgccaccatgcctggctaatttctggtattttgtagagacagggtttcgccatgttggccagggtggtcttgaactcctggcctcaagtgatctgcccacctcggcctcccaaagtgctgggattacagacttgagccactgcgcccaacctggagtgtttttacatattgtaaaatt

SEQ ID NO: 728854 - DNA, 296 bp, Homo sapiens
ctccatctcaaaaaaaaaaaaaagcaaaaaaactggaccccaagagccacaaggaaaaagcatgtactacaacagagtgcacctcttcattcagtaaagggaggtcaccaagagaatttgatgaaccttaccttcaaagttcctgggcacagtggctcacacctgtaatcccagagctttgggaggctgaggtaggaggattgcttgaacccaggagttcaagtttgcagtgcgctatgattgtcccactacactctagcctgagcaacagaccaagaccgtattgccaaaatacc

SEQ ID NO: 728855 - DNA, 248 bp, Homo sapiens; identical to SEQ ID NO: 61313

SEQ ID NO: 728856 - DNA, 1507 bp, Homo sapiens; identical to SEQ ID NO: 23249
  misc_feature (1507)..(1507): n is a, c, g, or t

SEQ ID NO: 728857 - DNA, 696 bp, Homo sapiens
tgaggtcagggatttttgcctgccttgtttactgctatatcccagccgctagaacaatccctagtacacagtagacactcaataagtacttactgagtgaatgaaggtccactcctctgtttggaccaagacctgctcagctatttagtcagctgctttgaccagaaaaaaacagtggatccagagacagagttggtcatgtcaaaggcacagctgccctgactgccaagaacttgtggttgtcttgaatccacaatcttttctctggcattgggttccccaacctgatcaattgagttgggagcaatggattcaagtcaacagtcattcttacactggacagaactcgagctgagccgggcactgtaatggggctggttagaaagataagtttggtgactgggcacggtggcgcactcctgtaatcacagcactttgagaggctgaggcaggtagatcccttgaggccaggagtctgagaccagcctggccaacatggcgaaaccctgtctctaccaaaaatacaaaaagttagccagttgtggtggcacacacttataatcccagctacttggaagtctgaggcaggagaatcgcttgaacctgggaggcggaggttgcagtgagccaagatcacgtcattgtcctccagcctgggtgacagagcgagactccatctcaaaaaaaaaaaaaaaa

SEQ ID NO: 728858 - DNA, 416 bp, Homo sapiens; identical to SEQ ID NO: 377946
  misc_feature (302)..(302): n is a, c, g, or t
  misc_feature (371)..(371): n is a, c, g, or t
  misc_feature (395)..(395): n is a, c, g, or t

SEQ ID NO: 728859 - DNA, 574 bp, Homo sapiens
aggagtccccctgaatggatgattgctgtttcaggaccgggattagaggctgtgatagactgtgcagtggcaaaagtattaacaagagtggcgatgaggatggcagttggggcgtccaggctgctgactgagtgcccgcctgtcggtacagccagccaggccttcgacaagcacctgcctggaaaccgggctcgctgtcctgaaggcctggactggatgtcacgatggggagaacgggatcgcgatacccaagctggggcacaggcgagccagggacactggtttactggggtgataacacccagccctgctatcgcgatccgtttgcactgtggtcagctgtctccacgccgtggttggagagggcttgtctccgggcgccactgctggtgtgtatggtctgtcttagtgtcccctgcaagttgcatttggagattgctgggtggcagggagggaaatgggaagagaatctgttggggtcatggtggtgaaggctgctggtttttaatcccttctcaaccagtccaggacacttgtctcccagagataactggggggggactgcctaaccccc

SEQ ID NO: 728860 - DNA, 526 bp, Homo sapiens
atttgattcaaaggtgtgttgtctgttatagataatctcagcaagtgctgctgtatctcacttgctaggcaatacctgtacaatagctaaccattgcatcaagtgtatatgaggctgtggaattagattttgcccagggaatagtaataatagtaactaccatttatggtcatataaagtacttatcatttttacaaccctgagttatttctttcttttcttttttttttttttgagacggagctttgctctgtcgcccaggctggagtgcagtggagcgatctcggctcactgcaggctccgctcctgggttcacgccattctcctgccttatcctcccgagtggctgggactggaggcgcccgccaccacgcctggctgattttttgtatttttggtggagacggggtttcaccgtgttacccagggatggtcttgatctcctgacctcgtgatccacccaccttggcctcccaaagtgctgggattacaggcgtgagccactgcgcccggccaaccctgagtt

SEQ ID NO: 728861 - DNA, 827 bp, Homo sapiens
gagatttttacaaaaagaaatactataggccataaggttgggggaagaccccaattaatggaaatgggcctaagggaccaatgcctaattaaatccgttaaccagtgattttgtccaccataattacatgacttatagcctaaaagagcaatatttaatccagtaagatttagagatgggtgtacttggaatccctttgaaagcagcgtgtttagttttcaagcaaatgctaatgttccttaatccctaatagtatattagacttcgttgtgttgaatatatcaaatgaacgaactatgaaccagagctttaaaatagtgatttgtaagactttgttacaatggtacttaaaaaattgctttgtataatttacacactgtaaaattcacccattgtacatgtacaattaattgtttttagtaaacttaagagttgtgcagtccaattttagaacatgtccatcagcccccaaaatttactcctgctgctctgcggttaatttgctcctgcctccagccccacgcagccacactgatctgctttctgtacagatttaccctttctagaaatttcacagaggtagaatcatgcagttagtcttttatatctgggcatctttcacttaggcatgtttttgaggttcatccatgttgcagcttatacctgcgtgtagttcctttagttgctgacttagtgttcactgtttgggatataccacattttgtttatcccattcaccagttgataggacattgggctgggcctacaattaggtttttttaaatgcggataataatgctatgaacattcataaatgtctttgtgtg

SEQ ID NO: 728862 - DNA, 1398 bp, Homo sapiens
cagtgaactgcctgctagatgccaggcaagtttaaaggaaaggtcaatgagaaataaagtgctcaagggcagattcaaggaaaacatggggagcattgcagagcaaccaggtcttaaaagagaagttaaggagaacagcaagaagcaagcacacaggagcaggcagaggcacactggttgagaaagtaggatgcccagcagcctggtctgattaaatcagaaattccctctgtaggaggacaagcaaagcatattatcataggctgggcagaattccaaaggtcatttcatccaacactcctcagacgctgaaactcaaggtttcgaaggcaaaagtggaagtgtagacaattgctacagaattgaagcccaacattctgtcctttgcctttcataatttgagacaaaattaaaaccatctgaaatatctcccttggctgcttttttcaaactttaatttccctgcaagtatatgataattgagtttctttagagcacaaggctggatatattggaccttaatgtgcacaagttcatcctagaaattgtctttagagtaccaagtctttcctccccaagagttccaaaactaattcaatatttagaatgctcccctggacctcccagttccagtggctgaatgtcagggctcaggcattagaggattctttttgttctttggccctcttggggactaaatgccatgtatgtcaccatgtcagtgactacagccttggtttcatcccctgatgacccacaaccatcatctcccttatgctgaacatctctctgaatcttggaattttcagatgactctaactttgccaaattagaatcatgcctgattctttttttgtttgattgtttgctttatgtttgtttactttgctcagtgccaagcacaggatttagcataagaaaagttccactagaggttgtttattcaagtaagtaattattatagccatccgtatatgaatgctttacaaaattttggctgatggtcctcgcaggtctgttttattagtcaatttataaactcaagtttatgtcttcaacttgaccatctcctttgacttccagattcgcctcttcccacaaaactgactctccacttggacatctaacaggcatcttaaatttaatgcatccactttggggggctgaggtgggcagatcacgagatcaggagatcaagaccatcctggctggcacggtgaaaccccgtctctgctgaaaatacaaaaaattggccaggcgtggtggcaggcgcctgtggtcccggctactcgggaggctgaggcaggaaaatggcatgaacccaggaggcgtagcttgcagtgagctgagatcgtgccactgcactccagcctgggcgacagagcaagactccttctc

SEQ ID NO: 728863 - DNA, 1311 bp, Homo sapiens
cctggctcctcccaggtcaagctgggaacacgaaagaaggaagccagcagagggcaagtacagacaggttcattgcagagcgtagccttggggttcagcccctcaacctgaggctgaggatctcttggagcttggggagcgtccttggggaccacattcagtagatggaaccacagggccgtaagggtgcgtccatgtgcattgcctggaaggtgaagcttgtagaaagcaaaggtttgtagaaggcgaaggtttgtagaaggcgaaggtttatagaaggtgaaggtttatagtagcctacagcgacttcatttccactctctctcttctagccatgtgttgaaatcagttattcgttgggaatgactaggctgtggatggctttcagtgtgcatatctggactccctctccctgagttccaaacctggctctgctcctttggagcttctgctatgtggcagatcgcctccctgtgcctcagtttccccatgtgtcaaacggggatgacggggtttcaagaatcagagtccacatcagatgcttgcctggcacacgggaatgtgtgagctgggcctgccctggcagcgacagagagctggtgaccaccagaaaccctggccctgggacggcttttgtctcttttttgttgggcaaatgggctcccagccgggcttgggcctccaccgccgggaaggcggaactgcgctcgggtactgggctccggcctcccgaagtccttggtaagccttgcctgtagcggctccgctgccgagtgctttgacaccaggcgctcccagagctctgcccccactgccaagcggcagctgctccggagggcacggggggctggatttggctgtggcttctccagctctgcacaagagccccccttccctggccctgctgcagcatgactgcctcctggctcgtgtcacccactctgtctctgtctctcttcatacgtttccagctgagctgggatccatagtctgtttccctctccacgaccaatctatttatcttctctggaacttcttgtaatgccgggagtgcagagcttacaagttggggcaggaagctttagaagcccaggcagccctgagaggctctttccttgtaagtgggtctctccccaggagcctcttggaatatttagcagggacttttacccatgctgggtctagagaccctcccgcccctctgtttcctgccctcctacttagactgggatctggtttccctcagctggttcccttgctagcgtgtgactctgtgtgtctgtctgtgactggtttagatttgtatgaaat

SEQ ID NO: 728864 - DNA, 491 bp, Homo sapiens
tgctggacaccttcgagtacccgggcctcgtgcatcacaccgggggctgccactgcggcgcggtccgctttgcggtctgggcccctgcagatctgcgcgtcgtggattgcagctgcaggctgtgcaggaagaagcagcaccgccacttcctcgtcccggcctcgcgcttcacgctgctccagggcgcagaaagcatcgtcacctatcggtccaacacgcacccggcgctgcacagcttctgcagcaggtgcggggtgcagagtttccacgcagctgtctctgacccccgcgtgtacggcgtcgcccgcactgcctggacgagggcaccgtgcgcacgtggtcatcgaggaggtcggcggtggcgacccgggggaggaggccgccgaggagcacaaggccatccacaagacgtcctcccagtcagcccctgcctgtccccgcgaacaggagcagtgattggggccgcaagcccgcctgaaaccggcccgggc

SEQ ID NO: 728865 - DNA, 413 bp, Homo sapiens
tttgctctgccagggtgtgtgagagagagagagagtgtgtgtgtgcgtgcgcgtgcgcgcgcactataaagcaatccccatatctggtggcttaaagaagaggggagtttgtttctccttcacttctgactgaggtgggtgccccagggcaagtggcttgcggaagatcaggtcatccctccatcttgcccctgtatgcctaagggtgaaggtcaaaaaccttttctctgaaggtgagtgtttcaggttctgtgggccatatggccctgttgtagctactcaactctgtagcgcaaaggtagccagagacagtacagagatgagtgggtgaggctgcattccaataaaactttacttgcacaaacaggctggatttggtccacaggccgtagcttacccatcctgcctggggc

SEQ ID NO: 728866 - DNA, 573 bp, Homo sapiens
gttttgacaggtctagagtggggtaaaagaatggtatttattcaggcctaatattgaggcttggggctgggctgtatatcagagggcatgcatagacaaagctgaacaaaggggcacacctactgggcacctgctgggcacttctctaaaagtggcactgagacatcattaggatgaattagaactagggcaccagttaacccgggcctgcatgctagtgaaaggaaaattgcgcctctccctcaaccctgctccagacaactgaatggtgacttcaagaacaaatattcaggctgggtgcggtggctcacacctgtaatcccaacacttttggaggctgaggtgagtggatcacctgaggtcaggagttcgagactagcctggccaacatggtgaaaccctgtttctactaaagatacaaaaattagctgggcgtggtggtgggtgccagtaatctcagctaggaggctgaggcaggagaatcgcttgagcctgggaggcagaggttgttgagatggtgccattgcacttcagcctggacgacaagagcataactctgtctcaaaaaaaaaa

SEQ ID NO: 728867 - DNA, 292 bp, Homo sapiens
gttttgacaggtctagagtggggtaaaagaatggtatttattcaggcctaatattgaggcttggggctgggctgtatatcagagggcatgcatagacaaagctgaacaaaggggcacacctactgggcacctgctgggcacttctctaaaagtggcactgagacatcattaggatgaattagaactagggcaccagttaacccgggcctgcatgctagtgaaaggaaaattgcgcctctccctcaaccctgctccagacatggtaactcacacctgtaaacctaacactttg

SEQ ID NO: 728868 - DNA, 247 bp, Homo sapiens
ccccaactggaaaatcacaagagaaaatagatctgaaacatggagaaggagaagatttcgtccaaccactgctccaaatggcttagaacctcttttgacaaaggattcaagaaggattcataaaacatccttacatagtaatgcagctattacaatgatctatttggggaaaaatgtgcacctatcttctgataatctgacttccgggatgaaattaaagtttatcagcagcactgtggtggggaaa

SEQ ID NO: 728869 - DNA, 411 bp, Homo sapiens
gaatcgcctgaacccgggaggcagaggttgccagtgagcccgatatccccgcccactgcactcccagccctggggaacagaatgagactctgtctcaaaaataaataataaaatgataaccaatttttatattccatttgcagaacccattaaaaaaaaaacttttagtcttgggttacaggtaccatataatggttgacacatttaaacaaatcaataaatattcacaccatctcagtcatccacagtaggaaagaacatgagatgtttttgaagggggtggcacttgcgaaacatttattattttaagctaaaagatgacaggtaatgaaatgtacacaatgctgtagactatactctgtgttccctaacaaatgtaaaatatacacatctaaagattaaaaaagcagt

SEQ ID NO: 728870 - DNA, 460 bp, Homo sapiens
tagactacgaaaatccaagtaacctagcagccggcaataaatatacggtgataatccaggttactgtgaacatccttgaagaaaatgatgaaaagccaatttgtactccaaactcttatttcctggccctcccagtggatctgaaagttggcacaaatattcagaatttcaagctgacatgtaccgaccttgattccagccccagatctttccgttattccattggcccaggtaacgtcaacaatcatttcaccttctctcccaatgctggttccaatgtcacacgcctgctgcttacatctcgctttgactatgctggtggggtttgataagatctggggactacaagctacttgtctacggtaactggatggacaacttggatgttctgacagggaaggaaagcggaggctcttgttgagacagggaacagtggacactgaggtatttaaagtcattc

SEQ ID NO: 728871 - DNA, 570 bp, Homo sapiens
ctttcttttcaaggggcttgagtccctcgctgaactttggggtacgcctccctatctgagcccccgctcccgatcgtgggctgaaccttgccttcgggcacggcgctgataggctggatccagcgctgggccaccctctccttcccagctggttggtgattttgacaagaggcctgagggctgtccagaactgctcaccctgcctttttctgggggctgagcccccacaacctgtcttttccaagtggataagcccaggccccatggagagaggctcagccctagggaaaggctgctcttgctctccctcccagggcttgaggctccctatacttttctgtcttccaggttctaccctccccacagacctaagctgctcccagtctcccagaaccaagagttcttgggttgggatttttgtttggttggtttttcttttttttaataaaacatctttaaaatgtgcgagttgtatgtcagtcatagaagccggattccccacatttgaggatgaaacggatgcccaggaggagctgtggctggacccatgaggatgggggcctggactca

SEQ ID NO: 728872 - DNA, 4390 bp, Homo sapiens; identical to SEQ ID NO: 262808
  misc_feature (136)..(136): n is a, c, g, or t
  misc_feature (1836)..(1836): n is a, c, g, or t
  misc_feature (2187)..(2187): n is a, c, g, or t

SEQ ID NO: 728873 - DNA, 4430 bp, Homo sapiens
  misc_feature (1866)..(1866): n is a, c, g, or t
  misc_feature (2217)..(2217): n is a, c, g, or t
  misc_feature (4421)..(4421): n is a, c, g, or t
  misc_feature (4425)..(4430): n is a, c, g, or t
gctgctctgctgattgtctccactatcctgttttgctcctacccactaatccagcctgggaggctctgggcattagcggaaggcttcaccacaaggagacaggagcgagtattccataggcatgcgctcctagtggcacgagtggcttgggtcaggatcaaagagtgaaggattcggaagtcagctatcttctcgtttggagcacagggaccgcccagctagaggagcaccagcgcactgcgccccagccctgggcgagggtgcggaggatttgttctcggtgcaatcctgctggcgcttttccggggttctgcgcggatccagctccccatctctgctcctacacacacaaaagaaaacaactctcgattggaagttgtggaattttctcagcccctacgaggcgcggggattctccagccccggccctcctcccgccagcctgaggtctccttcgctcgcctgccttgctagggaccgcagtccctcagccgcagctgggtctgtccgccccgcctttgccctcgccttttcccggggcggatttggtgaagtcggcctcaagtccaggaggtctgtcttcgccgggccagctctcgcggaactggggggtagagagcaaagggagagattcgtggaagggaagggaggtaggggtggcgcaaacgcccagagtatcaaacttgggggtggcacagtaggtgacagcagcagctgcaggtggtggctggggacccgcgagggggcgcccctctgggtagggtctggctgagcgggcttgcaagcccgggaggcggctgagagaccctggacactgttcctgctccctcgccaccaaaacttctcctccagtcccctcccctgcaggaccatcgcccgcagcctctgcacctgttttcttgtgtttaagggtggggtttgcccccctccccacgctcccatctctgatcctcccaccttcacccgcccaccccgcgagtgagtgcggtgcccaggcgcgcttggcctgagaggtcggcagcagacccggcagcgccaaccgcccagccgctctgactgctccggctgcccgcccgcgcggcgcgggctgtcctggaccctaggaggggacggaaccggacttgcctttgggcaccttccagggccctctccaggtcggctggctaatcatcggacagacggactgcacacatcttgtttccgcgtctccgcaaaaacgcgaggtccaggtcagttgtagactcttgtgctggttgcaggccaagtggacctgtactgaaaatgggtccaataggtgcagaggctgatgagaaccagacagtggaagaaatgaaggtggaacaatacgggccacaaacaactcctagaggtgaactggtccctgaccctgagccagagcttatagatagtaccaagctgattgaggtacaagttgttctcatattggcctactgctccatcatcttgcttggggtaattggcaactccttggtgatccatgtggtgatcaaattcaagagcatgcgcacagtaaccaactttttcattgccaatctggctgtggcagatcttttggtgaacactctgtgtctaccgttcactcttacctataccttaatgggggagtggaaaatgggtcctgtcctgtgccacctggtgccctatgcccagggcctggcagtacaagtatccacaatcaccttgacagtaattgccctggaccggcacaggtgcatcgtctaccacctagagagcaagatctccaagcgaatcagcttcctgattattggcttggcctggggcatcagtgccctgctggcaagtcccctggccatcttccgggagtattcgctgattgagatcatnccggactttgagattgtggcctgtactgaaaagtggcctggcgaggagaagagcatctatggcactgtctatagtctttcttccttgttgatcttgtatgttttgcctctgggcattatatcattttcctacactcgcatttggagtaaattgaagaaccatgtcagtcctggagctgcaaatgaccactaccatcagcgaaggcaaaaaaccaccaaaatgctggtgtgtgtggtggtggtgtttgcggtcagctggctgcctctccatgccttccagcttgccgttgacattgacagccaggtcctggacctgaaggagtacaaactcatcttcacagtgttccacatnatcgccatgtgctccacttttgccaatccccttctctatggctggatgaacagcaactacagaaaggctttcctctcggccttccgctgtgagcagcggttggatgccattcactctgaggtgtccgtgacattcaaggctaaaaagaacctggaggtcagaaagaacagtggccccaatgactctttcacagaggctaccaatgtctaaggaagctgtggtgtgaaaatgtatggatgaattctgaccagagctatgaatctggttgatggcggctcacaagtgaaaactgatttcccattttaaagaagaagtggatctaaatggaagcatctgctgtttaattcctggaaaactggctgggcagagcctgtgtgaaaatactggaattcaaagataaggcaacaaaatggtttacttaacagttggttgggtagtaggttgcattatgagtaaaagcagagagaagtacttttgattattttcctggagtgaagaaaacttgaacaagaaattggtattatcaaagcattgctgagagacggtgggaaaataagttgactttcaaatcacgttaggacctggattgaggaggtgtgcagttcgctgctccctgcttggcttatgaaaacaccactgaacagaaatttctccagggagccacaggctctccttcatcgcattttgatttttttgttcattctctagacaaaatccatcagggaatgctgcaggaaacgattgccaactatacgaatggcttcgaggagataaactgaaatttgctatataattaatattttggcagatgataggggaactcctcaacactcagtgggccaattgttcttaaaaccaattgcacgtttggtgaaagtttcttcaactctgaatcaaaagctgaaattctcagaattacaggaaatgcaaaccatcatttaatttctaatttcaagttacatccgctttatggagatactatttagataacaagaatacaacttgatacttttattgttatacctttttgaacatgtatgatttctgttgttattcctattggagctaagtttgtctacactaaaatttaaatcagactagagaataatttttgtggcatgttgtaacatttcacagtatttacaagctatttttgcacaggtacatagctctcatgtatttaaagaacactgcagtgttattttctttgaaattcatcctccacggacccattcatactaaataaaacaatgtaattacattaaaatggacctatctgtaagaggtactaaaaacactggattcatttcatcttgcaaatgttgtatttcaaaccagtttcacataagttatttgtcttcttttcaaaataattagctatatttttatataatatgaatatatacataaaaattgtttctataaattgtagaacatagatgctacagtattttttatttaattatattatgaataaaattgttatttcaatagtacccaaccaaagatgcttaaaaaccttctatgttcataaaaaataacaactgagatgttaaaatagtcatacgtctttagatgctattaaagtttcattagtcatatttttgtaaatatgacagaatttgtgaatatatttttaaagcaaaaaacttcaacatgcatatgatatatagttacaacattaattttatgaactggagagctttactttgtggatatatttaaaattcatattatagctcctattaaattccttccatgatagatataaaggactggtttttaagtgcactgcacttctggaatactgaaaaagaatgaaaacaatatgttagattaggtgtaagactttaagaagcgaacaaaaagtaatgtatatctgtaatatataatcaaatgattcatttttctgttagactaggcaaattgttcaaaaataacctttttgtcttttaagtagcagtcactttgcttaagatgctaatagaaaactgtggttaaagatttaccctccctcttggtgaattattacactgtaagaaatgtatatgctactgtgttacatgttgtattagtaaattattagaatccaattaatgattcaattaacatatatcttatccaattcattatgtcaattcattaataaaataccttttatgtagaggctttatgttgcaattaaaaagttgggaaaatgaganaaannnnnn

SEQ ID NO: 728874 - DNA, 4420 bp, Homo sapiens
  misc_feature (1866)..(1866): n is a, c, g, or t
  misc_feature (2217)..(2217): n is a, c, g, or t
gctgctctgctgattgtctccactatcctgttttgctcctacccactaatccagcctgggaggctctgggcattagcggaaggcttcaccacaaggagacaggagcgagtattccataggcatgcgctcctagtggcacgagtggcttgggtcaggatcaaagagtgaaggattcggaagtcagctatcttctcgtttggagcacagggaccgcccagctagaggagcaccagcgcactgcgccccagccctgggcgagggtgcggaggatttgttctcggtgcaatcctgctggcgcttttccggggttctgcgcggatccagctccccatctctgctcctacacacacaaaagaaaacaactctcgattggaagttgtggaattttctcagcccctacgaggcgcggggattctccagccccggccctcctcccgccagcctgaggtctccttcgctcgcctgccttgctagggaccgcagtccctcagccgcagctgggtctgtccgccccgcctttgccctcgccttttcccggggcggatttggtgaagtcggcctcaagtccaggaggtctgtcttcgccgggccagctctcgcggaactggggggtagagagcaaagggagagattcgtggaagggaagggaggtaggggtggcgcaaacgcccagagtatcaaacttgggggtggcacagtaggtgacagcagcagctgcaggtggtggctggggacccgcgagggggcgcccctctgggtagggtctggctgagcgggcttgcaagcccgggaggcggctgagagaccctggacactgttcctgctccctcgccaccaaaacttctcctccagtcccctcccctgcaggaccatcgcccgcagcctctgcacctgttttcttgtgtttaagggtggggtttgcccccctccccacgctcccatctctgatcctcccaccttcacccgcccaccccgcgagtgagtgcggtgcccaggcgcgcttggcctgagaggtcggcagcagacccggcagcgccaaccgcccagccgctctgactgctccggctgcccgcccgcgcggcgcgggctgtcctggaccctaggaggggacggaaccggacttgcctttgggcaccttccagggccctctccaggtcggctggctaatcatcggacagacggactgcacacatcttgtttccgcgtctccgcaaaaacgcgaggtccaggtcagttgtagactcttgtgctggttgcaggccaagtggacctgtactgaaaatgggtccaataggtgcagaggctgatgagaaccagacagtggaagaaatgaaggtggaacaatacgggccacaaacaactcctagaggtgaactggtccctgaccctgagccagagcttatagatagtaccaagctgattgaggtacaagttgttctcatattggcctactgctccatcatcttgcttggggtaattggcaactccttggtgatccatgtggtgatcaaattcaagagcatgcgcacagtaaccaactttttcattgccaatctggctgtggcagatcttttggtgaacactctgtgtctaccgttcactcttacctataccttaatgggggagtggaaaatgggtcctgtcctgtgccacctggtgccctatgcccagggcctggcagtacaagtatccacaatcaccttgacagtaattgccctggaccggcacaggtgcatcgtctaccacctagagagcaagatctccaagcgaatcagcttcctgattattggcttggcctggggcatcagtgccctgctggcaagtcccctggccatcttccgggagtattcgctgattgagatcatnccggactttgagattgtggcctgtactgaaaagtggcctggcgaggagaagagcatctatggcactgtctatagtctttcttccttgttgatcttgtatgttttgcctctgggcattatatcattttcctacactcgcatttggagtaaattgaagaaccatgtcagtcctggagctgcaaatgaccactaccatcagcgaaggcaaaaaaccaccaaaatgctggtgtgtgtggtggtggtgtttgcggtcagctggctgcctctccatgccttccagcttgccgttgacattgacagccaggtcctggacctgaaggagtacaaactcatcttcacagtgttccacatnatcgccatgtgctccacttttgccaatccccttctctatggctggatgaacagcaactacagaaaggctttcctctcggccttccgctgtgagcagcggttggatgccattcactctgaggtgtccgtgacattcaaggctaaaaagaacctggaggtcagaaagaacagtggccccaatgactctttcacagaggctaccaatgtctaaggaagctgtggtgtgaaaatgtatggatgaattctgaccagagctatgaatctggttgatggcggctcacaagtgaaaactgatttcccattttaaagaagaagtggatctaaatggaagcatctgctgtttaattcctggaaaactggctgggcagagcctgtgtgaaaatactggaattcaaagataaggcaacaaaatggtttacttaacagttggttgggtagtaggttgcattatgagtaaaagcagagagaagtacttttgattattttcctggagtgaagaaaacttgaacaagaaattggtattatcaaagcattgctgagagacggtgggaaaataagttgactttcaaatcacgttaggacctggattgaggaggtgtgcagttcgctgctccctgcttggcttatgaaaacaccactgaacagaaatttctccagggagccacaggctctccttcatcgcattttgatttttttgttcattctctagacaaaatccatcagggaatgctgcaggaaacgattgccaactatacgaatggcttcgaggagataaactgaaatttgctatataattaatattttggcagatgataggggaactcctcaacactcagtgggccaattgttcttaaaaccaattgcacgtttggtgaaagtttcttcaactctgaatcaaaagctgaaattctcagaattacaggaaatgcaaaccatcatttaatttctaatttcaagttacatccgctttatggagatactatttagataacaagaatacaacttgatacttttattgttatacctttttgaacatgtatgatttctgttgttatttacctttttaaacagataaatatttttttttcattttagagtagcggaatctaatcttaatctaatcttttaggagtatatttcagagaaattccaagcacaccagtatgaccatccttatttcagaaatgacaatgcatagaggaaaagtaatatgtgcaaagcctccgaagaggatggttaagtaaagacttaggttaccagtatcaggctttcgtttttgtatgtaggtagctctactgcctcctcttaaaaccaacaaaggaaagagagactggctgcaaacttttagaaggaatggcttcgaatagggttcctgggaggaatcccgaggaaatagacgctgctgctctgctgattgtctccactatcctgttttgctcctacccactaatccagcctgggaggctctgggcattagcggaaggcttcaccacaaggagacaggagcgagtattccataggcatgcgctcctagtggcacgagtggcttgggtcaggatcaaagagtgaaggattcggaagtcagctatctggagagagagagagattgtgttttattcgtgtcccatagctttcctatcctatccctatcctagcttttaacctgagccagagctcactacacaggttcctggctatcgagtctgaatctgcactactcaacttataaactgtctgcagacacctgttagggaaattgctgatcatgggcggcaggatctgaactcgctttaccttcttgtttggagcacagggaccgcccagctagaggagcaccagcgcactgcgccccagccctgggcgagggtgcggaggatttgttctcggtgcaatcctgctggcgcttttccggggttctgcgcggatccagctccccatctctgctcctacacacacaaaagaaaacaactctcgattggaagttgtggaattttctcagcccctacgaggcgcggggattctccagccccggccctcctcccgccagcctgaggtctccttcgctcgcctgccttgctagggaccgcagtccctcagccgcagctgggtctgtccgccccgcctttgccctcgccttttcccggggcggatttggtgaagtcggcctcaagtccaggaggtctgtcttcgccgggccagctctc

SEQ ID NO: 728875 - DNA, 4304 bp, Homo sapiens
  misc_feature (1740)..(1740): n is a, c, g, or t
  misc_feature (2091)..(2091): n is a, c, g, or t
  misc_feature (4295)..(4295): n is a, c, g, or t
  misc_feature (4299)..(4304): n is a, c, g, or t
gctgctctgctgattgtctccactatcctgttttgctcctacccactaatccagcctgggaggctctgggcattagcggaaggcttcaccacaaggagacaggagcgagtattccataggcatgcgctcctagtggcacgagtggcttgggtcaggatcaaagagtgaaggattcggaagtcagctatcttctcgtttggagcacagggaccgcccagctagaggagcaccagcgcactgcgccccagccctgggcgagggtgcggaggatttgttctcggtgcaatcctgctggcgcttttccggggttctgcgcggatccagctccccatctctgctccttgctagggaccgcagtccctcagccgcagctgggtctgtccgccccgcctttgccctcgccttttcccggggcggatttggtgaagtcggcctcaagtccaggaggtctgtcttcgccgggccagctctcgcggaactggggggtagagagcaaagggagagattcgtggaagggaagggaggtaggggtggcgcaaacgcccagagtatcaaacttgggggtggcacagtaggtgacagcagcagctgcaggtggtggctggggacccgcgagggggcgcccctctgggtagggtctggctgagcgggcttgcaagcccgggaggcggctgagagaccctggacactgttcctgctccctcgccaccaaaacttctcctccagtcccctcccctgcaggaccatcgcccgcagcctctgcacctgttttcttgtgtttaagggtggggtttgcccccctccccacgctcccatctctgatcctcccaccttcacccgcccaccccgcgagtgagtgcggtgcccaggcgcgcttggcctgagaggtcggcagcagacccggcagcgccaaccgcccagccgctctgactgctccggctgcccgcccgcgcggcgcgggctgtcctggaccctaggaggggacggaaccggacttgcctttgggcaccttccagggccctctccaggtcggctggctaatcatcggacagacggactgcacacatcttgtttccgcgtctccgcaaaaacgcgaggtccaggtcagttgtagactcttgtgctggttgcaggccaagtggacctgtactgaaaatgggtccaataggtgcagaggctgatgagaaccagacagtggaagaaatgaaggtggaacaatacgggccacaaacaactcctagaggtgaactggtccctgaccctgagccagagcttatagatagtaccaagctgattgaggtacaagttgttctcatattggcctactgctccatcatcttgcttggggtaattggcaactccttggtgatccatgtggtgatcaaattcaagagcatgcgcacagtaaccaactttttcattgccaatctggctgtggcagatcttttggtgaacactctgtgtctaccgttcactcttacctataccttaatgggggagtggaaaatgggtcctgtcctgtgccacctggtgccctatgcccagggcctggcagtacaagtatccacaatcaccttgacagtaattgccctggaccggcacaggtgcatcgtctaccacctagagagcaagatctccaagcgaatcagcttcctgattattggcttggcctggggcatcagtgccctgctggcaagtcccctggccatcttccgggagtattcgctgattgagatcatnccggactttgagattgtggcctgtactgaaaagtggcctggcgaggagaagagcatctatggcactgtctatagtctttcttccttgttgatcttgtatgttttgcctctgggcattatatcattttcctacactcgcatttggagtaaattgaagaaccatgtcagtcctggagctgcaaatgaccactaccatcagcgaaggcaaaaaaccaccaaaatgctggtgtgtgtggtggtggtgtttgcggtcagctggctgcctctccatgccttccagcttgccgttgacattgacagccaggtcctggacctgaaggagtacaaactcatcttcacagtgttccacatnatcgccatgtgctccacttttgccaatccccttctctatggctggatgaacagcaactacagaaaggctttcctctcggccttccgctgtgagcagcggttggatgccattcactctgaggtgtccgtgacattcaaggctaaaaagaacctggaggtcagaaagaacagtggccccaatgactctttcacagaggctaccaatgtctaaggaagctgtggtgtgaaaatgtatggatgaattctgaccagagctatgaatctggttgatggcggctcacaagtgaaaactgatttcccattttaaagaagaagtggatctaaatggaagcatctgctgtttaattcctggaaaactggctgggcagagcctgtgtgaaaatactggaattcaaagataaggcaacaaaatggtttacttaacagttggttgggtagtaggttgcattatgagtaaaagcagagagaagtacttttgattattttcctggagtgaagaaaacttgaacaagaaattggtattatcaaagcattgctgagagacggtgggaaaataagttgactttcaaatcacgttaggacctggattgaggaggtgtgcagttcgctgctccctgcttggcttatgaaaacaccactgaacagaaatttctccagggagccacaggctctccttcatcgcattttgatttttttgttcattctctagacaaaatccatcagggaatgctgcaggaaacgattgccaactatacgaatggcttcgaggagataaactgaaatttgctatataattaatattttggcagatgataggggaactcctcaacactcagtgggccaattgttcttaaaaccaattgcacgtttggtgaaagtttcttcaactctgaatcaaaagctgaaattctcagaattacaggaaatgcaaaccatcatttaatttctaatttcaagttacatccgctttatggagatactatttagataacaagaatacaacttgatacttttattgttatacctttttgaacatgtatgatttctgttgttattcctattggagctaagtttgtctacactaaaatttaaatcagactagagaataatttttgtggcatgttgtaacatttcacagtatttacaagctatttttgcacaggtacatagctctcatgtatttaaagaacactgcagtgttattttctttgaaattcatcctccacggacccattcatactaaataaaacaatgtaattacattaaaatggacctatctgtaagaggtactaaaaacactggattcatttcatcttgcaaatgttgtatttcaaaccagtttcacataagttatttgtcttcttttcaaaataattagctatatttttatataatatgaatatatacataaaaattgtttctataaattgtagaacatagatgctacagtattttttatttaattatattatgaataaaattgttatttcaatagtacccaaccaaagatgcttaaaaaccttctatgttcataaaaaataacaactgagatgttaaaatagtcatacgtctttagatgctattaaagtttcattagtcatatttttgtaaatatgacagaatttgtgaatatatttttaaagcaaaaaacttcaacatgcatatgatatatagttacaacattaattttatgaactggagagctttactttgtggatatatttaaaattcatattatagctcctattaaattccttccatgatagatataaaggactggtttttaagtgcactgcacttctggaatactgaaaaagaatgaaaacaatatgttagattaggtgtaagactttaagaagcgaacaaaaagtaatgtatatctgtaatatataatcaaatgattcatttttctgttagactaggcaaattgttcaaaaataacctttttgtcttttaagtagcagtcactttgcttaagatgctaatagaaaactgtggttaaagatttaccctccctcttggtgaattattacactgtaagaaatgtatatgctactgtgttacatgttgtattagtaaattattagaatccaattaatgattcaattaacatatatcttatccaattcattatgtcaattcattaataaaataccttttatgtagaggctttatgttgcaattaaaaagttgggaaaatgaganaaannnnnn

SEQ ID NO: 728876 - DNA, 4294 bp, Homo sapiens
  misc_feature (1740)..(1740): n is a, c, g, or t
  misc_feature (2091)..(2091): n is a, c, g, or t
gctgctctgctgattgtctccactatcctgttttgctcctacccactaatccagcctgggaggctctgggcattagcggaaggcttcaccacaaggagacaggagcgagtattccataggcatgcgctcctagtggcacgagtggcttgggtcaggatcaaagagtgaaggattcggaagtcagctatcttctcgtttggagcacagggaccgcccagctagaggagcaccagcgcactgcgccccagccctgggcgagggtgcggaggatttgttctcggtgcaatcctgctggcgcttttccggggttctgcgcggatccagctccccatctctgctccttgctagggaccgcagtccctcagccgcagctgggtctgtccgccccgcctttgccctcgccttttcccggggcggatttggtgaagtcggcctcaagtccaggaggtctgtcttcgccgggccagctctcgcggaactggggggtagagagcaaagggagagattcgtggaagggaagggaggtaggggtggcgcaaacgcccagagtatcaaacttgggggtggcacagtaggtgacagcagcagctgcaggtggtggctggggacccgcgagggggcgcccctctgggtagggtctggctgagcgggcttgcaagcccgggaggcggctgagagaccctggacactgttcctgctccctcgccaccaaaacttctcctccagtcccctcccctgcaggaccatcgcccgcagcctctgcacctgttttcttgtgtttaagggtggggtttgcccccctccccacgctcccatctctgatcctcccaccttcacccgcccaccccgcgagtgagtgcggtgcccaggcgcgcttggcctgagaggtcggcagcagacccggcagcgccaaccgcccagccgctctgactgctccggctgcccgcccgcgcggcgcgggctgtcctggaccctaggaggggacggaaccggacttgcctttgggcaccttccagggccctctccaggtcggctggctaatcatcggacagacggactgcacacatcttgtttccgcgtctccgcaaaaacgcgaggtccaggtcagttgtagactcttgtgctggttgcaggccaagtggacctgtactgaaaatgggtccaataggtgcagaggctgatgagaaccagacagtggaagaaatgaaggtggaacaatacgggccacaaacaactcctagaggtgaactggtccctgaccctgagccagagcttatagatagtaccaagctgattgaggtacaagttgttctcatattggcctactgctccatcatcttgcttggggtaattggcaactccttggtgatccatgtggtgatcaaattcaagagcatgcgcacagtaaccaactttttcattgccaatctggctgtggcagatcttttggtgaacactctgtgtctaccgttcactcttacctataccttaatgggggagtggaaaatgggtcctgtcctgtgccacctggtgccctatgcccagggcctggcagtacaagtatccacaatcaccttgacagtaattgccctggaccggcacaggtgcatcgtctaccacctagagagcaagatctccaagcgaatcagcttcctgattattggcttggcctggggcatcagtgccctgctggcaagtcccctggccatcttccgggagtattcgctgattgagatcatnccggactttgagattgtggcctgtactgaaaagtggcctggcgaggagaagagcatctatggcactgtctatagtctttcttccttgttgatcttgtatgttttgcctctgggcattatatcattttcctacactcgcatttggagtaaattgaagaaccatgtcagtcctggagctgcaaatgaccactaccatcagcgaaggcaaaaaaccaccaaaatgctggtgtgtgtggtggtggtgtttgcggtcagctggctgcctctccatgccttccagcttgccgttgacattgacagccaggtcctggacctgaaggagtacaaactcatcttcacagtgttccacatnatcgccatgtgctccacttttgccaatccccttctctatggctggatgaacagcaactacagaaaggctttcctctcggccttccgctgtgagcagcggttggatgccattcactctgaggtgtccgtgacattcaaggctaaaaagaacctggaggtcagaaagaacagtggccccaatgactctttcacagaggctaccaatgtctaaggaagctgtggtgtgaaaatgtatggatgaattctgaccagagctatgaatctggttgatggcggctcacaagtgaaaactgatttcccattttaaagaagaagtggatctaaatggaagcatctgctgtttaattcctggaaaactggctgggcagagcctgtgtgaaaatactggaattcaaagataaggcaacaaaatggtttacttaacagttggttgggtagtaggttgcattatgagtaaaagcagagagaagtacttttgattattttcctggagtgaagaaaacttgaacaagaaattggtattatcaaagcattgctgagagacggtgggaaaataagttgactttcaaatcacgttaggacctggattgaggaggtgtgcagttcgctgctccctgcttggcttatgaaaacaccactgaacagaaatttctccagggagccacaggctctccttcatcgcattttgatttttttgttcattctctagacaaaatccatcagggaatgctgcaggaaacgattgccaactatacgaatggcttcgaggagataaactgaaatttgctatataattaatattttggcagatgataggggaactcctcaacactcagtgggccaattgttcttaaaaccaattgcacgtttggtgaaagtttcttcaactctgaatcaaaagctgaaattctcagaattacaggaaatgcaaaccatcatttaatttctaatttcaagttacatccgctttatggagatactatttagataacaagaatacaacttgatacttttattgttatacctttttgaacatgtatgatttctgttgttatttacctttttaaacagataaatatttttttttcattttagagtagcggaatctaatcttaatctaatcttttaggagtatatttcagagaaattccaagcacaccagtatgaccatccttatttcagaaatgacaatgcatagaggaaaagtaatatgtgcaaagcctccgaagaggatggttaagtaaagacttaggttaccagtatcaggctttcgtttttgtatgtaggtagctctactgcctcctcttaaaaccaacaaaggaaagagagactggctgcaaacttttagaaggaatggcttcgaatagggttcctgggaggaatcccgaggaaatagacgctgctgctctgctgattgtctccactatcctgttttgctcctacccactaatccagcctgggaggctctgggcattagcggaaggcttcaccacaaggagacaggagcgagtattccataggcatgcgctcctagtggcacgagtggcttgggtcaggatcaaagagtgaaggattcggaagtcagctatctggagagagagagagattgtgttttattcgtgtcccatagctttcctatcctatccctatcctagcttttaacctgagccagagctcactacacaggttcctggctatcgagtctgaatctgcactactcaacttataaactgtctgcagacacctgttagggaaattgctgatcatgggcggcaggatctgaactcgctttaccttcttgtttggagcacagggaccgcccagctagaggagcaccagcgcactgcgccccagccctgggcgagggtgcggaggatttgttctcggtgcaatcctgctggcgcttttccggggttctgcgcggatccagctccccatctctgctcctacacacacaaaagaaaacaactctcgattggaagttgtggaattttctcagcccctacgaggcgcggggattctccagccccggccctcctcccgccagcctgaggtctccttcgctcgcctgccttgctagggaccgcagtccctcagccgcagctgggtctgtccgccccgcctttgccctcgccttttcccggggcggatttggtgaagtcggcctcaagtccaggaggtctgtcttcgccgggccagctctc

SEQ ID NO: 728877 - DNA, 4400 bp, Homo sapiens
  misc_feature (136)..(136): n is a, c, g, or t
  misc_feature (1836)..(1836): n is a, c, g, or t
  misc_feature (2187)..(2187): n is a, c, g, or t
  misc_feature (4391)..(4391): n is a, c, g, or t
  misc_feature (4395)..(4400): n is a, c, g, or t
tatcctatccctatcctagcttttaacctgagccagagctcactacacaggttcctggctatcgagtctgaatctgcactactcaacttataaactgtctgcagacacctgttagggaaattgctgatcatgggcngcaggatctgaactcgctttaccttctcgtttggagcacagggaccgcccagctagaggagcaccagcgcactgcgccccagccctgggcgagggtgcggaggatttgttctcggtgcaatcctgctggcgcttttccggggttctgcgcggatccagctccccatctctgctcctacacacacaaaagaaaacaactctcgattggaagttgtggaattttctcagcccctacgaggcgcggggattctccagccccggccctcctcccgccagcctgaggtctccttcgctcgcctgccttgctagggaccgcagtccctcagccgcagctgggtctgtccgccccgcctttgccctcgccttttcccggggcggatttggtgaagtcggcctcaagtccaggaggtctgtcttcgccgggccagctctcgcggaactggggggtagagagcaaagggagagattcgtggaagggaagggaggtaggggtggcgcaaacgcccagagtatcaaacttgggggtggcacagtaggtgacagcagcagctgcaggtggtggctggggacccgcgagggggcgcccctctgggtagggtctggctgagcgggcttgcaagcccgggaggcggctgagagaccctggacactgttcctgctccctcgccaccaaaacttctcctccagtcccctcccctgcaggaccatcgcccgcagcctctgcacctgttttcttgtgtttaagggtggggtttgcccccctccccacgctcccatctctgatcctcccaccttcacccgcccaccccgcgagtgagtgcggtgcccaggcgcgcttggcctgagaggtcggcagcagacccggcagcgccaaccgcccagccgctctgactgctccggctgcccgcccgcgcggcgcgggctgtcctggaccctaggaggggacggaaccggacttgcctttgggcaccttccagggccctctccaggtcggctggctaatcatcggacagacggactgcacacatcttgtttccgcgtctccgcaaaaacgcgaggtccaggtcagttgtagactcttgtgctggttgcaggccaagtggacctgtactgaaaatgggtccaataggtgcagaggctgatgagaaccagacagtggaagaaatgaaggtggaacaatacgggccacaaacaactcctagaggtgaactggtccctgaccctgagccagagcttatagatagtaccaagctgattgaggtacaagttgttctcatattggcctactgctccatcatcttgcttggggtaattggcaactccttggtgatccatgtggtgatcaaattcaagagcatgcgcacagtaaccaactttttcattgccaatctggctgtggcagatcttttggtgaacactctgtgtctaccgttcactcttacctataccttaatgggggagtggaaaatgggtcctgtcctgtgccacctggtgccctatgcccagggcctggcagtacaagtatccacaatcaccttgacagtaattgccctggaccggcacaggtgcatcgtctaccacctagagagcaagatctccaagcgaatcagcttcctgattattggcttggcctggggcatcagtgccctgctggcaagtcccctggccatcttccgggagtattcgctgattgagatcatnccggactttgagattgtggcctgtactgaaaagtggcctggcgaggagaagagcatctatggcactgtctatagtctttcttccttgttgatcttgtatgttttgcctctgggcattatatcattttcctacactcgcatttggagtaaattgaagaaccatgtcagtcctggagctgcaaatgaccactaccatcagcgaaggcaaaaaaccaccaaaatgctggtgtgtgtggtggtggtgtttgcggtcagctggctgcctctccatgccttccagcttgccgttgacattgacagccaggtcctggacctgaaggagtacaaactcatcttcacagtgttccacatnatcgccatgtgctccacttttgccaatccccttctctatggctggatgaacagcaactacagaaaggctttcctctcggccttccgctgtgagcagcggttggatgccattcactctgaggtgtccgtgacattcaaggctaaaaagaacctggaggtcagaaagaacagtggccccaatgactctttcacagaggctaccaatgtctaaggaagctgtggtgtgaaaatgtatggatgaattctgaccagagctatgaatctggttgatggcggctcacaagtgaaaactgatttcccattttaaagaagaagtggatctaaatggaagcatctgctgtttaattcctggaaaactggctgggcagagcctgtgtgaaaatactggaattcaaagataaggcaacaaaatggtttacttaacagttggttgggtagtaggttgcattatgagtaaaagcagagagaagtacttttgattattttcctggagtgaagaaaacttgaacaagaaattggtattatcaaagcattgctgagagacggtgggaaaataagttgactttcaaatcacgttaggacctggattgaggaggtgtgcagttcgctgctccctgcttggcttatgaaaacaccactgaacagaaatttctccagggagccacaggctctccttcatcgcattttgatttttttgttcattctctagacaaaatccatcagggaatgctgcaggaaacgattgccaactatacgaatggcttcgaggagataaactgaaatttgctatataattaatattttggcagatgataggggaactcctcaacactcagtgggccaattgttcttaaaaccaattgcacgtttggtgaaagtttcttcaactctgaatcaaaagctgaaattctcagaattacaggaaatgcaaaccatcatttaatttctaatttcaagttacatccgctttatggagatactatttagataacaagaatacaacttgatacttttattgttatacctttttgaacatgtatgatttctgttgttattcctattggagctaagtttgtctacactaaaatttaaatcagactagagaataatttttgtggcatgttgtaacatttcacagtatttacaagctatttttgcacaggtacatagctctcatgtatttaaagaacactgcagtgttattttctttgaaattcatcctccacggacccattcatactaaataaaacaatgtaattacattaaaatggacctatctgtaagaggtactaaaaacactggattcatttcatcttgcaaatgttgtatttcaaaccagtttcacataagttatttgtcttcttttcaaaataattagctatatttttatataatatgaatatatacataaaaattgtttctataaattgtagaacatagatgctacagtattttttatttaattatattatgaataaaattgttatttcaatagtacccaaccaaagatgcttaaaaaccttctatgttcataaaaaataacaactgagatgttaaaatagtcatacgtctttagatgctattaaagtttcattagtcatatttttgtaaatatgacagaatttgtgaatatatttttaaagcaaaaaacttcaacatgcatatgatatatagttacaacattaattttatgaactggagagctttactttgtggatatatttaaaattcatattatagctcctattaaattccttccatgatagatataaaggactggtttttaagtgcactgcacttctggaatactgaaaaagaatgaaaacaatatgttagattaggtgtaagactttaagaagcgaacaaaaagtaatgtatatctgtaatatataatcaaatgattcatttttctgttagactaggcaaattgttcaaaaataacctttttgtcttttaagtagcagtcactttgcttaagatgctaatagaaaactgtggttaaagatttaccctccctcttggtgaattattacactgtaagaaatgtatatgctactgtgttacatgttgtattagtaaattattagaatccaattaatgattcaattaacatatatcttatccaattcattatgtcaattcattaataaaataccttttatgtagaggctttatgttgcaattaaaaagttgggaaaatgaganaaannnnnn

SEQ ID NO: 728878 - DNA, 4274 bp, Homo sapiens; identical to SEQ ID NO: 262809
  misc_feature (136)..(136): n is a, c, g, or t
  misc_feature (1710)..(1710): n is a, c, g, or t
  misc_feature (2061)..(2061): n is a, c, g, or t
  misc_feature (4265)..(4265): n is a, c, g, or t
  misc_feature (4269)..(4274): n is a, c, g, or t

SEQ ID NO: 728879 - DNA, 4264 bp, Homo sapiens
  misc_feature (136)..(136): n is a, c, g, or t
  misc_feature (1710)..(1710): n is a, c, g, or t
  misc_feature (2061)..(2061): n is a, c, g, or t
tatcctatccctatcctagcttttaacctgagccagagctcactacacaggttcctggctatcgagtctgaatctgcactactcaacttataaactgtctgcagacacctgttagggaaattgctgatcatgggcngcaggatctgaactcgctttaccttctcgtttggagcacagggaccgcccagctagaggagcaccagcgcactgcgccccagccctgggcgagggtgcggaggatttgttctcggtgcaatcctgctggcgcttttccggggttctgcgcggatccagctccccatctctgctccttgctagggaccgcagtccctcagccgcagctgggtctgtccgccccgcctttgccctcgccttttcccggggcggatttggtgaagtcggcctcaagtccaggaggtctgtcttcgccgggccagctctcgcggaactggggggtagagagcaaagggagagattcgtggaagggaagggaggtaggggtggcgcaaacgcccagagtatcaaacttgggggtggcacagtaggtgacagcagcagctgcaggtggtggctggggacccgcgagggggcgcccctctgggtagggtctggctgagcgggcttgcaagcccgggaggcggctgagagaccctggacactgttcctgctccctcgccaccaaaacttctcctccagtcccctcccctgcaggaccatcgcccgcagcctctgcacctgttttcttgtgtttaagggtggggtttgcccccctccccacgctcccatctctgatcctcccaccttcacccgcccaccccgcgagtgagtgcggtgcccaggcgcgcttggcctgagaggtcggcagcagacccggcagcgccaaccgcccagccgctctgactgctccggctgcccgcccgcgcggcgcgggctgtcctggaccctaggaggggacggaaccggacttgcctttgggcaccttccagggccctctccaggtcggctggctaatcatcggacagacggactgcacacatcttgtttccgcgtctccgcaaaaacgcgaggtccaggtcagttgtagactcttgtgctggttgcaggccaagtggacctgtactgaaaatgggtccaataggtgcagaggctgatgagaaccagacagtggaagaaatgaaggtggaacaatacgggccacaaacaactcctagaggtgaactggtccctgaccctgagccagagcttatagatagtaccaagctgattgaggtacaagttgttctcatattggcctactgctccatcatcttgcttggggtaattggcaactccttggtgatccatgtggtgatcaaattcaagagcatgcgcacagtaaccaactttttcattgccaatctggctgtggcagatcttttggtgaacactctgtgtctaccgttcactcttacctataccttaatgggggagtggaaaatgggtcctgtcctgtgccacctggtgccctatgcccagggcctggcagtacaagtatccacaatcaccttgacagtaattgccctggaccggcacaggtgcatcgtctaccacctagagagcaagatctccaagcgaatcagcttcctgattattggcttggcctggggcatcagtgccctgctggcaagtcccctggccatcttccgggagtattcgctgattgagatcatnccggactttgagattgtggcctgtactgaaaagtggcctggcgaggagaagagcatctatggcactgtctatagtctttcttccttgttgatcttgtatgttttgcctctgggcattatatcattttcctacactcgcatttggagtaaattgaagaaccatgtcagtcctggagctgcaaatgaccactaccatcagcgaaggcaaaaaaccaccaaaatgctggtgtgtgtggtggtggtgtttgcggtcagctggctgcctctccatgccttccagcttgccgttgacattgacagccaggtcctggacctgaaggagtacaaactcatcttcacagtgttccacatnatcgccatgtgctccacttttgccaatccccttctctatggctggatgaacagcaactacagaaaggctttcctctcggccttccgctgtgagcagcggttggatgccattcactctgaggtgtccgtgacattcaaggctaaaaagaacctggaggtcagaaagaacagtggccccaatgactctttcacagaggctaccaatgtctaaggaagctgtggtgtgaaaatgtatggatgaattctgaccagagctatgaatctggttgatggcggctcacaagtgaaaactgatttcccattttaaagaagaagtggatctaaatggaagcatctgctgtttaattcctggaaaactggctgggcagagcctgtgtgaaaatactggaattcaaagataaggcaacaaaatggtttacttaacagttggttgggtagtaggttgcattatgagtaaaagcagagagaagtacttttgattattttcctggagtgaagaaaacttgaacaagaaattggtattatcaaagcattgctgagagacggtgggaaaataagttgactttcaaatcacgttaggacctggattgaggaggtgtgcagttcgctgctccctgcttggcttatgaaaacaccactgaacagaaatttctccagggagccacaggctctccttcatcgcattttgatttttttgttcattctctagacaaaatccatcagggaatgctgcaggaaacgattgccaactatacgaatggcttcgaggagataaactgaaatttgctatataattaatattttggcagatgataggggaactcctcaacactcagtgggccaattgttcttaaaaccaattgcacgtttggtgaaagtttcttcaactctgaatcaaaagctgaaattctcagaattacaggaaatgcaaaccatcatttaatttctaatttcaagttacatccgctttatggagatactatttagataacaagaatacaacttgatacttttattgttatacctttttgaacatgtatgatttctgttgttatttacctttttaaacagataaatatttttttttcattttagagtagcggaatctaatcttaatctaatcttttaggagtatatttcagagaaattccaagcacaccagtatgaccatccttatttcagaaatgacaatgcatagaggaaaagtaatatgtgcaaagcctccgaagaggatggttaagtaaagacttaggttaccagtatcaggctttcgtttttgtatgtaggtagctctactgcctcctcttaaaaccaacaaaggaaagagagactggctgcaaacttttagaaggaatggcttcgaatagggttcctgggaggaatcccgaggaaatagacgctgctgctctgctgattgtctccactatcctgttttgctcctacccactaatccagcctgggaggctctgggcattagcggaaggcttcaccacaaggagacaggagcgagtattccataggcatgcgctcctagtggcacgagtggcttgggtcaggatcaaagagtgaaggattcggaagtcagctatctggagagagagagagattgtgttttattcgtgtcccatagctttcctatcctatccctatcctagcttttaacctgagccagagctcactacacaggttcctggctatcgagtctgaatctgcactactcaacttataaactgtctgcagacacctgttagggaaattgctgatcatgggcggcaggatctgaactcgctttaccttcttgtttggagcacagggaccgcccagctagaggagcaccagcgcactgcgccccagccctgggcgagggtgcggaggatttgttctcggtgcaatcctgctggcgcttttccggggttctgcgcggatccagctccccatctctgctcctacacacacaaaagaaaacaactctcgattggaagttgtggaattttctcagcccctacgaggcgcggggattctccagccccggccctcctcccgccagcctgaggtctccttcgctcgcctgccttgctagggaccgcagtccctcagccgcagctgggtctgtccgccccgcctttgccctcgccttttcccggggcggatttggtgaagtcggcctcaagtccaggaggtctgtcttcgccgggccagctctc

SEQ ID NO: 728880 - DNA, 3558 bp, Homo sapiens; identical to SEQ ID NO: 262810
  misc_feature (994)..(994): n is a, c, g, or t
  misc_feature (1345)..(1345): n is a, c, g, or t
  misc_feature (3549)..(3549): n is a, c, g, or t
  misc_feature (3553)..(3558): n is a, c, g, or t

SEQ ID NO: 728881 - DNA, 3548 bp, Homo sapiens
  misc_feature (994)..(994): n is a, c, g, or t
  misc_feature (1345)..(1345): n is a, c, g, or t
aattcatagtggttatacaattcataaagtttataatattcattccacttaaaatgaaattaatccatttgatagcattcactttgaaattatgtctatactatcggtattatactttaccgtcatagcatatatttcagaaacctgatttaattgatccatatttgacaatagacttattaaagggtctatttcattaaaatgttttgctatgcacaattttagagagtagaggatattttgatccctaaccaaaattaaaccagtccatttgtgaaatttctttgcttcacctttgtgttttcctcgttccattggtttttgttgttgttgttttgttttattttgtttttctttttaggttgtagactcttgtgctggttgcaggccaagtggacctgtactgaaaatgggtccaataggtgcagaggctgatgagaaccagacagtggaagaaatgaaggtggaacaatacgggccacaaacaactcctagaggtgaactggtccctgaccctgagccagagcttatagatagtaccaagctgattgaggtacaagttgttctcatattggcctactgctccatcatcttgcttggggtaattggcaactccttggtgatccatgtggtgatcaaattcaagagcatgcgcacagtaaccaactttttcattgccaatctggctgtggcagatcttttggtgaacactctgtgtctaccgttcactcttacctataccttaatgggggagtggaaaatgggtcctgtcctgtgccacctggtgccctatgcccagggcctggcagtacaagtatccacaatcaccttgacagtaattgccctggaccggcacaggtgcatcgtctaccacctagagagcaagatctccaagcgaatcagcttcctgattattggcttggcctggggcatcagtgccctgctggcaagtcccctggccatcttccgggagtattcgctgattgagatcatnccggactttgagattgtggcctgtactgaaaagtggcctggcgaggagaagagcatctatggcactgtctatagtctttcttccttgttgatcttgtatgttttgcctctgggcattatatcattttcctacactcgcatttggagtaaattgaagaaccatgtcagtcctggagctgcaaatgaccactaccatcagcgaaggcaaaaaaccaccaaaatgctggtgtgtgtggtggtggtgtttgcggtcagctggctgcctctccatgccttccagcttgccgttgacattgacagccaggtcctggacctgaaggagtacaaactcatcttcacagtgttccacatnatcgccatgtgctccacttttgccaatccccttctctatggctggatgaacagcaactacagaaaggctttcctctcggccttccgctgtgagcagcggttggatgccattcactctgaggtgtccgtgacattcaaggctaaaaagaacctggaggtcagaaagaacagtggccccaatgactctttcacagaggctaccaatgtctaaggaagctgtggtgtgaaaatgtatggatgaattctgaccagagctatgaatctggttgatggcggctcacaagtgaaaactgatttcccattttaaagaagaagtggatctaaatggaagcatctgctgtttaattcctggaaaactggctgggcagagcctgtgtgaaaatactggaattcaaagataaggcaacaaaatggtttacttaacagttggttgggtagtaggttgcattatgagtaaaagcagagagaagtacttttgattattttcctggagtgaagaaaacttgaacaagaaattggtattatcaaagcattgctgagagacggtgggaaaataagttgactttcaaatcacgttaggacctggattgaggaggtgtgcagttcgctgctccctgcttggcttatgaaaacaccactgaacagaaatttctccagggagccacaggctctccttcatcgcattttgatttttttgttcattctctagacaaaatccatcagggaatgctgcaggaaacgattgccaactatacgaatggcttcgaggagataaactgaaatttgctatataattaatattttggcagatgataggggaactcctcaacactcagtgggccaattgttcttaaaaccaattgcacgtttggtgaaagtttcttcaactctgaatcaaaagctgaaattctcagaattacaggaaatgcaaaccatcatttaatttctaatttcaagttacatccgctttatggagatactatttagataacaagaatacaacttgatacttttattgttatacctttttgaacatgtatgatttctgttgttatttacctttttaaacagataaatatttttttttcattttagagtagcggaatctaatcttaatctaatcttttaggagtatatttcagagaaattccaagcacaccagtatgaccatccttatttcagaaatgacaatgcatagaggaaaagtaatatgtgcaaagcctccgaagaggatggttaagtaaagacttaggttaccagtatcaggctttcgtttttgtatgtaggtagctctactgcctcctcttaaaaccaacaaaggaaagagagactggctgcaaacttttagaaggaatggcttcgaatagggttcctgggaggaatcccgaggaaatagacgctgctgctctgctgattgtctccactatcctgttttgctcctacccactaatccagcctgggaggctctgggcattagcggaaggcttcaccacaaggagacaggagcgagtattccataggcatgcgctcctagtggcacgagtggcttgggtcaggatcaaagagtgaaggattcggaagtcagctatctggagagagagagagattgtgttttattcgtgtcccatagctttcctatcctatccctatcctagcttttaacctgagccagagctcactacacaggttcctggctatcgagtctgaatctgcactactcaacttataaactgtctgcagacacctgttagggaaattgctgatcatgggcggcaggatctgaactcgctttaccttcttgtttggagcacagggaccgcccagctagaggagcaccagcgcactgcgccccagccctgggcgagggtgcggaggatttgttctcggtgcaatcctgctggcgcttttccggggttctgcgcggatccagctccccatctctgctcctacacacacaaaagaaaacaactctcgattggaagttgtggaattttctcagcccctacgaggcgcggggattctccagccccggccctcctcccgccagcctgaggtctccttcgctcgcctgccttgctagggaccgcagtccctcagccgcagctgggtctgtccgccccgcctttgccctcgccttttcccggggcggatttggtgaagtcggcctcaagtccaggaggtctgtcttcgccgggccagctctc

SEQ ID NO: 728882 - DNA, 470 bp, Homo sapiens
aatgttgtggaaggaagggaaacttcaggaaaggcttgctcacctcgctcggggccgcggaggtgcctggccacagtgccaccctcctgaccctgccgaggtactcgagggccaccacgcatcccctcactggctgcagatcacatcagtttttcagtcagacttgttaatgtcaagggtccgtcacggtggtgataccactgtgtgacaggaagcgagagtcaacgcagggagcctgcaccctgcaaacagccacagcccttcactgaacggggagcataaatcccaccctagttagaaccatggcttttgtgcggaccagaagtgccagagccacaatataggggtgagatgtcttaccgttttgcggtgttgagtgtgtggattcccttttaagatagaaagtaggaaaactgccagtaagggagacgactcactaaaagaggattcagtctctggttgacatgttt

SEQ ID NO: 728883 - DNA, 451 bp, Homo sapiens; identical to SEQ ID NO: 1192

SEQ ID NO: 728884 - DNA, 613 bp, Homo sapiens
taatttgaaggttcttctttagtgctgattgatgttcctaagtcaccatccctaaagctatttttgattattccccatctctgctatcaggagcataatagaacagtggctggaattagagtcactcatgagggagacaggcaaacctgtgtgggttgggggtgtcttcctatgtaatagaaggtctcgtggtggggcatgctgtctttcgtttgaggggatgatgggcctccagttggtggcgaatcttttgaaacttgtttttagcattcccaaatttttttagagaaaaattcagaaagtacaggtgcctttggcgtttcatagtcaatatacaagcgagacacaagtattctccatggatgatttttgtgttgtcatggaatgaaagaaaaataccagtgggtctttactggccataatattttcgttttctcagttggcacatagctctttcgtgaattcacttctttccatcccctctctctacttttaaatattttatgggcagtaagctcacaatatgtgctagcacggctgctctctccaggggtcaggatgggtttaataatgagatgcgtaacagtgactctgtaaaaacccatttcaggtt

SEQ ID NO: 728885 - DNA, 487 bp, Homo sapiens
gtggaatcctaatagttttttccgtaatctccaactatatttaaaataatgcccttctaaatagctctgtaaagagcctattggaagctgcacatttaaaaatggcaatagcactgcaatatgctgtagcatgatgcctgtcagccatgttccagacaattccttgtaagtcatctttcatttaagtaaaaaacaggttatgaagtactgcctcccagaccggaagtgccattctaaaaactccactatatatatcctgggagccataaaactgcctattgggaggctaaatgctctgcttttctataaaacagagataaggttctagagggaagtactgttaccagaaacaagggcacgtttcttctctgcctagggaatgcttcatctgggggacagaggggaaggtttcaatggaaaagggaacttattatttaaccaggtccctactacatggtggccaacccttttcaaatgactcctctca

SEQ ID NO: 728886 - DNA, 435 bp, Homo sapiens
ggaaagtcctaactgtaatggagttcgctttcccaatgctgactcttatggttagtgcctttggagtttaagaagcatttcctgctccaagatcatgaagatactctcctctgtcttatggaagcttggttatttttgccttcacatttagatctttcatctaccccagatgaatgctacctgcttttaccctgagaactgtgtttggggggaccatgtacccctgaggggctcttcggggcacacagctcttctcttaccatgggcctcagaggcaggcccggagtgagtttcagactttgtgagtgaagcccttcaaaacacgaaatattcccagaaacccagtaagtgcagcagacctactctaactgggggcagtgggaggacgcccacatcctgccccctcagcccctctctgacaccccagggtggccc

SEQ ID NO: 728887 - DNA, 455 bp, Homo sapiens
gttaatatttattttctaaaaatattaaggctctcagttgtttcattaattctaaagggttaaaaagggctgaaatttgtttatagcactaaatgtttttaataggaaatttactcacataaaaaatttaagcagaagtagtagaatacagattatcataaaacatattttctatgaaaggcatttcttcctcatcttcaataaatatgaagaagttagaggagaggaaaagcaatcactctaagacaacttttcgtctttgagggacattatgataagcctgaaattaatacgcacaggctattgcatttttctgtgagaaatgtgcccctttgctgtgagattctaaaatgtgttcagatttagtttttattcaaatgatccaaggtaacgcattagttagataactgctatttcagatagtgaggttagctgagaaaaggaagcatggtaga

SEQ ID NO: 728888 - DNA, 451 bp, Homo sapiens
tagacagatattgtgtaacaagttaaccttaaggacacatgccttaaaggactattgagcaaaaaaaaataactaagctctttccaggtaacactcagggaacttttgcagtgtcatatccgttctctggtacctatgtgtccgatcttcctgcccatctgtttttttcactcaaagtcccagaatcctatgccacgggcagggattttcacctctcaatatagacccatgtaccttaccccatgttccaactgacttcctgagaaataaatcattgtccttgtatttcataagagacaacaaacattgattttgttgttaacatatgtgaggcttcgttcatccaataactatatattttaatcaccaataagtatcctaaaatttcagacggtaatgccctgagggatcaacttttaattcaattattgactacagtttgaggggtgcc

SEQ ID NO: 728889 - DNA, 748 bp, Homo sapiens
gtcacagttgctttgactatagagtccctatgtagaaatagaattatcctattctttttttggcaacctcactgatttacaatgaaattattggaatggtcaatagatacatccatatagcattttgacataagcaaaatgtaacttgactgaatagtaaaataatactgtaattttttatttccaatttcaaagattattttaaagaactgaggagatgatatattatgttgctatgcattggcaatttctggtaggaagttagggggaagatcaactcaaattctgaaactttactccattataaacttttctacatcctattagttccaaatatgcagaaagggattgtgcagatgataccattctgcttaaatgacaaacctggaatgatgaatgcttttcctggtcaattaacccctgccaaagctctcagtgactaaaagaaatgctgtggaacacagtctcaagtagactataaaatatacaattagaggtcttctgaagaggatagtgttccattagaaatctaccagctccttttaactctatgggtccctatttctcagaacttttaccagaggtttgttcagaaactggctcatcaccagttttcttaacaaagctttcagatctttgttatcacacaaagagataaagagtctgaaatcctccttatgattcaggcatcatctgttatcctagatcaatgtcaagctaaagatttttggaaaggattttggcaaag

SEQ ID NO: 728890 - DNA, 524 bp, Homo sapiens
tcaatctagaccttgagactaactgggagacagctggtgctgcagagtcacacactggctctgtgcctccagcaagccgtgtgctctgtctcccctgcttcccgccacatggagtgcagaagggaactcattcattattttaaatacaaaaaaagtaatacatgcttattgtaatagattcatgcaattcagaaaatgtaagaagtgaataacccctagaggtaatagtaacagtttggtgtgtatcctttcagacacagtgatattaatatatgtttgtgtacacatcaatatatacccacctttttaaaaagtaaggaatatatttacctattctgctctgtcttttagttacttaatgtcttttcatgtcagtacataggggatctccttccttgttttcagtggtgtgcacgatttctttgtatttagccattagcctgttgatggcaatctcagttgtttctgttttctttattacaaataatgctgtggtctttaccatttgtgtacacctaacttta

SEQ ID NO: 728891 - DNA, 352 bp, Homo sapiens
ggatttctgccaattacaagcaaaaggacccttaatgatgcaagtactgaactgggaataataaacaccaatagttgagtcaatgttcttgccattaaccaactgcacatgggagcaaatcacccctatagttgagaaagctgtctccaaaaaaggagaagtctttccttcctacttcaaaaatgtattcagagcctcagtagagaagatgtacacaaaaatgctttttaagtagtaaattgctgaacaatgataagagagtattattgaaacctcagggatgtagagtagaatgagcattattttttccctcttactactaaaaaaactgagtcacaaaaattagatggta

SEQ ID NO: 728892 - DNA, 452 bp, Homo sapiens
ggagctgcacttcagagagtcccactgtaatctgttaatagaatctgctttaaatgagtcactccttagactggcaatgacacccagcttagtctgtaaaatcaggaatctttgtgttggctgaaggaacttagtaatcttagttgaattcctcttccccatgtctttcaaaaccagagcactgggtcgaacctaacccacaaaataattcgtccaaattaaattgacttttttacataacatcagcaccaccccttacacttttaaagttaaagaccctgttgatcaggttacctgggaaatttcaagtgcatctgaccggggattatcaagctccttgtggacatctgtttctgatgctgtggaatgtgatgtcaccacaaataggaggattctgaattttgctggtactaatgctgagtggtgacttattggggccttgctcatgttac

SEQ ID NO: 728893 - DNA, 504 bp, Homo sapiens
gcttcccacatctggaggatgacgaccctcccctgaccacatctggagggcgtccagctgcgagccagcggggcacagctctcttctcctggcctggatccccacccccccaacccaggaagactgagaatcccatcatcgcgtgcacatctcatcccaggagggagagaggagctgccgagtagaaagcagactggctgcagggacagaagacaccaagggcaccctcccccacagctgcgcctggacctcctgcgagaagaggaagccttaggggtctttattgtaccctcaagaccccagagagaaacagaagtgctgaggggtcgcaggcaggtctcttaccctctctgggcctcgaatatttatccataggaggctgaaggtaactgcctcgcaactcattcatgagggtcaatgggacgacagtggcaagaggggttggcacactgcccagactgttccaaagccagggctggggctgccaaaaaggccacctgtgct

SEQ ID NO: 728894 - DNA, 1184 bp, Homo sapiens
tgcagccgccgccgccgccgacaccgcggcacatgggccggccccgccgctgccgtcgcccctagccccagcagccctggtctcgcagcctcctgcggctctggtcgcccgaccagccatgtctctcggcggagcctccgagcgcagcgtcccggccaccaagattgaaattaccgtgtcctgccggaacctgctagaccttgataccttctccaagtccgaccccatggtggtgctttacacgcagagccgggccagccaggagtggcgggagttcggacggaccgaggtgattgataacacgctgaacccagacttcgtgcgcaaattcgtcctcgactatttctttgaggaaaagcaaaatctgcgcttcgatgtgtacaacgtggactccaaaaccaacatctccaaaccggatttcctgggacaagcgttcctggccctgggagaggtgattggaggccagggcagccgagtagagcgaaccctcacgggtgtaccaggcaagaagtgtgggaccatattgctgactgcagaagagcttagcaattgtcgggacattgccaccatgcagctgtgtgcaaacaagctggacaagaaggacttctttgggaaatcagaccccttccttgtgttctacaggagcaatgaggatggcacgttcaccatctgccacaagacagaggttgtgaaaaacacgctgaatcctgtgtggcagcccttcagcatccctgtgcgggctctgtgcaatggagactatgacagaacggtgaagattgatgtgtacgactgggaccgggatggaagccacgatttcattggtgagttcaccaccagctaccgggagctgagcaaggcccagaaccagttcacagtatatgaggttcttaaccctcggaagaaatgtaagaagaagaaatatgtcaactcaggaactgtgacgctgctctccttctctgtggactctgaattcacttttgttgattacatcaagggagggacacagctgaacttcacagtagccattgacttcacggcttccaatgggaatcctctgcagcctacctccctgcactacatgagtccctaccagctcagcgcctatgccatggccctcaaggcagtgggagagatcatccaggactatgacagtgataagctcttcccagcttatggctttgggg

SEQ ID NO: 728895 - DNA, 3622 bp, Homo sapiens
agaaagcttggtacatgttccaggctatgatcctaaggacaaaagcttcagcaatatggcatttgagactacccatttttaaggcaatacctgtatgaatgcacacacacacgtgcaatacacacacacacacacaaactccacatacttcttgcctacttgttagtagatatgtatagttgccattgctagaagacagggatgtctggtgcctatttctacttatttataactacatgcaaaatgactgtctctcgggatattctttgaaagactccaactttcacagagaaaagccaacctgctccaaatgcccttgactacttccttcttgaataaattagggctggatttcattaccattcaaaaaagcgaagtctttttgcttggtgtcatattaaacttcaggtttttcgttttagtagttttttaaccatcaaaatatcttggagtttagaggcagaacgggaaacagaaatatgcatatttaacactttcctgccacgagggataaaatagaggaatgacatccacccctgacctcatacctgacatacatgtagatatattttatgccacccatctcccatcctgtagctacaattggcatacaactactattaacctcccttcaccaccactgtcaggtcctcttccagtcattccagtcattagctgtcctgaccaaacattaaaaaaaaaattcagctaaatacagaagaagatggtatgtctggctagtgggagtgattataactaaaaactttgctccttttgtgctgtccatgcagtatgtcttcttcctttctatcactttacaatgaaaaattgcctcagagctcaataagaagtctagagcctttttccagggctaaggaaagagaaaaggaatgtcctatagaaggttgttaggatagaatttggtaaaagaacgttgcaaatattgtaacagaccataggagatttcatcagcaataggattcttctttggagaaaatacattgtccataagacttgtactctgctcattcaactcatgtgagcaagctcaactcactccacctgggttaggtaacagaagtggagaacttcatagttcgtgtctagaaaataatgtttaaagttctggagaatgagggtattgcagattaaaaggcgagttgacaaatgaaggagcagtgaaagatttttggaagaagtgaagaagtgaaattctgaaaaggtaaaagaaagaaccagtatgtcacaggggccaagtcagaggacagataataagaaacaaagttgtatctgagagtcatatattaggacaggtgtcagatatttattttggtggccagataaaagcaaaaggcctagaaacagtgtgttagcaaagtaagaagaaatggtccaaataggcaaggataaggaaatccaaaggttgtctttaaatatttctcaaaagagaaagccttgaaagaagcatacaatagagaaaaaataaattaccagtatttattattagaaaagatagaaagacagacaaatcagtggaggaattaaaacagagaaactggagtttataaaacagagcccaatccttgccttctctccctccactcaaatagaaaaggagaatggagaaagagaaagaaggtattaggctacagtttataagagagatgagaaaaaaatacatttgggaatagagggaaagggtcaaaaggggtcacatttggagaaatatctgaaaatgagaaggagcagaatttttggaaacattttttaaagtctggcaacgctaattaagctgttgatctaaggatttgcaaattgagaggtgcaattattttccaaatgatttgtgacactcttattaattagaatatatattttgtgaatattgaaatctgagccaaaactagttagctttattaatatcttagggaaagaagagagaaagaaagagggagggagagagagaaagaaagaaagaaagaaagaaagaaagaaagaaagaaagaaagaaagaaaaagaaaagaagaaagaaagaaagaaaaagacaggaagaggaagagagagacagaaagaataaaaaaacagcaattctgaggatgagaataaattaatggtaggtattacatatgcatgtacatatatatatatctgtacacatatatatgtaaatatgatttggaatacatcaggattgtgaacttccacttgggatagcataaaagcaaaatataccatacaatttttcattttactcacaaattttactcacaaattctcctaaagacatttcactaggtcagtacatttccgagaaagttttaaaaacgtttcttcttttatagtccctaattatcttacctggagtgttatcaaaatgtcatacaactggaaaatgcaattattattataaaaatatctctgccttctcttgtgtaatgaaatttatggcattaggagatgacatttcaagagattttagaggtcaatgtagagactccccccattcttcttaattgaacaaacatgcataaatctagggtttcaggtagagagcagatgggaatctacaggaaactgtcttccatagtgtatgaaaaccgtgtttgttgtgtggtgaagcaaaaggaaactatgaagcgcacagtcaatagattcagctagtgagtcccagcactcctttcaggccctcactaggattagcagcccagagtcatgccaaggccactggtgcagtacaaagacagttcagtgacaagttccatccataccatggaagagggttaaacttgtggctgtttttgccacagcatgaccagagacattctcaataaatggcactaggaatgatgagttttagaggggcctaaaatgttccaaacttgatactcaccactgtacctttaaagcacaaccacagatattggtaaaaatggaacagaattacctcaatacctctttaactcattctgaatgaattcattttgatgacagacattttttgtcaccatttggaataagaactacaacagcttatgattgaggtgaggaactgcagtcaaatggcttaggttcaaacacgagttctgacacaaatctaggtaattttgggcaatattttaaaatcttagtttattcaccaattaataggagtaaaaattacccctacttaatagaattattatgaagatttatataagtaaatcatataaagtgcttagcacagtgtgactggcccacatggaacatttaatacttggtctgcagtatatgaagaaaatggtgtacatgttaacttaaatggtttcattatttctcttcaggatttttaagatgtgggatcagaatatatgttactattttgagaattagaaataataagaaaaacagaatgtatacattaaaagtcatgcctaaatttccaaagagtagtttttttaatgccagagtttaaataaaatattattttccagagagtaacttttctaaaggtcctaaattctgaaaagagagaaaactactgttataaacaagtttattactaaaagatgcaattcattactatgatttattattattttgtacatgtaaaccttgataaataaacagcatctcaacaccaaa

SEQ ID NO: 728896 - DNA, 3596 bp, Homo sapiens
agaaagcttggtacatgttccaggctatgatcctaaggacaaaagcttcagcaatatggcatttgagactacccatttttaaggcaatacctgtatgaatgcacacacacacgtgcaatacacacacacacacacaaactccacatacttcttgcctacttgttagtagatatgtatagttgccattgctagaagacagggatgtctggtgcctatttctacttatttataactacatgcaaaatgactgtctctcgggatattctttgaaagactccaactttcacagagaaaagccaacctgctccaaatgcccttgactacttccttcttgaataaattagggctggatttcattaccattcaaaaaagcgaagtctttttgcttggtgtcatattaaacttcaggtttttcgttttagtagttttttaaccatcaaaatatcttggagtttagaggcagaacgggaaacagaaatatgcatatttaacactttcctgccacgagggataaaatagaggaatgacatccacccctgacctcatacctgacatacatgtagatatattttatgccacccatctcccatcctgtagctacaattggcatacaactactattaacctcccttcaccaccactgtcaggtcctcttccagtcattccagtcattagctgtcctgaccaaacattaaaaaaaaaattcagctaaatacagaagaagatggtatgtctggctagtgggagtgattataactaaaaactttgctccttttgtgctgtccatgcagtatgtcttcttcctttctatcactttacaatgaaaaattgcctcagagctcaataagaagtctagagcctttttccagggctaaggaaagagaaaaggaatgtcctatagaaggttgttaggatagaatttggtaaaagaacgttgcaaatattgtaacagaccataggagatttcatcagcaataggattcttctttggagaaaatacattgtccataagacttgtactctgctcattcaactcatgtgagcaagctcaactcactccacctgggttaggtaacagaagtggagaacttcatagttcgtgtctagaaaataatgtttaaagttctggagaatgagggtattgcagattaaaaggcgagttgacaaatgaaggagcagtgaaagatttttggaagaagtgaagaagtgaaattctgaaaaggtaaaagaaagaaccagtatgtcacaggggccaagtcagaggacagataataagaaacaaagttgtatctgagagtcatatattaggacaggtgtcagatatttattttggtggccagataaaagcaaaaggcctagaaacagtgtgttagcaaagtaagaagaaatggtccaaataggcaaggataaggaaatccaaaggttgtctttaaatatttctcaaaagagaaagccttgaaagaagcatacaatagagaaaaaataaattaccagtatttattattagaaaagatagaaagacagacaaatcagtggaggaattaaaacagagaaactggagtttataaaacagagcccaatccttgccttctctccctccactcaaatagaaaaggagaatggagaaagagaaagaaggtattaggctacagtttataagagagatgagaaaaaaatacatttgggaatagagggaaagggtcaaaaggggtcacatttggagaaatatctgaaaatgagaaggagcagaatttttggaaacattttttaaagtctggcaacgctaattaagctgttgatctaaggatttgcaaattgagaggtgcaattattttccaaatgatttgtgacactcttattaattagaatatatattttgtgaatattgaaatctgagccaaaactagttagctttattaatatcttagggaaagaagagagaaagaaagagggagggagagagagaaagaaagaaagaaagaaagaaagaaagaaaagaagaaagaaagaaagaaaaagacaggaagaggaagagagagacagaaagaataaaaaaacagcaattctgaggatgagaataaattaatggtaggtattacatatgcatgtacatatatatatatctgtacacatatatatgtaaatatgatttggaatacatcaggattgtgaacttccacttgggatagcataaaagcaaaatataccatacaatttttcattttactcacaaattttactcacaaattctcctaaagacatttcactaggtcagtacatttccgagaaagttttaaaaacgtttcttcttttatagtccctaattatcttacctggagtgttatcaaaatgtcatacaactggaaaatgcaattattattataaaaatatctctgccttctcttgtgtaatgaaatttatggcattaggagatgacatttcaagagattttagaggtcaatgtagagactccccccattcttcttaattgaacaaacatgcataaatctagggtttcaggtagagagcagatgggaatctacaggaaactgtcttccatagtgtatgaaaaccgtgtttgttgtgtggtgaagcaaaaggaaactatgaagcgcacagtcaatagattcagctagtgagtcccagcactcctttcaggccctcactaggattagcagcccagagtcatgccaaggccactggtgcagtacaaagacagttcagtgacaagttccatccataccatggaagagggttaaacttgtggctgtttttgccacagcatgaccagagacattctcaataaatggcactaggaatgatgagttttagaggggcctaaaatgttccaaacttgatactcaccactgtacctttaaagcacaaccacagatattggtaaaaatggaacagaattacctcaatacctctttaactcattctgaatgaattcattttgatgacagacattttttgtcaccatttggaataagaactacaacagcttatgattgaggtgaggaactgcagtcaaatggcttaggttcaaacacgagttctgacacaaatctaggtaattttgggcaatattttaaaatcttagtttattcaccaattaataggagtaaaaattacccctacttaatagaattattatgaagatttatataagtaaatcatataaagtgcttagcacagtgtgactggcccacatggaacatttaatacttggtctgcagtatatgaagaaaatggtgtacatgttaacttaaatggtttcattatttctcttcaggatttttaagatgtgggatcagaatatatgttactattttgagaattagaaataataagaaaaacagaatgtatacattaaaagtcatgcctaaatttccaaagagtagtttttttaatgccagagtttaaataaaatattattttccagagagtaacttttctaaaggtcctaaattctgaaaagagagaaaactactgttataaacaagtttattactaaaagatgcaattcattactatgatttattattattttgtacatgtaaaccttgataaataaacagcatctcaacaccaaa

SEQ ID NO: 728897 - DNA, 3267 bp, Homo sapiens
agaaagcttggtacatgttccaggctatgatcctaaggacaaaagcttcagcaatatggcatttgagactacccatttttaaggcaatacctgtatgaatgcacacacacacgtgcaatacacacacacacacacaaactccacatacttcttgcctacttgttagtagatatgtatagttgccattgctagaagacagggatgtctggtgcctatttctacttatttataactacatgcaaaatgactgtctctcgggatattctttgaaagactccaactttcacagagaaaagccaacctgctccaaatgcccttgactacttccttcttgaataaattagggctggatttcattaccattcaaaaaagcgaagtctttttgcttggtgtcatattaaacttcaggtttttcgttttagtagttttttaaccatcaaaatatcttggagtttagaggcagaacgggaaacagaaatatgcatatttaacactttcctgccacgagggataaaatagaggaatgacatccacccctgacctcatacctgacatacatgtagatatattttatgccacccatctcccatcctgtagctacaattggcatacaactactattaacctcccttcaccaccactgtcaggtcctcttccagtcattccagtcattagctgtcctgaccaaacattaaaaaaaaaattcagctaaatacagaagaagatggtatgtctggctagtgggagtgattataactaaaaactttgctccttttgtgctgtccatgcagtatgtcttcttcctttctatcactttacaatgaaaaattgcctcagagctcaataagaagtctagagcctttttccagggctaaggaaagagaaaaggaatgtcctatagaaggttgttaggatagaatttggtaaaagaacgttgcaaatattgtaacagaccataggagatttcatcagcaataggattcttctttggagaaaatacattgtccataagacttgtactctgctcattcaactcatgtgagcaagctcaactcactccacctgggttaggtaacagaagtggagaacttcatagttcgtgtctagaaaataatgtttaaagttctggagaatgagggtattgcagattaaaaggcgagttgacaaatgaaggagcagtgaaagatttttggaagaagtgaagaagtgaaattctgaaaaggtaaaagaaagaaccagtatgtcacaggggccaagtcagaggacagataataagaaacaaagttgtatctgagagtcatatattaggacaggtgtcagatatttattttggtggccagataaaagcaaaaggcctagaaacagtgtgttagcaaagtaagaagaaatggtccaaataggcaaggataaggaaatccaaaggttgtctttaaatatttctcaaaagagaaagccttgaaagaagcatacaatagagaaaaaataaattaccagtatttattattagaaaagatagaaagacagacaaatcagtggaggaattaaaacagagaaactggagtttataaaacagagcccaatccttgccttctctccctccactcaaatagaaaaggagaatggagaaagagaaagaaggtattaggctacagtttataagaaagaaaagaagaaagaaagaaagaaaaagacaggaagaggaagagagagacagaaagaataaaaaaacagcaattctgaggatgagaataaattaatggtaggtattacatatgcatgtacatatatatatatctgtacacatatatatgtaaatatgatttggaatacatcaggattgtgaacttccacttgggatagcataaaagcaaaatataccatacaatttttcattttactcacaaattttactcacaaattctcctaaagacatttcactaggtcagtacatttccgagaaagttttaaaaacgtttcttcttttatagtccctaattatcttacctggagtgttatcaaaatgtcatacaactggaaaatgcaattattattataaaaatatctctgccttctcttgtgtaatgaaatttatggcattaggagatgacatttcaagagattttagaggtcaatgtagagactccccccattcttcttaattgaacaaacatgcataaatctagggtttcaggtagagagcagatgggaatctacaggaaactgtcttccatagtgtatgaaaaccgtgtttgttgtgtggtgaagcaaaaggaaactatgaagcgcacagtcaatagattcagctagtgagtcccagcactcctttcaggccctcactaggattagcagcccagagtcatgccaaggccactggtgcagtacaaagacagttcagtgacaagttccatccataccatggaagagggttaaacttgtggctgtttttgccacagcatgaccagagacattctcaataaatggcactaggaatgatgagttttagaggggcctaaaatgttccaaacttgatactcaccactgtacctttaaagcacaaccacagatattggtaaaaatggaacagaattacctcaatacctctttaactcattctgaatgaattcattttgatgacagacattttttgtcaccatttggaataagaactacaacagcttatgattgaggtgaggaactgcagtcaaatggcttaggttcaaacacgagttctgacacaaatctaggtaattttgggcaatattttaaaatcttagtttattcaccaattaataggagtaaaaattacccctacttaatagaattattatgaagatttatataagtaaatcatataaagtgcttagcacagtgtgactggcccacatggaacatttaatacttggtctgcagtatatgaagaaaatggtgtacatgttaacttaaatggtttcattatttctcttcaggatttttaagatgtgggatcagaatatatgttactattttgagaattagaaataataagaaaaacagaatgtatacattaaaagtcatgcctaaatttccaaagagtagtttttttaatgccagagtttaaataaaatattattttccagagagtaacttttctaaaggtcctaaattctgaaaagagagaaaactactgttataaacaagtttattactaaaagatgcaattcattactatgatttattattattttgtacatgtaaaccttgataaataaacagcatctcaacaccaaa

SEQ ID NO: 728898 - DNA, 467 bp, Homo sapiens
acattctcaattataatgtgcagaaatccccgtggttttccaatcctgactacattccccaacattaactgcttctttacaggtaagagtgagtctgcagttgtcccagtggccaatacaatgcctcctcttctctcgtctgcccttccaccaagcctctggcactctcaggcactcttttctaaggaatcagtgacaagataggaagcaataaggtcaggttagagtagctgctgcaaatgatcaaacatgataaggacaatgaggtgaactgtggttgcttttctcatcctgctcttctgacacctcccactctgcacaccaatccactatggaaaccaataagccttctttcagacccatggcaaacatgctgtaacagaaagcacagctacagagggcatgcattggaggcctgtgagctgaatctggcccacagatgtgatttgtttgaccccaacagtgtt

SEQ ID NO: 728899 - DNA, 682 bp, Homo sapiens
ggatgcaactgctagttttagatgtaaatagtgttatttactggactttgtgatattattttcttaactacactttactatggccctgttgaaaacagactatcaagttttttgtctctgttctgtcatctctcttaagccaggcacctttagagtgtttgcaatttgttcgaagtggttgaggatctcaggccctgctcacgtgaggtggagtgcaggggagctaccggtttccctgctgacctgctgaatgctaccttcccctcgagttgaatacaccttaaggaaaatgataacacgagggacgtgtaacttgttttgaagcattaaaaaccagcagctcttcactatgttccatattttaaccaaactactgtagactactaaacatagccaagccagaacattccttctggattaagcctaggccacttgaggggcagccaggggtgatggtgtcaggtgagaatcctgtgtcttgaaggagtggcctttacaggaagagtgcccatgttttcacctgcagcgttgccaccagagtgtgcaatacctcctgcacacaggctcagggtaaactgctccaaagctgggttttgtgttgcatacaaagtcaataaaatagttgctaatcctgaatggcagccagtgatgtgaaggtactattaaagtgaacaaaaactag

SEQ ID NO: 728900 - DNA, 1019 bp, Homo sapiens
gtcacataagagacagagcaagtaaaatattacgctacagtgctactggcccataatcaggcaactgcagagtcttagggggttatctaatgtagtcttggggtggctggatagacttcccaaagaaggtgatgccgaagctgaggtcggaaattacgaagatcagctatcaaacttggaaatcatgtcttagagatcaaggagccaagagatgagacaagcctgggttcctaggtgatagggtgtggctgtgtccccacccaaatctcgtcttgaattgtagctcccataatccccacatgttgtggagggaccctgtggaaggaaggcctgaggagagaagacacatagtcatgctgactaaaccagatcacctagaattaccaaatggaaagattgtgcctgcagcctggcctgttgcccacagcggtctacctgccacactgggaaagatcgagcagagacagagaagaaaaggaggctccatttttcaggctgctctcccgcaggctcatgttttgtgttcatgccaggcagagaacacaaaatgttccaataaataagtatcaaaggttagtggtgaaaatgaaggaggaagaggcattgcgtgaaaaactaaacatgcaaaatattacacacaaagagaaccaaaatgcaggttcactggaaatgatagacaatatgttaaaaccaagaggagagaagagagctgaaataatcaaatgggaaacacacaatttaggggctaagatcttgttgtgttcagccacaaatgatggccagcagtgaggaatctgtgtgttctccacactcttcgctcctgggaagtcaactcacatggaccatgatatcaatatctggtccttcccctaatatctgtttgaccttgggtcagttacttaaacttcctaagccttagttctttgtctggaaactagggatagttatacctacaacacaaccactttgtaaggaatatgttggaaattatatgcaaattggcttccgttggtgtttgg

SEQ ID NO: 728901 - DNA, 865 bp, Homo sapiens
gtcacataagagacagagcaagtaaaatattacgctacagtgctactggcccataatcaggcaactgcagagtcttagggggttatctaatgtagtcttggggtggctggatagacttcccaaagaaggtgatgccgaagctgaggtcggaaattacgaagatcagctatgaaggcctgaggagagaagacacatagtcatgctgactaaaccagatcacctagaattaccaaatggaaagattgtgcctgcagcctggcctgttgcccacagcggtctacctgccacactgggaaagatcgagcagagacagagaagaaaaggaggctccatttttcaggctgctctcccgcaggctcatgttttgtgttcatgccaggcagagaacacaaaatgttccaataaataagtatcaaaggttagtggtgaaaatgaaggaggaagaggcattgcgtgaaaaactaaacatgcaaaatattacacacaaagagaaccaaaatgcaggttcactggaaatgatagacaatatgttaaaaccaagaggagagaagagagctgaaataatcaaatgggaaacacacaatttaggggctaagatcttgttgtgttcagccacaaatgatggccagcagtgaggaatctgtgtgttctccacactcttcgctcctgggaagtcaactcacatggaccatgatatcaatatctggtccttcccctaatatctgtttgaccttgggtcagttacttaaacttcctaagccttagttctttgtctggaaactagggatagttatacctacaacacaaccactttgtaaggaatatgttggaaattatatgcaaattggcttccgttggtgtttgg

SEQ ID NO: 728902 - DNA, 743 bp, Homo sapiens
gccttttaaaggaccatgggctgtttgaggggccaacatcattaactggaaggcctgaggagagaagacacatagtcatgctgactaaaccagatcacctagaattaccaaatggaaagattgtgcctgcagcctggcctgttgcccacagcggtctacctgccacactgggaaagatcgagcagagacagagaagaaaaggaggctccatttttcaggctgctctcccgcaggctcatgttttgtgttcatgccaggcagagaacacaaaatgttccaataaataagtatcaaaggttagtggtgaaaatgaaggaggaagaggcattgcgtgaaaaactaaacatgcaaaatattacacacaaagagaaccaaaatgcaggttcactggaaatgatagacaatatgttaaaaccaagaggagagaagagagctgaaataatcaaatgggaaacacacaatttaggggctaagatcttgttgtgttcagccacaaatgatggccagcagtgaggaatctgtgtgttctccacactcttcgctcctgggaagtcaactcacatggaccatgatatcaatatctggtccttcccctaatatctgtttgaccttgggtcagttacttaaacttcctaagccttagttctttgtctggaaactagggatagttatacctacaacacaaccactttgtaaggaatatgttggaaattatatgcaaattggcttccgttggtgtttgg

SEQ ID NO: 728903 - DNA, 948 bp, Homo sapiens
gtcacataagagacagagcaagtaaaatattacgctacagtgctactggcccataatcaggcaactgcagagtcttagggggttatctaatgtagtcttggggtggctggatagacttcccaaagaaggtgatgccgaagctgaggtcggaaattacgaagatcagctatcaaacttggaaatcatgtcttagagatcaaggagccaagagatgagacaagcctgggttcctaggtgatagggtgtggctgtgtccccacccaaatctcgtcttgaattgtagctcccataatccccacatgttgtggagggaccctgtggaagattgtgcctgcagcctggcctgttgcccacagcggtctacctgccacactgggaaagatcgagcagagacagagaagaaaaggaggctccatttttcaggctgctctcccgcaggctcatgttttgtgttcatgccaggcagagaacacaaaatgttccaataaataagtatcaaaggttagtggtgaaaatgaaggaggaagaggcattgcgtgaaaaactaaacatgcaaaatattacacacaaagagaaccaaaatgcaggttcactggaaatgatagacaatatgttaaaaccaagaggagagaagagagctgaaataatcaaatgggaaacacacaatttaggggctaagatcttgttgtgttcagccacaaatgatggccagcagtgaggaatctgtgtgttctccacactcttcgctcctgggaagtcaactcacatggaccatgatatcaatatctggtccttcccctaatatctgtttgaccttgggtcagttacttaaacttcctaagccttagttctttgtctggaaactagggatagttatacctacaacacaaccactttgtaaggaatatgttggaaattatatgcaaattggcttccgttggtgtttgg

SEQ ID NO: 728904 - DNA, 474 bp, Homo sapiens; identical to SEQ ID NO: 400171

SEQ ID NO: 728905 - DNA, 539 bp, Homo sapiens
aaaagaaagaaagaaagaaagaaaaaaatgccatacagatgaatctttaaagattttaatttatatatacctcttctaccattcattggctggagtagttgaacagacatcagcaggcacaatgctaggcaggcactggagattcagtgatgaataaaacaaaactgacctggaacctggcctcctgaagcttctcttcatctgtctaaattcctttctttcaaggcccagtgcaagtgacaccttcatcaggaagggcttccacatgattctatctgcaaatctcccttttctgaactattatgcttatagtctgtaccaggccacatgacatatgttattttgtggcattctagaattattccaatcttttcattcttataattggtgtgttgtattcaataaataatgttgttattccagttttcatcactggtcacgcaagagtcctctcttaattatattttatccccatagttcaccccgtttcctccccatcctaagtaactattaccatacctaaatatatatctaattag

SEQ ID NO: 728906 - DNA, 1249 bp, Homo sapiens
tgacctccctggctcaggtgatcctgtcacctcagccttccaagtagctgagaccacaggcatgcaccactaagcctggctaatttttcaatttttatttttcgtagagacagggtctccctgggttgcccaaactggtcttgaattcctgggctcaagcaatcctcctgtcccggcaccccgaagtgttgggactacaggcatgagccactgtgcacagccctttttgtttttgtttttgtttttttttaaaggtaatttcccagtggaatcctcgagatttcttcacgtttttggaaaaatgagttacattttagattgttttcctttttggaatttaatggtatacattatattacatagctatgttgagctctatttctattacactaaaaagtaggctaattgtcttaactttcatcagtaatgacattaaatgtgtgaagattatacttggaataaagcacttggattcattcatttcttcagtaaatatttattgagcactagtatgttccaacgagtgtctgtctacattctggggacaagtgataactaaatccctgtcctcgtggagagttaacaatcaacaaactaacaaacatttaatttatgtcatcaactcatttccacaaatataacaacatcttgacttcaagtttcctgagtttctggtctaaagaattgctaccttcaagagctcaaatcatttgttggggagagaggcctgtgatatattttctcctttacaatgaaagtagctgtaaaaagaggaagagaaattctgagggtaaagataaaaaatgttgaaatcttctttctggatttcagattgagtctcttgccctaattgatgcaatttacactccatgcatctccttccctggaccttctccagttcttggggactacagatgaacttacttttaatgcattttatggcatttggaggccctccagtggacaaatactatacctgaaaaaaatccttttgctgtgctaaagtgttcaggtgtgaagtgtactcatgtttgcaaatcactttgaaatatataaacaaaaatgaattaatggatgaatagagtgatgcatagatcattagacatgtgataaaaataactgttaattgtagaatctagatgatgagtatattatatgatatggcccactgtataattctttcaacttttctgtttgaatgtttgataataaaatattgaataaaaatctttttgctaaagaaatatgc

SEQ ID NO: 728907 - DNA, 432 bp, Homo sapiens
gaagtgggagcggctgtcaggttagagctgtgctctgcctcaggggcaggggatgctaactctgagttggattctggggctgcttcaggttccctctcttgctttggctccttgggctcactgtgaaacgggtctgaattgtccctattccactcctcctctgaatctgtctctggctgggtgctgaggagggggccgttgttgatggggacactctgaacttcagcctgggcttcagctggtggcctagcagcttcctcctgagaatccttcatgtcctcggagtccttctcagcacacagcctgtacaccatcacatcatcctgaaagtccgactcttctatgtaggaccctttgaagagcaggagggcattcttcttcatctcctggatgtgtttggggggatcaatgggtgctggggggcctgaaacc

SEQ ID NO: 728908 - DNA, 1535 bp, Homo sapiens
cccaaatgcttctttggatctcaggctctaggtgcaatgtgaaggggagtcactgggcagactgatccctggctcagacagttcagtgggagaatcccaaaggccttttccctccttcctgagcctccgggcaaggagggagggatcttggttccagggtctcagtaccccctgtgccatttgagctgcttgcgctcatcatctctattaataaccaacttccctcccccactgccagtgctgcccccacgcctgcccagctcgtgttctccggtcacagcagctcagtcctccaaagctgctggaccccagggagagctgaccactgcccgagcagccggctgaatccacctccacaatgccgctctcaggaaccccggcccctaataagaagaggaaatccagcaagctgatcatggaactcactggaggtggacaggagagctcaggcttgaacctgggcaaaaagatcagtgtcccaagggatgtgatgttggaggaactgtcgctgcttaccaaccggggctccaagatgttcaaactgcggcagatgagggtggagaagtttatttatgagaaccaccctgatgttttctctgacagctcaatggatcacttccagaagttccttccaacagtggggggacagctgggcacagctggtcagggattctcatacagcaagagcaacggcagaggcggcagccaggcaagggggcagtggctctgccggacagtatggctctgatcagcagcaccatctgggctctgggtctggagctgggggtacaggtggtcccgcgggccaggctggcagaggaggagctgctggcacagcaggggttggtgagacaggatcaggagaccaggcaggcggagaaggaaaacatatcactgtgttcaagacctatatttccccatgggagcgagccatgggggttgacccccagcaaaaaatggaacttggcattgacctgctggcctatggggccaaagctgaacttcccaaatataagtccttcaacaggacggcaatgccctatggtggatatgagaaggcctccaaacgcatgaccttccagatgcccaagtttgacctggggcccttgctgagtgaacccctggtcctctacaaccaaaacctctccaacaggccttctttcaatcgaacccctattccctggctgagctctggggagcctgtagactacaacgtggatattggcatccccttggatggagaaacagaggagctgtgaggtgtttcctcctctgatttgcatcatttcccctctctggctccaatttggagagggaatgctgagcagatagcccccattgttaatccagtatccttatgggaatggagggaaaaaggagagatctacctttccatcctttactccaagtccccactccacgcatccttcctcaccaactcagagctccccttctacttgctccatatggaacctgctcgtttatggaatttgctctgccaccagtaacagtcaataaacttcaaggaaaatgaa

SEQ ID NO: 728909 - DNA, 1577 bp, Homo sapiens
cccaaatgcttctttggatctcaggctctaggtgcaatgtgaaggggagtcactgggcagactgatccctggctcagacagttcagtgggagaatcccaaaggccttttccctccttcctgagcctccgggcaaggagggagggatcttggttccagggtctcagtaccccctgtgccatttgagctgcttgcgctcatcatctctattaataaccaacttccctcccccactgccagtgctgcccccacgcctgcccagctcgtgttctccggtcacagcagctcagtcctccaaagctgctggaccccagggagagctgaccactgcccgagcagccggctgaatccacctccacaatgccgctctcaggaaccccggcccctaataagaagaggaaatccagcaagctgatcatggaactcactggaggtggacaggagagctcaggcttgaacctgggcaaaaagatcagtgtcccaagggatgtgatgttggaggaactgtcgctgcttaccaaccggggctccaagatgttcaaactgcggcagatgagggtggagaagtttatttatgagaaccaccctgatgttttctctgacagctcaatggatcacttccagaagttccttccaacagtggggggacagctgggcacagctggtcagggattctcatacagcaagagcaacggcagaggcggcagccaggcaagggggcagtggctctgccggacagtatggctctgatcagcagcaccatctgggctctgggtctggagctgggggtacaggtggtcccgcgggccaggctggcagaggaggagctgctggcacagcaggggttggtgagacaggatcaggagaccaggcaggcggagaaggaaaacatatcactgtgttcaagacctatatttccccatgggagcgagccatgggggttgacccccagcaaaaaatggaacttggcattgacctgctggcctatggggccaaagctgaacttcccaaatataagtccttcaacaggacggcaatgccctatggtggatatgagaaggcctccaaacgcatgaccttccagatgcccaagtttgacctggggcccttgctgagtgaacccctggtcctctacaaccaaaacctctccaacaggccttctttcaatcgaacccctattccctggctgagctctggggagcctgtagactacaacgtggatattggcatccccttggatggagaaacagaggagctgtgaggtgtttcctcctctgatttgcatcatttcccctctctggctccaatttggagagggaatgctgagcagatagcccccattgttaatccagtatccttatgggaatggagggaaaaaggagagatctacctttccatcctttactccaagtccccactccacgcatccttcctcaccaactcagagctccccttctacttgctccatatggaacctgctcgtttatggaatttgctctgccaccagtaacagtcaataaacttcaaggaaaatgaactcattcttcctttgatatttgagagcagatgaaagccgagg

SEQ ID NO: 728910 - DNA, 1451 bp, Homo sapiens
cccaaatgcttctttggatctcaggctctaggtgcaatgtgaaggggagtcactgggcagactgatccctggctcagacagttcagtgggagaatcccaaaggccttttccctccttcctgagcctccgggcaaggagggagggatcttggttccagggtctcagtaccccctgtgccatttgagctgcttgcgctcatcatctctattaataaccaacttccctcccccactgccagtgctgcccccacgcctgcccagctcgtgttctccggtcacagcagctcagtcctccaaagctgctggaccccagggagagctgaccactgcccgagcagccggctgaatccacctccacaatgccgctctcaggaaccccggcccctaataagaagaggaaatccaagatgttcaaactgcggcagatgagggtggagaagtttatttatgagaaccaccctgatgttttctctgacagctcaatggatcacttccagaagttccttccaacagtggggggacagctgggcacagctggtcagggattctcatacagcaagagcaacggcagaggcggcagccaggcaagggggcagtggctctgccggacagtatggctctgatcagcagcaccatctgggctctgggtctggagctgggggtacaggtggtcccgcgggccaggctggcagaggaggagctgctggcacagcaggggttggtgagacaggatcaggagaccaggcaggcggagaaggaaaacatatcactgtgttcaagacctatatttccccatgggagcgagccatgggggttgacccccagcaaaaaatggaacttggcattgacctgctggcctatggggccaaagctgaacttcccaaatataagtccttcaacaggacggcaatgccctatggtggatatgagaaggcctccaaacgcatgaccttccagatgcccaagtttgacctggggcccttgctgagtgaacccctggtcctctacaaccaaaacctctccaacaggccttctttcaatcgaacccctattccctggctgagctctggggagcctgtagactacaacgtggatattggcatccccttggatggagaaacagaggagctgtgaggtgtttcctcctctgatttgcatcatttcccctctctggctccaatttggagagggaatgctgagcagatagcccccattgttaatccagtatccttatgggaatggagggaaaaaggagagatctacctttccatcctttactccaagtccccactccacgcatccttcctcaccaactcagagctccccttctacttgctccatatggaacctgctcgtttatggaatttgctctgccaccagtaacagtcaataaacttcaaggaaaatgaactcattcttcctttgatatttgagagcagatgaaagccgagg

SEQ ID NO: 728911 - DNA, 1409 bp, Homo sapiens
cccaaatgcttctttggatctcaggctctaggtgcaatgtgaaggggagtcactgggcagactgatccctggctcagacagttcagtgggagaatcccaaaggccttttccctccttcctgagcctccgggcaaggagggagggatcttggttccagggtctcagtaccccctgtgccatttgagctgcttgcgctcatcatctctattaataaccaacttccctcccccactgccagtgctgcccccacgcctgcccagctcgtgttctccggtcacagcagctcagtcctccaaagctgctggaccccagggagagctgaccactgcccgagcagccggctgaatccacctccacaatgccgctctcaggaaccccggcccctaataagaagaggaaatccaagatgttcaaactgcggcagatgagggtggagaagtttatttatgagaaccaccctgatgttttctctgacagctcaatggatcacttccagaagttccttccaacagtggggggacagctgggcacagctggtcagggattctcatacagcaagagcaacggcagaggcggcagccaggcaagggggcagtggctctgccggacagtatggctctgatcagcagcaccatctgggctctgggtctggagctgggggtacaggtggtcccgcgggccaggctggcagaggaggagctgctggcacagcaggggttggtgagacaggatcaggagaccaggcaggcggagaaggaaaacatatcactgtgttcaagacctatatttccccatgggagcgagccatgggggttgacccccagcaaaaaatggaacttggcattgacctgctggcctatggggccaaagctgaacttcccaaatataagtccttcaacaggacggcaatgccctatggtggatatgagaaggcctccaaacgcatgaccttccagatgcccaagtttgacctggggcccttgctgagtgaacccctggtcctctacaaccaaaacctctccaacaggccttctttcaatcgaacccctattccctggctgagctctggggagcctgtagactacaacgtggatattggcatccccttggatggagaaacagaggagctgtgaggtgtttcctcctctgatttgcatcatttcccctctctggctccaatttggagagggaatgctgagcagatagcccccattgttaatccagtatccttatgggaatggagggaaaaaggagagatctacctttccatcctttactccaagtccccactccacgcatccttcctcaccaactcagagctccccttctacttgctccatatggaacctgctcgtttatggaatttgctctgccaccagtaacagtcaataaacttcaaggaaaatgaa

SEQ ID NO: 728912 - DNA, 470 bp, Homo sapiens
ccttttattacttttaggatttcctttttatcactggttttgatggattcgattaaggtgttccttggtgaagttttctgcatgtttcttgttcttgggataatcatatttctgtaatatttgaagtttatgatttccatggagcttctaaatctttcatccagtatgttttaaatatctttgtctctcttctccactacctgcccttcagggattccatttagccctatactagggtgtttaaagttttgatgctgatggtctttatgtgttttcaagtcatttgttaatgtgtgtttcatttatgttagtttcaacttctattccttctagtttaataatcttctcttctgcaatatttaatccagtgccttcttccatttcacactgtaaatcatagtttttatctacagaatttgatatttaaaaaatcttcaacctctccatttaattaaaatacaattatacta

SEQ ID NO: 728913 - DNA, 486 bp, Homo sapiens
ctctccacacaggtgtctgagagggctgaggtgggcaaggcgctgagagtccatgtcaccctcaccaacaccttaatggtggctctgagcagctgcacgatggtgctggaaggaagcggcctcatcaatgggcagatagcaaaggaccttgggactctggtggccggacacaccctccaaattcaactggacctctacccgaccaaagctggaccccgccagctccaggttctcatcagcagcaacgaggtcaaggagatcaaaggctacaaggacatcttcgtcactgtggctggggctccctgagacccgccctccagctgccctccctggcacccctgccccacctggctcctttctactcctggctatgtcgtcttggctccacctctgtcctctctctagcctgcctgggaatgaatgaagctctgttagaaacaccgtgtgctttgggaagagacaataaagatgtctttatttaaaaaa

SEQ ID NO: 728914 - DNA, 556 bp, Homo sapiens
gtaggtcagctctgaaagcacccggtgctgcggggcctgccttcctgtggcttcggcttgggcgccatcccaagccgggttggccagaactctgcctgtgcagccccgcccccaggcaagcaggaaacaatgcacctgagcaacctcctcccatctgcagaggaggaagctaaggtgtaggggggtcaaggcactggcctaaggtcccacagccaaggggtggctgggaggtgcaatcaggtctgcctggcacagagtctggtctcctgaccacgatgccaaactggttattattgtcaccacaatagaatactaataatagttgtcgtaattattattattgtggagggctgttctccaggcaggcaggtctgggttgctgcgtcactggggccaggaggctggctagtgcccacaatgaggcagggtcctgtcccaaacagcactaggagaatgctggagatgggaggctgagcccatcctgcagcctgggtcagcagcctggggcctcaccccaccctccatccaatgctgggtggcgggcagcctctccaat

SEQ ID NO: 728915 - DNA, 492 bp, Homo sapiens
gggaaaaatcagaactttgttgtacttccttacattcatttcctgattacatgatgcttttgttttgaatcacgtgtggagggtgtcaccaaaatctttagatgctttgtccttatgtggatctggacccagatcctagcaaatgttaccatctctgcctcacaaagatctgacagaatgcaggcagttggggctatccttaggagagacagctctccttcgcagtagatgcacctgggtgataaatccaactctgaccacaaggtggcaaaagagtaaatgacaattcctcatatatgttttgtatgtttatataaaactattggtttatataaaatgctctctaaaaatattaagaaaaacgtgtgctccttcacacatttttgggttgatgtctgatattttgcatcacaaatgtcaattggctacaaataatgtaatttgtgacaaatgttaatattcaaaaataaaactgttatgtcactatttcac

SEQ ID NO: 728916 - DNA, 574 bp, Homo sapiens; identical to SEQ ID NO: 415347

SEQ ID NO: 728917 - DNA, 403 bp, Homo sapiens
  misc_feature (75)..(75): n is a, c, g, or t
gaagaacaagcgaaatggctgacagccctggcctccaaagtcaccaggctcaaatcgctcgccctggacatcgantagggatgcagaggatcagaaaccggtacctggatggcatggtgcaggtgatggtcctaccagtgtgtctgttgaggtcacccgtcctaaagtgacctccctgaaagcctgagttgaaatccagactccacttcttgaggcctggccttggactcttgggcagcctctggaaatcctcctcttcaggcccagcggataccccaccttccctgtccatgtcttccttgtactccctgtattacccattgatgtgtaacaggtcaccctaaaacttcacctaaaatagcaatgatttatcatgtctcattgaatttgagacggggcacgc

SEQ ID NO: 728918 - DNA, 395 bp, Homo sapiens; identical to SEQ ID NO: 415346
  misc_feature (4)..(4): n is a, c, g, or t

SEQ ID NO: 728919 - DNA, 909 bp, Homo sapiens; identical to SEQ ID NO: 415361

SEQ ID NO: 728920 - DNA, 467 bp, Homo sapiens
tttatggcacctcttaaaggccaggtagaagagaggcaaccgaaagttactcagtagaacagtacagtcctcatttcttcaaggcagacagccttaaccacctagaggctgatggcctggggagtacttttcaagttctgaagcagatttgtcaaagtagacaaaatggcatttccctcctgaagattcttcactacctcgattcttatgaaatagtctaaggaagttctaaagaaataagacaagtgaattctattttcgttaccagagaaatacaatcgtactagacggggctgtaatctggtaactgtatgtattttagttcttcagtccctgggaaggagacaggagaaggtgggagggaggaaggggccagctgaaatggaaacagatccctgatccggggcggtcagtggaacccttcttggtgtgcgagagcctgtgcatttcagaggcagcaaaaaagt

SEQ ID NO: 728921 - DNA, 821 bp, Homo sapiens; identical to SEQ ID NO: 66318

SEQ ID NO: 728922 - DNA, 885 bp, Homo sapiens
cccagccacagccaccagccggtccccagcctgcatcccagccttcttggctggcagtcccgggtccacctcccacaggaactgtcctggggcatagacatcctcactgctcctctccagctatcctaggccactgtgtacacaccaggggactgaccccagagtgaacgggaagaggcggcccagggcagagctcagacagggacacctcttcggtgcactgaaaggtgtatatacgcttgtgtgcccaccccaaggcccaccttcccccaccgcccccagggctcccactcaccagggcgaccgtcaaggcccttttcctcccggagcaggaacccaaaaccctggggccctttctccaggtgcaggcagcggggcttggtgggcagtgcccagccctctgccaggggtgcagccaggggcaatcccagctggcgacactgttcttccaccttctggccctgccaccagcaaggtcacctgctgtccactctgccaaagctgtggggacccagcagggcatcagtataacacctgggcagggagagaagaggtatgctccccccacagcccctcctcccaggcactaagtggagcctggcacaaactgtagagggggaggatggtgataaaggtaggagaccagataaggaggttaggcgcatggggaaggaggcgtttcccgaggtgggcccaggcccggattgggggaggagagtgggagacaggcagtcacaccttcctggtgagttggttgtgagtgaacttctccacactgaccccattcacttccagcagccggccccgggggcacccctgcccgctcagctgctcctccagtacttagcaccaaccagaaaggaccctgattgcatagaaattaaa

SEQ ID NO: 728923 - DNA, 332 bp, Homo sapiens
atccagtatctccgtgattaccttcatctgccccggagattgtgcctgccactctatgctgcagccgtccagagactggaagtcctcagcctaaaggtctgaagggtgagcgacctgcaagactcacaagagggaaagcggacagagataacctacagacggagtgctgtgccgcctggtgccgacagcaaagctgaggctggggctgggtcagcaaccgaattccagtttagaggtggatttggttgaggatgtggtcagccacctcagtaaaattggagaggattattttgcattgaataaacttacagcaaaaaaacttaaaaaaaaaa

SEQ ID NO: 728924 - DNA, 640 bp, Homo sapiens
  misc_feature (332)..(332): n is a, c, g, or t
agcagtgcactccgtgaaggcaaagagaacacgctgcaaaaggctttccaagaatcctcgacatggcaaggaggagctcgttccagtcgtgtcagataatatccctgttcacttttgccgttggagtcaatatctgcttaggattcactgcacatcgaattaagagagcagaaggatgggaggaaggtcctcctacagtgctatcagactccccctggaccaacatctccggatcttgcaagggcaggtgctttgaacttcaagaggctggacctcctgattgtcgctgtgacaacttgtgtaagagctataccagttgctgccatgacttngatgagctgtgtttgaacgcacagcccgtggctgggagtgtactaaggacagatgtggcagaagtcagcaactgaagaaacatgcctgtcactgctcaagaggactgtctggtgccaggggcgagactgctgtaccaagttaccaagtggctttgcaaaggacgagtcgcatggggttgaatgcatgactgtgaggacatacaggccgcacgaatgccctgcaggggctttgttcgcctccattaactcatcttctccgctggctggctatcacgcgccatcatacatgacgaaacggagacatagtc

SEQ ID NO: 728925 - DNA, 590 bp, Homo sapiens; identical to SEQ ID NO: 407351

SEQ ID NO: 728926 - DNA, 905 bp, Homo sapiens
aggatgtgacaccccgagctactcacgtcagtctccaggaggttgtgcatgctggtttctgccacctccttggactcctcgaacttctccagcgcctggcgtagctcctcatcggggatcttgccctgccgcttcttcttgtagtcaaagtccaggcggcggccctccagtttcttcaggtggtgctggagacgtgggggacatgggtcacaccagtagcggccagagggccgccccacgcatggctttgacccactgtccctgcaccactggggatcctgcctgcctgagacccagagggcagtgccgaggctggaggttctggagggggtcaatgaagttctgcttgacctcgatgtccagggagtccttcacctctgccaggcgcttcatggactcgccggcatccagcaatgcgtcacctgtggagaagtggtgggggaagccatcataccgggcctgggaccactagactgagacactcctcagcctttgtttttgaaatagcgtttcacaggctggaacgcagtggcgctgtaccagctcactgcaggcctcaaactgggctcaagccatgctggcacctcagcctcccaagtagccgggaccacaggcgttcacccccacacctggatcctttccaacttctttgagatgaagtctcgctgttgcccaggctgcagtgcagtggcatgatctcagctcactgcaacctctgcctcccaggttcaagcaattctcctgtctcagcctcctgagtaagggggattacaggggcctgccaccacatccagctaatttttgtatttttaatagagacggggtttcaccatatagaccacaccggtctcgaactcctgaccttgtgatccgcccgcctcggcctcccaaagtgttgggattac

SEQ ID NO: 728927 - DNA, 3013 bp, Homo sapiens; identical to SEQ ID NO: 271853

SEQ ID NO: 728928 - DNA, 582 bp, Homo sapiens; identical to SEQ ID NO: 465342

SEQ ID NO: 728929 - DNA, 576 bp, Homo sapiens
  misc_feature (573)..(573): n is a, c, g, or t
tttggcatcttggcatcccatgtccccacactacaggtcctacggcctgggctggtagtggttcacacagaagacggcaccacgactaagtactttgtgagcagcggctccgtcactgtgaatgccgactcctctgtgcagttactagctgaagaagctgtgacactggacatgctggacctgggggcagcccgggccaacctggagaaggcgcagtcagaactgtcaggtgcggcggacgaggcagcacgggctgagatccagatccgtattgaggccaatgaagccctagtgaaggccctggagtaggtggtacctactgtctgacacccacggggaaactgagccaggtccaggccgatgagaagttcccagtgggctgaagtggccaccaggggtcagcagtgctccagttgctgggcttaaagcttcctggtgcctgtctgccaggtcatggaggattccccaatctggcatccccacgatgcctctggagagatggccttgattgcccctcaaagccacctgaaccgtcgtcaacttacccagcctgtctccattaaacaccaggancca

SEQ ID NO: 728930 - DNA, 642 bp, Homo sapiens
  misc_feature (14)..(14): n is a, c, g, or t
  misc_feature (604)..(604): n is a, c, g, or t
  misc_feature (639)..(639): n is a, c, g, or t
gccaaagctcctgnccctggagctagagaagacagcctgccaggagtatactgtcacagagttccagcctctgtactatgtggccgagagtttcaatgatgccaaggagaaagtgaggacttttgctgccacaatcccccggcccttctccgttcgctatgacccctacactcaaagggttgaggtcctggacaatactcagcagttgaagattttagctgactccattaatagtgaggttggaatcctttgccatgccctgcagaaaataaagtcatgaacagaaagtgacgtcatagacagaacttaggaggtcaaccaaaaaaatctgctgatagaagtatagtaactgcttcttttccctgaagaagaaaagttttatttgcaatgtcagcttttaatatattttcctaacatagtggaggatcaccaaataaatcaatttctctgaaatgaaagtatattaaaacccatcagtggtagatccttcagagtcacatttgatttagatatctcagaccttcaatttggtttaaaatgtaatttcccagttctcatcaacattccatccaaattttgggacccatatcatttgggctccggnctgttcattttttaacctccccaggtaagcaaatnacg

SEQ ID NO: 728931 - DNA, 1575 bp, Homo sapiens
  misc_feature (1429)..(1429): n is a, c, g, or t
  misc_feature (1493)..(1493): n is a, c, g, or t
  misc_feature (1533)..(1533): n is a, c, g, or t
cctctcctttcttctgtagctcgcgttgaagccgcacgtccggccccgatcccggcaccatgagcttcggctcggagcactacctgtgctcctcctcctcctaccgcaaggtgttcggggatggctctcgcctgtccgcccgcctctctggggccggcggcgcgggcggcttccgctcgcagtcgctgtcccgcagcaatgtggcctcctcggccgcctgctcctcggcctcgtcgctcggcctcggcctggcctatcgccggccgccggcgtccgacgggctggacctgagccaggcggcggcgcgcaccaacgagtacaagatcatccgcaccaacgagaaggagcagctgcagggcctcaacgaccgcttcgccgtgttcatcgagaaggtgcatcagctggagacgcagaaccgcgcgttggaggccgagctggccgcgctgcgacagcgccacgctgagccgtcgcgcgtcggcgagctcttccagcgcgagctgcgcgacctgcgcgcgcagctggaggaggccagctcggctcgctcgcaggccctgctggagcgcgacgggctggcggaggaggtgcagcggctgcgggcgcgctgcgaggaggagagccgcggacgcgaaggcgccgagcgcgccctgaaggcgcacagcgcgacgtggacggcgccacgctggcccgcctggacctggagaagaaggtggagtcgctgctggacgagctggccttcgtacgccaggtgcacgacgaggaggtagccgagctgctggccacgctgcaggcgttcgtcgcaggccgcggccgaggtggacgtgactgtggctaaaccagacctgacctcggctctgagggagatccgcgcccagtatgagtccctggccgctaagaacctgcagtccgcggaagaatggtacaagtccaagtttgccaacctgaacgagcaggcggcgcgcacaccgaggccatccgggccagccgcgaggagatccacgagtatcggcgccagctgcaggcgcgcaccatcgagatcgagggcctgcgcggggccaacgagtccttggagaggcagatcctggagctggaggagcggcacagtgccgaggtagctggctaccaggatagcattgggcagctggagaatgatctgaggaacaccaagagtgagatggcacgccaccttcgggaataccaggacttgctcaatgtcaaaatggctcttgacattgagatagcagcttacaggaaactgctggaaggcgaggagacacgttttagcaccagtgggttaagcatttcggggctgaatccacttcccaatccaagttacctgctcccacctagaatcctcagtgctacaacctccaaagtctcatccactgggctatcacttaagaaagaggaggaggaggaggaggcatctaangtagcctctaagaaaacctcccagatagggggaaagttttgaagaaatattagaggagacagtnatatctactaagaaaaccgagaaatcaaatatagaagaancaccatttcaagccaaaaaatataattccattgctttgaaaa

SEQ ID NO: 728932 - DNA, 2877 bp, Homo sapiens
  misc_feature (159)..(159): n is a, c, g, or t
  misc_feature (318)..(318): n is a, c, g, or t
  misc_feature (356)..(356): n is a, c, g, or t
  misc_feature (708)..(708): n is a, c, g, or t
  misc_feature (712)..(712): n is a, c, g, or t
  misc_feature (714)..(714): n is a, c, g, or t
  misc_feature (729)..(729): n is a, c, g, or t
  misc_feature (739)..(739): n is a, c, g, or t
  misc_feature (756)..(756): n is a, c, g, or t
  misc_feature (801)..(801): n is a, c, g, or t
  misc_feature (872)..(872): n is a, c, g, or t
  misc_feature (895)..(895): n is a, c, g, or t
  misc_feature (903)..(903): n is a, c, g, or t
  misc_feature (915)..(915): n is a, c, g, or t
  misc_feature (921)..(921): n is a, c, g, or t
  misc_feature (930)..(930): n is a, c, g, or t
  misc_feature (2812)..(2812): n is a, c, g, or t
  misc_feature (2817)..(2817): n is a, c, g, or t
  misc_feature (2829)..(2830): n is a, c, g, or t
  misc_feature (2842)..(2842): n is a, c, g, or t
  misc_feature (2849)..(2849): n is a, c, g, or t
  misc_feature (2853)..(2853): n is a, c, g, or t
  misc_feature (2862)..(2862): n is a, c, g, or t
  misc_feature (2872)..(2872): n is a, c, g, or t
acagagcgctcccttggaggcacccagggacctggccagccgtgcagctgcccaggcgctatggcgagtgcggtcagggggtcgaggccgtggccccggctggggctccagctccagttcgcggcgctgctgctcgggacgctgagtccacaggttcanactctcaggccagagaacctcctgctggtgtccaccttggatggaagtctccacgcactaagcaagcagacaggggacctgaagtggactctgagggatgatcccgtcatcgaaggaccaatgtacgtcacagaaatggcctttctctctgacccagcngatggcagcctgtacatcttggggacccaaaaacaacngggattaatgaaactgccattcaccatccctgagctggttcatgcctctccctgccgcagctctgatggggtcttctacacaggccggaagcaggatgcctggtttgtggtggaccctgagtcaggggagacccagatgacactgaccacagagggtccctccaccccccgcctctacattggccgaacacagtatacggtcaccatgcatgacccaagagccccagccctgcgctggaacaccacctaccgccgctactcagcgccccccatggatggctcacctgggaaatacatgagccacctggcgtcctgcgggatgggcctgctgctcactgtggacccaggaagngggncngtgctgtggacacangacctgggcntgcctgtgatgggcgtntacacctggcaccaggacggcctgcgccagctgccgcatctcacnctggctcgagacactctgcatttcctcgccctccgctggggccacatccgactgcctgcctcaggcccccnggacacagccaccctcttctctnccttgganacccagctgctnatgacnctgtatgtngggaaggatgaaactggcttctatgtctctaaagcactggtccacacaggagtggccctggtgcctcgtggactgaccctggcccccgcagatggccccaccacagatgaggtgacactccaagtctcaggagagcgagagggctcacccagcactgctgttagatacccctcaggcagtgtggccctcccaagccagtggctgctcattggacaccacgagctacccccagtcctgcacaccaccatgctgagggtccatcccaccctggggagtggaactgcagagacaagacctccagagaatacccaggccccagccttcttcttggagctattgagcctgagccgagagaaactttgggactccgagctgcatccagaagaaaaaactccagactcttacttggggctgggaccccaagacctgctggcagctagcctcactgctgtcctcctgggagggtggattctctttgtgatgaggcagcaacagccgcaggtggtggagaagcagcaggagacccccctggcacctgcagactttgctcacatctcccaggatgcccagtccctgcactcgggggccacccggaggagccagaagaggcttcagagtccctcaaagcaagcccagccactcgacgaccctgaagctgagcaactcaccgtagtggggaagatttccttcaatcccaaggacgtgctgggccgcggggcaggcgggactttcgttttccggggacagtttgagggacgggcagtggctgtcaagcggctcctccgcgagtgctttggcctggttcggcgggaagttcaactgctgcaggagtctgacaggcaccccaacgtgctccgctacttctgcaccgagcggggaccccagttccactacattgccctggagctctgccgggcctccttgcaggagtacgtagaaaacccggacctggatcgcgggggtctggagcccgaggtcgtgctgcagcagctgatgtctggcctggcccacctgcactctttacacatagtgcaccgggacctgaagccaggaaatattctcatcaccgggcctgacagccagggcctgggcagagtggtgctctcagacttcggcctctgcaagaagctgcctgctggccgctgtagcttcagcctccactccggcatccccggcacggaaggctggatggcgcccgagcttctgcagctcctgccaccagacagtcctaccagcgctgtggacatcttctctgcaggctgcgtgttctactacgtgctttctggtggcagccacccctttggagacagtctttatcgccaggcaaacatcctcacaggggctccctgtctggctcacctggaggaagaggtccacgacaaggtggttgcccgggacctggttggagccatgttgagcccactgccgcagccacgcccctctgccccccaggtgctggcccaccccttcttttggagcagagccaagcaactccagttcttccaggacgtcagtgactggctggagaaggagtccgagcaggagcccctggtgagggcactggaggcgggaggctgcgcagtggtccgggacaactggcacgagcacatctccatgccgctgcagacagatctgagaaagttccggtcctataaggggacatcagtgcgagacctgctccgtgctgtgaggaacaagaagcaccactacagggagctcccagttgaggtgcgacaggcactcggccaagtccctgatggcttcgtccagtacttcacaaaccgcttcccacggctgctcctccacacgcaccgagccatgaggagctgcgcctctgagagcctcttcctgccctactacccgccagactcagaggccaggnggccntgccctggggcnncagggaggtgangtgggcnggangccacacanatggtctccntgctg

SEQ ID NO: 728933 - DNA, 687 bp, Homo sapiens
  misc_feature (1)..(1): n is a, c, g, or t
  misc_feature (7)..(7): n is a, c, g, or t
  misc_feature (16)..(16): n is a, c, g, or t
natgacnctgtatgtngggaaggatgaaactggcttctatgtctctaaagcactggtccacacaggagtggccctggtgcctcgtggactgaccctggcccccgcagatggccccaccacagatgaggtgacactccaagtctcaggagagcgagagggctcacccagcactgctgttagatacccctcaggcagtgtggccctcccaagccagtggctgctcattggacaccacgagctacccccagtcctgcacaccaccatgctgagggtccatcccaccctggggagtggaactgcagagacaagacctccagagaatacccaggccccagccttcttcttggagctattgagcctgagccgagagaaactttgggactccgagctgcatccagaagaaaaaactccagactcttacttggggctgggaccccaagacctgctggcagctagcctcactgctgtcctcctgggagggtggattctctttgtgatgaggcagcaacagccgcaggtggtggagaagcagcaggagacccccctggcacctgcctggggctgatgaagcagagatgttcgctggatcccaggccctggcacccctcaggaaatacaagaaaaagaatattcacatctgtttaatgtgcataaagccaaggaaaggacagttccgaattcaataga

SEQ ID NO: 728934 - DNA, 689 bp, Homo sapiens
tgacactgggtgtgggaatttctgcatttcctcaagaggctgtgtagcaaaatgattcagtgtgctggctctggagcctgactgcctgggttcaaggccaggctctgccatttagtagctgtgtgacattagccaagttacatggcctctccaagccccagtttccttacctgaaaagtggaaatgatagtaatacctgttaattggttgctatggaaatgggctcacctggcacagtgagcactgtgtgttgctgctcttactccttcctgtaaattttccgtctcctagaaactgccattcaccatccctgagctggttcatgcctctccctgccgcagctctgatggggtcttctacacaggccggaagcaggatgcctggtttgtggtggaccctgagtcaggggagacccagatgacactgaccacagagggtccctccaccccccgcctctacattggccgaacacagtatacggtcaccatgcatgacccaagagccccagccctgcgctggaacaccacctaccgccgctactcagcgccccccatggatggctcacctgggaaatgtgagttccacctttctctggtcccatcttggagcaaggtccccaacccagggaaccctgaacagcatccatgaccaattcccagccacatttcgacccacttgacctccccagg

SEQ ID NO: 728935 - DNA, 638 bp, Homo sapiens
  misc_feature (1)..(1): n is a, c, g, or t
  misc_feature (7)..(7): n is a, c, g, or t
  misc_feature (16)..(16): n is a, c, g, or t
natgacnctgtatgtngggaaggatgaaactggcttctatgtctctaaagcactggtccacacaggagtggccctggtgcctcgtggactgaccctggcccccgcagatggccccaccacagatgaggtgacactccaagtctcaggagagcgagagggctcacccagcactgctgttagatacccctcaggcagtgtggccctcccaagccagtggctgctcattggacaccacgagctacccccagtcctgcacaccaccatgctgagggtccatcccaccctggggagtggaactgcagagacaagacctccagagaatacccaggccccagccttcttcttggagctattgagcctgagccgagagaaactttgggactccgagctgcatccagaagaaaaaactccagactcttacttggggctgggaccccaagacctgctggcagctagcctcactgctgtcctcctgggagggtggattctctttgtgatgaggcagcaacagccgcaggtggtggagaagcagcaggagacccccctggcacctgccctcaggaaatacaagaaaaagaatattcacatctgtttaatgtgcataaagccaaggaaaggacagttccgaattcaataga

SEQ ID NO: 728936 - DNA, 475 bp, Homo sapiens
ctgagcaactcaccgtagtggggaagatttccttcaatcccaaggacgtgctgggccgcggggcaggcgggactttcgttttccggggacagtttgagggacgggcagtggctgtcaagcggctcctccgcgagtgctttggcctggttcggcgggaagttcaactgctgcaggagtctgacaggcaccccaacgtgctccgctacttctgcaccgagcggggaccccagttccactacattgccctggagctctgccgggcctccttgcaggagtgcaccgggacctgaagccaggaaatattctcatcaccgggcctgacagccagggcctgggcagagtggtgctctcagacttcggcctctgcaagaagctgcctgctggccgctgtagcttcagcctccactccggcatccccggcacggaaggctggatggcgcccgagcttctgcagctcctgccaccagacagtcct

SEQ ID NO: 728937 - DNA, 492 bp, Homo sapiens; identical to SEQ ID NO: 288149

SEQ ID NO: 728938 - DNA, 1504 bp, Homo sapiens
aaagaaacaaaattgggatgttcgggttggagagttagcaggggcatctccaggagggtcctgccccccaccccaaagccggcctcagggagttccaggcgttcccacactccccaggcaggacggtggacgcagcgcagacaggaagctccccgagataacgctgcggccgggcggcctgatttgctgggctgtctgatggcccgggccgaggcttctccctgcgcctgggactgcggccgcctctctaaatagcagccatgaggcgcctgggggcagtgtcctcgcgggccagcgacgggcaggacgccccgttcgcctagcgcgtgctcaggagttggtgtcctgcctgcgctcaggatgagggggaatctggccctggtgggcgttctaatcagcctggccttcctgtcactgctgccatctggacatcctcagccggctggcgatgacgcctgctctgtgcagatcctcgtccctggcctcaaaggggatgcgggagagaagggagacaaaggcgcccccggacggcctggaagagtcggccccacgggagaaaaaggagacatgggggacaaaggacagaaaggcagtgtgggtcgtcatggaaaaattggtcccattggctctaaaggtgagaaaggagattccggtgacataggaccccctggtcctaatggagaaccaggcctcccatgtgagtgcagccagctgcgcaaggccatcggggagatggacaaccaggtctctcagctgaccagcgagctcaagttcatcaagaatgctgtcgccggtgtgcgcgagacggagagcaagatctacctgctggtgaaggaggagaagcgctacgcggacgcccagctgtcctgccagggccgcgggggcacgctgagcatgcccaaggacgaggctgccaatggcctgatggccgcatacctggcgcaagccggcctggcccgtgtcttcatcggcatcaacgacctggagaaggagggcgccttcgtgtactctgaccactcccccatgcggaccttcaacaagtggcgcagcggtgagcccaacaatgcctacgacgaggaggactgcgtggagatggtggcctcgggcggctggaacgacgtggcctgccacaccaccatgtacttcatgtgtgagtttgacaaggagaacatgtgagcctcaggctggggctgcccattgggggccccacatgtccctgcagggttggcagggacagagcccagaccatggtgccagccagggagctgtccctctgtgaagggtggaggctcactgagtagagggctgttgtctaaactgagaaaatggcctatgcttaagaggaaaatgaaagtgttcctggggtgctgtctctgaagaagcagagtttcattacctgtattgtagccccaatgtcattatgtaattattacccagaattgctcttccataaagcttgtgcctttgtccaagctatacaataaaatctttaagtagtgcagta

SEQ ID NO: 728939 - DNA, 1143 bp, Homo sapiens
  misc_feature (1030)..(1030): n is a, c, g, or t
  misc_feature (1043)..(1043): n is a, c, g, or t
  misc_feature (1056)..(1057): n is a, c, g, or t
  misc_feature (1059)..(1059): n is a, c, g, or t
  misc_feature (1064)..(1064): n is a, c, g, or t
  misc_feature (1074)..(1074): n is a, c, g, or t
  misc_feature (1087)..(1087): n is a, c, g, or t
aaagaaacaaaattgggatgttcgggttggagagttagcaggggcatctccaggagggtcctgccccccaccccaaagccggcctcagggagttccaggcgttcccacactccccaggcaggacggtggacgcagcgcagacaggaagctccccgagataacgctgcggccgggcggcctgatttgctgggctgtctgatggcccgggccgaggcttctccctgcgcctgggactgcggccgcctctctaaatagcagccatgaggcgcctgggggcagtgtcctcgcgggccagcgacgggcaggacgccccgttcgcctagcgcgtgctcaggagttggtgtcctgcctgcgctcaggatgagggggaatctggccctggtgggcgttctaatcagcctggccttcctgtcactgctgccatctggacatcctcagccggctggcgatgacgcctgctctgtgcagatcctcgtccctggcctcaaaggggatgcgggagagaagggagacaaaggcgcccccggacggcctggaagagtcggccccacgggagaaaaagcagtcacagccagtcgtgacagcttctgacatctccaaaaggaagtgcacctcgtcctttgtagaaatgggatcacagggagacatgggggacaaaggacagaaaggcagtgtgggtcgtcatggaaaaattggtcccattggctctaaaggtgagaaaggagattccggtgacataggaccccctggtcctaatggagaaccaggcctcccatgtgagtgcagccagctgcgcaaggccatcggggagatggacaaccaggtctctcagctgaccagcgagctcaagttcatcaagaatgctgtcgccggtgtgcgcgagacggagagcaagatctacctgctggtgaaggaggagaagcgctacgcggacgcccagctgtcctgccagggccgcgggggcacgctgagcatgcccaaggacgacaagctgcatgggcgaggcgataccggggcagccgccggcggntcacggtcacacnccggaaggggccnngnccgcncccccgggcncacaagggggggnccatgccacgcgggcggggagtgccgccgggaagcggcacacatcgggtgggaggc

SEQ ID NO: 728940 - DNA, 1583 bp, Homo sapiens
aaagaaacaaaattgggatgttcgggttggagagttagcaggggcatctccaggagggtcctgccccccaccccaaagccggcctcagggagttccaggcgttcccacactccccaggcaggacggtggacgcagcgcagacaggaagctccccgagataacgctgcggccgggcggcctgatttgctgggctgtctgatggcccgggccgaggcttctccctgcgcctgggactgcggccgcctctctaaatagcagccatgaggcgcctgggggcagtgtcctcgcgggccagcgacgggcaggacgccccgttcgcctagcgcgtgctcaggagttggtgtcctgcctgcgctcaggatgagggggaatctggccctggtgggcgttctaatcagcctggccttcctgtcactgctgccatctggacatcctcagccggctggcgatgacgcctgctctgtgcagatcctcgtccctggcctcaaaggggatgcgggagagaagggagacaaaggcgcccccggacggcctggaagagtcggccccacgggagaaaaagcagtcacagccagtcgtgacagcttctgacatctccaaaaggaagtgcacctcgtcctttgtagaaatgggatcacagggagacatgggggacaaaggacagaaaggcagtgtgggtcgtcatggaaaaattggtcccattggctctaaaggtgagaaaggagattccggtgacataggaccccctggtcctaatggagaaccaggcctcccatgtgagtgcagccagctgcgcaaggccatcggggagatggacaaccaggtctctcagctgaccagcgagctcaagttcatcaagaatgctgtcgccggtgtgcgcgagacggagagcaagatctacctgctggtgaaggaggagaagcgctacgcggacgcccagctgtcctgccagggccgcgggggcacgctgagcatgcccaaggacgaggctgccaatggcctgatggccgcatacctggcgcaagccggcctggcccgtgtcttcatcggcatcaacgacctggagaaggagggcgccttcgtgtactctgaccactcccccatgcggaccttcaacaagtggcgcagcggtgagcccaacaatgcctacgacgaggaggactgcgtggagatggtggcctcgggcggctggaacgacgtggcctgccacaccaccatgtacttcatgtgtgagtttgacaaggagaacatgtgagcctcaggctggggctgcccattgggggccccacatgtccctgcagggttggcagggacagagcccagaccatggtgccagccagggagctgtccctctgtgaagggtggaggctcactgagtagagggctgttgtctaaactgagaaaatggcctatgcttaagaggaaaatgaaagtgttcctggggtgctgtctctgaagaagcagagtttcattacctgtattgtagccccaatgtcattatgtaattattacccagaattgctcttccataaagcttgtgcctttgtccaagctatacaataaaatctttaagtagtgcagta

SEQ ID NO: 728941 - DNA, 1432 bp, Homo sapiens
aaagaaacaaaattgggatgttcgggttggagagttagcaggggcatctccaggagggtcctgccccccaccccaaagccggcctcagggagttccaggcgttcccacactccccaggcaggacggtggacgcagcgcagacaggaagctccccgagataacgctgcggccgggcggcctgatttgctgggctgtctgatggcccgggccgaggcttctccctgcgcctgggactgcggccgcctctctaaatagcagccatgaggcgcctgggggcagtgtcctcgcgggccagcgacgggcaggacgccccgttcgcctagcgcgtgctcaggagttggtgtcctgcctgcgctcaggatgagggggaatctggccctggtgggcgttctaatcagcctggccttcctgtcactgctgccatctggacatcctcagccggctggcgatgacgcctgctctgtgcagatcctcgtccctggcctcaaaggagacatgggggacaaaggacagaaaggcagtgtgggtcgtcatggaaaaattggtcccattggctctaaaggtgagaaaggagattccggtgacataggaccccctggtcctaatggagaaccaggcctcccatgtgagtgcagccagctgcgcaaggccatcggggagatggacaaccaggtctctcagctgaccagcgagctcaagttcatcaagaatgctgtcgccggtgtgcgcgagacggagagcaagatctacctgctggtgaaggaggagaagcgctacgcggacgcccagctgtcctgccagggccgcgggggcacgctgagcatgcccaaggacgaggctgccaatggcctgatggccgcatacctggcgcaagccggcctggcccgtgtcttcatcggcatcaacgacctggagaaggagggcgccttcgtgtactctgaccactcccccatgcggaccttcaacaagtggcgcagcggtgagcccaacaatgcctacgacgaggaggactgcgtggagatggtggcctcgggcggctggaacgacgtggcctgccacaccaccatgtacttcatgtgtgagtttgacaaggagaacatgtgagcctcaggctggggctgcccattgggggccccacatgtccctgcagggttggcagggacagagcccagaccatggtgccagccagggagctgtccctctgtgaagggtggaggctcactgagtagagggctgttgtctaaactgagaaaatggcctatgcttaagaggaaaatgaaagtgttcctggggtgctgtctctgaagaagcagagtttcattacctgtattgtagccccaatgtcattatgtaattattacccagaattgctcttccataaagcttgtgcctttgtccaagctatacaataaaatctttaagtagtgcagta

SEQ ID NO: 728942 - DNA, 1656 bp, Homo sapiens
  misc_feature (1435)..(1435): n is a, c, g, or t
  misc_feature (1441)..(1441): n is a, c, g, or t
  misc_feature (1455)..(1455): n is a, c, g, or t
aaagaaacaaaattgggatgttcgggttggagagttagcaggggcatctccaggagggtcctgccccccaccccaaagccggcctcagggagttccaggcgttcccacactccccaggcaggacggtggacgcagcgcagacaggaagctccccgagataacgctgcggccgggcggcctgatttgctgggctgtctgatggcccgggccgaggcttctccctgcgcctgggactgcggccgcctctctaaatagcagccatgaggcgcctgggggcagtgtcctcgcgggccagcgacgggcaggacgccccgttcgcctagcgcgtgctcaggagttggtgtcctgcctgcgctcaggatgagggggaatctggccctggtgggcgttctaatcagcctggccttcctgtcactgctgccatctggacatcctcagccggctggcgatgacgcctgctctgtgcagatcctcgtccctggcctcaaaggagacatgggggacaaaggacagaaaggcagtgtgggtcgtcatggaaaaattggtcccattggctctaaaggtgagaaaggagattccggtgacataggaccccctggtcctaatggagaaccaggcctcccatgtgagtgcagccagctgcgcaaggccatcggggagatggacaaccaggtctctcagctgaccagcgagctcaagttcatcaagaatgctgtcgccggtgtgcgcgagacggagagcaagatctacctgctggtgaaggaggagaagcgctacgcggacgcccagctgtcctgccagggccgcgggggcacgctgagcatgcccaaggacgaggctgccaatggcctgatggccgcatacctggcgcaagccggcctggcccgtgtcttcatcggcatcaacgacctggagaaggagggcgccttcgtgtactctgaccactcccccatgcggaccttcaacaagtggcgcagcggtgagcccaacaatgcctacgacgaggaggactgcgtggagatggtggcctcgggcggctggaacgacgtggcctgccacaccaccatgtacttcatgtgtgagtttgacaaggagaacatgtgagcctcaggctggggctgcccattgggggccccacatgtccctgcagggttggcagggacagagcccagaccatggtgccagccagggagctgtccctctgtgaagggtggaggctcactgagtagagggctgttgtctaaactgagaaaatggcctatgcttaagaggaaaatgaaagtgttcctggggtgctgtctctgaagaagcagagtttcattacctgtattgtagccccaatgtcattatgtaattattacccagaattgctcttccataaagcttgtgcctttgtccaagctatacaataaaatctttaagtagtgcagtaaanaaaaanaaaaaaaaaaaaanaaacccggggcaaaacacagagcgcgacaacaagcgcagaaacgcgcacatggggcaatgcgggtcctgaaccaagattgtgtccaaggggaaaccgcggcccaaaaggagcgcaaaatcgaaagcaggcaccgtagacccgcgaagcacaggcacccaaagacaacggcaaggaacacgaaagaggccaacaccacaaaa

SEQ ID NO: 728943 - DNA, 1633 bp, Homo sapiens
aaagaaacaaaattgggatgttcgggttggagagttagcaggggcatctccaggagggtcctgccccccaccccaaagccggcctcagggagttccaggcgttcccacactccccaggcaggacggtggacgcagcgcagacaggaagctccccgagataacgctgcggccgggcggcctgatttgctgggctgtctgatggcccgggccgaggcttctccctgcgcctgggactgcggccgcctctctaaatagcagccatgaggcgcctgggggcagtgtcctcgcgggccagcgacgggcaggacgccccgttcgcctagcgcgtgctcaggagttggtgtcctgcctgcgctcaggatgagggggaatctggccctggtgggcgttctaatcagcctggccttcctgtcactgctgccatctggacatcctcagccggctggcgatgacgcctgctctgtgcagatcctcgtccctggcctcaaaggagacatgggggacaaaggacagaaaggcagtgtgggtcgtcatggaaaaattggtcccattggctctaaaggtgagaaaggagattccggtgacataggaccccctggtcctaatggagaaccaggcctcccatgtgagtgcagccagctgcgcaaggccatcggggagatggacaaccaggtctctcagctgaccagcgagctcaagttcatcaagaatgctgtcgccggtgtgcgcgagacggagagcaagatctacctgctggtgaaggaggagaagcgctacgcggacgcccagctgtcctgccagggccgcgggggcacgctgagcatgcccaaggacgaggctgccaatggcctgatggccgcatacctggcgcaagccggcctggcccgtgtcttcatcggcatcaacgacctggagaaggagggcgccttcgtgtactctgaccactcccccatgcggaccttcaacaagtggcgcagcggtgagcccaacaatgcctacgacgaggaggactgcgtggagatggtggcctcgggcggctggaacgacgtggcctgccacaccaccatgtacttcatgtgtgagtttgacaaggagaacatgtgagcctcaggctggggctgcccattgggggccccacatgtccctgcagggttggcagggacagagcccagaccatggtgccagccagggagctgtccctctgtgaagggtggaggctcactgagtagagggctgttgtctaaactgagaaaatggcctatgcttaagaggaaaatgaaagtgttcctggggtgctgtctctgaagaagcagagtttcattacctgtattgtagccccaatgtcattatgtaattattacccagaattgctcttccataaagcttgtgcctttgtccaagctatacaataaaatctttaagtagtgcagtagttaagtccaaatagtggcaatggggtcttgaattactaccttttaatttctatatggaaaagaactcactttgaccaacacttctgtaaattacattacaatataggttccttcacactattatccatgtaaaaacaattttgctttgcttcaaacccagatttcaggaaaacaacaacaaaattctccaaactttacta

SEQ ID NO: 728944 - DNA, 1807 bp, Homo sapiens
  misc_feature (1586)..(1586): n is a, c, g, or t
  misc_feature (1592)..(1592): n is a, c, g, or t
  misc_feature (1606)..(1606): n is a, c, g, or t
aaagaaacaaaattgggatgttcgggttggagagttagcaggggcatctccaggagggtcctgccccccaccccaaagccggcctcagggagttccaggcgttcccacactccccaggcaggacggtggacgcagcgcagacaggaagctccccgagataacgctgcggccgggcggcctgatttgctgggctgtctgatggcccgggccgaggcttctccctgcgcctgggactgcggccgcctctctaaatagcagccatgaggcgcctgggggcagtgtcctcgcgggccagcgacgggcaggacgccccgttcgcctagcgcgtgctcaggagttggtgtcctgcctgcgctcaggatgagggggaatctggccctggtgggcgttctaatcagcctggccttcctgtcactgctgccatctggacatcctcagccggctggcgatgacgcctgctctgtgcagatcctcgtccctggcctcaaaggggatgcgggagagaagggagacaaaggcgcccccggacggcctggaagagtcggccccacgggagaaaaagcagtcacagccagtcgtgacagcttctgacatctccaaaaggaagtgcacctcgtcctttgtagaaatgggatcacagggagacatgggggacaaaggacagaaaggcagtgtgggtcgtcatggaaaaattggtcccattggctctaaaggtgagaaaggagattccggtgacataggaccccctggtcctaatggagaaccaggcctcccatgtgagtgcagccagctgcgcaaggccatcggggagatggacaaccaggtctctcagctgaccagcgagctcaagttcatcaagaatgctgtcgccggtgtgcgcgagacggagagcaagatctacctgctggtgaaggaggagaagcgctacgcggacgcccagctgtcctgccagggccgcgggggcacgctgagcatgcccaaggacgaggctgccaatggcctgatggccgcatacctggcgcaagccggcctggcccgtgtcttcatcggcatcaacgacctggagaaggagggcgccttcgtgtactctgaccactcccccatgcggaccttcaacaagtggcgcagcggtgagcccaacaatgcctacgacgaggaggactgcgtggagatggtggcctcgggcggctggaacgacgtggcctgccacaccaccatgtacttcatgtgtgagtttgacaaggagaacatgtgagcctcaggctggggctgcccattgggggccccacatgtccctgcagggttggcagggacagagcccagaccatggtgccagccagggagctgtccctctgtgaagggtggaggctcactgagtagagggctgttgtctaaactgagaaaatggcctatgcttaagaggaaaatgaaagtgttcctggggtgctgtctctgaagaagcagagtttcattacctgtattgtagccccaatgtcattatgtaattattacccagaattgctcttccataaagcttgtgcctttgtccaagctatacaataaaatctttaagtagtgcagtaaanaaaaanaaaaaaaaaaaaanaaacccggggcaaaacacagagcgcgacaacaagcgcagaaacgcgcacatggggcaatgcgggtcctgaaccaagattgtgtccaaggggaaaccgcggcccaaaaggagcgcaaaatcgaaagcaggcaccgtagacccgcgaagcacaggcacccaaagacaacggcaaggaacacgaaagaggccaacaccacaaaa

SEQ ID NO: 728945 - DNA, 1784 bp, Homo sapiens
aaagaaacaaaattgggatgttcgggttggagagttagcaggggcatctccaggagggtcctgccccccaccccaaagccggcctcagggagttccaggcgttcccacactccccaggcaggacggtggacgcagcgcagacaggaagctccccgagataacgctgcggccgggcggcctgatttgctgggctgtctgatggcccgggccgaggcttctccctgcgcctgggactgcggccgcctctctaaatagcagccatgaggcgcctgggggcagtgtcctcgcgggccagcgacgggcaggacgccccgttcgcctagcgcgtgctcaggagttggtgtcctgcctgcgctcaggatgagggggaatctggccctggtgggcgttctaatcagcctggccttcctgtcactgctgccatctggacatcctcagccggctggcgatgacgcctgctctgtgcagatcctcgtccctggcctcaaaggggatgcgggagagaagggagacaaaggcgcccccggacggcctggaagagtcggccccacgggagaaaaagcagtcacagccagtcgtgacagcttctgacatctccaaaaggaagtgcacctcgtcctttgtagaaatgggatcacagggagacatgggggacaaaggacagaaaggcagtgtgggtcgtcatggaaaaattggtcccattggctctaaaggtgagaaaggagattccggtgacataggaccccctggtcctaatggagaaccaggcctcccatgtgagtgcagccagctgcgcaaggccatcggggagatggacaaccaggtctctcagctgaccagcgagctcaagttcatcaagaatgctgtcgccggtgtgcgcgagacggagagcaagatctacctgctggtgaaggaggagaagcgctacgcggacgcccagctgtcctgccagggccgcgggggcacgctgagcatgcccaaggacgaggctgccaatggcctgatggccgcatacctggcgcaagccggcctggcccgtgtcttcatcggcatcaacgacctggagaaggagggcgccttcgtgtactctgaccactcccccatgcggaccttcaacaagtggcgcagcggtgagcccaacaatgcctacgacgaggaggactgcgtggagatggtggcctcgggcggctggaacgacgtggcctgccacaccaccatgtacttcatgtgtgagtttgacaaggagaacatgtgagcctcaggctggggctgcccattgggggccccacatgtccctgcagggttggcagggacagagcccagaccatggtgccagccagggagctgtccctctgtgaagggtggaggctcactgagtagagggctgttgtctaaactgagaaaatggcctatgcttaagaggaaaatgaaagtgttcctggggtgctgtctctgaagaagcagagtttcattacctgtattgtagccccaatgtcattatgtaattattacccagaattgctcttccataaagcttgtgcctttgtccaagctatacaataaaatctttaagtagtgcagtagttaagtccaaatagtggcaatggggtcttgaattactaccttttaatttctatatggaaaagaactcactttgaccaacacttctgtaaattacattacaatataggttccttcacactattatccatgtaaaaacaattttgctttgcttcaaacccagatttcaggaaaacaacaacaaaattctccaaactttacta

SEQ ID NO: 728946 - DNA, 1728 bp, Homo sapiens
  misc_feature (1507)..(1507): n is a, c, g, or t
  misc_feature (1513)..(1513): n is a, c, g, or t
  misc_feature (1527)..(1527): n is a, c, g, or t
aaagaaacaaaattgggatgttcgggttggagagttagcaggggcatctccaggagggtcctgccccccaccccaaagccggcctcagggagttccaggcgttcccacactccccaggcaggacggtggacgcagcgcagacaggaagctccccgagataacgctgcggccgggcggcctgatttgctgggctgtctgatggcccgggccgaggcttctccctgcgcctgggactgcggccgcctctctaaatagcagccatgaggcgcctgggggcagtgtcctcgcgggccagcgacgggcaggacgccccgttcgcctagcgcgtgctcaggagttggtgtcctgcctgcgctcaggatgagggggaatctggccctggtgggcgttctaatcagcctggccttcctgtcactgctgccatctggacatcctcagccggctggcgatgacgcctgctctgtgcagatcctcgtccctggcctcaaaggggatgcgggagagaagggagacaaaggcgcccccggacggcctggaagagtcggccccacgggagaaaaaggagacatgggggacaaaggacagaaaggcagtgtgggtcgtcatggaaaaattggtcccattggctctaaaggtgagaaaggagattccggtgacataggaccccctggtcctaatggagaaccaggcctcccatgtgagtgcagccagctgcgcaaggccatcggggagatggacaaccaggtctctcagctgaccagcgagctcaagttcatcaagaatgctgtcgccggtgtgcgcgagacggagagcaagatctacctgctggtgaaggaggagaagcgctacgcggacgcccagctgtcctgccagggccgcgggggcacgctgagcatgcccaaggacgaggctgccaatggcctgatggccgcatacctggcgcaagccggcctggcccgtgtcttcatcggcatcaacgacctggagaaggagggcgccttcgtgtactctgaccactcccccatgcggaccttcaacaagtggcgcagcggtgagcccaacaatgcctacgacgaggaggactgcgtggagatggtggcctcgggcggctggaacgacgtggcctgccacaccaccatgtacttcatgtgtgagtttgacaaggagaacatgtgagcctcaggctggggctgcccattgggggccccacatgtccctgcagggttggcagggacagagcccagaccatggtgccagccagggagctgtccctctgtgaagggtggaggctcactgagtagagggctgttgtctaaactgagaaaatggcctatgcttaagaggaaaatgaaagtgttcctggggtgctgtctctgaagaagcagagtttcattacctgtattgtagccccaatgtcattatgtaattattacccagaattgctcttccataaagcttgtgcctttgtccaagctatacaataaaatctttaagtagtgcagtaaanaaaaanaaaaaaaaaaaaanaaacccggggcaaaacacagagcgcgacaacaagcgcagaaacgcgcacatggggcaatgcgggtcctgaaccaagattgtgtccaaggggaaaccgcggcccaaaaggagcgcaaaatcgaaagcaggcaccgtagacccgcgaagcacaggcacccaaagacaacggcaaggaacacgaaagaggccaacaccacaaaa

SEQ ID NO: 728947 - DNA, 1705 bp, Homo sapiens
aaagaaacaaaattgggatgttcgggttggagagttagcaggggcatctccaggagggtcctgccccccaccccaaagccggcctcagggagttccaggcgttcccacactccccaggcaggacggtggacgcagcgcagacaggaagctccccgagataacgctgcggccgggcggcctgatttgctgggctgtctgatggcccgggccgaggcttctccctgcgcctgggactgcggccgcctctctaaatagcagccatgaggcgcctgggggcagtgtcctcgcgggccagcgacgggcaggacgccccgttcgcctagcgcgtgctcaggagttggtgtcctgcctgcgctcaggatgagggggaatctggccctggtgggcgttctaatcagcctggccttcctgtcactgctgccatctggacatcctcagccggctggcgatgacgcctgctctgtgcagatcctcgtccctggcctcaaaggggatgcgggagagaagggagacaaaggcgcccccggacggcctggaagagtcggccccacgggagaaaaaggagacatgggggacaaaggacagaaaggcagtgtgggtcgtcatggaaaaattggtcccattggctctaaaggtgagaaaggagattccggtgacataggaccccctggtcctaatggagaaccaggcctcccatgtgagtgcagccagctgcgcaaggccatcggggagatggacaaccaggtctctcagctgaccagcgagctcaagttcatcaagaatgctgtcgccggtgtgcgcgagacggagagcaagatctacctgctggtgaaggaggagaagcgctacgcggacgcccagctgtcctgccagggccgcgggggcacgctgagcatgcccaaggacgaggctgccaatggcctgatggccgcatacctggcgcaagccggcctggcccgtgtcttcatcggcatcaacgacctggagaaggagggcgccttcgtgtactctgaccactcccccatgcggaccttcaacaagtggcgcagcggtgagcccaacaatgcctacgacgaggaggactgcgtggagatggtggcctcgggcggctggaacgacgtggcctgccacaccaccatgtacttcatgtgtgagtttgacaaggagaacatgtgagcctcaggctggggctgcccattgggggccccacatgtccctgcagggttggcagggacagagcccagaccatggtgccagccagggagctgtccctctgtgaagggtggaggctcactgagtagagggctgttgtctaaactgagaaaatggcctatgcttaagaggaaaatgaaagtgttcctggggtgctgtctctgaagaagcagagtttcattacctgtattgtagccccaatgtcattatgtaattattacccagaattgctcttccataaagcttgtgcctttgtccaagctatacaataaaatctttaagtagtgcagtagttaagtccaaatagtggcaatggggtcttgaattactaccttttaatttctatatggaaaagaactcactttgaccaacacttctgtaaattacattacaatataggttccttcacactattatccatgtaaaaacaattttgctttgcttcaaacccagatttcaggaaaacaacaacaaaattctccaaactttacta

SEQ ID NO: 728948 - DNA, 1394 bp, Homo sapiens
aggctgtgcagctctggctgggggcttttttccggctgtgttagccctgctgtggaaagcaagtggactgtcctgcagcccagacaagcccagtggcctttgtgcttttaattgtgataaatgtacctgctttagaaaatgtttaattatgttggaagcaacttaaactgttggatgcctacggctctctcagaagtttggtgaaagtggctttggccctgactttgtggtagcgtgtgtgggtttgtgagtggaaccttcagctttaggttggaaacggtggctgtggagagctggacttttggctgtggaggtcacgtccctgcccaatgtggtgggtgcctccgagtccctacggttgtcttccctgcgccctgccagggatgcgggagagaagggagacaaaggcgcccccggacggcctggaagagtcggccccacgggagaaaaaggagacatgggggacaaaggacagaaaggcagtgtgggtcgtcatggaaaaattggtcccattggctctaaaggtgagaaaggagattccggtgacataggaccccctggtcctaatggagaaccaggcctcccatgtgagtgcagccagctgcgcaaggccatcggggagatggacaaccaggtctctcagctgaccagcgagctcaagttcatcaagaatgctgtcgccggtgtgcgcgagacggagagcaagatctacctgctggtgaaggaggagaagcgctacgcggacgcccagctgtcctgccagggccgcgggggcacgctgagcatgcccaaggacgaggctgccaatggcctgatggccgcatacctggcgcaagccggcctggcccgtgtcttcatcggcatcaacgacctggagaaggagggcgccttcgtgtactctgaccactcccccatgcggaccttcaacaagtggcgcagcggtgagcccaacaatgcctacgacgaggaggactgcgtggagatggtggcctcgggcggctggaacgacgtggcctgccacaccaccatgtacttcatgtgtgagtttgacaaggagaacatgtgagcctcaggctggggctgcccattgggggccccacatgtccctgcagggttggcagggacagagcccagaccatggtgccagccagggagctgtccctctgtgaagggtggaggctcactgagtagagggctgttgtctaaactgagaaaatggcctatgcttaagaggaaaatgaaagtgttcctggggtgctgtctctgaagaagcagagtttcattacctgtattgtagccccaatgtcattatgtaattattacccagaattgctcttccataaagcttgtgcctttgtccaagctatacaataaaatctttaagtagtgcagta

SEQ ID NO: 728949 - DNA, 1618 bp, Homo sapiens
  misc_feature (1397)..(1397): n is a, c, g, or t
  misc_feature (1403)..(1403): n is a, c, g, or t
  misc_feature (1417)..(1417): n is a, c, g, or t
aggctgtgcagctctggctgggggcttttttccggctgtgttagccctgctgtggaaagcaagtggactgtcctgcagcccagacaagcccagtggcctttgtgcttttaattgtgataaatgtacctgctttagaaaatgtttaattatgttggaagcaacttaaactgttggatgcctacggctctctcagaagtttggtgaaagtggctttggccctgactttgtggtagcgtgtgtgggtttgtgagtggaaccttcagctttaggttggaaacggtggctgtggagagctggacttttggctgtggaggtcacgtccctgcccaatgtggtgggtgcctccgagtccctacggttgtcttccctgcgccctgccagggatgcgggagagaagggagacaaaggcgcccccggacggcctggaagagtcggccccacgggagaaaaaggagacatgggggacaaaggacagaaaggcagtgtgggtcgtcatggaaaaattggtcccattggctctaaaggtgagaaaggagattccggtgacataggaccccctggtcctaatggagaaccaggcctcccatgtgagtgcagccagctgcgcaaggccatcggggagatggacaaccaggtctctcagctgaccagcgagctcaagttcatcaagaatgctgtcgccggtgtgcgcgagacggagagcaagatctacctgctggtgaaggaggagaagcgctacgcggacgcccagctgtcctgccagggccgcgggggcacgctgagcatgcccaaggacgaggctgccaatggcctgatggccgcatacctggcgcaagccggcctggcccgtgtcttcatcggcatcaacgacctggagaaggagggcgccttcgtgtactctgaccactcccccatgcggaccttcaacaagtggcgcagcggtgagcccaacaatgcctacgacgaggaggactgcgtggagatggtggcctcgggcggctggaacgacgtggcctgccacaccaccatgtacttcatgtgtgagtttgacaaggagaacatgtgagcctcaggctggggctgcccattgggggccccacatgtccctgcagggttggcagggacagagcccagaccatggtgccagccagggagctgtccctctgtgaagggtggaggctcactgagtagagggctgttgtctaaactgagaaaatggcctatgcttaagaggaaaatgaaagtgttcctggggtgctgtctctgaagaagcagagtttcattacctgtattgtagccccaatgtcattatgtaattattacccagaattgctcttccataaagcttgtgcctttgtccaagctatacaataaaatctttaagtagtgcagtaaanaaaaanaaaaaaaaaaaaanaaacccggggcaaaacacagagcgcgacaacaagcgcagaaacgcgcacatggggcaatgcgggtcctgaaccaagattgtgtccaaggggaaaccgcggcccaaaaggagcgcaaaatcgaaagcaggcaccgtagacccgcgaagcacaggcacccaaagacaacggcaaggaacacgaaagaggccaacaccacaaaa

SEQ ID NO: 728950 - DNA, 1595 bp, Homo sapiens
aggctgtgcagctctggctgggggcttttttccggctgtgttagccctgctgtggaaagcaagtggactgtcctgcagcccagacaagcccagtggcctttgtgcttttaattgtgataaatgtacctgctttagaaaatgtttaattatgttggaagcaacttaaactgttggatgcctacggctctctcagaagtttggtgaaagtggctttggccctgactttgtggtagcgtgtgtgggtttgtgagtggaaccttcagctttaggttggaaacggtggctgtggagagctggacttttggctgtggaggtcacgtccctgcccaatgtggtgggtgcctccgagtccctacggttgtcttccctgcgccctgccagggatgcgggagagaagggagacaaaggcgcccccggacggcctggaagagtcggccccacgggagaaaaaggagacatgggggacaaaggacagaaaggcagtgtgggtcgtcatggaaaaattggtcccattggctctaaaggtgagaaaggagattccggtgacataggaccccctggtcctaatggagaaccaggcctcccatgtgagtgcagccagctgcgcaaggccatcggggagatggacaaccaggtctctcagctgaccagcgagctcaagttcatcaagaatgctgtcgccggtgtgcgcgagacggagagcaagatctacctgctggtgaaggaggagaagcgctacgcggacgcccagctgtcctgccagggccgcgggggcacgctgagcatgcccaaggacgaggctgccaatggcctgatggccgcatacctggcgcaagccggcctggcccgtgtcttcatcggcatcaacgacctggagaaggagggcgccttcgtgtactctgaccactcccccatgcggaccttcaacaagtggcgcagcggtgagcccaacaatgcctacgacgaggaggactgcgtggagatggtggcctcgggcggctggaacgacgtggcctgccacaccaccatgtacttcatgtgtgagtttgacaaggagaacatgtgagcctcaggctggggctgcccattgggggccccacatgtccctgcagggttggcagggacagagcccagaccatggtgccagccagggagctgtccctctgtgaagggtggaggctcactgagtagagggctgttgtctaaactgagaaaatggcctatgcttaagaggaaaatgaaagtgttcctggggtgctgtctctgaagaagcagagtttcattacctgtattgtagccccaatgtcattatgtaattattacccagaattgctcttccataaagcttgtgcctttgtccaagctatacaataaaatctttaagtagtgcagtagttaagtccaaatagtggcaatggggtcttgaattactaccttttaatttctatatggaaaagaactcactttgaccaacacttctgtaaattacattacaatataggttccttcacactattatccatgtaaaaacaattttgctttgcttcaaacccagatttcaggaaaacaacaacaaaattctccaaactttacta

SEQ ID NO: 728951 - DNA, 641 bp, Homo sapiens
aaagaaacaaaattgggatgttcgggttggagagttagcaggggcatctccaggagggtcctgccccccaccccaaagccggcctcagggagttccaggcgttcccacactccccaggcaggacggtggacgcagcgcagacaggaagctccccgagataacgctgcggccgggcggcctgatttgctgggctgtctgatggcccgggccgaggcttctccctgcgcctgggactgcggccgcctctctaaatagcagccatgaggcgcctgggggcagtgtcctcgcgggccagcgacgggcaggacgccccgttcgcctagcgcgtgctcaggagttggtgtcctgcctgcgctcaggatgagggggaatctggccctggtgggcgttctaatcagcctggccttcctgtcactgctgccatctggacatcctcagccggctggcgatgacgcctgctctgtgcagatcctcgtccctggcctcaaagagatagttctgcaggtcaggcatgggtgagaaagtccctgaggctgcggtatctgaagcctccagagcagcatcttcaagggatgcgggagagaagggagacaaaggcgcccccggacggcctggaagagtcggccccacgggagaaaaag

SEQ ID NO: 728952 - DNA, 294 bp, Homo sapiens; identical to SEQ ID NO: 275909

SEQ ID NO: 728953 - DNA, 266 bp, Homo sapiens
  misc_feature (149)..(149): n is a, c, g, or t
  misc_feature (201)..(202): n is a, c, g, or t
gaaagaggtttttaaattctccatgaagtgcactatgttccatcattccttcccaaagccaccggaagcattccttctaggaaaggtggagtcggtagtgagaagccggagtgcccctacagacatacaaggagattgttcactgctgngaggagcaggtcttaactcttgccactgaacagacctatgctgtggagggtnngacaccatcaaccgcctgtcctgctgctctttggccgggtcgtgtgaccagatggcagtttctg

SEQ ID NO: 728954 - DNA, 241 bp, Homo sapiens
gaaagaggtttttaaattctccatgaagtgcactatgttccatcattccttcccaaagccaccggaagcattccttctaggaaaggtggagtcggtagtgagaagccggagtgagaagacccctgagcgatggattcattcattttctgaatttcctatgttaggacagtattagagcccagtaggctttagagccccaagatgagcgtgcattagtgagcagatgtgagggctgtctaca

SEQ ID NO: 728955 - DNA, 524 bp, Homo sapiens
  misc_feature (202)..(202): n is a, c, g, or t
  misc_feature (209)..(209): n is a, c, g, or t
  misc_feature (394)..(394): n is a, c, g, or t
  misc_feature (417)..(417): n is a, c, g, or t
  misc_feature (430)..(430): n is a, c, g, or t
  misc_feature (485)..(485): n is a, c, g, or t
cggccgctcggcggaggggacgggccgggtactctcctccttcctccccgagctccagctgcctggtcaggacctttctctcgctgccgctgggaccccgtgtcatcgcccaggccgagcacgatgccccctaaaaagggaggtgatggaattaaaccacccccaatcattggcaagatttggaacctcactgaaaattggntatcgtnggattgccaaatgtgggacaatctactttcttcaatgtgttaaccaaactagctcaggccttcagccagaaaaacttcccggttctgcactattgatcctaatgagcagcagagtacctgtgccagatgaaaggtttgacttctcttgtgtcaataaccacaaaaccagcaagcaaaattcctgncctttctaaatgtggtggctatngctggcttgtganaggagctcacaatgggcaagggctggggactgctttttatctcatattagtgccntgtgcatgggccattcttttccattcctaacaacgttgc

SEQ ID NO: 728956 - DNA, 3091 bp, Homo sapiens
gtccaatatttgatatacctggaaggctttatccagtcagagagaaattctgcaatttgattggtccacgagacagagaaaatactgcgtatattcaagcgattgtgaaagtcaccatggatatccatttgaatgaaatggctggagacatcttggtttttctgactggccagtttgaaatagaaaaaagttgtgagttactttttcagatggcagagtctgttgattatgattatgatgttcaagataccaccctcgatggcttgttaatattgccgtgttatggatcaatgacaacagatcaacagaggaggatatttttgccaccaccacctggaattagaaaatgtgtcatatccaccaatatttctgcaacgtctttgacaatagatggaatcagatatgtggtagatggtggcttcgtgaagcagttaaatcacaaccccagattagggttggacatcctggaggtggttccaatttcaaagagcgaggcattacagcgaagtggccgagctggcaggacttcttcaggaaaatgctttcggatctatagtaaagatttttggaaccagtgtatgcctgaccatgtgatccctgaaattaagagaactagtttgacatctgtagttctgaccttaaagtgccttgccatacacgatgtcataaggtttccctatttggatccacctaatgagagacttattttagaagctcttaaacaactttaccagtgtgatgctattgacaggagtggccatgtcaccagattgggtttgtctatggtggagtttcctttgcctccacatctgacatgtgcagtaataaaagctgcttccctggattgtgaagatctactacttccaatagcagcaatgttgtctgtggaaaacgtcttcattagacctgttgatccagagtaccagaaggaagcagaacagagacatcgagaattggcagctaaagctggaggatttaatgactttgcaactttagctgtcatctttgaacaatgcaaatcaagtggagctccagcttcatggtgccaaaaacactggattcattggaggtgcttattttctgcatttcgtgtggaagctcaacttcgagaactaatcaggaagcttaaacagcaaagtgatttcccaaaagagacctttgaaggccctaaacatgaagtactacgaagatgtctttgtgcgggctatttcaaaaatgtagctcgaagatctgttgggagaacgttttgcacaatggatggtcgtggaagcccagttcacattcatccttcctcagcacttcatgaacaggaaaccaaacttgaatggatcatttttcatggggtattggttaccaccaaagtctacgcaagaattgtatgcccaatccgttatgaatgggtaagagacttgttacccaagttgcatgaatttaatgcacatgatttgagcagtgtggcccgacgtgaagtgatgaagatctactacttccaatagcagcaatgttgtttgtggaaaacgtcttcattagacctgttgatccagagtaccagaaggaagcagaacagagacatcgagaattggcagctaaagctggaggatttaatgactttgcaactttagctgtcatctttgaacaatgcaaatcaagtggagctccagcttcatggtgccaaaaacactggattcattggaggtgcttattttctgcatttcgtgtgagaagatgcaagaaggagatggacaaataaggaaaatgtaaagcagctaaaggatggaatatcgaaagacgtcttaaagaaaatgcaaagaagaaatgatgacaaatccatatttgatgcacgggctcgtttccttgagagaaagcagcagaggacccaggaccacagtgacacacgaaaggaaacaggctaaggtggtgaaccctccaattcaggaagtgggaaaaggagccaggaaatgtgcttctactttgccagttatttcagacagcactaccaagaggaggtggtcagcacttgttattggcctatgaactaaaagcaaatcaaagctcataaatcaaagctcatcagttcccataaatgcagttgtcaaagaaaagatttggttgccatagtcataagcaatgatacatgaaaccaatgaaagacagtacatgtaataatattttcctcagtacaattttgctggccttaactggtatcaaacgctgtcattgagatgttttcaaagaacattgagttgtatttaatcagcgtgtactccatttgcattgaagcattaaaaattatttttcttaaaatctctttaaggccttcttgttgctgttagaatagtgctatatatcaggtatgtgaccatttatttcagaaggctgaacataagaggtttctactcagcaatacttagatgtctaactgtttaattgctacagagctttatagatatttagagaaaagacttaatcaattagtaaataaaattgcctatgcaggattctttcttgaattaatattaatccttaaattgatttttctgggattatacaaattcctctttatataaaagtatattgtttaaaacagtagctatagccattaaccaaaggacagatgatatatatatatatgatatatatatatatataagttcttttttagctgtacctacgtacttatatcagcaccatgtatgtaggtgtgatagtactttcaaacagcgcctccacctggcctactctgttatttccacctgtttgggtagggccatttaacttccattatgccaaacttgggatgggattttcgaagcagacaacactatttcatcgtgtttcaaattggaaccttgaggctagttagtatcacactcaggccacactcagcacttgcccactcttgtttactgccttgtattctagttatttgtgtatttgtctccctcactagattatacgctccttgtgggcagggactgtgtcttttttcatctttgtatctttcatgcacctagcatagtgctttgcacatagtagtcactcagtgtttgttaaataaagctattagtgtcattaaaattcaaaagacagt

SEQ ID NO: 728957 - DNA, 2459 bp, Homo sapiens; identical to SEQ ID NO: 290139

SEQ ID NO: 728958 - DNA, 2285 bp, Homo sapiens; identical to SEQ ID NO: 290138

SEQ ID NO: 728959 - DNA, 815 bp, Homo sapiens; identical to SEQ ID NO: 285121

SEQ ID NO: 728960 - DNA, 803 bp, Homo sapiens
agcggagaaagctggttccacttcatcttggagatggaggaaagcttgccagaacaactgcacaccccatccactcctcatgttctcagtttgttcttctctgtgatacaaccagcatcacgagaacagccagcagcagctccagcgtgataaaattttcactccttgacaagtgtaagaagccggaaaactgtgcccagccagaagttttgtgtcgcccctttgagatgctgtctaacctccacgagctgcttccgaatcacctgatggagacgctttattcccgcaagagtgaagaggacaagaaaaaatgtgagaatcctgaactctctggcttagaaagaatcttagcaagacatcagttgccaaaagagattaatctgaccccaaagccgaacagaatgcccccgtggaaaagaaaaatcatcaacaatgtaactgacgggtggaagaaatgtcacttgttgaagagaaacacgaaagagcctccaatgtccaccatagttgtcagaaaacttattcaaaaaaatgtacccagaagacacagcctaaggaatacaagcaggaaactgagaaacctgccaacaacagctaaagggacacaaacaggaaaatcacagtgccttctgggtatatcagaacctacctgaaattcacaaactctaaacaatgaatgctcaactctgttgtatgaagtagccacaattaccaaccttcctgcacaaatcaaacaagagatatcttaaaataggaatgatgctgaaactctacagcttttgtgtgaaacacatagaagaagaaag

SEQ ID NO: 728961 - DNA, 1011 bp, Homo sapiens
agcggagaaagctggttccacttcatcttggagatggaggaaagcttgccagaacaactgcacaccccatccactcctcatgttctcagtttgttcttctctgtgatacaaccagcatcacgagaacagccagcagcagctccagcgtgataaaattttcactccttgacaagtgtaagaagccggaaaactgtgcccagccagaagttttgtgtcgcccctttgagatgctgtctaacctccacgagctgcttccgaatcacctgatggagacgctttattcccgcaagagtgaagaggacaagaaaaaatgtgagaatcctgaactctctggcttagaaagaatcttagcaagacatcagttgccaaaagagattaatctgaccccaaagccgaacagaatgcccccgtggaaaagaaaaatcatcaacaatgtaactgacgggtggaagaaatgtcacttgttgaagagaaacacgaaagagcctccaatgtccaccatagttgtcagaaaacttattcaaaaaaatgtacccagaagacacagcctaaggaatacaagcaggaaactgagaaacctgccaacaacagctaaagggacacaaacagtcaaatctcatgagaccagcaggatgaacaggtaacagaggtcaaagagaaagaatgaatgcccacctatggatggaggcagtttagagaaatatgcttgtccaaagtcacaattaactgcactgacacagagaagcagatattgcacttttgctcaactaaataccactttgatgactaagaacgggccctctgggatcagacaaaggaaaatcacagtgccttctgggtatatcagaacctacctgaaattcacaaactctaaacaatgaatgctcaactctgttgtatgaagtagccacaattaccaaccttcctgcacaaatcaaacaagagatatcttaaaataggaatgatgctgaaactctacagcttttgtgtgaaacacatagaagaagaaag

SEQ ID NO: 728962 - DNA, 961 bp, Homo sapiens
attcgcgggccgcggggtcgccgccggccgcccaggcgcggagcctctcgggggtcacccggccgccgggcccgcgggacgcacggggccgccaggggaggacaacaagcctcaggccctgtccctgcgccccgcccggcctcccccgcggggctgcgcagcccactcggccatcctggcctgaaggggccgcccccggcctcgcgggaaagcctgagcctcccgggccttctcgggccttctcggactttcccccaggcgtcctggaccttcttcggccttcctgggcctcctcgggcttccttgaccctccccaggccttccccgaggcctccaggcccttccctgggcctctccaggctgagctctccgcgacatggccagtgggcctctgggacccggggcccggcccacccgcctccaccctccattcccaccgcctgctcacatcaagccaggagcaccgcccggtgagaatcctgaactctctggcttagaaagaatcttagcaagacatcagttgccaaaagagattaatctgaccccaaagccgaacagaatgcccccgtggaaaagaaaaatcatcaacaatgtaactgacgggtggaagaaatgtcacttgttgaagagaaacacgaaagagcctccaatgtccaccatagttgtcagaaaacttattcaaaaaaatgtacccagaagacacagcctaaggaatacaagcaggaaactgagaaacctgccaacaacagctaaagggacacaaacaggaaaatcacagtgccttctgggtatatcagaacctacctgaaattcacaaactctaaacaatgaatgctcaactctgttgtatgaagtagccacaattaccaaccttcctgcacaaatcaaacaagagatatcttaaaataggaatgatgctgaaactctacagcttttgtgtgaaacacatagaagaagaaag

SEQ ID NO: 728963 - DNA, 950 bp, Homo sapiens
attcgcgggccgcggggtcgccgccggccgcccaggcgcggagcctctcgggggtcacccggccgccgggcccgcgggacgcacggggccgccaggggaggacaacaagcctcaggccctgtccctgcgccccgcccggcctcccccgcggggctgcgcagcccactcggccatcctggcctgaaggggccgcccccggcctcgcgggaaagcctgagcctcccgggccttctcgggccttctcggactttcccccaggcgtcctggaccttcttcggccttcctgggcctcctcgggcttccttgaccctccccaggccttccccgaggcctccaggcccttccctgggcctctccaggctgagctctccgcgacatggccagtgggcctctgggacccggggcccggcccacccgcctccaccctccattcccaccgcctgctcacatcaagccaggagcaccgcccggtgagaatcctgaactctctggcttagaaagaatcttagcaagacatcagttgccaaaagagattaatctgaccccaaagccgaacagaatgcccccgtggaaaagaaaaatcatcaacaatgtaactgacgggtggaagaaatgtcacttgttgaagagaaacacgaaagagcctccaatgtccaccatagttgtcagagaagttttgttcacattctttggaatcagaagtggaattcaagcaacactgattcttctcctgatgctgtcctgaaccaacacattgggatcttcaagggtcctttgagttcagttgtcttctcagagatgccaggaagcctcaggtgtatgcatgtctgttcgtatgttgtctacataataccaagttgacttcgtttgttcgttcgtgtgtttttgttgagctaccgggcctggccccacattgacttttaaataaatgtgagtattcataaattaag

SEQ ID NO: 728964 - DNA, 1959 bp, Homo sapiens
aaatctgtggaccgaagcatacaaatggtggtatcttgtctgtttaatccagagaagagactgataaattccgttgttactcaagatgactgcttcaagggtaaaagagtgcatcgctttagaagaagtttggcagtatttaaatctgttggatcctctcagctatctagtttcatgggaagttgctggttttgaatattaagctaaaagttttccactattacagaaattctgaattttggtaaatcacactgaaactttctgtataacttgtattattagactctctagttttatcttaacactgaaactgttcttcattagatgtttatttagaacctggttctgtgtttaatatatagtttaaagtaacaaataatcgagactgaaagaatgttaagatttatctgcaaggatttttaaaaaattgaaacttgcattttaagtgtttaaaagcaaatactgactttcaaaaaagtttttaaaacctgatttgaaagctaacaattttgatagtctgaacacaagcatttcacttctccaagaagtacctgtgaacagtacaatatttcagtattgagctttgcatttatgatttatctagaaatttacctcaaaagcagaatttttaaaactgcatttttaatcagtggaactcaatgtatagttagctttattgaagtcttatccaaacccagtaaaacagattctaagcaaacagtccaatcagtgagtcataatgtttattcaaagtattttatcttttatctagaatccacatatgtatgtccaatttgattgggatagtagttaggataactaaaattctgggcctaattttttaaagaatccaagacaaactaaactttactgggtatataaccttctcaatgagttaccattcttttttataaaaaaaattgttccttgaaatgctaaacttaatggctgtatgtgaaatttgcaaaatactggtattaaagaacgctgcagcttttttatgtcactcaaaggttaatcggagtatctgaaaggaattgtttttataaaaacattgaagtattagttacttgctataaatagatttttatttttgttttttagcctgttatatttccttctgtaaaataaaatatgtccagaagaggcatgttgtttctagattaggtagtgtcctcattttatattgtgaccacacagctagagcaccagagcccttttgctatactcacagtcttgttttcccagcctcttttactagtctttcaggaggtttgctcttagaactggtgatgtaaagaatggaagtagctgtatgagcagttcaaaggccaagccgtggaatggtagcaatgggatataatacctttctaagggaaacatttgtatcagtatcatttgatctgccatggacatgtgtttaaagtggctttctggcccttctttcaatggcttcttccctaaaacgtggagactctaagttaatgtcgttactatgggccatattactaatgcccactggggtctatgatttctcaaaattttcattcggaatccgaaggatacagtctttaaactttagaattcccaagaaggctttattacacctcagaaattgaaagcaccatgactttgtccattaaaaaattatccatagtttttttagtgcttttaacattccgacatacatcattctgtgattaaatctccagatttctgtaaatgatacctacattctaaagagttaattctaattattccgatatgaccttaaggaaaagtaaaggaataaatttttgtctttgttgaagtatttaatagagtaaggtaaagaagatattaagtccctttcaaaatggaaaattaattctaaactgagaaaaatgttcctactacctattgctgatactgtctttgcataaatgaataaaaataaactttttttcttcaaatgtgttt

SEQ ID NO: 728965 - DNA, 424 bp, Homo sapiens; identical to SEQ ID NO: 595022

SEQ ID NO: 728966 - DNA, 613 bp, Homo sapiens; identical to SEQ ID NO: 595019
  misc_feature (21)..(21): n is a, c, g, or t
  misc_feature (33)..(33): n is a, c, g, or t
  misc_feature (35)..(35): n is a, c, g, or t
  misc_feature (537)..(537): n is a, c, g, or t
  misc_feature (545)..(545): n is a, c, g, or t
  misc_feature (549)..(549): n is a, c, g, or t
  misc_feature (552)..(553): n is a, c, g, or t

SEQ ID NO: 728967 - DNA, 390 bp, Homo sapiens; identical to SEQ ID NO: 595024
  misc_feature (239)..(239): n is a, c, g, or t

SEQ ID NO: 728968 - DNA, 418 bp, Homo sapiens
tctttaaatttggattttggtatctttggttttgtagttgactgcagtgtgatgtgaccttacctttataagagccacttgatggagtagatctgtcacattactaagatacgatatttctttttttttccgagacggagtcttgctctgccactgtgcccggccaatacattattattaacttaaggctgtactttattaaggcttccttagtttttgttttgttttgttttttgagatggagtctcactctgtcgcccaggctggaatgcagtggcatgatctcagctcactgcaacctctgcctcctgagttcaaatgattctcctgcctcagcctcccgagtagctgggattacaggcacctgccaccacgcccagctaatttttgtatttttagtaaagacgggggatttcac

SEQ ID NO: 728969 - DNA, 441 bp, Homo sapiens
tctttaaatttggattttggtatctttggttttgtagttgactgcagtgtgatgtgaccttacctttataagagccacttgatggagtagatctgtcacattactaagatacgatatttctttttttttccgagacggagtcttgctctgccactgtgcccggccaatacattattattaacttaaggctgtactttattaaggcttccttagtttttgttttgttttgttttttgagatggagtctcactctgtcgcccaggctggaatgcagtggcatgatctcagctcactgcaacctctgcctcctgaggcaggagagttgcttgaacctggggggcggaggttcagtgagccactgcactccagcctgatgacagagcaagactcagtctcaaaaataaataaaaataataaaacctccataagtaatcctgaaaa

SEQ ID NO: 728970 - DNA, 2087 bp, Homo sapiens
aaaacttaactgctaatagcctgctgttgatcagaagccttacctttggtcctggctggtgctgaaagcgcttgagcacaccgctcctagggctgatgacttctgaggaaccttattggaaaagcattttgctctaagattcagtaaacgctgtcccgtgccaaggaagtggcgtcaacctgaggctctgggatcagacccaccggactcacgccggctctgccacttgttgcccgcagtctcggcccgttccctctgcgttggcaacgggcactgactgtccgatacctcagcgatcgtaggggagtagagacgttcctaatgccgggcgcaccgccggcgggccggcggttccgttggcttccctgacacacttcctacagtcatttctttcagctgagatctttccctttaatacctcgttaattaacgtgtaatcttttggttaaaatgtcacagctaagactaaacccgaagaaaagaatgaaaccacgggaagttcttcagacagtcgccgcaaggttatgggccgaagtggtgcaggggcggcgcccggggaagcgactaacagagctgtgcgcactgggggtgctgcaggcgctgagaagagtgtggagaggctgcgtggagctgcgcgctcggggtgggggttgcactaccaatgaagcgcgtgtttgtcaccacgggatgggttctgcgccagtggggctgggagcccgtccggggctgtacatggggctgcgcgcaaggtgaggactgcgcatgtgggcttggggcctgcgcgcaccggaggctgcaggcgctggggagggtgtggggggctgtgcgtggggctgccctcaccggaagctgcacgctctgggaagcgcagaggcgggggtgctgctcgcgctggggagcacgtgaggggacactcagggactgcccgcgcgaatggcttccaacgcatgcgccccaccccacatttcacagtcgccatgacgaccgggaggtccgcaacggctgcggggacaagtccgttgaggctgccaggcgagtcaggtctctctggacctcgcctgactcggctgggctgtgcctgaaattgacccagctccaccatactccttgattatgagaaaacaaggagtaagctcaaagcggctgcaatcttccggccgcagccagtctaaggggcggcgcggggcctccctcgcccgggagccggaggtagaggaggagatggaaaagtcggccctaggcggcgggaaactgccaaggggctcctggaggtcctccccggggaggatccaaagtctgaaagagcgaaaaggcttggagctagaggtggtggccaagacctttcttctcggccccttccagttcgtccgtaattccctggcgcagctccgggaaaaggtgcaggaactgcaggcgcggcggttctccagcagaaccactctcggcatcgctgtctttgtggcaattttacattggttacatttagtaacactttttgaaaatgatcgtcatttctctcacctctcatctttggaacgggagatgacttttcgcactgaaatgggactttattattcatacttcaagaccattattgaagcaccttcgtttttggaaggactgtggatgattatgaatgacaggcttactgaatatcctcttataattaatgcaataaaacgcttccatctttatccagaggtgagtcataatttgagacaaataatatttgtagagtgatcctctttgtcagataaaaatagtaagcacaatcttgttaagaaagggaggggacgtttcaggtttattaattgtgtgtatccttatagttgagtagaatatcataagttcctctcttaaaatttaaagaccccagaaactgttctctcatgaactcgaagaatgaaccttagtgtgtaaataatggccagggtggtcccatattaaagagtggtgcataaaccaagagaagatgctagagcggactgaaacgagcgatcagagaggcagggggaatcagaagcacagcgttcagtgtcaaagcgacggccagttaaagtgaaataacctttgacaagttgaatatc

SEQ ID NO: 728971 - DNA, 1750 bp, Homo sapiens
ttggtcctggctggtgctgaaagcgcttgagcacaccgctcctagggctgatgacttctgaggaaccttattggaaaagcattttgctctaagattcagtaaacgctgtcccgtgccaaggaagtggcgtcaacctgaggctctgggatcagacccaccggactcacgccggctctgccacttgttgcccgcagtctcggcccgttccctctgcgttggcaacgggcactgactgtccgatacctcagcgatcgtaggggagtagagacgttcctaatgccgggcgcaccgccggcgggccggcggttccgttggcttccctgacacacttcctacagtcatttctttcagctgagatctttccctttaatacctcgttaattaacgtgtaatcttttggttaaaatgtcacagctaagactaaacccgaagaaaagaatgaaaccacgggaagttcttcagacagtcgccgcaaggttatgggccgaagtggtgcaggggcggcgcccggggaagcgactaacagagctgtgcgcactgggggtgctgcaggcgctgagaagagtgtggagaggctgcgtggagctgcgcgctcggggtgggggttgcactaccaatgaagcgcgtgtttgtcaccacgggatgggttctgcgccagtggggctgggagcccgtccggggctgtacatggggctgcgcgcaaggtgaggactgcgcatgtgggcttggggcctgcgcgcaccggaggctgcaggcgctggggagggtgtggggggctgtgcgtggggctgccctcaccggaagctgcacgctctgggaagcgcagaggcgggggtgctgctcgcgctggggagcacgtgaggggacactcagggactgcccgcgcgaatggcttccaacgcatgcgccccaccccacatttcacagtcgccatgacgaccgggaggtccgcaacggctgcggggacaagtccgttgaggctgccaggcgagtcaggtctctctggacctcgcctgactcggctgggctgtgcctgaaattgacccagctccaccatactccttgattatgagaaaacaaggagtaagctcaaagcggctgcaatcttccggccgcagccagtctaaggggcggcgcggggcctccctcgcccgggagccggaggtagaggaggagatggaaaagtcggccctaggcggcgggaaactgccaaggggctcctggaggtcctccccggggaggatccaaagtctgaaagagcgaaaaggcttggagctagaggtggtggccaagacctttcttctcggccccttccagttcgtccgtaattccctggcgcagctccgggaaaaggtgcaggaactgcaggcgcggcggttctccagcagaaccactctcggcatcgctgtctttgtggcaattttacattggttacatttagtaacactttttgaaaatgatcgtcatttctctcacctctcatctttggaacgggagatgacttttcgcactgaaatgggactttattattcatacttcaagaccattattgaagcaccttcgtttttggaaggactgtggatgattatgaatgacaggcttactgaatatcctcttataattaatgcaataaaacgcttccatctttatccagaggtaatcatagcctcctggtattgcacattcatgggaataatgaatttatttggactagaaactaagacctgctggaatgtcaccagaatagaac

SEQ ID NO: 728972 - DNA, 1363 bp, Homo sapiens; identical to SEQ ID NO: 206217

SEQ ID NO: 728973 - DNA, 866 bp, Homo sapiens; identical to SEQ ID NO: 345440

SEQ ID NO: 728974 - DNA, 756 bp, Homo sapiens
gtcagaggagaagaagaaggagtcagtgctatctctaagtaggatttttgagtctgtaaacttgtaaaaatagtggtgtccttaaaacacacacagaaagaaagagaaagaacagattttggggagaaaagatgaacttgactttgaatttactaagctttagataaggaagtaaaacctagatgaaattgcccatcaggcaaaggaaaggtaaggttgaagttagaagtagatttagttgtcatctctgtagaagggattctcaccagacagagattttctaaagaagggactgaggcctgagggaatggctttacttaggaactacaagaagaaaaaaaaaaaaaatgaagaaatggtcattgacctatttgaagcttaggataatcctcaaacaatgagatttcactgtattttgtttttatttatttatttgagacagagtctcgctctgtcacccaggctggagtgcaatggcatgatctcgactcactgtaacctccacctccaggatgcaagcagttctcctgcctcagcctcccaggtagctgggattacaggtgcccaccaccacacctggctaattttatgtttttagtagagacgagttttcaccgtgttggccaggctggtctcgaactcctgacctcaagtgatccacctgccttggcctcccaaagtgctgagattacaggcatgagccaccgtgcctggctgtgtattttcttttgcttagccttatgttaaaagctccca

SEQ ID NO: 728975 - DNA, 521 bp, Homo sapiens
gtcagaggagaagaagaaggagtcagtgctatctctaagtaggatttttgagtctgtaaacttgtaaaaatagtggtgtccttaaaacacacacagaaagaaagagaaagaacagattttggggagaaaagatgaacttgactttgaatttactaagctttagataaggaagtaaaacctagatgaaattgcccatcaggcaaaggaaaggtaaggttgaagttagaagtagatttagttgtcatctctgtagaagggattctcaccagacagagattttctaaagaagggactgaggcctgagggaatggctttacttaggaactacaagaagaaaaaaaaaaaaaatgaagaaatggtcattgacctatttgaagcttaggataatcctcaaacaatgagatttcactgtattttgtttttatttatttatttgagacagagtctcgctctgtcacccaggagaatcacttaaggccaggagtccagcctgggcaacatagcaggatcctatcccttta

SEQ ID NO: 728976 - DNA, 585 bp, Homo sapiens
  misc_feature (13)..(13): n is a, c, g, or t
  misc_feature (19)..(19): n is a, c, g, or t
  misc_feature (21)..(21): n is a, c, g, or t
  misc_feature (29)..(29): n is a, c, g, or t
  misc_feature (32)..(32): n is a, c, g, or t
  misc_feature (123)..(123): n is a, c, g, or t
  misc_feature (147)..(147): n is a, c, g, or t
  misc_feature (157)..(157): n is a, c, g, or t
tcacatggcatgnaagttngntgagctgnagnaaaagattgatcgtcgttttggtaaaagctggaagatggtttcacattcttgaagtctggtgatgctgttattgttgatatggtttttggncagtctatgtgtgttgagagtttnttagactatncacttttgggtcgctttgctgtttcgtgatatgagatagatagttgcggtgggtgttattaaagcagtggataagaaggctgctggagctggtaaggttattaagtttgtctagaaagtttagaaggctaaatgaatattatccctaatacctgccaccccactcttaatcagtggtggaagaacggtctcagaactgtttgtttcaattggccatttaagtttagtagtaaaagactggttaatgataacaatgcattgtaaaaccttcagaaggaaaggagaatgttttgtggaccactttggttttcttttttgcgtgtggcagttttaagttattagtttttaaaatcagtactttttaatggaaacaacttgaccaaaaatttgtcacagaattttgagacccattaaaaaagttaaatgaga

SEQ ID NO: 728977 - DNA, 1269 bp, Homo sapiens
catctttcatatcttgatatgcagctgcatcagatggaaaaaaatttactaaagcaccctgttaaagagctggtgtgctccagtgaggccctctccttttctcagcacagtgtggcagtggtaatctattcaaattttgcctgttacacaaaataatccacttatatatacagtcagccttccgtacttgtgggttctgcatctgtggattccaccaactgtagatggaaaatactcaaaaagaaagttgtgtctgtactgaatatgtacagactttttccttgtcattattccctaaacaatacagcgtaacaactatttaaataggatttacattgttttaggtattataaattacctagagatgatttaaagtatatgggaggatgtgcataggttatatgcaatttctgcaccattttatgtcaaggattttgaacatcctcagattttggtgttcgagggcatcctggaatcaattccccatgataccgagggatgactggatattaatcgatttccctcaagcctgcccttgctgtgaactagtgctacaagcacgggaaatccatctgctctctggcttaaaatatgtatctcatctaaaattgttcgttaaagtgtgaataaattgctaagtggttgttgcttagcaataatttttgcctgaccatcagcagagcttttatttacctttgtaattaaaatccaacatagcatgggctcttgggcaaaatatttcactgactattaagcatgtagaacaggaaaatgaaatacactatttgtgcccttgacctagaaccagaaccactaattatgagaactttgttttatgtaccaaattcacattgaccattttctgagctctagactgatcgtagtaagttttgtgacttaacaatgaaagaaagtagaaagatgctttgggttttcaaaatgttgttttttaaaattgttctttgggtgaatttactcagtgctgctttgagttgtatacagaaacaaatgttgggaattgctcctcagaaatgtgttcctaagttgtgttttcaactttacatcatgaggtgaagcattagggaaagagattctttcgatttgtttaataatctaattatacagaccaaagtgctttacgtttctgctctatgttaatgttttagaatggtgattttgctgattaatttagacctggaattgaaataatgtgctcagaataataacatggttatagttcttgtatgataaagtattcaatttcagaat

SEQ ID NO: 728978 - DNA, 973 bp, Homo sapiens
tccggctgcccgcgcacctctccacgccggccccgttccgcggctcgccctcggctgcgctcggctcccgcgggcgctcggccccgagcccctcctccccctacccgccggccggacagggaggagccaatggctgggcctgccatccacaccgctcccatgctgttcctcgtcctcctgctgcccctggagctgagcctggcaggcgcccttgcacctgggacccctgcccggaacctccctgagaatcacattgacctcccaggcccagcgctgtggacgcctcaggccagccaccaccgccggcggggcccgggcaagaaggagtggggcccaggcctgcccagccaggcccaggatggggctgtggtcaccgccaccaggcaggcctccaggctgccagaggctgaggggctgctgcctgagcagagtcctgcaggcctgctgcaggacaaggacctgctcctgggactggcattgccctaccccgagaaggagaaccgacctccaggttgggagaggaccaggaaacgcagcagggagcacaagagacgcagggacaggttgaggctgcaccaaggccgagccttggtccgaggtcccagctccctgatgaagaaggcagagctctccgaagcccaggtgctggatgcagccatggaggaatcctccaccagcctggcgcccaccatgttctttctcaccacctttgaggcagcacctgccacagaagagtccctgatcctgcccgtcacctccctgcggccccagcaggcacagcccaggtctgacggggaggtgatgcccacgctggacatggccttgttcgactggaccgattatgaagacttaaaacctgatggttggccctctgcaaagaagaaagagaaacaccgcggtaaactctccagtgatggtaacgaaacatcaccagccgaaggggaaccatgcgaccatcaccaagactgcctgc

SEQ ID NO: 728979 - DNA, 429 bp, Homo sapiens
aataatagagacagtctttcattcctagtgccaggacccgtctcgggtcaacgaaatctgagacagtcaaggtaacagaggcagctgttcgaatagattcattggagagtctaaggcagctctccggaccaagctgtaaagcagataagatagaaataatcactctggtaccacagcagacaggccttgtaggtactgggccgctcacagcttaatccgacttagaaagcatttttgcctctgaccttctagttgaaacaaaattagttaccagtagacttaggcgaatgctacactgcacacaggcgcataaccccaacctatataaacactaagacaattgttgacactttgagttggcctggtggaattatctccagccttctgcctgtatctggttacagcaataaattcccttctttcctagtc

SEQ ID NO: 728980 - DNA, 740 bp, Homo sapiens; identical to SEQ ID NO: 217386

SEQ ID NO: 728981 - DNA, 869 bp, Homo sapiens
acaaattcactggttatttaaaaagactatgcttgtaaatgacatatcatttttatactgcaactcacaagattctcttcttgtctgtgacttttgaaattgtgtttatatatgtgtttgttataaatatcattgtgtgtatcctaatttgttgagcttcttcatttgtacataactttttttttttttaacttttaggattttttagttatttatttttgtattttgcttatgtagtttgtgtaattttataaatttgatatgtaaaatatattcatctgagtctaggaagtggtgtaatttgttacttttatgtctttcagttatatattctcatttcactgaagacctttggccagagcatagcataaaagattcttttcaaaaagtgatactgagaggatatggaaaatgtggacatgagaatttacaattaagaataagttgtaaaagtgtggatgagtctaaggtgttcaaagaaggttataatgaacttaaccaatgtttgagaactacccagagcaaaatatttcaatgtgataaatacgtgaaagtctttcataaattttcaaattcaaacagtcataagaaaagaaatactggaaagaaggttttcaaatgtaaagaatgtggcaaatcattttgcatgctttcacatctaacacaacatataagaattcacactagagagaattcttacaaatgtgaggaatgtggcaaagttcttaactggttctcagagcttattaaacataagggaattcatatgggagagaaaccctacaaatgtgaggaatgtggcaaagcctttaaccaatcctcaacccttattaaacataagaaaattcatattgaagagaaacccttca

SEQ ID NO: 728982 - DNA, 954 bp, Homo sapiens
agcggacaggacggcttccgggatttggcggggcctttgtctctagctgctgcgggagctccaggtctagtctttactgctctgtgtattctgctcctagaggcccagcctctgtgactccgttatctgcaggtattgggagatgcacagctaagatgccaggaccacctggaagcctagaaatgggaccactgacatttagggatgtggccatagaattctctctggaggagtggcaatgcctggacactgcacaacggaatttatataggaaagtgatgtttgagaactacagaaacctggtcttcctgggtattgctgtctctaagcctcacctgataacctgtttggagcaaggaaaagagccctggaataggaagagacaggagatggtagccaaacccccagttatatattctcatttcactgaagacctttggccagagcatagcataaaagattcttttcaaaaagtgatactgagaggatatggaaaatgtggacatgagaatttacaattaagaataagttgtaaaagtgtggatgagtctaaggtgttcaaagaaggttataatgaacttaaccaatgtttgagaactacccagagcaaaatatttcaatgtgataaatacgtgaaagtctttcataaattttcaaattcaaacagtcataagaaaagaaatactggaaagaaggttttcaaatgtaaagaatgtggcaaatcattttgcatgctttcacatctaacacaacatataagaattcacactagagagaattcttacaaatgtgaggaatgtggcaaagttcttaactggttctcagagcttattaaacataagggaattcatatgggagagaaaccctacaaatgtgaggaatgtggcaaagcctttaaccaatcctcaacccttattaaacataagaaaattcatattgaagagaaacccttca

SEQ ID NO: 728983 - DNA, 1142 bp, Homo sapiens
agcggacaggacggcttccgggatttggcggggcctttgtctctagctgctgcgggagctccaggtctagtctttactgctctgtgtattctgctcctagaggcccagcctctgtgactccgttatctgcaggtattgggagatgcacagctaagatgccaggaccacctggaagcctagaaatgggaccactgacatttagggatgtggccatagaattctctctggaggagtggcaatgcctggacactgcacaacggaatttatataggaaagtgatgtttgagaactacagaaacctggtcttcctgggtattgctgtctctaagcctcacctgataacctgtttggagcaaggaaaagagccctggaataggaagagacaggagatggtagccaaacccccaggcagaactggccgtgaactgtggctcagggagctggaactgagtcatcgaactgcttcagaaaccacagtaaaggacaaggtctgcaggcctgcctgcgtggctataaatggctgtcttcctccaggcctctggaagggcacggtctctcccagactgtggctgggaggagtttgggatgattagagattatatattctcatttcactgaagacctttggccagagcatagcataaaagattcttttcaaaaagtgatactgagaggatatggaaaatgtggacatgagaatttacaattaagaataagttgtaaaagtgtggatgagtctaaggtgttcaaagaaggttataatgaacttaaccaatgtttgagaactacccagagcaaaatatttcaatgtgataaatacgtgaaagtctttcataaattttcaaattcaaacagtcataagaaaagaaatactggaaagaaggttttcaaatgtaaagaatgtggcaaatcattttgcatgctttcacatctaacacaacatataagaattcacactagagagaattcttacaaatgtgaggaatgtggcaaagttcttaactggttctcagagcttattaaacataagggaattcatatgggagagaaaccctacaaatgtgaggaatgtggcaaagcctttaaccaatcctcaacccttattaaacataagaaaattcatattgaagagaaacccttca

SEQ ID NO: 728984 - DNA, 827 bp, Homo sapiens
agcggacaggacggcttccgggatttggcggggcctttgtctctagctgctgcgggagctccaggtctagtctttactgctctgtgtattctgctcctagaggcccagcctctgtgactccgttatctgcaggtattgggagatgcacagctaagatgccaggaccacctggaagcctagaaatggtattgctgtctctaagcctcacctgataacctgtttggagcaaggaaaagagccctggaataggaagagacaggagatggtagccaaacccccagttatatattctcatttcactgaagacctttggccagagcatagcataaaagattcttttcaaaaagtgatactgagaggatatggaaaatgtggacatgagaatttacaattaagaataagttgtaaaagtgtggatgagtctaaggtgttcaaagaaggttataatgaacttaaccaatgtttgagaactacccagagcaaaatatttcaatgtgataaatacgtgaaagtctttcataaattttcaaattcaaacagtcataagaaaagaaatactggaaagaaggttttcaaatgtaaagaatgtggcaaatcattttgcatgctttcacatctaacacaacatataagaattcacactagagagaattcttacaaatgtgaggaatgtggcaaagttcttaactggttctcagagcttattaaacataagggaattcatatgggagagaaaccctacaaatgtgaggaatgtggcaaagcctttaaccaatcctcaacccttattaaacataagaaaattcatattgaagagaaacccttca

SEQ ID NO: 728985 - DNA, 2057 bp, Homo sapiens; identical to SEQ ID NO: 217153

SEQ ID NO: 728986 - DNA, 2260 bp, Homo sapiens; identical to SEQ ID NO: 289176

SEQ ID NO: 728987 - DNA, 2623 bp, Homo sapiens; identical to SEQ ID NO: 289180

SEQ ID NO: 728988 - DNA, 2338 bp, Homo sapiens; identical to SEQ ID NO: 289177

SEQ ID NO: 728989 - DNA, 2543 bp, Homo sapiens; identical to SEQ ID NO: 289181

SEQ ID NO: 728990 - DNA, 1028 bp, Homo sapiens
cccctccacaccttcccacttgaaccggcaccgacctgagggagagggggccgggaagcgctggacgcccggggtcgggggaacgggcgtgggaggcgtctggacctgctgcctccgctccagtgctgggcggggcttcccggcctcccatggggggagggagagacccagggggagggacccacggagggatgcgaggcgggcaggagtcagcccgttggagacctgggcgagggagacgccgagagctaggctcagtgggagggggcgggcgtagaggctgaggcaccgcccagagctcgctgagacagagactgagaacgcccccggccagattccccccggagagacccgggtagggacagggacagagagacgcctctaggggcagaggccctgggaggcaaagacccccaggagagatttacccaccccagacggaaagcgcggctcagagtcggacgaggggagactgtcagaggacaacgccccctaggtctcctgggagaccccgaagcgaccccgggggcagcccgggccgtgtccgggcgagggtgacctatccttggttgagagcgatggggacacaagccctgcagggcttcctctttctcctcttcctcccgctgctgcagccgcgtggggcctcggctgggagcctgcacagtccaggcctgtccgaatgcttccaggtgaatggggctgactaccgcggccaccagaaccgcactggcccgcgcggggcgggccgcccgtgcctcttctgggaccagacgcagcaacacagctacagcagcgccacggccccagcggcacctccacgaagctcacggtccaggtgtgcctacgcttctgccgcatgaaggggtaccagctggcgggcgtggaggccggttacgcctgcttctgtggctctgaaagcgacctggcccggggacgcctggcccccgccaccgactgtgaccagatctgtttcggccaccctggacagctgtgtggcggcgatgggcggctgggcgtctatgaag

SEQ ID NO: 728991 - DNA, 202 bp, Homo sapiens; identical to SEQ ID NO: 289179

SEQ ID NO: 728992 - DNA, 561 bp, Homo sapiens
ggttgtggagcttctccctttcacagagtccctgatctccgaaaatttggttgagatgtaaggttgattttgctgtacaactccttttttgaagttttactcatttccaacaaggaaggcaagttttcctgcttccattgacaaaggagagcaggcacctcctttcctgagtttcagcttgcttctgacagggaaggtgagtgtaagtttttccagcttctaagatggcagagaatgatcacccagtctgagccttatttccaggtaagtagctgaattagagttttgtcttaaaatttttgtttaatgactaaaatttaagattacccaccagctgcttttaattcctccttaccattagaacactcagttaatcatatgaattgtgcatttgtttgttttgcttaactctttttgtttatgtttggggttttattgttgtttcacttttctcccatctcttcctgacttggtcaaatccaaaggaatgttccaaattgtggggagcaaggcatctgaattggctaaaactcctgtggctgcaaaacaaaaacaaaacaa

SEQ ID NO: 728993 - DNA, 942 bp, Homo sapiens
gtatcgacgtgagattttgcaaatttgaaccataggttatatttgtaagattgttctctcagttattaagagtttgaaattggggttgaactgtgtctaaagctatggtttatgtgtatgtttagtttatgtagttgctgtgtgcataacatttggcaggggaaaatgtttttactttcaaacaaactgacaagaaattgttccatcttgaatttgtgtaagaacgtttcagaactaaaacaaacttaccaaaactaggtcttgtccattaaatgagataatgcgtgtaatgtgtctagcaagtacttggaaattattattgttaagactgtcttatagtctaacttatcaactacaatgatgcctcttctgaatttcctaatttcttgcctttatctttttttttttttaattatactttaagttctgggatacatgtgcggaatgtgcgggtttgttacataggtatacatgtgccatggtgatttgctgcacccatcaacctgtcatctaggttttaagccccacatgcattaggtatttgtcttaatgctctcttgccttttatcttttttatgatgaggattatatatatacacacacacacacaatgcctcctgtatgctcagtatcacttttagccaataaaattgagattctggccaggcacagttgctcacacctgtaatctcagcattttaggaggccaaggcaggtggattgcttgagctcaggagtttgacactagcctgggcaacatggcaaaaccctgtctctacaaaaaattaactaggcatggtggtgtgtgcctgtagtcccagctacttgggaggctgaggtgggaagatggcttgagcctgggaggcggaggttgcagtgagtcgagccgagatcacacaccactgcactccagcctgggcaacagagccagaccctgtctca

SEQ ID NO: 728994 - DNA, 1073 bp, Homo sapiens
cttagactttttctagaatattattggccaagtgatttcaggttctctgtggactggtgggggaaggggtgaggagactattggtagaaactgtattatacgaaatccaattgttctttatgaaacccaaataggattcctcagaccctggcactaaagaaaaaatatataccctgagacttttccaaaaccttaaatttgaaaatcctactagcatgtgattacgatgcccccctaaaacacagtatattattatatttttaggagagtcactacttaccataaactgaaaaattttaagaattaacatagacatgaagcctcaaagtaaatcaacgtattactattcatcttggattctcaaaccccctgccctttgatgcgaaatgtaataaatacatcatattaatactttgtagttggcagggtagaagccagcttgaaaggcagatgctggccagacagctaggctcactcgctagcgaaatgactcgcatctgcgaatttaaaagtcatgatacgtcatccaccttcaggattacttgtgaatgtttgcaacactggatattaattaaatccttaaatgctggatatctattgcacatatccgaacaatttgtggtgacactaaaggaatttttgtttcttcaggtatggctatcctgatccttcttacctgaaacgtgtcaaagaggagctgaaagctaaaggaattgagtaagacaactgctggaagatgtcttaaatcaagctttcaaaaaaatatattttaggaggctgatttaatgccagtctaaatccttatgtagaaaggactttgaaatttttcttctcaagaaatggtttgtataagaataacaatctgctagtctgtcatttctggagtgatacttttttttttgagacggagtctgctctgtcgctcgcgctggagtgcagtggcatgatctcggctcactgcaagctccgcctcccaggttcatgccattctcctacctcagcctcccgagtagctgggactacaggcgcccaccaccatgcccggctaatttttgtttttgtatttttagtag

SEQ ID NO: 728995 - DNA, 427 bp, Homo sapiens
gaaatgcggcaatttgtggatgtggatataagtagactctatagcagtggaattggtgttttaagagctgctgatcggggatggtaatctcaaagacagaaagattggtctccatcaacttctaccgtgccagctataaagtactatggagttatttaaattttgcaccaaaggacagggggcttttgaatccgagatgaatactatataagctgatttaatttgaggcgttgtgtctatctgaaggctagaggctcggaatgtcactttgcttccttttaaggtcacctttttttttcaccccttcccccaccagtccacagagaacctgaaatcacttggccaataatattctagaaaaagtctaagttgtgaggagactattggtagaaactgtattatacgaaatccaattgttctttatgaa

SEQ ID NO: 728996 - DNA, 4049 bp, Homo sapiens
ctgagacctgagatgctcccatgagttttgaatatgctctgctccttacagcaaagacaccatttttaaaagtaccattcttttgactttgctgttcccaaggcttctgtgatattccggcccctccgtttaaaagccatcagatttgagagcaataagtcttcaaaaccgggaatttacattgtttttcagctgaccgacttccaggaaaaggactcaaccgcatctacccaaataccgtggcactgcttgcgctctttgccaccggatactccccttccaatgagactttctgattgtgtctaccaactctcctattaggaaacccgtgggttgcatgcagctattctgttgtattctcattctcactctccctcccttctctcactctcactcttgctggaggcgagccactaccattctgctgagaaggaaaagcccgcaactactttaagagattaagacaatatgcgcaatcctcgcctttcctagcaatcactatttaaatctggcaagaactgacaacagtctttgcaagaatggaatccgtaaaacaaaggattttggccccaggaaaagaggggctaaagaattttgctggaaaatcactcggccagatctacagggtgctggagaagaagcaagacaccggggagacaatcgagctgacggaggatgggaagcccctagaggtgcccgagaggaaggcgccgctgtgcgactgcacgtgcttcggcctgccccgccgctacattatcgccatcatgagcggcctgggcttctgcatctccttcggtatccgctgcaacctgggcgtggccattgtggacatggtcaacaacagcaccatccaccgcgggggcaaggtcatcaaggagaaagccaaattcaactgggacccggaaaccgtggggatgatccacggttccttcttttggggctacatcatcactcagattccgggaggctacatcgcgtctcggctggcagccaacagggttttcggagctgccatacttcttacctctaccctaaatatgctaattccatcagcagccagagtgcattatggatgtgtcatctttgtcagaatactgcagggacttgttgagggtgtgacctacccagcatgtcatgggatatggagcaaatgggccccacctctagagaggagtagactggcaaccacctccttttgtggttcctatgccggagctgtgattgcaatgcctttagctggcattcttgtgcagtacactggctggtcttcagtgttttatgtctacggaagctttggaatggtctggtacatgttttggcttttggtgtcttatgaaagtcctgcaaagcatcctactattacagatgaagaacgtaggtacatagaagaaagcattggagagagtgcaaatcttttaggtgcaatggaaaaattcaagactccatggaggaagttttttacatccatgccagtctatgcaataattgttgcaaacttctgcagaagctggactttttatttattgcttattagtcagccagcatattttgaggaagtctttggatttgaaattagcaaggttggtatgctatctgctgtgccacacttagtaatgacaattattgtgcctattgggggacaaattgcagattttctaagaagcaagcagattctttcaactacgacagtgagaaagatcatgaattgtggtggttttggcatggaagccacactgctcctggtcgttggctattctcatactagaggggtagcaatctcattcttggtacttgcagtgggattcagtggatttgctatatctggtttcaatgttaaccacttggatatcgctccaagatatgccagtatcttaatgggcatttcgaatggtgttggcacattgtcaggaatggtttgtcctatcattgttggtgcaatgacaaagaataagtcacgtgaagagtggcagtatgtcttcctgatcgctgccctagtccactatggtggagttatattttatgcaatatttgcctcaggagagaaacaaccctgggcagacccggaggaaacaagtgaagaaaaatgtggatttattcatgaagatgaactcgatgaagaaacaggggacattactcaaaattatataaattatggtaccaccaagtcttatggtgccacaacacaggccaatggaggttggcctagtggttgggaaaagaaagaggaatttgtacaaggagaagtacaagactcacatagctataaggaccgagttgattattcataacaaaactaattactggatttatttttagtgtttgtgattaaattcattgtgattgcacaaaaattttaaaaacacgtgatgtaaacttgcaagcatatcaaccaggcaagtcttgctgtaaaaatgaaaacaaaacaaacccatgaggttaccatcaagtgcaatctgtaaaattgtgaagttccatcatttccattcaagtcatccattcttgcatttgtgacttaaaggttgactggtcaaaattgtagaaacaagtagttacccattggattcatatgagctaaaactcatcactatttactaaagcacaacatctcatcctacaaaagttaagaagccaaagctacttgatcatgcaaaatgcacttatatatttgttacactgtattgcaagatagcacacagaagttggctgcgtcaagtagaggcgacatttattaagtgaaaatcatggagttgggatatctctcaattaaagaaatacattgtgaactatcagctacaaagttgtactgaataactattagaattgcataatgtgagatattttgttagtcctcaaaaggaatatcttgcagtgttttctatgaaatgcttgggcacaaacacttatttctgtgaaagagaacatgtaagttgaggggtatgcttcatgttcttccatccatttacctaatagtatgaaacagttcacatttcaataaaatcaaacttttcatgtagcgtatcacataacttttttgcaaaaaatataaaaagaaataaacttcaatgtattttttattacaactttgtactggttgtaacttgcattagaaaaaaaaaagagatatataaaccacaaagaatctaataagaaatttattatggagatatagcccttaaaatgcaatattaagaacaaagaaatagaaaatggtttagatatctttcttccttcataattaaatactatatgaaacttgtgccacagagctatatgtaatatgaaaagattaacttcatagagatattgtaagtaggtaattttattatttaaagtcctattaagaaatatttgtcttaaatatataggacaatacattatattaaaatggtctctctctatatatatctgtatatcttatacatgtccatacacagaaacataataaacaatcttcacacgaaaccaaaaatagcatacacctaatgttgggttagggaattgcaatttctactttcatagagtcatagaattttaggtggggaagaggcattttgcttgtcatttcttaatataactcaacaagaattgcaacatttgtgtaccaagcaataagtgcaatgcataaaatttcctgtctgtatattaccttcattttgcttgtagtagctgtttgggtggttggaataattttatttttcttttaaaaaagctaacatcagacccctttataatgtcctaaaattatgataatacatttcccaattcaactcaaaatattattggtgtattttgtctattctggatatttgatctgtttaatgtactgtgctagtgactggaggccctgctactgcaaatataaaacctaaagtttgtttaaaaaaatgcaaatcattctttaccttaagaaaaaaaaaataccctttgctttgtgcctcaaagtgatgtaatgtgatcacagcttttgttgtgttgaatgaaaatatgtggactgtcattttgttgcagcaaaaaagtgttaataaaatgctctatttatccttttttta

SEQ ID NO: 728997 - DNA, 537 bp, Homo sapiens
acacacgatcatcaacacatacttagcctttttagatccataaagtccagaaggcagtagggatcccaagacgacctcacccaaagggctccctggctctcctctgatggaggggcactgcttgcttggcccggtcccctccgtgccagttcccaggcgcactctactccagcccttctccctccctcccttcctccctctcctggcccaccctgctcttccctcgccctgcaaattaggtgggtgtggcaagggcaccgcctggtcccaagtgtccctctgtacccacacccacccactcacttgtaagctccttgatgagcaaacccctaaggcccccagctcagactcagcaggcattcaggtcaactcaggcagactggctaaggaccagcccagggcaattttgcagaaatgatcatttgcacagaatgggtttccttcacagggagaaacttgcctctgaaagctattttctgatcaagaaaaggcccactttttaaaaagtgaaacaagtttgcagatacggttctcttc

SEQ ID NO: 728998 - DNA, 637 bp, Homo sapiens
ggagcaagctgccagagagagggtgtcagagagcttcagaggagcccttttgagtcttctgctcagtaatgatcagcacatattgattttatttttaactgacatgaggccatttctgcccacgctcttgatgcttagtaaaacatgaacgagcctgttaaagcaacatgcaggagatggagaagttcggccacatgcccattgctttcctgcgagtggcaggagagtcttctgtcactgggaccagaatgtgcctagaggcaggaaatctcaacacgactgtgagatcagaccacaatccacaaagcgctgctgtttctctcaaaggcaggttctcaggctgagccgtagatttggagaaagcacccctcacccagctccacatctgtgtgtctgcgtgcacacgtgtgtaaaacatggtgtatgtgttctcaaacattcacgaaattagaaatgttgagagagatgaaaataaatataaaaatactgctgtgatacatttttcttgccgcacccacaactggactgtgtacatgggccctctttaggagacttaaactcaatgctgaaacactttgcacaatgcctggcgtgttatgcactcaataaacattagtgtctatcgttaaaaaaaaaa

SEQ ID NO: 728999 - DNA, 578 bp, Homo sapiens
cgtctcccattccaggcttcctcttcaagactgtgtggtggtgtggcttcatttcgcagagaaggggcgtggaaaggtaaaaccatcttcttggacgtgggtctgctcctctctgccggacaatgtgctaccgtggggcttttgtcctgggctgcagtgtggtcctctcgatcctagaaaagaggccgctcaggatggggatgagacttccattgctccgggcccgatgcatcccctcacgttatcgaggcctgcacagacccaaagtggaaccgccgcgaagacgatggacagctggccgcaggacccagggagagacgcagaaagaggctcaccaaagaccggtccacataaaagacatccctttttgacgcacagggcacattcgtccaaagacacacacacacacacacacacacagagggaaagaagcacacagagggtgagagacagagagagaagggagaatgggagacacagccccacacacagtcctaccgcggtggccgagaaatacacgccccaggcaaccctgcggctgccgggttctgctctggaggggaacaaccctcggctga

SEQ ID NO: 729000 - DNA, 495 bp, Homo sapiens
tcctctcctgccggacaatgtgctaccgtggggcttttgtcctgggctgcagtgtggtcctctcgatcctagaaaagaggccgctcaggatggggatgagacttccattgctccgggcccgatgcatcccctcacgttatcgaggcctgcacagacccaaagtggaaccgccgcgaagacgatggacagctggccgcaggacccagggagagacgcagaaagaggctcaccaaagaccggtccacataaaagacatccctttttgacgcacagggcacattcgtccaaagacacacacacacacacacacacacacacacacacacacacacacacagagggaaagaagcacacagagggtgagagacagagagagaagggagaatgggagacacagccccacacacagtcctaccgcggtggccgagaaatacacgccccaggcaaccctgcggctgccgggttctgctctggaggggaacaaccctcggctga

SEQ ID NO: 729001 - DNA, 1379 bp, Homo sapiens; identical to SEQ ID NO: 286033

SEQ ID NO: 729002 - DNA, 376 bp, Homo sapiens; identical to SEQ ID NO: 233459

SEQ ID NO: 729003 - DNA, 432 bp, Homo sapiens; identical to SEQ ID NO: 233460

SEQ ID NO: 729004 - DNA, 347 bp, Homo sapiens
  misc_feature (43)..(43): n is a, c, g, or t
  misc_feature (45)..(45): n is a, c, g, or t
gttgagcccaaagagcttgcttacttgctgggaggcagggcgngnagacgctgacttcaggacgacttgggcctgcagaggtcgccaggaggcccaagctggcgcggaggagcccaccgaccggagaccgtttggggcctggagacgccatcggagggcaggagctgatcctggagaggccaccgtgagcctgacctgggcctggggagcttggcttgaggaagctgtgggccgaccaaggccgccagaggatgggcaggcgctgagtccaaagaggttgttgggaggcagcagtcgggcctggagacgcagccgggaggaagagctgggcccggagaggacgccgg

SEQ ID NO: 729005 - DNA, 871 bp, Homo sapiens; identical to SEQ ID NO: 343124

SEQ ID NO: 729006 - DNA, 507 bp, Homo sapiens
actaggaaaattgaaatgggcacagaaattccttgttcgagagccttctggttatactttaaaaagaagggagcctagcatcttgtcaaatctttgagcccactcactcagagggcctgtcactcatccagaattgaatctgctggtttaacaggtcaggcagtgtgatttgacagcgtgaatcttagagtccagcctttgaacctggcgctgaatcctgactttactgcttattcagggggccactagctaagttaatttgtgagcctgggcaacatggcgtgacccatctctacaaaagatacaaaagttaactggatgtggtggtgcatgcctgtggttcatagctactctggaggctgaggcgggaggatgacctgagtgcgggaggttggggttgcagtgagctgaagttgcgccactgcactccagcctgggtgacagagtgagaccttatcttaatctaaaaaataaaatttctgagcccataaaacagggccaggctca

SEQ ID NO: 729007 - DNA, 749 bp, Homo sapiens
aattcgcggccgcgtcgacacgacagaagggggactgcgataggaatcatgtctggtcgcggcaaaggcggaaaaggcttggggaagggtggtgctaagcgccatcgtaaggtgctccgggataacatccagggcattacaaaaccggctattcgccgtttggctcggcgcggtggcgtcaagcgcatttccggtcttatctatgaggagactcgaggtgtgcttaaggttttcttagagaacgttattcgagacgccgtcacctatacggagcacgccaagcgcaaaactgtcacagccatggatgtagtatatgccctaaaacgtcaggggcgcactctgtatggcttcggcggctgaatctaagaatacgcggtctcctgagaacttcaaaaaaaaaaaagaaaaaaaaattataaaaaaaaacatgtggccgcccttggtccaacaagtcttttaatttcttcaagctttttcatttcggcgccaaattaagcgatcttttggccaaatacccccttataaggggggggttttaacaaaaaaaggggcccgcgttttaaaaacagttgatttgtgaaaaaccctgggggtcccacactaaaagacctttttgaacaaaaacccttttttgcgggcggtgggattaacaaaaaagcccccacccaaagggtcttttcaaaaaaatgggccccctttaaggggcaatgaaaaatttgccggcctaaatattttttaccccgcgattt

SEQ ID NO: 729008 - DNA, 750 bp, Homo sapiens
  misc_feature (113)..(113): n is a, c, g, or t
  misc_feature (694)..(694): n is a, c, g, or t
aatacagcgcattcaacttgcaaacacccttccactcccacaaagagcaagctgtcactggccaatcaaaacaatgaaccataatgaaacagtttttcttgctccacccactnggtgaccaaatttgaaaaaaaaaaaaaaccgcgccaactcatgttgttttcaatcaggtccgccaagtttgtatttaaggaactgtttcagttcataccttccactgcgataggaatcatgtctggtcgcggcaaaggcggaaaaggcttggggaagggtggtgctaagcgccatcgtaaggtgctccgggataacatccagggcattacaaaaccggctattcgccgtttggctcggcgcggtggcgtcaagcgcatttccggtcttatctatgaggagactcgaggtgtgcttaaggttttcttagagaacgttattcgagacgccgtcacctatacggagcacgccaagcgcaaaactgtcacagccatggatgtagtatatgccctaaaacgtcaggggcgcactctgtatggcttcggcggctgaatctaagaatacgcggtctcctgagaacttcaaaaaaaaaaaagaaaaaaaaaaaaacccaaaggcccttttcagggccgctcacaaagtcgtttaaagagctgaaatgcgttgcgagaatgagtttggatgacagaaataaccgtgacancctgcataagaatgaattgtgtttgccatgaccggccacactgtgacaaaatttca

SEQ ID NO: 729009 - DNA, 551 bp, Homo sapiens
  misc_feature (1)..(1): n is a, c, g, or t
  misc_feature (33)..(33): n is a, c, g, or t
  misc_feature (73)..(74): n is a, c, g, or t
  misc_feature (88)..(88): n is a, c, g, or t
  misc_feature (90)..(90): n is a, c, g, or t
  misc_feature (97)..(97): n is a, c, g, or t
  misc_feature (123)..(123): n is a, c, g, or t
nccaggccaaattggtaacccccggccccatcnccaccttaaacgacgcccatgattgtaatacgactcaccnnaggccaaggttacngnccccccntcgagttcgacgtatcgttagcttgntatcgaattcgcggccgcgcgacacggctgcgagaagacgacagaaggggactgcgataggaatcatgtctggtcgcggcaaaggcggaaaaggcttggggaagggtggtgctaagcgccatcgtaaggtgctccgggataacatccagggcattacaaaaccggctattcgccgtttggctcggcgcggtggcgtcaagcgcatttccggtcttatctatgaggagactcgaggtgtgcttaaggttttcttagagaacgttattcgagacgccgtcacctatacggagcacgccaagcgcaaaactgtcacagccatggatgtagtatatgccctaaaacgtcaggggcgcactctgtatggcttcggcggctgaatctaagaatacgcggtctcctgagaacttcaaaaaaaaaaaagaaaaaaa

SEQ ID NO: 729010 - DNA, 494 bp, Homo sapiens
  misc_feature (371)..(371): n is a, c, g, or t
  misc_feature (391)..(391): n is a, c, g, or t
  misc_feature (408)..(408): n is a, c, g, or t
  misc_feature (430)..(430): n is a, c, g, or t
cgcggccgcgcgacacggctgcgagaagacgacagaaggggactgcgataggaatcatgtctggtcgcggcaaaggcggaaaaggcttggggaagggtggtgctaagcgccatcgtaaggtgctccgggataacatccagggcattacaaaaccggctattcgccgtttggctcggcgcggtggcgtcaagcgcatttccggtcttatctatgaggagactcgaggtgtgcttaaggttttcttagagaacgttattcgagacgccgtcacctatacggagcacgccaagcgcaaaactgtcacagccatggatgtagtatatgccctaaaacgtcaggggcgcactctgtatggcttcggcgggcttggnaaaaaaaattttcccccctntttttaaaaaaaaaagngggggaaaaaaaaaaatttttntaaaaccccccgggcgccgtcttatgagaacttaaaaacaataaaaaaggctaccgatcttcta

SEQ ID NO: 729011 - DNA, 440 bp, Homo sapiens
  misc_feature (45)..(45): n is a, c, g, or t
cgcggccgcgcgacacggctgcgagaagacgacagaaggggacgncgagaagacgacgaagggatgcgataggaatcatgtctggtcgcggcaaaggcggaaaaggcttggggaagggtggtgctaagcgccatcgtaaggtgctccgggataacatccagggcattacaaaaccggctattcgccgtttggctcggcgcggtggcgtcaagcgcatttccggtcttatctatgaggagactcgaggtgtgcttaaggttttcttagagaacgttattcgagacgccgtcacctatacggagcacgccaagcgcaaaactgtcacagccatggatgtagtatatgccctaaaacgtcaggggcgcactctgtatggcttcggcggctgaatctaagaatacgcggtctcctgagaacttcaaaaaaaaaaaagaaaaaaa

SEQ ID NO: 729012 - DNA, 522 bp, Homo sapiens; identical to SEQ ID NO: 243565

SEQ ID NO: 729013 - DNA, 422 bp, Homo sapiens
tctggaaggtttcatacgggaagtgacatgttaagatctggatcttaaagaacttggggttcccgaagaagctcggtgccatcaacaggaaaggatgagactttggattccagaagaacactgctggggcttccccccgagtctgccacttgctgtcgtgcaggcggagtggagagtgacacggccacgtaattggttgaaaatttgaacggcatgctcttgtacctgggagggcgttccaaaggctatgaaaacattgggaacagactcaaccacttcaaaggcacaggtggctggtgaatggaaccctttgctgcctgctggttcccaattttgaatgtatctttttgtttaaaatgtctttgttacaaaccaaacgttacaagaattgtaggggaaatgaattaaaagtagaaacaata

SEQ ID NO: 729014 - DNA, 919 bp, Homo sapiens; identical to SEQ ID NO: 249878

SEQ ID NO: 729015 - DNA, 402 bp, Homo sapiens
  misc_feature (1)..(1): n is a, c, g, or t
  misc_feature (20)..(20): n is a, c, g, or t
  misc_feature (24)..(24): n is a, c, g, or t
ntactactactaaattcgcngccncgtcgacgtgaggaactgagaaacatggatggccttgggaacgtggaaaagggtcactgaaatgggacgacatgaactcaaggaggctatttatgaccatgtcatttgcaacatgaagaaagcttatctggagtgaaagtaaatgagaccaacagagatgagagacccggagaaatcctggttacactgcttgaatcctgtcagtcctatactggagtcctgttaatacaaaataattaagaaagaactctccaccacggggaatgtgaaaggtatatgagtcccttttcacgatgcgatgtcatgtcttttaaataagccatactttatgttcaataaaaagagaataagcaggaaaaaaaagtcgacgcggccgcg

SEQ ID NO: 729016 - DNA, 756 bp, Homo sapiens
  misc_feature (1)..(1): n is a, c, g, or t
  misc_feature (20)..(20): n is a, c, g, or t
  misc_feature (24)..(24): n is a, c, g, or t
  misc_feature (601)..(601): n is a, c, g, or t
ntactactactaaattcgcngccncgtcgacactaccgtttgctggttttgaaaatggagaaaaagagtgaggaactgagaaacatggatggccttgggaacgtggaaaagggtcactgaaatgggacgacatgaactcaaggaggctatttatgaccatgtcatttgcaacatgaagaaagcttatctggagtgaaagtaaatgagaccaacagagatgagagacccggagaaatcctggttacactgcttgaatcctgtcagtcctatactggagtcctgttaatacaaaataatagtaataatccctctgtttcttatgtttatgccaacttcaacaaaaagaaacttgactaagagacaatataagaatttaatgtgtaattaagaaagaactctccaccacggggaatgtgaaaggtatatgagtcccttttcacgatgcgatgtcatgtcttttaaataagccatactttatgttcaataaaaagagaataaggcaggattcgcaagagaacacaatccctttttaactgctgggaagatacttttagtcattaatgactggacgacaatttgggacacatatatggatattggncggttgtgatgatgtgattggctctaagtgacaacattgttccctgtatagagtgagtggcaagtgcatttataaaattggccatcatggctgttaaattatgagtctagaagtgtgctcttcaaacagttttgggaggtttcctgaagaaagaa

SEQ ID NO: 729017 - DNA, 943 bp, Homo sapiens
  misc_feature (788)..(788): n is a, c, g, or t
gatgtaagtgagattctgaagaaggaagagaagaacagtgttaagtatcctggcaaaggagcattagggttacagatagaattgaagttgctcgtcagctgattgaagataaggagattggcctggattatccaggtaggctcaatgtaatcaggaagggcctttaaagtgagagagggaggcagaagaggaagtcagagcgatgtgctgtgaaatctactaccgtttgctggttttgaaaatggagaaaaagagtgaggaactgagaaacatggatggccttgggaacgtggaaaagggtcactgaaatgggacgacatgaactcaaggaggctatttatgaccatgtcatttgcaacatgaagaaagcttatctggagtgaaagtaaatgagaccaacagagatgagagacccggagaaatcctggttacactgcttgaatcctgtcagtcctatactggagtcctgttaatacaaaataatagtaataatccctctgtttcttatgtttatgccaacttcaacaaaaagaaacttgactaagagacaatataagaatttaatgtgtaattaagaaagaactctccaccacggggaatgtgaaaggtatatgagtcccttttcacgatgcgatgtcatgtcttttaaataagccatactttatgttcaataaaaagagaataaggcaggattcgcaagagaacacaatccctttttaactgctgggaagatacttttagtcattaatgactggacgacaatttgggacacatatatggatattggncggttgtgatgatgtgattggctctaagtgacaacattgttccctgtatagagtgagtggcaagtgcatttataaaattggccatcatggctgttaaattatgagtctagaagtgtgctcttcaaacagttttgggaggtttcctgaagaaagaa

SEQ ID NO: 729018 - DNA, 695 bp, Homo sapiens; identical to SEQ ID NO: 725244

SEQ ID NO: 729019 - DNA, 460 bp, Homo sapiens
aaagtgagagagggaggcagaagaggaagtcagagcgatgtgctgtgaaatctactaccgtttgctggttttgaaaatggagaaaaagagtgaggaactgagaaacatggatggccttgggaacgtggaaaagggtcactgaaatgggacgacatgaactcaaggaggctatttatgaccatgtcatttgcaacatgaagaaagcttatctggagtgaaagtaaatgagaccaacagagatgagagacccggagaaatcctggttacactgcttgaatcctgtcagtcctatactggagtcctgttaatacaaaataattaagaaagaactctccaccacggggaatgtgaaaggtatatgagtcccttttcacgatgcgatgtcatgtcttttaaataagccatactttatgttcaataaaaagagaataagcaggaaaaaaaagtcgacgcggccgcg

SEQ ID NO: 729020 - DNA, 686 bp, Homo sapiens
gatgtaagtgagattctgaagaaggaagagaagaacagtgttaagtatcctggcaaaggagcattagggttacagatagaattgaagttgctcgtcagctgattgaagataaggagattggcctggattatccaggtaggctcaatgtaatcaggaagggcctttaaagtgagagagggaggcagaagaggaagtcagagcgatgtgctgtgaaatctactaccgtttgctggttttgaaaatggagaaaaagagtgaggaactgagaaacatggatggccttgggaacgtggaaaagggtcactgaaatgggacgacatgaactcaaggaggctatttatgaccatgtcatttgcaacatgaagaaagcttatctggagtgaaagtaaatgagaccaacagagatgagagacccggagaaatcctggttacactgcttgaatcctgtcagtcctatactggagtcctgttaatacaaaataatagtaataatccctctgtttcttatgtttatgccaacttcaacaaaaagaaacttgactaagagacaatataagaatttaatgtgtaattaagaaagaactctccaccacggggaatgtgaaaggtatatgagtcccttttcacgatgcgatgtcatgtcttttaaataagccatactttatgttcaataaaaagagaataag

SEQ ID NO: 729021 - DNA, 438 bp, Homo sapiens
  misc_feature (1)..(1): n is a, c, g, or t
  misc_feature (20)..(20): n is a, c, g, or t
  misc_feature (24)..(24): n is a, c, g, or t
ntactactactaaattcgcngccncgtcgacactaccgtttgctggttttgaaaatggagaaaaagagtgaggaactgagaaacatggatggccttgggaacgtggaaaagggtcactgaaatgggacgacatgaactcaaggaggctatttatgaccatgtcatttgcaacatgaagaaagcttatctggagtgaaagtaaatgagaccaacagagatgagagacccggagaaatcctggttacactgcttgaatcctgtcagtcctatactggagtcctgttaatacaaaataattaagaaagaactctccaccacggggaatgtgaaaggtatatgagtcccttttcacgatgcgatgtcatgtcttttaaataagccatactttatgttcaataaaaagagaataagcaggaaaaaaaagtcgacgcggccgcg

SEQ ID NO: 729022 - DNA, 499 bp, Homo sapiens
  misc_feature (1)..(1): n is a, c, g, or t
  misc_feature (20)..(20): n is a, c, g, or t
  misc_feature (24)..(24): n is a, c, g, or t
ntactactactaaattcgcngccncgtcgacactaccgtttgctggttttgaaaatggagaaaaagagtgaggaactgagaaacatggatggccttgggaacgtggaaaagggtcactgaaatgggacgacatgaactcaaggaggctatttatgaccatgtcatttgcaacatgaagaaagcttatctggagtgaaagtaaatgagaccaacagagatgagagacccggagaaatcctggttacactgcttgaatcctgtcagtcctatactggagtcctgttaatacaaaataatagtaataatccctctgtttcttatgtttatgccaacttcaacaaaaagaaacttgactaagagacaatataagaatttaatgtgtaattaagaaagaactctccaccacggggaatgtgaaaggtatatgagtcccttttcacgatgcgatgtcatgtcttttaaataagccatactttatgttcaataaaaagagaataag

SEQ ID NO: 729023 - DNA, 774 bp, Homo sapiens
aaagtgagagagggaggcagaagaggaagtcagagcgatgtgctgtgaaatctactaccgtttgctggttttgaaaatggagaaaaagagtgaggaactgagaaacatggatggccttgggaacgtggaaaagacacatactaacaaaaggccacatgaggacacagtgagaagctggaagtctacaacccagaagagagccctcaacagaacctaaccatgctggtaccctgatctcagacatccagcctccagaagagtgaaaaaatataattcttatttctaagcaacctggtctatggtatttcattatggcagcccaagctaagacagatccctatcctattcaccatgctgcagagccacatgagcctcccttttgttcctcaagctcatcaaatacctcctagccttagaacttgctattccctctaaccagaattctcttccaggtctttccatcctgtaagtcttgtcctttagatcgaaattcacatgtgacctcccctgagaatggtcctctggaaaactatctcaaaagaggtgttcccagttactctctaccttaccccaggttattatctttcccacccacttttgcatatgtgtatcattgcttggatatgtgtgatatggtagggttaggtcctaccaaatccgtgttactgtatcccgggggatacactcaggagagaccgtggcaggatgctagggggggtccccagcggctcggtagggaaccatcaaatcagttgcagggtccggggcaaaatc

SEQ ID NO: 729024 - DNA, 341 bp, Homo sapiens
cggtgggtgtttccttctccggggagagcaggggatcgtggtccccggtggtgggtgtttccttctctaaggtttgctgctgtttccaggcctttctgtggggcctgggtcctgtcctgggccaagccacggggtcatcctcagctgcactgggcgtgccaaccacaaacgagtcacttgctacaagcagcaccatgcagcctcctgtctggacgagaccctgccccccacagactggagacgcaccccgatttcccaggtcacagggggaagtgtggatctgataagggactaaatgtggcgtctttcatatgtttctcttacatattttattttaaaat

SEQ ID NO: 729025 - DNA, 1274 bp, Homo sapiens
ctggtgactttggaaaactcccttaaccagcgtgagcctccatgtcctcctccagagcaggggactgtaaggaccgattttattgtggggtgaaaaaagaaagcgcgaacgcaattccccaccaccacaaattacagtccagtttccccacatgtggaagtaacaggagtcagtcagcacatactgagtacaatggaaaaaccgcccccggaaaacaccaacttcatggccgtattttctcctgttacataagtatgaatgaacgcacctccgccctgccacagctccatacgcctcaccccttacacgcacggtcacttgccccgcgcattcccccaccccgcccccatgccgcctcaagtcctcctagccctgacacacagctgggactatcacgtccaaccggaagtcctggactagctcccacagcacgagaaatctttcctggcgaagcagcagcccctgagctgcctcctctgcataggaatcgccctatctgtgatgtcaccgacagcgcctttcccgtccccatctgctcttccgccccaccctctgccactcggccgaccaaccagctgcgggagcgggcggaggaagtgacacctgactctacctcctttccctcccatccccgtccctggtctctgccaaagaaatatgaccagaaggctttgggggactaaggttggctttatggaaccaataaagtaccatcttggaaaaactggctctagggttcccagacttacagtccttcaaactgaaactggatgacttgacataagcttcagaaaaattaccacaacagcttgtgtgtggcccatctttatggcattcaaactgcaaactaatccaatgcctcttctcacaccagctgaagatactacaagcccagcatctagaaatcttattgatcagctgccctctgggctcagaaactgtctttatagttcgttccaactattaatcttttttaattttatttttatagaaactaaacttcccacattaaaggcctgatagctcacactatccaggaaatatcctctgctaccaagtcccaacagatgattcaactggtccttaatgaataaaaggtgatcaaacaagaaaagagacttatattgtttgaaggaaagatgaatgtctcttctttccttaaacaagaagtagtactaacaaagattccttgcttggccaaactttagtcagatgtctatcttccttgcaaaatccaacttttttttttttatgtggtacaatgtgatgttttg

SEQ ID NO: 729026 - DNA, 444 bp, Homo sapiens
gcccatctttatggcattcaaactgcaaactaatccaatgcctcttctcacaccagctgaagatactacaagcccagcatctagaaatcttattgatcagctgccctctgggctcagaaactgtctttatagttcgttccaactattaatcttttttaattttatttttatagaaactaaacttcccacattaaaggcctgatagctcacactatccaggaaatatcctctgctaccaagtcccaacagatgattcaactggtccttaatgaataaaaggtgatcaaacaagaaaagagacttatattgtttgaaggaaagatgaatgtctcttctttccttaaacaagaagtagtactaacaaagattccttgcttggccaaactttagtcagatgtctatcttccttgcaaaatccaacttttttttttttatgtggtacaa

SEQ ID NO: 729027 - DNA, 329 bp, Homo sapiens
gaggttttattatctgcctgcaatctgcaatagatcctcaatttttctagtttactacaatatttagctacaacactccaaattaatatttcatttttttcctgctattctggcttggaatcactaaaattataaacttttcatttcttgaagtccttcaaactgaaactggatgacttgacataagcttcagaaaaattaccacaacagcttgtgtgtggcccatctttatggcattcaaactgcaaactaatccaatgcctcttctcacaccagctgaagatactacaagcccagcatctagaaatcttattgatcagctgccctct

SEQ ID NO: 729028 - DNA, 602 bp, Homo sapiens; identical to SEQ ID NO: 280221

SEQ ID NO: 729029 - DNA, 1345 bp, Homo sapiens
ataacacgaggagtgcacaggcaagtgcccagttgccagcaattgcttcaaaagcccatgttcttcttttcccccattcttaggcacagccaaaattggtcagaaaggggagtaaagtgggacacgagcttcaaagtagggaaaccaaagaagggagcatccacgtcctctctctccagcttctcccccgcgttcttcgggcgaatccgagggacgggcgctgcgctggggaaagtttgtcccacccgcgtttcgcagctggttgcaaggagaggaggaggagagggagggtcaagctcggagcctgtgaccgcacggatgatcgagccggcgtcgcgcttacctcgcagtcctcgtacttgatattatccgtcaatttccaaagcattttcatggatcggcgtgaacggatatgcccctctcggtctcgcacccaagtggagctactctctggctctttaccaacagcctaatcgcctcattagcatatcaacaatagtccaattgctcgccagtaccacaatctgccgccggccgctccgacacaggtataaaggcctctctacgccgcgaacttgcttctagagcgcactccagcctgcgaactgataaaaccttcctcgagctccgccgcgaggccctgccccaacaccccctctcttaccccaattccgccacattccccttcctttctttctccgcttccttttctccagagatgccttctgcaaagcccggcactgctcaaggtccaagcgccacgcctggggcccagcttctagcacttctcccttaaccctgctaccacgatccgagctgcccttttggccccgtgcaattttattagaaatcattatccctttcgcaattaaacataaccaccaaaccaagaccggcgaagtcactccaggattttttcccaacaagggatcgcctccgctcgaggcagccaccccctcgggccgcagcgccttgggagttttattggctttgagctttcccccaggttggagattctgccaagcggctccggtggctctgctggggtttgcaatcccttaattgcagcgtgtaaaataaaagttgtaccctgaagaggttacttgacagctccaggggttaaacaatttttctcctgtttgtgtgaagctagggccaactgacagttcaaattggtgttcaggctaaggtttcctgggtgcaacgtggacacgaatacagaactcctatggaactgcacacccgcttctgaagttgagcctaaaaacagacgtgtgtgtgcctgcaagtctagataccgtctcgtgcgtgcatcaaaataaatcaccgggaaccgaaatttagc

SEQ ID NO: 729030 - DNA, 1313 bp, Homo sapiens; identical to SEQ ID NO: 280223

SEQ ID NO: 729031 - DNA, 1094 bp, Homo sapiens
gcacagccaaaattggtcagaaaggggagtaaagtgggacacgagcttcaaagtagggaaaccaaagaagggagcatccacgtcctctctctccagcttctcccccgcgttcttcgggcgaatccgagggacgggcgctgcgctggggaaagtttgtcccacccgcgtttcgcagctggttgcaaggagaggaggaggagagggagggtcaagctcggagcctgtgaccgcacggatgatcgagccggcgtcgcgcttacctcgcagtcctcgtacttgatattatccgtcaatttccaaagcattttcatggatcggcgtgaacggatatgcccctctcggtctcgcacccaagtggagctactctctggctctttaccaacagcctaatcgcctcattagcatatcaacaatagtccaattgctcgccagtaccacaatctgccgccggccgctccgacacagagatgccttctgcaaagcccggcactgctcaaggtccaagcgccacgcctggggcccagcttctagcacttctcccttaaccctgctaccacgatccgagctgcccttttggccccgtgcaattttattagaaatcattatccctttcgcaattaaacataaccaccaaaccaagaccggcgaagtcactccaggattttttcccaacaagggatcgcctccgctcgaggcagccaccccctcgggccgcagcgccttgggagttttattggctttgagctttcccccaggttggagattctgccaagcggctccggtggctctgctggggtttgcaatcccttaattgcagcgtgtaaaataaaagttgtaccctgaagaggttacttgacagctccaggggttaaacaatttttctcctgtttgtgtgaagctagggccaactgacagttcaaattggtgttcaggctaaggtttcctgggtgcaacgtggacacgaatacagaactcctatggaactgcacacccgcttctgaagttgagcctaaaaacagacgtgtgtgtgcctgcaagtctagataccgtctcgtgcgtgcatcaaaataaatcaccgggaaccgaaatttagc

SEQ ID NO: 729032 - DNA, 695 bp, Homo sapiens
gtttttatttcacatttgactttttgttacctttgtgtcttcagagtacagtgtacgttaagacatatatcgattttcttctcagtagttgaccaattgcctcaatactcttttctttccaacaacagttctttattaagatggaaactaccctggttagtcctatggtgaaatattctgcatacaaaggatactaatggaatgatgagtaacatatttaccaagttgtcaggccccaagagcaagggaagggtgaagtcagtgtggtgtacatgaggcagatccctacctgggaaggtgaagaggggattgggcagggaggtgagtacagcaggcgctcacaaagcggtcagctgtgggatgggaatggtcaactctgaagctacgggacttggagagagcctcagctgttggatgaaagagcgaaaacagatgcagtagttttcaaaccaagttccatggaggcattttaggggctttcctgggaaagcatgaagagctggaagaggtttatagccctctcctctctttccaccagaaatataaatgctttttctttctgtttcaacatgagattttatttgaaaaaatgatttcagtgtttttgtaataacttatttattgtagacatttttaagtacatgaaaatagcaagaataatataataaattctcattcttcaccaatgataattt

SEQ ID NO: 729033 - DNA, 2899 bp, Homo sapiens; identical to SEQ ID NO: 364887

SEQ ID NO: 729034 - DNA, 3874 bp, Homo sapiens; identical to SEQ ID NO: 364886
  misc_feature (3006)..(3006): n is a, c, g, or t

SEQ ID NO: 729035 - DNA, 1914 bp, Homo sapiens
gaagggtgatgagacctcagtgagaggaaaggagaggaagagctggagggggtgaggaagtaaggggagggaggcagagggttctgcttggtctccaggctaggaggcggtgcctggaggatacaggaacggggatcctctgatcaaggctggtctatactcgctatgggaagtgttacaccttcaacgcggacccgcggagctcgctgcccagccgggcagggggcatgggcagtggcctggagatcatgctggacatccagcaggaggagtacctgcccatctggagggagacaaatgagacgtcgtttgaggcaggtattcgggtgcagatccacagccaggaggagccgccctacatccaccagctggggttcggggtgtccccaggcttccagacctttgtgtcctgccaggaacagcggctgacctacctgccccagccctggggcaactgccgcgcagagagtgagctcagggagcctgagcttcagggctactcggcctacagtgtgtctgcctgccggctgcgctgtgaaaaggaggccgtgcttcagcgctgccactgccggatggtgcacatgccaggcaatgagaccatctgcccaccaaatatctacatcgagtgtgcagaccacacactggactccctgggtgggggccctgagggcccgtgcttctgccccaccccctgcaacctgacacgctatgggaaagagatctccatggtcaggatccccaacaggggctcagcccggtacctggcgaggaagtacaaccgcaacgagacctacatacgggagaacttcctggtcctagatgtcttctttgaggccctgacctctgaagccatggagcagcgagcagcctatggcctgtcagccctgctgggagacctcgggggacagatgggcctgttcattggggccagcatcctcacgttgctggagatcctcgactacatctatgaggtgtcctgggatcgactgaagcgggtatggaggcgtcccaagacccccctgcggacctccactgggggcatctccactttggggcttcaggagctgaaggaacagagtccctgcccgagcctgggccgagcggagggtgggggggtcagcagtctgctccccaatcaccaccacccccacggtcccccaggaggtctctttgaagattttgcttgctaggacggtgctgtgactgaaaggacccaggagtctgggacccctcctgggatccccagcacattctcctgctcctgggagaggcctgggggcggtgctcactgggagggccaggactcagttcctgctctcatcctcccctgccctgatgtcagctgctttgcacaaaggtccttcttgtccacaccccttatccccaggctggtgccccgggagggctggagaccaggccatgggccctcacggagaggaagggaaggaaggagagggagggggaggatagagcccatcccagccggggagggggagccctctgtacatttgtaaatatttagggaaagccgggtggggggaggggatacagatgtagaaggtgggtagggctacaggggtgggtgatttagggacagccagggtcccagccccaatgtcagcaggatagggagagccccaggactcaggagtgctgggctggtcctacttcctgcccctctccaggcccagctcccctcttggcagggggagaggatggcccagcaggcctggcccagctcccagttccccctgcaccagccccacccctagagtcccttctatagggagggggcaggagaccttccagacttcggctgagcttggagggtgggaagggagccttctcagtcctctctccctccagtctgattttataaagtgctgacgagattgggaataaagaggcataaag

SEQ ID NO: 729036 - DNA, 1496 bp, Homo sapiens
gaagggtgatgagacctcagtgagaggaaaggagaggaagagctggagggggtgaggaagtaaggggagggaggcagagggttctgcttggtctccaggctaggaggcggtgcctggaggatacaggaacggggatcctctgatcaaggctggtctatactcgctatgggaagtgttacaccttcaacgcggacccgcggagctcgctgcccagccgggcagggggcatgggcagtggcctggagatcatgctggacatccagcaggaggagtacctgcccatctggagggagacaaatgagacgtcgtttgaggcaggtattcgggtgcagatccacagccaggaggagccgccctacatccaccagctggggttcggggtgtccccaggcttccagacctttgtgtcctgccaggaacagcggctgacctacctgccccagccctggggcaactgccgcgcagagagtgagctcagggagcctgagcttcagggctactcggcctacagtgtgtctgcctgccggctgcgctgtgaaaaggaggccgtgcttcagcgctgccactgccggatggtgcacatgccaggcaatgagaccatctgcccaccaaatatctacatcgagtgtgcagaccacacactgggtccgtgctgcctaccctttcctacctctccatcagcctcttcatgtctctgtccactcttctcctcactgtcttggatcctcccctcccaatctcttcctggagggttcttcctgggggttgagccttagcccatacttcagtggggtcggggagaggtctgcggacctctgcaggtacagacacttgggtaagtggaggcagcagggtggggggttgcagagaagccaggactgggagtgaaggtctgggcttctcatcttggttcagccaatgagctcacccactttgagaaagtgaaatgacttctctcttggtctcaggaaaaatgcattgctggctatcggtgtgggtaaggcaaaccccatctgtccacagatcttgcctgatctgcagttcatccatctatccatccattcatcgattcgcgcattctccagacctttacagcctgtgctgggtactggaggtgagagtgggggcgacagccctgcccttggagagcttacaccccggcagggctgtggacagccattcccacacagcccgtcaactcctggagaggggagcctcgggtgtgctgcaaggccccaaggaggggtgtgcagccctagcctgggaaggtagggaggattcctagaggaagggacacattagctgaggcttgatgggtgtataagagtcaggtgcaaagggggacatacactgaagacctgtggccagaaagagcatgctgtgtccggggcactgaaaggtctgtgtggctgcagggcagagaacaggggagggagtagaaagagtagaggagggaggccaggcacggtggctcacaagtgtagacccagcacttt

SEQ ID NO: 729037 - DNA, 586 bp, Homo sapiens
gactggcagattattgcaaaaagggcacggggcagagggactatgttgtgagcctgcgaaagaagtttgtgtggggactgtgggcagtgaatgcgttgggaacaatatggaaaactgggagctgccttggaatctacagggccgggctgaagaaaagaagaatggtattcatgcagttcccattttacagatgaaaacaagaggactttttctgtgaagtcaagaaagtggttacaatggtactttcagcctgtccgaattatgtattgcccctcccctttttattaataacattgaagtgtgatgggacaaccactgaagccgtctgttgaaacctgctgggactttttagccattctcttcaacataaagaatgggtgtttttggagggggtgagaggaatggggaaatgttgtcaaagagtacaatgttttagttgagacaggaggaatatattttgttgagatctacagcacagcatggtgactgtagttaacaatgaagtattgtgtatttcaaaattgctaagacaataaatttcaaatgttctcaccacaaaaaagataggttttgaggtgatgaatct

SEQ ID NO: 729038 - DNA, 643 bp, Homo sapiens
gactggcagattattgcaaaaagggcacggggcagagggactatgttgtgagcctgcgaaagaagtttgtgtggggactgtgggcagtgaatgcgttgggaacaatatggaaaactgggagctgccttggaatctacagggccgggacccactcgagccatccacactttccccagcctcctccaaaacagcacactttccggctgaagaaaagaagaatggtattcatgcagttcccattttacagatgaaaacaagaggactttttctgtgaagtcaagaaagtggttacaatggtactttcagcctgtccgaattatgtattgcccctcccctttttattaataacattgaagtgtgatgggacaaccactgaagccgtctgttgaaacctgctgggactttttagccattctcttcaacataaagaatgggtgtttttggagggggtgagaggaatggggaaatgttgtcaaagagtacaatgttttagttgagacaggaggaatatattttgttgagatctacagcacagcatggtgactgtagttaacaatgaagtattgtgtatttcaaaattgctaagacaataaatttcaaatgttctcaccacaaaaaagataggttttgaggtgatgaatct

SEQ ID NO: 729039 - DNA, 1628 bp, Homo sapiens; identical to SEQ ID NO: 336258

SEQ ID NO: 729040 - DNA, 341 bp, Homo sapiens
ttatcttttcatctctctaatcattgagaaaaagagtacaaaaagccagattttgcagttccctattttgtattccaggttgaagagtgctctggctgtagagggtccccacgatctgtcatctagtaactcaccagatacataagatattttgcctgctatgaagccattggagaatcaggtccagctgtgtcctacagatttataccctcactttggatgcactgtgaatcttgaaacaagtatgtaaatagaatccagcccctctctgccacagcctcagagcaggattggtaactccaaaagacaccaggacacatcctaattttcttaaattttat

SEQ ID NO: 729041 - DNA, 489 bp, Homo sapiens; identical to SEQ ID NO: 136342
  misc_feature (6)..(6): n is a, c, g, or t

SEQ ID NO: 729042 - DNA, 251 bp, Homo sapiens
ccttgaagggatctagcatatctccaatatacccagaggataacaatctccaaatgtgattatgaaacctgtttctggtaatggagctcagaggactaggtggaacgaacagagccctcagaaataatgccacatatctacaactatctgatctttgacaaacctgacaaaaacaagaaatagggaaaggattccctatttaataaatggtgctgagaaaactggctagccatatatagaaagctgaaact

SEQ ID NO: 729043 - DNA, 479 bp, Homo sapiens
ccttgaagggatctagcatatctccaatatacccagaggataacaatctccaaatgtgattatgaaacctgtttctggtaatggagctcagaggactaggtggaacgaactacaaaaccctgtcagagtggtgtgaggatagagaaaaacagaaattttccactcaaaatgagcaaacttaattctaaaacagaagaaaaaagtctaatgctaagaaagtcagccaacaaaattaacagttagagcagggattctttccaaatgaaaatctttttacagagcaattaagacaaagacatttaaataagtacgctaaaaacattcaaagagataaatgaagatacagcttttaaaagaatgataaaacaatgccaggaagaaatgaaacaaatctaatagattataaaaaagaataaattagactggtcattgacatttttaaaaaaccaataaataagaaaaactgtagactggataca

SEQ ID NO: 729044 - DNA, 1013 bp, Homo sapiens
  misc_feature (6)..(6): n is a, c, g, or t
  misc_feature (162)..(162): n is a, c, g, or t
  misc_feature (173)..(173): n is a, c, g, or t
  misc_feature (224)..(224): n is a, c, g, or t
  misc_feature (319)..(319): n is a, c, g, or t
  misc_feature (328)..(328): n is a, c, g, or t
  misc_feature (330)..(331): n is a, c, g, or t
  misc_feature (338)..(338): n is a, c, g, or t
  misc_feature (348)..(348): n is a, c, g, or t
  misc_feature (358)..(358): n is a, c, g, or t
  misc_feature (360)..(361): n is a, c, g, or t
  misc_feature (364)..(364): n is a, c, g, or t
  misc_feature (368)..(369): n is a, c, g, or t
  misc_feature (372)..(374): n is a, c, g, or t
  misc_feature (376)..(378): n is a, c, g, or t
  misc_feature (381)..(381): n is a, c, g, or t
  misc_feature (384)..(384): n is a, c, g, or t
  misc_feature (389)..(389): n is a, c, g, or t
  misc_feature (396)..(397): n is a, c, g, or t
  misc_feature (404)..(404): n is a, c, g, or t
  misc_feature (411)..(411): n is a, c, g, or t
  misc_feature (415)..(416): n is a, c, g, or t
  misc_feature (421)..(421): n is a, c, g, or t
  misc_feature (428)..(428): n is a, c, g, or t
  misc_feature (440)..(440): n is a, c, g, or t
  misc_feature (456)..(456): n is a, c, g, or t
  misc_feature (459)..(459): n is a, c, g, or t
  misc_feature (466)..(466): n is a, c, g, or t
  misc_feature (469)..(470): n is a, c, g, or t
  misc_feature (479)..(479): n is a, c, g, or t
  misc_feature (484)..(485): n is a, c, g, or t
  misc_feature (487)..(487): n is a, c, g, or t
  misc_feature (495)..(495): n is a, c, g, or t
  misc_feature (498)..(498): n is a, c, g, or t
  misc_feature (503)..(503): n is a, c, g, or t
  misc_feature (505)..(505): n is a, c, g, or t
  misc_feature (540)..(540): n is a, c, g, or t
  misc_feature (596)..(596): n is a, c, g, or t
  misc_feature (603)..(603): n is a, c, g, or t
  misc_feature (672)..(672): n is a, c, g, or t
  misc_feature (865)..(865): n is a, c, g, or t
  misc_feature (874)..(874): n is a, c, g, or t
  misc_feature (879)..(879): n is a, c, g, or t
  misc_feature (883)..(883): n is a, c, g, or t
tagacnccaacgtgggcagcacagagatgggccacctccccaggccgtggctcccacacaccccaattagctgaattcgcgtgtggcagagggaggaaaaggaggcaaacgtgggctgggcaatggcctcacataggaaacagggtcttcctggagatttgntgatggagatntcaagcaggtggcctctggacgtcaccgttgccctgcatggtggccccagngcagcctctatgaacaacctcgtttccaaaccacagcccacagccggagagtccaggaaaacttgcgcactcagagcagaagggtaggagtcctntagacaacntnnagccgcnccagtcgccnatagacactngnngtnaccnngcnnncnnncancancagtncacagtnnccagcantaacccncccnnagaanataaccngctcattcactncctcccagaagacgcntgntagcaantannacaggcgtncaccnncncccaaatnacncaccnanacacacgggctgagcagaccgccccgtggatgganacaaagagctcttctgaccatatccttcttaacacccgctggcatctcctttcgcncctcccntcctaacctactgacccaccttttgattttagcgcacctgtgattgataggccttccaaagagtcccangctggcatcaccctccccgaggacggagatgaggagtagtcagcgtgatgccaaaacgcgtcttcttaatccaattctaattctgaatgtttcgtgtgggcttaataccatgtctattaatatatagcctcgatgatgagagagttacaaagaacaaaactccagacacaaacctccaaatttttcagcagangcactctgngtcgntganctgaggtcggctctgcgatccatacgtggccgcaccccctcagcacgtgctgtgtcgcatgggtcaccgaacagtgtactctgttcctgacatatcggtataaaacaataaacttttaatggtaaaaaaa

SEQ ID NO: 729045 - DNA, 459 bp, Homo sapiens
  misc_feature (39)..(39): n is a, c, g, or t
  misc_feature (61)..(61): n is a, c, g, or t
gcttcagagaaccagcctctttcacgccatgcccgcccncgcctcccttcttccctcttcnctttccctgcccagccctcccttccttcctttgccggcaaggcagggacccacagtggttgcctgcctccgggagggaaggagagggagggtgggtgggtgggagggggccttcctcccagggaatgtgactctcccaggccccagaatagctcctggacccaagcccaaggcccagcctgggacaaggctccgagggtcggctggccggagctatttttacctcccgcctcccctgctggtccccccacctgacgtcttgctgcagagtctgacactggattcccccaccctcaccccgcccctggtcccactcctgcccccgccctacctccgccccaccccatcatctgtggacactggagtctggaataaatgctgtttgtcacatcaacacca

SEQ ID NO: 729046 - DNA, 354 bp, Homo sapiens
ggcggcgcgggtgagaggcgacctgcacccgcctgattgcctccccgcagctgctgctggctgaggccgagcgtgccgtggtgctccagtacctgagcgcgctgatgcaaggccgcctggtgtgccgcggagccgacgagaggacccaggcggccgagcgcctgcggcacgatgctgcccagcttcagcagcttttcctcagtttggtgagagcttcttgggcgggcagacgggcgagagtctcagtggctgggtgggagagaggtggctcgcgccggcctcctgcctgccctcggggtcctgcgcccgagccctgctgctcgcagaataaaccacggctgccggaaaaaagag

SEQ ID NO: 729047 - DNA, 339 bp, Homo sapiens
ctgcgcgccggtgctgctcgccctgagggagctgctaaacctccgcgaccccgcgctgctgggcctggaggtggctggcctgcggcaacaatttcccgacgtgagcgaggaccacgtctccgccctcttgggcctgcgcggggacttgtcccgggagcagcacctggccgcgctcagctccctgcaggctgcgctgccgccgtcgccccgcgcgagccgccgcgtcctcttcagcctagtgcccgcgcccgcgctcgcgccggcctcctgcctgccctcggggtcctgcgcccgagccctgctgctcgcagaataaaccacggctgccggaaaaaagag

SEQ ID NO: 729048 - DNA, 2710 bp, Homo sapiens
  misc_feature (1012)..(1012): n is a, c, g, or t
  misc_feature (1014)..(1014): n is a, c, g, or t
agggaatacaaggaaaaggtgacagaaaagcaagagagggatccgaggagtgccgaccagagaggcagttcatgtagcctcattagtaaagcccccaggggctgtgactgtcctgcgcgggcttccaagtccacctgagagttctgatgctgtgctgaccccatggcacatcaggggcagcgagcctgctgtccacactggctgggagaagcagcagccaggcaagagaacaacaaacaggggcaggcagccacccaccaagaggacatgtggaaccaggcagcacgccatttggaaagcaagtctatatgggagtggtcactatcatggaaaggaaaaagaatgggaaaacctgagatttaagaaagacccaatgctgttctagaagcatcttcagaaagagcaataaagcttctttggggaagtcacaggacacagactctccagggtggaagggatcttgaagagcacagaggccaagtcctcatccatctctcgacttccttcatgactcatctgaagacggctggattggtctatgtctgtaccctaccctcaccccacaatcccagtccaccctatctcagaacaatttcaaatgcaggggaggatcagagatgaagatgttactccaaaagtatacatgcaaagatgttctggaagtgctacttcttaacttgtctggtcttatagtctgtggttgaaagagtcctccatggagaagtctactgccgaagtccactgattttcactgccgtatgatattccatcgtgtggcacgtggaacaatcaggatcatatttcaacatgagatccccacgttgatgtctcagtcttgggtagacatggtagggctggtaggaagtggtctaatgacttccattcctctgttggaacatttgggttgcttttgggtgttttgttattaaaaacactgctgctgctatcattcttttttgtacagtttctttggattccaatccataaaagcctagcatggaattgttagccnanctaggaagtgaggagcgtctctgcccggcagcccatcgtctgagatgtggggagcacctctgccccgccgccctgtctgggatgtgaggagcgcctctgctgggcgcaaccctgtctgggaggtgaggagcgtctctgcccggccgccccatctgagaagtgaggaaaccctctgcctggcaaccgccccgtctgagaagtgaggagcccctccgtccggcagccaccccgtctgggaagtgaggagcgtctccgcccggcagccgccccgtccgggagggaggtgggggggtcagccccccgcctggccagccgccccatccaggaggtgaggggtgcctctgcccggccgcccctactgggaagtgaggacccctctgcccggccagccgccccgtccgggagggaggtgggggggtcagccccccgcccggccagccgccccatccgggagaaggaagtgttcctctgctaaatacccctgaaaccaaaaatgaaccagccaaccaacccaccaaacaatgcaccagccaactgacccatcaaacaatggacgagccaaccaacccaccaaacaatgcaccagccaactgacccatcaaacaatggaccagccaaccaacccaccaaacaatgcaccagccaactgacccatcaaacaatggaccagccaaccaacccactgaacaatggaccggccaactgacccatcaaacaatggaccagccaaccaacccaccaaacaatggaccaaccaaccaacccaccaaacaatggaccagccaactgacccatcaaacaatggaccaaacaaccgacccaccaaacaatggaccaaccaaccaacccaccaaacaatggaccagccaactgacccatcaaacaatggaccagccaaccaacccactgaacaatggaccagccaaccgacccacagaacaactgaccagccaaccagccccccaaacaatggaccagccaaccaacctactgaacaatagaccagccattcaacctaccaaacaatggaccagccaatcaacccaccgaacaacgaaccagtcaaccaacctactgaacaatggaccagccaagcaatccaccaagcaatggaccaaccaaccaacccaccaagcaatggaccaaccaacctacccaccaaacaacggaccagccaactgacccatcaaacaatgcaccagccaactgacccatcaaacaatgcaccagccaactgacccatgaaacaatggaccagccaaccaacccactgaacaatgaaccagccaaccaacccaccaaacaatggaccagccaaccgacccaccaaacaatggaccagccaaccaacccactgaacaatggaccagccaaccgacccacagaacaactgaccagccaaccagccccccaaacaatggaccagccaaccaacctactgaacaatagaccagccattcaacccaccaaacaatggaccagccaatcaacccactgaacaacgaaccaggcaaccaacccactgaacaatggaccatccaatcaacctactgaacaatggaccagccaagcaatccaccaagcaatggaccaaccaaccaaccaacccaccaaacaatggaccaaccaaccaacccaccaaacaatggaccagccaaccaacccacctaaaaatggaccagccaaccaacctacc

SEQ ID NO: 729049 - DNA, 810 bp, Homo sapiens; identical to SEQ ID NO: 728317

SEQ ID NO: 729050 - DNA, 549 bp, Homo sapiens
accaagaatcaatactacaactgcaggagctccttcatcttaaattcggtgtagccacagaaatacttctcaaagtaaacattggagaactgatggcatcagcaatgtatcctacaaaccaaaagaaagacttgtaacattcagcctggacacctttggccctgttaccttgattcaagatgctcatattaacatgccgtaccagtcatgggaactaagaccacttgatgtaaataaagtacttttaactgtgactacagtatttactgagattcaaatacaaattaaggaaaacctctgcatgttatcttcaatcaaactaaaagacaagaaacacatctctattttggaaggaacctggatgactcctattcctttcattattgctttgaaagaagctggactgaatatctttcctactagacactctcatttttatgttattataaacaataaggcaagaatgaatctttccaaatttaatgtggcgtgcatttaaaatgttagcaattattaaatgttatataatttaatattatatacactgta

SEQ ID NO: 729051 - DNA, 1784 bp, Homo sapiens
accaagaatcaatactacaactgcaggagctccttcatcttaaattcggtgtagccacagaaatacttctcaaacaagctagtactttggcagatctggacagtggaaatatggaaaaagtcattaaagatgaaaatgttactctgtatgtgtgggcaaacctcaagaagaatccaaggcacagaagtgttagattctctgaaacacaaattggatttgagattccaaggatattagcaacaagtgacattgctgtacgactcctgcatacccactatgatcatgtttctgcactgcaccctgtttcaacaccatcaaaagaatacacttctgcagtaactgagcttgtcaaagatgatgttaagaatgtagaaaaagcaatcagcaaggaggtcgaagaagagtccaaacaacaagaaagagggtctcacttaattcaggaggaagaaataaaagttgaggaggaacaaggtgatattgaagtgaaaatgagttctgctgaggaagaatctgaagccataaaatgtgaacgagagatgaaagtattaagtgaaactgtttcagcagcacagttgttgctggtagagaattcttctgaaaagccagatttctttgaagacaatgtggtggatttatgccagttcacaactctgggtggagtataccacttggatattttggagcttcctccacagtgtaaaccagtgaagggatggatgattgtggaaatactcaaagaaggattacagaaatacacatatcctccggaaactacagaagagtttgagacagaaaatgctttcccacctatagaggtccacttgaggttcatgagaatgtaatcttttttgaggatcctgtggttgtaaggtgggatgctgaaggtaaacattggagaactgatggcatcagcaatgtatcctacaaaccaaaagaaagacttgtaacattcagcctggacacctttggccctgttaccttgattcaagatgctcatattaacatgccgtaccagtcatgggaactaagaccacttgatgtaaataaagtacttttaactgtgactacagtatttactgagattcaaatacaaattaaggaaaacctctgcatgttatcttcaatcaaactaaaagacaagaaacacatctctattttggaaggaacctggatgactcctattcctttcattattgctttgaaagaagctggactgaatatctttcctactagacactctcatttttatgttattataaacaataaggttcctttggtagaagtgaaagcttatcgacagatggccctactaagttctgcttttgcatttggttggagcaagtggaacctactatgtaattctacaaaagtcgtatttaaggtgagggaacaccttactgaagaatgtactgagaatcctaattgggcccttttaatgtttagtggtgacagagcacaaagactgaagatcaaggaagagagtgaggcattttctgaagcacttaaagaagaaactgagtttcattctactttatatcacatggtgaaggattttgcttctgaggaagcaatggagaaagtcaggagttccaactgtcagtttgtcaactctgtgtgccacatgctgctctctaccagattgctcagctactcctaacctccacttacaaactgtattgtaagtatgaagaaccaagcatggtgaaagacaggtatttctgcaacacaatgtaatgagtgaatgaatacatttcaaatcaactattaaaaattttctaatctgc

SEQ ID NO: 729052 - DNA, 471 bp, Homo sapiens; identical to SEQ ID NO: 288418

SEQ ID NO: 729053 - DNA, 974 bp, Homo sapiens
accaagaatcaatactacaactgcaggagctccttcatcttaaattcggtgtagccacagaaatacttctcaaagtaaacattggagaactgatggcatcagcaatgtatcctacaaaccaaaagaaagacttgtaacattcagcctggacacctttggccctgttaccttgattcaagatgctcatattaacatgccgtaccagtcatgggaactaagaccacttgatgtaaataaagtacttttaactgtgactacagtatttactgagattcaaatacaaattaaggaaaacctctgcatgttatcttcaatcaaactaaaagacaagaaacacatctctattttggaaggaacctggatgactcctattcctttcattattgctttgaaagaagctggactgaatatctttcctactagacactctcatttttatgttattataaacaataaggttcctttggtagaagtgaaagcttatcgacagatggccctactaagttctgcttttgcatttggttggagcaagtggaacctactatgtaattctacaaaagtcgtatttaaggtgagggaacaccttactgaagaatgtactgagaatcctaattgggcccttttaatgtttagtggtgacagagcacaaagactgaagatcaaggaagagagtgaggcattttctgaagcacttaaagaagaaactgagtttcattctactttatatcacatggtgaaggattttgcttctgaggaagcaatggagaaagtcaggagttccaactgtcagtttgtcaactctgtgtgccacatgctgctctctaccagattgctcagctactcctaacctccacttacaaactgtattgtaagtatgaagaaccaagcatggtgaaagacaggtatttctgcaacacaatgtaatgagtgaatgaatacatttcaaatcaactattaaaaattttctaatctgc

SEQ ID NO: 729054 - DNA, 537 bp, Homo sapiens; identical to SEQ ID NO: 288423

SEQ ID NO: 729055 - DNA, 1909 bp, Homo sapiens; identical to SEQ ID NO: 161289

SEQ ID NO: 729056 - DNA, 1864 bp, Homo sapiens
gacagcctccaccagagtcgcccacctttctggaagctgcagggctctccatccaggatccagaagcattgaaggggaccagccgctgaagggattctcagtcccatctgactccccatgaggctcctggctttcctgagtctgctggccttggtgctgcaggagacagggacagcttctctcccaaggaaggagaggaagaggagagaggagcagatgcccagggaaggcgattcctttgaagttctgcctctgcggaatgatgtcctgaacccagacaactatggtgaagtcattgacctgagcaactatgaggagctcacagattatggggaccaactccccgaggttaaggtgactagcctcgctcctgcaaccagcatcagtcccgccaagagcactacggctccagggacaccctcgtcaaaccccacgatgaccagacctactacagcagggctgctactgagttcccagcccaaccatggtctgcccacctgcctggtctgcgtgtgcctcggttcctctgtgtattgcgatgacattgacctagaggacattcctcctcttcctcggaggactgcctacctgtatgcacgcttcaaccgcatcagccgtatcagggccgaagacttcaaagggctgacaaagttgaagaggattgacctctccaacaacctcatttcctccatcgataatgatgccttccgcctgctacatgccctccaggacctcatcctcccagagaaccagttggaagctctgcccgtgctgcccagtggcattgagttcctggatgtccgcctaaatcggctccagagctcggggatacagcctgcagccttcagggcaatggagaagctgcagttcctttacctgtcagacaacctgctggattctatcccggggcctttgcccctgagcctgcgctctgtacacctgcagaataacctgatagagaccatgcagagagacgtcttctgtgaccccgaggagcacaaacacacccgcaggcagctggaagacatccgcctggatggcaaccccatcaacctcagcctcttccccagcgcctacttctgcctgcctcggctccccatcggccgcttcacgtagctcggagcccttccactcctcccaggtcatctcttggaccagcgggcatcacattctccagcagccgccatctcacacgcctccctcctgtggccgccggcagcatggacaaaggtctccatgcagggggaggaggcctgcttctttccccacagctctcacgtctcccttctccctgcgggtgacaaagaagcccaaggaccacctccttcctgcctcattgtaataaaattccccacactgaggccttcttgtcttcaacctggcctgtccagcccttccagatatggccaaacccatggcctggatgggcttgtgtacttcctttcaaatgagcccacacagaacgccctgctctccccttcctcccctctgcactccttctgcctcctttttctctattctccttctgtgctcaggcaccacagcaaatagctttttgtttcctcctggcactaccagtcccagccctgccttcaggaattcttttctctctctctctctttttttaaaagactgggtctcactaggttacctaggctggttttgaactcttgggctcaaatgttcacctgccttagcctcctgagttcctgggattacagatgtgtgccactgtaccgactccagaattattttcttttgtgtctaacacacagttcagacacaggagggagtggaagtgtttcttgttatggcatctgtagaggaactgtgatgcaagggagtgagcactggaatgagaatc

SEQ ID NO: 729057 - DNA, 1421 bp, Homo sapiens
gacagcctccaccagagtcgcccacctttctggaagctgcagggctctccatccaggatccagaagcattgaaggggaccagccgctgaagggattctcagtcccatctgactccccatgaggctcctggctttcctgagtctgctggccttggtgctgcaggagacagggacagcttctctcccaaggaaggagaggaagaggagagaggagcagatgcccagggaaggcgattcctttgaagttctgcctctgcggaatgatgtcctgaacccagacaactatggtgaagtcattgacctgagcaactatgaggagctcacagattatggggaccaactccccgaggttaaggtgactagcctcgctcctgcaaccagcatcagtcccgccaagagcactacggctccagggacaccctcgtcaaaccccacgatgaccagacctactacagcagggctgctactgagttcccagcccaaccatggtctgcccacctgcctggtctgcgtgtgcctcggttcctctgtgtattgcgatgacattgacctagaggacattcctcctcttcctcggaggactgcctacctgtatgcacgcttcaaccgcatcagccgtatcagggccgaagacttcaaagggctgacaaagttgaagaggattgacctctccaacaacctcatttcctccatcgataatgatgccttccgcctgctacatgccctccaggacctcatcctcccagagaaccagttggaagctctgcccgtgctgcccagtggcattgagttcctggatgtccgcctaaatcggctccagagctcggggatacagcctgcagccttcagggcaatggagaagctgcagttcctttacctgtcagacaacctgctggattctatcccggggcctttgcccctgagcctgcgctctgtacacctgcagaataacctgatagagaccatgcagagagacgtcttctgtgaccccgaggagcacaaacacacccgcaggcagctggaagacatccgcctggatggcaaccccatcaacctcagcctcttccccagcgcctacttctgcctgcctcggctccccatcggccgcttcacgtagctcggagcccttccactcctcccaggtcatctcttggaccagcgggcatcacattctccagcagccgccatctcacacgcctccctcctgtggccgccggcagcatggacaaaggtctccatgcagggggaggaggcctgcttctttccccacagctctcacgtctcccttctccctgcgggtgacaaagaagcccaaggaccacctccttcctgcctcattgtactgcgggtgacaaagaagcccaaggaccacctccttcctgcctcattgtaataaaattccccacactgaaaaaaaaagaa

SEQ ID NO: 729058 - DNA, 460 bp, Homo sapiens
  misc_feature (31)..(31): n is a, c, g, or t
gtaagaagtggggcagcgaggagcggaaganagcatgcccttcaaaaagggtgccgcctttgagctggtcttcatagtcctggctgagcactacaaggtggtggtaaatggaaatcccttctatgagtacgggcaccggcttcccctacagatggtcacccacctgcaagtggatggggatctgcaacttcaatcaatcaacttcatcggaggccagcccctccggccccagggacccccgatgatgccaccttaccctggtcccggacattgccatcaacagctgaacagcctgcccaccatggaaggacccccaaccttcaacccgcctgtgccatatttcgggaggctgcaaggaggggctcacagctcgaagaaccatcatcatcaagggctatgtgcctcccacaggcaagagctttgctaatcaacttcaaaggtgggctcctcaggggacata

SEQ ID NO: 729059 - DNA, 475 bp, Homo sapiens; identical to SEQ ID NO: 626530

SEQ ID NO: 729060 - DNA, 171 bp, Homo sapiens
cccgggcacatcgtggagcgtgacgagtagtacggtggctgtaacttggtaatcctttttataactgttggctgtgtgttcttgtactgctggagacccacctgcaagtggatggggatctgcaacttcaatcaatcaacttcatcggaggccagcccctccggccccagg

SEQ ID NO: 729061 - DNA, 283 bp, Homo sapiens
ctgccacgcacgactgaacacagacagcagccgcctcgccatgaagctgctgatggtcctcatgctggcggccctcctcctgcactgctatgcagattctggctgcaaactcctggaggacatggttgaaaagaccatcaattccgacatatctatacctgaatacaaagagcttcttcaagagttcatagacagtgatgccgctgcagaggctatggggaaattcaagcagtgtttcctcaaccagtcacatagaactctgaaaaactttggactgatgatg

SEQ ID NO: 729062 - DNA, 1097 bp, Homo sapiens
accgtccgggcacgagccccgcccgagctcaccgcccctgctcccctctccgaccctttgagccgtggccgttgccagatgtccacaatgggaaacgaggccagttacccggcggagatgtgctcccactttgacaatgatgaaattaaaaggctgggcaggaggtttaagaagttggacttggacaaatcagggtctctgagcgtggaggagttcatgtccctgccggagctgcgccacaacccgttggtgcggcgagtgatcgacgtcttcgacaccgacggtgatggagaagtggacttcaaggaattcatcctggggacctcccagttcagcgtcaagggcgacgaggagcagaagttgaggtttgcgttcagcatttacgacatggataaagatggctacatttccaacggggagctcttccaggtgctgaagatgatggtgggcaacaacctgacggactggcagctccagcagctggtcgacaaaaccatcatcatcctggacaaggatggcgatgggaagatatcctttgaggaattcagtgctgtggtcagagacctggagatccacaagaagctggtcctcatcgtatgagcctttttcttacaagcaccacccaacaacttctgctttcttccctatctctttcaagatttgctcaagacgtccaactgtctctctgacttatctggaagtatttctttttgtgaagccatatgtcctaacaggagcttcatcaccaactcagtgctattaattctccttctctgaatgactcagggtaccctatagggggaagagcaagtcaaatgagcatagtggggaaagaaaaggaaatggcttttataaacatcttttactttgttttgattcaaagaccaaactagaactttaaaagttcaaaaataagaaagtatacatttttgctgttatttctcatcattttgtatatgggaggaaatttataatttgcatgggtgttaggtgaactgttttcatttgcttgtgttcagatatcttgccagattgttaacttcctattgtagcaacagggacaaatatatttgtctttgctgggcaaaaagtaatca

SEQ ID NO: 729063 - DNA, 345 bp, Homo sapiens; identical to SEQ ID NO: 337939

SEQ ID NO: 729064 - DNA, 517 bp, Homo sapiens
aggttgaccacctgtttcatgcagcttagggtcagaagaatctgtagctctgtcaagaagacgcagggctacagataggaaacaggagggaataatccagccagaaattatcttgcccaaccacagagggcatcatctacattctgctgggatccataccagaggaggacagaaacagaaaataggatcgggactggaaactagagctgtggttgtcttctggatggatcagaatgctctagatcaatggaacgtggcagctccaattccagtcatcgtaacgcgtgtcctccaagccctcggaactgtggctgtggctctgggggctctaggagctgcctactacatcactgaatccttgtgaacaagcccctaggcccacagtctggcagacctccaccagccccaggagttgataggtgatggcgctgggagaagatgttcagaatatctcaaaagccaagtccagaagatccagtttccatcaaagggacctctcttgtcaccaaaatttaaa

SEQ ID NO: 729065 - DNA, 1336 bp, Homo sapiens
ggtccagctggaggcccaagccaggctcctagggcagagggcaaacggcccctccaggagggagccgggagattacgcagctccatgtaggtccacgtttaggttgggaggatctaccatgaagaaggtcaagaagaaaagggcctctgattcgcgccggcccgcattcctgctcctgtgccacttgcccctgcagctccgcttgctggcgtcgtctggggctatgccatagccgcatcttcgatgtccttctgcctcgggactggcagatggcgccagggagaggactccccaacctgctcaccttctacagaaaatcttcaagaaaaccctccagtcatcgtaacgcgtgtcctccaagccctcggaactgtggctgtggctctgggggctctaggagctgcctactacatcactgaatccttgtgaacaagcccctaggcccacagtctggcaggaggtgcttttaatgtgctgataaaccaacctcaggaaggtattatgtacagaagattcccaaggctgctgttgctgaaagagacttgggctactgccagggaactagaaacgtgctgagaagaggactgcaatgactgctttcaaaaaacaccagaataaatacatacgtagtgtaagcaagcgaccactgttgtatcaaaagccctttgttgtatctgttggtggcggaggcagccagcggttaactgaggttctactgagctctgtggaccacagagttgtcttctcaagtttgcttctagggacaaattactacaggtggaatctccacactggctctgtgacccaaaaagtaagggctattatgacagagggagcaaagggaagcccttggaccctccccagtcccttcaacaaaatagcaaatctagaggaacactgcgtccctgctgggaacacagatgttgatatcactgtgaatgagtcaaaaggggtgggtgtgtgtgtgtgtgtgtgtgcgcacgcgcgcatgtggaggcagtgggtgattcccctcacagctctacgtaagtctcccgtcttctggccagtgcagaatggtggctcctggaggggtggacagcagcacattgtctgcatcttgctcgtgggctctgtgctgggtggaccttagccacctcaccatcctgcaggacatcgtgctggtccactgcactgaccgtatcaggcctaggacttgaagccatcctgttaccagtagcttggatttccttctaaaggcaatctattatttgacctattttaaatattttatttaataatttatgtcctatctcaatataaaacaatttaaggaagatgttgggttatacaattt

SEQ ID NO: 729066 - DNA, 582 bp, Homo sapiens
ggtccagctggaggcccaagccaggctcctagggcagagggcaaacggcccctccaggagggagccgggagattacgcagctccatgtaggtccacgtttaggttgggaggatctaccatgaagaaggtcaagaagaaaagggcctctgattcgcgccggcccgcattcctgctcctgtgccacttgcccctgcagctccgcttgctggcgtcgtctggggctatgccatagccgcatcttcgatgtccttctgcctcgggactggcagatggcgccagggagaggactccccaacctgctcaccttctacagaaaatcttcaagaaaaccctccagtcatcgtaacgcgtgtcctccaagccctcggaactgtggctgtggctctgggggctctaggagctgcctactacatcactgaatccttgtgaacaagcccctaggcccacagtctggcagacctccaccagccccaggagttgataggtgatggcgctgggagaagatgttcagaatatctcaaaagccaagtccagaagatccagtttccatcaaagggacctctcttgtcaccaaaatttaaa

SEQ ID NO: 729067 - DNA, 479 bp, Homo sapiens
ctagccctgaatccacaccacagcagcctagtcctgaatccacaccacagcagcctagccctgaatccacaccacagcattccagccttgaaaccacctcccggcagccagcattccaagcccttccagcacccgaaatccgccgctcctcttgctgccttttatctccagatgctaacgtgaaggcagcccctcaatccaggaaagcagaaaatcttcaagaaaaccctccagtcatcgtaacgcgtgtcctccaagccctcggaactgtggctgtggctctgggggctctaggagctgcctactacatcactgaatccttgtgaacaagcccctaggcccacagtctggcagacctccaccagccccaggagttgataggtgatggcgctgggagaagatgttcagaatatctcaaaagccaagtccagaagatccagtttccatcaaagggacctctcttgtcaccaaaatttaaa

SEQ ID NO: 729068 - DNA, 833 bp, Homo sapiens
ggtccagctggaggcccaagccaggctcctagggcagagggcaaacggcccctccaggagggagccgggagattacgcagctccatgtaggtccacgtttaggttgggaggatctaccatgaagaaggtcaagaagaaaaggtcagaggccagacgccaccgagactccacctcccagcatgctagctccaattccacctctcagcagcctagtcctgaatccacaccacagcagcctagccctgaatccacaccacagcattccagccttgaaaccacctcccggcagccagcattccaagcccttccagcacccgaaatccgccgctcctcttgctgccttttatctccagatgctaacgtgaaggcagcccctcaatccaggaaagcagggcctctgattcgcgccggcccgcattcctgctcctgtgccacttgcccctgcagctccgcttgctggcgtcgtctggggctatgccatagccgcatcttcgatgtccttctgcctcgggactggcagatggcgccagggagaggactccccaacctgctcaccttctacagaaaatcttcaagaaaaccctccagtcatcgtaacgcgtgtcctccaagccctcggaactgtggctgtggctctgggggctctaggagctgcctactacatcactgaatccttgtgaacaagcccctaggcccacagtctggcagacctccaccagccccaggagttgataggtgatggcgctgggagaagatgttcagaatatctcaaaagccaagtccagaagatccagtttccatcaaagggacctctcttgtcaccaaaatttaaa

SEQ ID NO: 729069 - DNA, 857 bp, Homo sapiens
ggtccagctggaggcccaagccaggctcctagggcagagggcaaacggcccctccaggagggagccgggagattacgcagctccatgtaggtccacgtttaggttgggaggatctaccatgaagaaggtcaagaagaaaaggtcagaggccagacgccaccgagactccacctcccagcatgctagctccaattccacctctcagcagcctagtcctgaatccacaccacagcagcctagccctgaatccacaccacagcattccagccttgaaaccacctcccggcagccagcattccaagcccttccagcacccgaaatccgccgctcctcttgctgccttttatctccagatgctaacgtgaaggcagcccctcaatccaggaaagcagggcctctgattcgcgccggcccgcattcctgctcctgtgccacttgcccctgcagctccgcttgctggcgtcgtctggggctatgccatagccgcatcttcgatgtccttctgcctcgggactggcagatggcgccagggagaggactccccaacctgctcaccttctacagaaaatcttcaagaaaaccctccagtcatcgtaacgcgtgtcctccaagccctcggaactgtggctgtggctctgggggctctaggagctgcctactacatcactgaatccttgtgaacaagcccctaggcccacagtctggcaggaggtgcttttaatgtgctgataaaccaacctcaggaaggtattatgtacagaagattcccaaggctgctgttgctgaaagagacttgggctactgccagggaactagaaacgtgctgagaagaggactgcaatgactgctttcaaaaa

SEQ ID NO: 729070 - DNA, 399 bp, Homo sapiens
ctagccctgaatccacaccacagcagcctagtcctgaatccacaccacagcagcctagccctgaatccacaccacagcattccagccttgaaaccacctcccggcagccagcattccaagcccttccagcacccgaaatccgccgctcctcttgctgccttttatctccagatgctaacgtgaaggcagcccctcaatccaggaaagcagaaaatcttcaagaaaaccctccagtcatcgtaacgcgtgtcctccaagccctcggaactgtggctgtggctctgggggctctaggagctgcctactacatcactgaatccttgtgaacaagcccctaggcccacagtctggcagatccagtttccatcaaagggacctctcttgtcaccaaaatttaaa

SEQ ID NO: 729071 - DNA, 952 bp, Homo sapiens
ggtccagctggaggcccaagccaggctcctagggcagagggcaaacggcccctccaggagggagccgggagattacgcagctccatgtaggtccacgtttaggttgggaggatctaccatgaagaaggtcaagaagaaaagggcctctgattcgcgccggcccgcattcctgctcctgtgccacttgcccctgcagctccgcttgctggcgtcgtctggggctatgccatagccgcatcttcgatgtccttctgcctcgggactggcagatggcgccagggagaggactccccaacctgctcaccttctacagaaaatcttcaagaaaaccctccagtcatcgtaacgcgtgtcctccaagccctcggaactgtggctgtggctctgggggctctaggagctgcctactacatcactgaatccttgtgaacaagcccctaggcccacagtctggcagaccccctcaatatcctcctcagatttgccctgcacttcttgttccatgcttggggtcctaagaacaagccatctgatgcctctactatcattacctctattgggacccagaaaccaataccccaaaatatggtgcatggacatgctgaactgaagaagatgcctcaagggtcatccctaaaggcaaaaacagaacttccaaagtatctttctgtgacaacattaggttcaggcttgaagtccctgatttcgccatcaaagtcagatccaggggggacgatgctattcagaaacgtgctgagaagaggactgcaatgactgctttcaaaaaacaccagaataaatacatacgtagtgtaagcaagcgaccactgttgtatcaaaagccctttgttgtatctgttggtggcggaggcagccagcggttaactgaggttctactgagctctgtggaccacagagttgtcttctcaagtttgcttctagggacaaatta

SEQ ID NO: 729072 - DNA, 1203 bp, Homo sapiens
ggtccagctggaggcccaagccaggctcctagggcagagggcaaacggcccctccaggagggagccgggagattacgcagctccatgtaggtccacgtttaggttgggaggatctaccatgaagaaggtcaagaagaaaaggtcagaggccagacgccaccgagactccacctcccagcatgctagctccaattccacctctcagcagcctagtcctgaatccacaccacagcagcctagccctgaatccacaccacagcattccagccttgaaaccacctcccggcagccagcattccaagcccttccagcacccgaaatccgccgctcctcttgctgccttttatctccagatgctaacgtgaaggcagcccctcaatccaggaaagcagggcctctgattcgcgccggcccgcattcctgctcctgtgccacttgcccctgcagctccgcttgctggcgtcgtctggggctatgccatagccgcatcttcgatgtccttctgcctcgggactggcagatggcgccagggagaggactccccaacctgctcaccttctacagaaaatcttcaagaaaaccctccagtcatcgtaacgcgtgtcctccaagccctcggaactgtggctgtggctctgggggctctaggagctgcctactacatcactgaatccttgtgaacaagcccctaggcccacagtctggcagaccccctcaatatcctcctcagatttgccctgcacttcttgttccatgcttggggtcctaagaacaagccatctgatgcctctactatcattacctctattgggacccagaaaccaataccccaaaatatggtgcatggacatgctgaactgaagaagatgcctcaagggtcatccctaaaggcaaaaacagaacttccaaagtatctttctgtgacaacattaggttcaggcttgaagtccctgatttcgccatcaaagtcagatccaggggggacgatgctattcagaaacgtgctgagaagaggactgcaatgactgctttcaaaaaacaccagaataaatacatacgtagtgtaagcaagcgaccactgttgtatcaaaagccctttgttgtatctgttggtggcggaggcagccagcggttaactgaggttctactgagctctgtggaccacagagttgtcttctcaagtttgcttctagggacaaatta

SEQ ID NO: 729073 - DNA, 272 bp, Homo sapiens; identical to SEQ ID NO: 337946

SEQ ID NO: 729074 - DNA, 328 bp, Homo sapiens; identical to SEQ ID NO: 337947

SEQ ID NO: 729075 - DNA, 576 bp, Homo sapiens
gtagttcttgctgccaccaccactgtcattcccccaggtataggaaggtacactgtgtcttccgattcttggagccagctctgctgtccagacctcctgaagccaggtgtccaggcacccagcacctcctgccaattcatacagaattcaattccccacctggaagggctttcagaagctgacctgcccaacccctggatttcaggcaaactgagaagattggagagggccaaggatttgtcactgagcaaggaggaagccaaagacttagagggcagagaaggatgtaatcaaaatcttcgtcatctccggcttccgaagctcccttccaaagtgccctcaagggcctggaacactctcagtgacagaggcaagagccccatcttgccccagtgctgcccatcaaaatggacccctaaatcctggcccagcctcccagcgcagatctctccttcctcctgtagccccaactaatgtctgtctggaatttgaggggccctggtctggcacactgtggatgcttagttaatgtatggtgactgactaatgtgtggccccaggcctgccccccacctc

SEQ ID NO: 729076 - DNA, 470 bp, Homo sapiens; identical to SEQ ID NO: 163192

SEQ ID NO: 729077 - DNA, 509 bp, Homo sapiens
  misc_feature (17)..(17): n is a, c, g, or t
  misc_feature (39)..(39): n is a, c, g, or t
  misc_feature (498)..(499): n is a, c, g, or t
cagccctgacgcttccntggggccacttccttctttgtntcctagcaacggcgggtagcgttgttgacatcccgggaggctgtgccgccggcctgagcccagagtttcgcggcctccgcgatggcagaggtggaggaaaccttaaagaggatccagagtcataaaggggttattggaactatggttgtaaatgcagaaggtattcccatccgaacaaccttggacaactcaacaactgttcaatatgcaggccttcttcatcacctgacaatgaaagccaaaagcacagttcgtgatattgatcctcagaacgacctgacttttcttaggatcagatcaaagaaacatgaaatcatggtagctccagataaggaatatcttctgatcgtcattcagaatccatgtgaatagacctgcgatggccaaggctgtttaagcgacactgggttggaaacacttggctctctcatgagtattaaaattctatttccttcctannggaattcaat

SEQ ID NO: 729078 - DNA, 422 bp, Homo sapiens
  misc_feature (411)..(412): n is a, c, g, or t
ttgtaaatgcagaagttctggaggttagaagttgaaatcaagatgtccgaaggctcatgctgtctctgaagactctgtgggaggaccattccttacctcttcctagcttctggtattcccatccgaacaaccttggacaactcaacaactgttcaatatgcaggccttcttcatcacctgacaatgaaagccaaaagcacagttcgtgatattgatcctcagaacgacctgacttttcttaggatcagatcaaagaaacatgaaatcatggtagctccagataaggaatatcttctgatcgtcattcagaatccatgtgaatagacctgcgatggccaaggctgtttaagcgacactgggttggaaacacttggctctctcatgagtattaaaattctatttccttcctannggaattcaat

SEQ ID NO: 729079 - DNA, 417 bp, Homo sapiens
  misc_feature (406)..(407): n is a, c, g, or t
caccctggctacacatccaatcacttggaggacattttaaaattttttccattcctgggactgcaccccaaaccaatgaaatcagaatctctgaggccctaggaaatgggtattttctaaagactgaacaggtaattcatacgtgcagatagggtgggaaaccatctgtctgcacaaggtccctgtgatgttttgaagaaaaaagaagactagttgaaatattccttgattaaatttaaattaagggtgaattgattttatccatctctccatagataaggaatatcttctgatcgtcattcagaatccatgtgaatagacctgcgatggccaaggctgtttaagcgacactgggttggaaacacttggctctctcatgagtattaaaattctatttccttcctannggaattcaat

SEQ ID NO: 729080 - DNA, 722 bp, Homo sapiens
caaaccctgttctgtgctgtgtacgatgagtaagcttcccaagttaaaattattgctccacaccacagatttcagattccaagtggaacagaagtccaaagttgctgtttataaacttctaagggtcgattgtacctttcaatggtgtccaccctgtgttgacatacagcaaaaccgaagggctcttgaaacttctaaccactttctgaattacagcgaagaatattctttgcatggtatcaaagttctacaatgtctcagtaattttacatattgaaaaaagtcattgatttccatattcagtcctctgcgctgtcttctcatttcaagtagtctcatgttccatgtattattacgttatttgaggaattaaaaaaaaaaaaaaagaactggggaatctccaagagctggcgggaatattggctttgagaaaggaaccttagaattcaaacgtaatgttttacctaaaaaggagtccagtttccaacacttgggctgggaacgacaggctatggttgcccaggatctgaagtacagaggaaattgcttgtccttctggtgggagagtttgtctctagaggatcaggaggatcaggagggtcaggagaagggcagggtgtggccgggaggaaggggcatggttagagatttcttttcttgatcattttcatcccagttcagcactgagttcagatttcccttccttccttccttccttccat

SEQ ID NO: 729081 - DNA, 1029 bp, Homo sapiens
actcgagtgggtgcgcatgcgcaagaaggtgcctgcgggactggagcagagcgggctgcgagggtcttcccagcgcaggcgggttttccagtgttacttgcggctgggcgtgggggactagctgcctttctggcagcaggcaggaagccgcaaaaagtttctgagcccccgaacctgtagcggacgtggaaaaagaacgcccctcctcaagtgtctggctgaaagatgccacccagggaagggaactcgggctagctaaggaggccattcttgatgttgcttctagatctcatgtcatcaccgagccctcagctgctggtggcagctgctcagcagacccttggcatgggaaagagacggagtccaccccaagccatctgccttcacttagctggagaggtgctggctgtggcccggggactgaagccagctgtgctctatgattgcaactgtgcaggggcatcagagctccagagctatctggaggagctgaaggggcttggcttcctgacttttggacttcacatccttgagattggagaaaacagcctgattgtcagtcctgagcatgtatgtcagcacttggagcaggtgctgcttggtaccatagcctttgtggatgtttccagctgccagcgtcacccttctgtctgctccctggaccagcttcaggacttgaaggccctcgtggctgagatcatcacacatttgcaggggctgcagagggacttatctctagcagtctcctacagcaggctccattcctcagactggaatctgtgtactgtatttgggatcctcctgggctatcctgttccctatacctttcacctgaaccagggagatgacaactgcttagctctgactccactacgagtattcactgcccggatctcatggttgctaggtcaacccccaatcctgctctattcttttagtgtcccagagagtttgttcccaggcctgagggacattctaaacacctgggagaaggacctcagaacccgatttaggactcagaatgacttt

SEQ ID NO: 729082 - DNA, 1114 bp, Homo sapiens; identical to SEQ ID NO: 398002

SEQ ID NO: 729083 - DNA, 1255 bp, Homo sapiens
attatccagcacagagaagcaaacaccagaagcttctctccaactttcagtttttctctaaacttccagtccttctcatactgtgtcctggttataatagttgctgggaccttattctattctgaatccccagcccctaaagaaggcttggtactgacgtgtacagcgtagttacccagtgactttggggaaggcaggaagagtgtggaaaggacaggaggaaggaagggaggggccgtggctccgagctgcctagaaagcggctccagggagccagggcaccgtgagcctggtggttggcagctggagccacgtcggagggggaagtgtcgcagcattctctgcaggcatcacagacctgaggcagtggcctccggagggcactggacagaaacagccatccaagtggctgagtggagggaccctgctcaagtgcagctgcagtggccggggtttccctcaggtagggatcggggcgccttgtcgccgccagccacgtgtggcgtcccggtacagtcagcagagtgcagggtgcgggcaccaggaaagggggcgcaggggaactcccgcgggcctcgcgtttgcaaacttctcgcctgggcaggaggcggtcgtgggaaagaaggtggaagagcgagctttttggaactgtgcacgggacagattggacgcacacccctcgggaggcgcgaaggcatggaaaatttgaagcatattatcacccttggccaggtcatccacaaacggtgtgaagagatgaaatactgcaagaaacagtgccggcgcctgggccaccgcgtcctcggcctgatcaagcctctggagatgctccaggaccaaggaaagaggagcgtgccctctgagaagttaaccacagccatgaaccgcttcaaggctgccctggaggaggctaatggggagatagaaaagttcagcaatagatccaatatctgcaggtttctaacagcaagccaggacaaaatactcttcaaggacgtgaacaggaagctgagtgatgtctggaaggagctctcgctgttacttcaggttgagcaacgcatgcctgtttcacccataagccaaggagcgtcctgggcacaggaagatcagcaggatgcagacgaagacaggcgagctttccagatgctaagaagagataatgaaaaaatagaagcttcactgagacgattagaaatcaacatgaaagaaatcaaggaaactttgaggcagtgtaagttatcatgtgccctgctgt

SEQ ID NO: 729084 - DNA, 1356 bp, Homo sapiens
gttcttttcctggctagtcaaagcacaccttacgtacattctgaagccgtctcttatatgattcatttttttcactgtagataagacttttatggatggattgtttttctcaaataatattatcgctttgtgactaaagtaaagattattaattcctgaggcaagaagatataaaagctccagaaacgttgactgggaccactggagacactgaagaaggcaggggcccttagagtcttggttgccaaacagatttgcagatcaaggagaacccaggagtttcaaagaagcgctagtaaggtctctgagatccttgcactagctacatcctcagggtaggaggaagatggcttccagaagcatgcggctgctcctattgctgagctgcctggccaaaacaggagtcctgggtgatatcatcatgagacccagctgtgctcctggatggttttaccacaagtccaattgctatggttacttcaggaagctgaggaactggtctgatgccgagctcgagtgtcagtcttacggaaacggagcccacctggcatctatcctgagtttaaaggaagccagcaccatagcagagtacataagtggctatcagagaagccagccgatatggattggcctgcacgacccacagaagaggcagcagtggcagtggattgatggggccatgtatctgtacagatcctggtctggcaagtccatgggtgggaacaagcactgtgctgagatgagctccaataacaactttttaacttggagcagcaacgaatgcaacaagcgccaacacttcctgtgcaagtaccgaccatagagcaagaatcaagattctgctaactcctgcacagccccgtcctcttcctttctgctagcctggctaaatctgctcattatttcagaggggaaacctagcaaactaagagtgataagggccctactacactggcttttttaggcttagagacagaaactttagcattggcccagtagtggcttctagctctaaatgtttgccccgccatccctttccacagtatccttcttccctcctcccctgtctctggctgtctcgagcagtctagaagagtgcatctccagcctatgaaacagctgggtctttggccataagaagtaaagatttgaagacagaaggaagaaactcaggagtaagcttctagaccccttcagcttctacacccttctgccctctctccattgcctgcaccccaccccagccactcaactcctgcttgtttttcctttggccataggaaggtttaccagtagaatccttgctaggttgatgtgggccatacattcctttaataaaccattgtgtacataaga

SEQ ID NO: 729085 - DNA, 1423 bp, Homo sapiens; identical to SEQ ID NO: 339566

SEQ ID NO: 729086 - DNA, 1206 bp, Homo sapiens
aaccttttcacctgtctgttctggcatgcttctaatgatgtcagagtcacctggatcaatgataggaaggcaggggcccttagagtcttggttgccaaacagatttgcagatcaaggagaacccaggagtttcaaagaagcgctagtaaggtctctgagatccttgcactagctacatcctcagggtaggaggaagatggcttccagaagcatgcggctgctcctattgctgagctgcctggccaaaacaggagtcctgggtgatatcatcatgagacccagctgtgctcctggatggttttaccacaagtccaattgctatggttacttcaggaagctgaggaactggtctgatgccgagctcgagtgtcagtcttacggaaacggagcccacctggcatctatcctgagtttaaaggaagccagcaccatagcagagtacataagtggctatcagagaagccagccgatatggattggcctgcacgacccacagaagaggcagcagtggcagtggattgatggggccatgtatctgtacagatcctggtctggcaagtccatgggtgggaacaagcactgtgctgagatgagctccaataacaactttttaacttggagcagcaacgaatgcaacaagcgccaacacttcctgtgcaagtaccgaccatagagcaagaatcaagattctgctaactcctgcacagccccgtcctcttcctttctgctagcctggctaaatctgctcattatttcagaggggaaacctagcaaactaagagtgataagggccctactacactggcttttttaggcttagagacagaaactttagcattggcccagtagtggcttctagctctaaatgtttgccccgccatccctttccacagtatccttcttccctcctcccctgtctctggctgtctcgagcagtctagaagagtgcatctccagcctatgaaacagctgggtctttggccataagaagtaaagatttgaagacagaaggaagaaactcaggagtaagcttctagaccccttcagcttctacacccttctgccctctctccattgcctgcaccccaccccagccactcaactcctgcttgtttttcctttggccataggaaggtttaccagtagaatccttgctaggttgatgtgggccatacattcctttaataaaccattgtgtacataaga

SEQ ID NO: 729087 - DNA, 1273 bp, Homo sapiens; identical to SEQ ID NO: 339564

SEQ ID NO: 729088 - DNA, 766 bp, Homo sapiens
gttcttttcctggctagtcaaagcacaccttacgtacattctgaagccgtctcttatatgattcatttttttcactgtagataagacttttatggatggattgtttttctcaaataatattatcgctttgtgactaaagtaaagattattaattcctgaggcaagaagatataaaagctccagaaacgttgactgggaccactggagacactgaagaaggcaggggcccttagagtcttggttgccaaacagatttgcagatcaaggagaacccaggagtttcaaagaagcgctagtaaggtctctgagatccttgcactagctacatcctcagggtaggaggaagatggcttccagaagcatgcggctgctcctattgctgagctgcctggccaaaacaggagtcctgggtgatatcatcatgagacccagctgtgctcctggatggttttaccacaagtccaattgctatggttacttcaggaagctgaggaactggtctgatgccgagctcgagtgtcagtcttacggaaacggagcccacctggcatctatcctgagtttaaaggaagccagcaccatagcagagtacataagtggctatcagagaagccagccgatatggattggcctgcacgacccacagaagcccagccactcaactcctgcttgtttttcctttggccataggaaggtttaccagtagaatccttgctaggttgatgtgggccatacattcctttaataaaccattgtgtacataaga

SEQ ID NO: 729089 - DNA, 616 bp, Homo sapiens
aaccttttcacctgtctgttctggcatgcttctaatgatgtcagagtcacctggatcaatgataggaaggcaggggcccttagagtcttggttgccaaacagatttgcagatcaaggagaacccaggagtttcaaagaagcgctagtaaggtctctgagatccttgcactagctacatcctcagggtaggaggaagatggcttccagaagcatgcggctgctcctattgctgagctgcctggccaaaacaggagtcctgggtgatatcatcatgagacccagctgtgctcctggatggttttaccacaagtccaattgctatggttacttcaggaagctgaggaactggtctgatgccgagctcgagtgtcagtcttacggaaacggagcccacctggcatctatcctgagtttaaaggaagccagcaccatagcagagtacataagtggctatcagagaagccagccgatatggattggcctgcacgacccacagaagcccagccactcaactcctgcttgtttttcctttggccataggaaggtttaccagtagaatccttgctaggttgatgtgggccatacattcctttaataaaccattgtgtacataaga

SEQ ID NO: 729090 - DNA, 455 bp, Homo sapiens
caggagcttaagttacagcgtcaggacagtacccggtgactcttggggatatttatttattttccctgagcctatatcttcatctgtgaaatggggataaaaatacttgttgctgtcacaattattaccatctctccagctagcaaaattactaccagagccgttactacacacaaaggctattgaccgagcacataccatgtgccacacaccttgacaaaatcttttaatacagtttattatgtactattcaatctttacacaatgtcacgggaccagtattgtttacccaattttttataaggacactgaagcttagaggagtgaaatgttttgagtgttatttcagagagcaaatggcaaagactggatccaaacccatcttcctggacctgaagttcatgctcccagccaccccacccctgagctgaataaagatgatttaagcataaaaa

SEQ ID NO: 729091 - DNA, 530 bp, Homo sapiens
  misc_feature (52)..(52): n is a, c, g, or t
  misc_feature (55)..(55): n is a, c, g, or t
  misc_feature (173)..(173): n is a, c, g, or t
  misc_feature (370)..(371): n is a, c, g, or t
  misc_feature (382)..(382): n is a, c, g, or t
atgggcagtccatcacttttgatgccattcaggaggcatgtgccagagcagncgncgcattgtgtcccaaggaatccagaggaaaatgaggccattgcaagcttcgtgaagaagtacaacacatatgcctatgtaggcctgactgagggtcccagccctggagacttccgctnctcagatgggacccctgtaaactacaccaactggtaccgaggggagcctgcaggtcggggaaaagagcagtgtgtggagatgtacacagatgggcagtggaatgacaggaactgcctgtactcccgactgaccatctgtgagttctgagaggcatttaggccatgggacagggaggatcctgtctggccttcagttnncagcgtcaggntcacttggtctgtgagatgctagaactccctttcaacagaattcacttgtgggctattagagctggaggcacccttagccacttcattccccttttccagactggtgtcactcaggaatcaactagaccatatacgatcactgcccta

SEQ ID NO: 729092 - DNA, 1650 bp, Homo sapiens
  misc_feature (52)..(52): n is a, c, g, or t
  misc_feature (55)..(55): n is a, c, g, or t
  misc_feature (173)..(173): n is a, c, g, or t
  misc_feature (370)..(371): n is a, c, g, or t
  misc_feature (382)..(382): n is a, c, g, or t
  misc_feature (565)..(565): n is a, c, g, or t
  misc_feature (570)..(570): n is a, c, g, or t
  misc_feature (579)..(579): n is a, c, g, or t
  misc_feature (594)..(594): n is a, c, g, or t
  misc_feature (650)..(650): n is a, c, g, or t
  misc_feature (812)..(813): n is a, c, g, or t
atgggcagtccatcacttttgatgccattcaggaggcatgtgccagagcagncgncgcattgtgtcccaaggaatccagaggaaaatgaggccattgcaagcttcgtgaagaagtacaacacatatgcctatgtaggcctgactgagggtcccagccctggagacttccgctnctcagatgggacccctgtaaactacaccaactggtaccgaggggagcctgcaggtcggggaaaagagcagtgtgtggagatgtacacagatgggcagtggaatgacaggaactgcctgtactcccgactgaccatctgtgagttctgagaggcatttaggccatgggacagggaggatcctgtctggccttcagttnncagcgtcaggntcacttggtctgtgagatgctagaactccctttcaacagaattcacttgtgggctattagagctggaggcacccttagccacttcattcccctgatgggccctgactcttccccataatcactgaccagccttgacactccccttgcaaaccatcccagcactgcaccccaggcagccactcntagcnttggccttngacatgagatggagncctccttattccccatctggtccagttccttcacttacagatggcagcagtgaggncttggggtagaaggatcctccaaagtcacacaaagtgcctgcctcctggtcccctcagctctgcctctgcagcccactgcctgcccagtgccatcaggatgagcagtcccggccaagcataatgacagagagaggcagatttcggggaagccctgactgtgnngagctaaggacacagtggagattctctggcactctgaggtctctgtggcaggcctggtcaggctctccatgaggttagaaggccaggtagtgttccagcagggtggtggccaagccaaccccatgattgatgtgtacgattcactcctttgagtctttgaatggcaactcagccccctgacctggagacagccagcctaggcctctagggtgacctagagccgccttcagatgtgacccgagtaactttcaactgatgaacaaatctgcaccctacttcagatctcggtgggcattcacaccaccccccatgccaccggctccactttccccttttattaatacattcacccagataatcattaaaattaacatgtgccaggtcttaggatgtgtcttggggtgggcacagtacccggtgactcttggggatatttatttattttccctgagcctatatcttcatctgtgaaatggggataaaaatacttgttgctgtcacaattattaccatctctccagctagcaaaattactaccagagccgttactacacacaaaggctattgaccgagcacataccatgtgccacacaccttgacaaaatcttttaatacagtttattatgtactattcaatctttacacaatgtcacgggaccagtattgtttacccaattttttataaggacactgaagcttagaggagtgaaatgttttgagtgttatttcagagagcaaatggcaaagactggatccaaacccatcttcctggacctgaagttcatgctcccagccaccccacccctgagctgaataaagatgatttaagcataaaaa

SEQ ID NO: 729093 - DNA, 1664 bp, Homo sapiens
  misc_feature (52)..(52): n is a, c, g, or t
  misc_feature (55)..(55): n is a, c, g, or t
  misc_feature (173)..(173): n is a, c, g, or t
  misc_feature (370)..(371): n is a, c, g, or t
  misc_feature (382)..(382): n is a, c, g, or t
  misc_feature (565)..(565): n is a, c, g, or t
  misc_feature (570)..(570): n is a, c, g, or t
  misc_feature (579)..(579): n is a, c, g, or t
  misc_feature (594)..(594): n is a, c, g, or t
  misc_feature (650)..(650): n is a, c, g, or t
  misc_feature (812)..(813): n is a, c, g, or t
atgggcagtccatcacttttgatgccattcaggaggcatgtgccagagcagncgncgcattgtgtcccaaggaatccagaggaaaatgaggccattgcaagcttcgtgaagaagtacaacacatatgcctatgtaggcctgactgagggtcccagccctggagacttccgctnctcagatgggacccctgtaaactacaccaactggtaccgaggggagcctgcaggtcggggaaaagagcagtgtgtggagatgtacacagatgggcagtggaatgacaggaactgcctgtactcccgactgaccatctgtgagttctgagaggcatttaggccatgggacagggaggatcctgtctggccttcagttnncagcgtcaggntcacttggtctgtgagatgctagaactccctttcaacagaattcacttgtgggctattagagctggaggcacccttagccacttcattcccctgatgggccctgactcttccccataatcactgaccagccttgacactccccttgcaaaccatcccagcactgcaccccaggcagccactcntagcnttggccttngacatgagatggagncctccttattccccatctggtccagttccttcacttacagatggcagcagtgaggncttggggtagaaggatcctccaaagtcacacaaagtgcctgcctcctggtcccctcagctctgcctctgcagcccactgcctgcccagtgccatcaggatgagcagtcccggccaagcataatgacagagagaggcagatttcggggaagccctgactgtgnngagctaaggacacagtggagattctctggcactctgaggtctctgtggcaggcctggtcaggctctccatgaggttagaaggccaggtagtgttccagcagggtggtggccaagccaaccccatgattgatgtgtacgattcactcctttgagtctttgaatggcaactcagccccctgacctggagacagccagcctaggcctctagggtatagatgccccccacgtgcatgacattgaccctgtgtagacttgctggcttatggatagtagatttgtacgggtcttgagacctcgggtggggcattcagatgagcgggttatttttaccggctccactttccccttttattaatacattcacccagataatcattaaaattaacatgtgccaggtcttaggatgtgtcttggggtgggcacagtacccggtgactcttggggatatttatttattttccctgagcctatatcttcatctgtgaaatggggataaaaatacttgttgctgtcacaattattaccatctctccagctagcaaaattactaccagagccgttactacacacaaaggctattgaccgagcacataccatgtgccacacaccttgacaaaatcttttaatacagtttattatgtactattcaatctttacacaatgtcacgggaccagtattgtttacccaattttttataaggacactgaagcttagaggagtgaaatgttttgagtgttatttcagagagcaaatggcaaagactggatccaaacccatcttcctggacctgaagttcatgctcccagccaccccacccctgagctgaataaagatgatttaagcataaaaa

SEQ ID NO: 729094 - DNA, 1374 bp, Homo sapiens
agtcaaagaattttaaaaacagggaactttgtaactgtgaaatactctccaggatttaaaaggctgtggagctccagataaagaatcgtttatctttcttctgaagaaattcctttggttacaagtttaccccataaacggcaacacactcacctccatccaagacagactcaaggtggaggaagcgtggaaatgtgcttccggacaaagctctcagtatcctgggtgccattgtttcttctactcagccgtgttttttctactgagacagacaaaccctcagcccaggacagcagaagccgtgggagttcaggccaaccggcagacctgctacaggttctctctgctggtgaccacccaccccacaaccactcaagaagcctcatcaaaacattgttggagaaaactgggtgcccacggaggagaaacggaatgcaaggagattgcaatctgtgctttgaaccagatgcactattactaatagctggaggaaattttgaagatcagcttagagaagaagtggtccagagagtttctcttctccttctctattacattattcatcaggaagagatctgttcttcaaagctcaacatgagtaataaagagtataaattttacctacacagcctactgagcctcaggcaggatgaagattcctctttcctttcacagaatgagacagaagatatcttggctttcaccaggcagtactttgacacttctcaaagccagtgtatggaaaccaaaacgctgcagaaaaaatctggaatagtgagcagtgaaggtgctaatgaaagtacgcttcctcagttggcagccatgatcattactttgtccctccagggtgtttgtctgggacaaggaaacttgccttccccagactactttacagaatatattttcagttccttgaatcgtacgaatacactccgcctatcagaggagccttactctgtggccagcaccaccacaggtccatggggagagctgccacactactgccaatgttcccttaaggcccaagggctcttgaatcaacttctggtgaatgctgcctaccctaggactcacccttcaggtcagtgggctcccctaggcccaggacaggtccagaaatcccatccaagggccaagtcctggaatctcaggccccccaccccaagagtctgcttggacagcattgagttcaatgcctcaaaattgccatgcccccctactgtcagcacccagagatgctctctgcaccacactgctgctactggggaggtgggagaggggtgacatcagagattcaagactgttttttctgcctcttcagtgcctatttcagtaatatgaagttaaaaccagtcaggcattttctgataggaa

SEQ ID NO: 729095 - DNA, 990 bp, Homo sapiens
agtcaaagaattttaaaaacagggaactttgtaactgtgaaatactctccaggatttaaaaggctgtggagctccagataaagaatcgtttatctttcttctgaagaaattcctttggttacaagtttaccccataaacggcaacacactcacctccatccaagacagactcaaggtggaggaagcgtggaaatgtgcttccggacaaagctctcagtatcctgggtgccattgtttcttctactcagccgtgttttttctactgagacagacaaaccctcagcccaggacagcagaagccgtgggagttcaggccaaccggcagacctgctacaggttctctctgctggtgaccacccaccccacaaccactcaagaagcctcatcaaaacattgttggagaaaactgggtgcccacggaggagaaacggaatgcaaggagattgcaatctgtgctttgaaccagatgcactattactaatagctggaggaaattttgaagatcagcttagagaagaagtggtccagagagtttctcttctccttctctattacattattcatcaggaagagatctgttcttcaaagctcaacatgagtaataaagagtataaattttacctacacagcctactgagcctcaggcaggatgaagattcctctttcctttcacagaatgagacagaagatatcttggctttcaccaggcagtactttgacacttctcaaagccagtgtatggaaaccaaaacgctgcagaaaaaatctggaatagtgagcagtgaaggtgctaatgaaagtacgcttcctcagttggcagccatgatcattactttgtccctccagggtgtttgtctgggacaaggaaacttgccttccccagactactttacagaatatattttcagttccttgaatcgtacgaatacactccgcctatcagaactagaccaactcctcaacactctctggaccagaagtacttgtatc

SEQ ID NO: 729096 - DNA, 886 bp, Homo sapiens; identical to SEQ ID NO: 176867

SEQ ID NO: 729097 - DNA, 618 bp, Homo sapiens
  misc_feature (377)..(377): n is a, c, g, or t
  misc_feature (428)..(428): n is a, c, g, or t
  misc_feature (468)..(468): n is a, c, g, or t
tgacatctggtcggaccatgtctaaagagttgaactgtgtgcaggtatgagcccttggttctgccagtgtctggggagttgagcctgggcatgggtgtgagaccctgggtctgtccatatctgaggaggtaggatctggtatgagtatgaggatctgggtgtgtccgtgtctgaggaggtgggccctggcacaggtatgaggcctggggtctgtccgtgtctgaggaggtgggccctggcgcaggtatgaggccctgggtgtgtccgtgtctgaggaggtgggccctggcacaggtatgaggtcctgggtctgctggtgtctgcagagacagggcccgacatctcagggaagaccacggtaagctcttcagtttgtnttgtggctgtggtcagtcatctgtagtctgccctgttggtcttcccatgtnttgccagcacctgcctgctgccttgcttcctggaggtggnttgggccagggccctccgagacgcccctgtgcaagaccagggacagggtttccggcaggaggtggggggcggggtgtgccggccctccctcagcaccttgtcctgtctctcctagtgggtgggaggacgctactgctgtgtcagaccatc

SEQ ID NO: 729098 - DNA, 1680 bp, Homo sapiens; identical to SEQ ID NO: 181813

SEQ ID NO: 729099 - DNA, 1382 bp, Homo sapiens
  misc_feature (852)..(852): n is a, c, g, or t
  misc_feature (856)..(856): n is a, c, g, or t
agcggagttgagctgaatgaatacctccgaagccgctttgttctccagatgtgaatagctccactataccagcctcgtcttccttccgggggacaacgtgggtcagggcacagagagatatttaatgtcaccctcttggggctttcatgggactccctctgccacattttttggaggttgggaaagttgctagaggcttcagaactccagcctaatggatcccaaactcgggagaatggctgcgtccctgctggctgtgctgctgctgctgctgctggagcgcggcatgttctcctcaccctccccgcccccggcgctgttagagaaagtcttccagtacattgacctccatcaggatgaatttgtgcagacgctgaaggagtgggtggccatcgagagcgactctgtccagcctgtgcctcgcttcagacaagagctcttcagaatgatggccgtggctgcggacacgctgcagcgcctgggggcccgtgtggcctcggtggacatgggtcctcagcagctgcccgatggtcagagtcttccaatacctcccgtcatcctggccgaactggggagcgatcccacgaaaggcaccgtgtgcttctacggccacttggacgtgcagcctgctgaccggggcgatgggtggctcacggacccctatgtgctgacggaggtagacgggaaactttatggacgaggagcgaccgacaacaaaggccctgtcttggcttggatcaatgctgtgagcgccttcagagccctggagcaagatcttcctgtgaatatcaaattcatcattgaggggatggaagaggctggctctgttgccctggaggaacttgtggaaanaganaaggaccgattcttctctggtgtggactacattgtaatttcagataacctgtggatcagccaaaggaagccagcaatcacttatggaacccggggaacagtacttcatggtggaggtgaaatgcgagaccaggatttcactcaggaacctttggtggcatcttcatgaaccaatggctgatctggttgctcttctcggtagcctggtagactcgtctggtcatatcctggtccctggaatctatgatgaagtggttcctcttacagaagaggaaataaatacatacaaagccatccatctagacctagaagaataccggaatagcagccgggttgagaaatttctgttcgatactaaggaggagattctaatgcactctggaggtaccatctctttctattcatgggatcgagggcgcgtttggatgagcctggaataaaagagtcatacctgggcgagttataggaaaatgttcaatccggctagtccgtcacataaatgtgtctgaggtggaaaaaagggtgat

SEQ ID NO: 729100 - DNA, 946 bp, Homo sapiens
  misc_feature (699)..(699): n is a, c, g, or t
  misc_feature (746)..(746): n is a, c, g, or t
  misc_feature (748)..(748): n is a, c, g, or t
  misc_feature (841)..(841): n is a, c, g, or t
  misc_feature (845)..(845): n is a, c, g, or t
agcggagttgagctgaatgaatacctccgaagccgctttgttctccagatgtgaatagctccactataccagcctcgtcttccttccgggggacaacgtgggtcagggcacagagagatatttaatgtcaccctcttggggctttcatgggactccctctgccacattttttggaggttgggaaagttgctagaggcttcagaactccagcctaatggatcccaaactcgggagaatggctgcgtccctgctggctgtgctgctgctgctgctgctggagcgcggcatgttctcctcaccctccccgcccccggcgctgttagagaaagtcttccagtacattgacctccatcaggatgaatttgtgcagacgctgaaggagtgggtggccatcgagagcgactctgtccagcctgtgcctcgcttcagacaagagctcttcagaatgatggccgtggctgcggacacgctgcagcgcctgggggcccgtgtggcctcggtggacatgggtcctcagcagctgcccgatggtcagagtcttccaatacctcccgtcatcctggccgaactggggagcgatcccacgaaaggcaccgtgtgcttctacggccacttggacgtgcagcctgctgaccggggcgatgggtggctcacggacccctatgtgctgacggaggtagacgggaaccttatgacgangagcgaccgacacaaggccctgcttgcttcgacaacgcgcgggcgcntnagagccttgagcagatcttcctgtgaatatcaaattcatcattgaggggatggaagaggctggctctgttgccctggaggaacttgtggaaanaganaaggaccgattcttctctggtgtggactacattgtaatttcagataacctgtggatcagccaaaggaagccagcaatcacttatggaacccggggaacagt

SEQ ID NO: 729101 - DNA, 117 bp, Homo sapiens
gcgtggtgaagcgctacggacccatggaggagcccctggtgatagagaaggacctgccccactatttctagctccacaagtgtgtggccccgtcccgaaactgagacagggtaccga

SEQ ID NO: 729102 - DNA, 656 bp, Homo sapiens
gaagaacactatcatcttgtaaacaagtgctgcgaaggataggaatgcagctacaccagcgatgccctggaccctcccctgaagaacgtgtccagcaacgcagagtgccctgcttgttatgaatctaatggaacttcctgttgtgggaagccctggaaatgctatgaagaagaacagtgtgtctttctagttgcagaacttaagaatgacattgagtctaagagtctcgtgctgaaaggctgttccaacgtcagtaacgccacctgtcagttcctgtctggtgaaaacaagactcttggaggagtcatctttcgaaagtttgagtgtgcaaatgtaaacagcttaacccccacgtctgcaccaaccacttcccacaacgtgggctccaaagcttccctctacctcttggcccttgccagcctccttcttcggggactgctgccctgaggtcctggggctgcactttgcccagcaccccatttctgcttctctgaggtccagagcaccccctgcggtgctgacaccctctttccctgctctgccccgtttaactgcccagtaagtgggagtcacaggtctccaggcaatgccgacagctgccttgttcttcattattaaagcactggttcattcactgcccaaaaaaaaaaaacatt

SEQ ID NO: 729103 - DNA, 498 bp, Homo sapiens
gaagaacactatcatcttgtaaacaagtgctgcgaaggataggaatgcagctacaccagcgatgccctggaccctcccctgaagaacgtgtccagcaacgcagagtgccctgcttgttatgaatctaatggaacttcctgttgtgggaagccctggaaatgctatgaagaagaacagtgtgtctttctagttgcagaacttaagaatgacattgagtctaagagtctcgtgctgaaaggctgttccaacgtcagtaacgccacctgtcagttcctgtctggtgaaaacaagactcttggaggagtcatctttcgaaagtttgagtgtgcaaatgtaaacagcttaacccccacgtctgcaccaaccacttcccacaacgtgggctccaaagcttccctctacctcttggcccttgccagcctccttcttcggggactggcagcccctaggacctccagggcacgcaagtcccccgaagaaaggaggcctggcaagagg

SEQ ID NO: 729104 - DNA, 593 bp, Homo sapiens
cggcacgagatccttgtaaacttgacttgtggaggcaaagggaagaagtgcctgccagagaaccctactgagctgctgctcacccccaagaggctggcctctctggtcagtccttctcacacgtcctccaactgcctggtcataaccatcatggaggtgcagagagagagctccccgtccctgagctccactcctgtggtagaattttataggcctgcgagtttcgactctgtcaccactgtgtcacacaactggactgtgtggaactgcacgtccctgctgtttcagacatccatccgggtgttagtgtggttgctaggtttgctctacttcagctccttacccttaggaatctacttactggtgtctaagaaagtcacccttggggtcgtctttgtcagcctggtcccttcgagcctcgttattcttatggtgtatggtttttgccagtgtgtttgtcatgaatttctagactgtatggcacctccttcttaactgatatgcaaaataagaaattggacacacattgccctgtttgagtgtgaagttagataatttataatttattttcttttatgttctttatgattagt

SEQ ID NO: 729105 - DNA, 1711 bp, Homo sapiens
tcagtgcccatccttgggctccaagctccctcccttccatctggtggcagccttgagtgaggggattccatctggtgcccccagaacttaggcagcatcttcaggaccatcaggttcctcacatgagtgctaggatcaacccatacttaagttgggacccgggaagaaccatgaagtggctgctgctgctgggtctggtggcgctctctgagtgcatcatgtacaaggtccccctcatcagaaagaagtccttgaggcgcaccctgtccgagcgtggcctgctgaaggacttcctgaagaagcacaacctcaacccagccagaaagtacttcccccagtgggaggctcccaccctggtagatgaacagcccctggagaactacctggatatggagtacttcggcactatcggcatcggaactcctgcccaggatttcaccgtcgtctttgacaccggctcctccaacctgtgggtgccctcagtctactgctccagtcttgcctgcaccaaccacaaccgcttcaaccctgaggattcttccacctaccagtccaccagcgagacagtctccatcacctacggcaccggcagcatgacaggcatcctcggatacgacactgtccaggttggaggcatctctgacaccaatcagatcttcggcctgagcgagacggaacctggctccttcctgtattatgctcccttcgatggcatcctggggctggcctaccccagcatttcctcctccggggccacacccgtctttgacaacatctggaaccagggcctggtttctcaggacctcttctctgtctacctcagcgccgatgaccagagtggcagcgtggtgatctttggtggcattgactcttcttactacactggaagtctgaactgggtgcctgttaccgtcgagggttactggcagatcaccgtggacagcatcaccatgaacggagaggccatcgcctgcgctgagggctgccaggccattgttgacaccggcacctctctgctgaccggcccaaccagccccattgccaacatccagagcgacatcggagccagcgagaactcagatggcgacatggtggtcagctgctcagccatcagcagcctgcccgacatcgtcttcaccatcaatggagtccagtaccccgtgccacccagtgcctacatcctgcaggccgactccaggccaagaacagccgagtccctggacactgagccaggaagctcctccttgcacgtgccttacagctggaccagggcgccctggatgtttatcacccagcgcctatcacggctgaatcgcgaatctggagagctttggatcctgggtgatgtcttcatccgccagtactttaccgtcttcgacagggcaaacaaccaggtcggcctggcccccgtggcttaagcctaagtctcttcagccacctcccaggaagatctggcctctgtcctgtgcccactttagatgtatctaattctcctgactgttcttcccaggggagtgtggaggtcttggccctgttccctgtcctaccaataacgtagaataaaaacataacccactgaaacaggttttgtggagctgcttctctttgctggtctttttccttcacattactggggttagaacgccagggcagggatgaaaatgaccacatccatttggatggcacccaacatagtgaccccagcagctga

SEQ ID NO: 729106 - DNA, 974 bp, Homo sapiens
tcagtgcccatccttgggctccaagctccctcccttccatctggtggcagccttgagtgaggggattccatctggtgcccccagaacttaggcagcatcttcaggaccatcaggttcctcacatgagtgctaggatcaacccatacttaagttgggacccgggaagaaccatgaagtggctgctgctgctgggtctggtggcgctctctgagtgcatcatgtacaaggtccccctcatcagaaagaagtccttgaggcgcaccctgtccgagcgtggcctgctgaaggacttcctgaagaagcacaacctcaacccagccagaaagtacttcccccagtgggaggctcccaccctggtagatgaacagcccctggagaactacctggatatggagtacttcggcactatcggcatcggaactcctgcccaggatttcaccgtcgtctttgacaccggctcctccaacctgtgggtgccctcagtctactgctccagtcttgcctgcaccaaccacaaccgcttcaaccctgaggattcttccacctaccagtccaccagcgagacagtctccatcacctacggcaccggcagcatgacaggcatcctcggatacgacactgtccaggttggaggcatctctgacaccaatcagatcttcggcctgagcgagacggaacctggctccttcctgtattatgctcccttcgatggcatcctggggctggcctaccccagcatttcctcctccggggccacacccgtctttgacaacatctggaaccagggcctggtttctcaggacctcttctctgtctacctcagcgccgatgaccagagtggcagcgtggtgatctttggtggcattgactcttcttactacactggaagtctgaactgggtgcctgttaccgtcgagggttactggcagatcaccgtggacagcatcaccagtgtggagagggggacctctaga

SEQ ID NO: 729107 - DNA, 1109 bp, Homo sapiens
tcccggcgccgtactgtacgtagagtggaagactcctcagagtatgaagcggctgtggttggtgcaggcacgaataggagcagtagactgaagggcacccacaggttggaggcatctctgacaccaatcagatcttcggcctgagcgagacggaacctggctccttcctgtattatgctcccttcgatggcatcctggggctggcctaccccagcatttcctcctccggggccacacccgtctttgacaacatctggaaccagggcctggtttctcaggacctcttctctgtctacctcagcgccgatgaccagagtggcagcgtggtgatctttggtggcattgactcttcttactacactggaagtctgaactgggtgcctgttaccgtcgagggttactggcagatcaccgtggacagcatcaccatgaacggagaggccatcgcctgcgctgagggctgccaggccattgttgacaccggcacctctctgctgaccggcccaaccagccccattgccaacatccagagcgacatcggagccagcgagaactcagatggcgacatggtggtcagctgctcagccatcagcagcctgcccgacatcgtcttcaccatcaatggagtccagtaccccgtgccacccagtgcctacatcctgcagagcgaggggagctgcatcagtggcttccagggcatgaaacctccccagcgaatctggagagctttggatcctgggtgatgtcttcatccgccagtactttaccgtcttcgacagggcaaacaaccaggtcggcctggcccccgtggcttaagcctaagtctcttcagccacctcccaggaagatctggcctctgtcctgtgcccactttagatgtatctaattctcctgactgttcttcccaggggagtgtggaggtcttggccctgttccctgtcctaccaataacgtagaataaaaacataacccactgaaacaggttttgtggagctgcttctctttgctggtctttttccttcacattactggggttagaacgccagggcagggatgaaaatgaccacatccatttggatggcacccaacatagtgaccccagcagctga

SEQ ID NO: 729108 - DNA, 901 bp, Homo sapiens
  misc_feature (33)..(33): n is a, c, g, or t
  misc_feature (36)..(36): n is a, c, g, or t
gtcgagttctgtaccctctctccacactggtanatnaacagcccctggagaactacctggatatggagtacttcggcactatcggcatcggaactcctgcccaggatttcaccgtcgtctttgacaccggctcctccaacctgtgggtgccctcagtctactgctccagtcttgcctgcaccaaccacaaccgcttcaaccctgaggattcttccacctaccagtccaccagcgagacagtctccatcacctacggcaccggcagcatgacaggcatcctcggatacgacactgtccaggttggaggcatctctgacaccaatcagatcttcggcctgagcgagacggaacctggctccttcctgtattatgctcccttcgatggcatcctggggctggcctaccccagcatttcctcctccggggccacacccgtctttgacaacatctggaaccagggcctggtttctcaggacctcttctctgtctacctcagcgccgatgaccagagtggcagcgtggtgatctttggtggcattgactcttcttactacactggaagtctgaactgggtgcctgttaccgtcgagggttactggcagatcaccgtggacagcatcaccatgaacggagaggccatcgcctgcgctgagggctgccaggccattgttgacaccggcacctctctgctgaccggcccaaccagccccattgccaacatccagagcgacatcggagccagcgagaactcagatggcgacatggtggtcagctgctcagccatcagcagcctgcccgacatcgtcttcaccatcaatggagtccagtaccccgtgccacccagtgcctacatcctgcagccagtgtggagagagggtaccaactcgagtcgtatatgtat

SEQ ID NO: 729109 - DNA, 1142 bp, Homo sapiens
tacatatacgaactcgagttggtaccaaccgcttcaaccctgaggattcttccacctaccagtccaccagcgagacagtctccatcacctacggcaccggcagcatgacaggcatcctcggatacgacactgtccaggttggaggcatctctgacaccaatcagatcttcggcctgagcgagacggaacctggctccttcctgtattatgctcccttcgatggcatcctggggctggcctaccccagcatttcctcctccggggccacacccgtctttgacaacatctggaaccagggcctggtttctcaggacctcttctctgtctacctcagcgccgatgaccagagtggcagcgtggtgatctttggtggcattgactcttcttactacactggaagtctgaactgggtgcctgttaccgtcgagggttactggcagatcaccgtggacagcatcaccatgaacggagaggccatcgcctgcgctgagggctgccaggccattgttgacaccggcacctctctgctgaccggcccaaccagccccattgccaacatccagagcgacatcggagccagcgagaactcagatggcgacatggtggtcagctgctcagccatcagcagcctgcccgacatcgtcttcaccatcaatggagtccagtaccccgtgccacccagtgcctacatcctgcagagcgaggggagctgcatcagtggcttccagggcatgaaacctccccagcgaatctggagagctttggatcctgggtgatgtcttcatccgccagtactttaccgtcttcgacagggcaaacaaccaggtcggcctggcccccgtggcttaagcctaagtctcttcagccacctcccaggaagatctggcctctgtcctgtgcccactttagatgtatctaattctcctgactgttcttcccaggggagtgtggaggtcttggccctgttccctgtcctaccaataacgtagaataaaaacataacccactgaaacaggttttgtggagctgcttctctttgctggtctttttccttcacattactggggttagaacgccagggcagggatgaaaatgaccacatccatttggatggcacccaacatagtgaccccagcagctga

SEQ ID NO: 729110 - DNA, 1228 bp, Homo sapiens
tcagtgcccatccttgggctccaagctccctcccttccatctggtggcagccttgagtgaggggattccatctggtgcccccagaacttaggcagcatcttcaggaccatcaggttcctcacatgagtgctaggatcaacccatacttaagttgggacccgggaagaaccatgaagtggctgctgctgctgggtctggtggcgctctctgagtgcatcatgtacaaggtccccctcatcagaaagaagtccttgaggcgcaccctgtccgagcgtggcctgctgaaggacttcctgaagaagcacaacctcaacccagccagaaagtacttcccccagtgggaggctcccaccctggtagatgaacagcccctggagaactacctggatatggagtacttcggcactatcggcatcggaactcctgcccaggatttcaccgtcgtctttgacaccggctcctccaacctgtgggtgccctcagtctactgctccagtcttgcctgcaccaaccacaaccgcttcaaccctgaggattcttccacctaccagtccaccagcgagacagtctccatcacctacggcaccggcagcatgacaggcatcctcggatacgacactgtccaggttggaggcatctctgacaccaatcagatcttcggcctgagcgagacggaacctggctccttcctgtattatgctcccttcgatggcatcctggggctggcctaccccagcatttcctcctccggggccacacccgtctttgacaacatctggaaccagggcctggtttctcaggacctcttctctgtctacctcagcgccgatgaccagagtggcagcgtggtgatctttggtggcattgactcttcttactacactggaagtctgaactgggtgcctgttaccgtcgagggttactggcagatcaccgtggacagcatcaccatgaacggagaggccatcgcctgcgctgagggctgccaggccattgttgacaccggcacctctctgctgaccggcccaaccagccccattgccaacatccagagcgacatcggagccagcgagaactcagatggcgacatggtggtcagctgctcagccatcagcagcctgcccgacatcgtcttcaccatcaatggagtccagtaccccgtgccacccagtgcctacatcctgcagccagtgtggagagagggtaccaactcgagtcgtatatgtat

SEQ ID NO: 729111 - DNA, 520 bp, Homo sapiens
tcagtgcccatccttgggctccaagctccctcccttccatctggtggcagccttgagtgaggggattccatctggtgcccccagaacttaggcagcatcttcaggaccatcaggttcctcacatgagtgctaggatcaacccatacttaagttgggacccgggaagaaccatgaagtggctgctgctgctgggtctggtggcgctctctgagtgcatcatgtacaaggtccccctcatcagaaagaagtccttgaggcgcaccctgtccgagcgtggcctgctgaaggacttcctgaagaagcacaacctcaacccagccagaaagtacttcccccagtgggaggctcccaccctggtagatgaacagcccctggagaactacctggatatggagtacttcggcactatcggcatcggaactcctgcccaggatttcaccgtcgtctttgacaccggctcctccaacctgttagccctggagtctactgcctccggtacctaatcgagtcgtatcatgta

SEQ ID NO: 729112 - DNA, 116 bp, Homo sapiens; identical to SEQ ID NO: 107084

SEQ ID NO: 729113 - DNA, 1520 bp, Homo sapiens
agcgggaaggagatcctatcagtggggagagtgtgaggggagagggagagcctgcagggcaggcgctgaggatcacgcatcctgtgactctcccctgtcccccgccaccctctgaaccactggccaccatggctacttcaaagttgcccgtggtgcctggggaggaggaaaacaccatccttatggccaaggaaaggctggaggccctgcgcacagcctttgagtcgggtgacctcccccaggccgcctctcacctccaggagctgctggcctccacggaaagcatccgcctggaggtgggcgtcacgggcgagtcgggcgcgggcaagtcctccctcatcaatgccctgcgtggcctggaggccgaggaccctggcgcggctctcacgggcgtcatggagaccacgatgcaaccgtcgccctatccacacccacagttccctgacgtgaccctctgggacctgccaggagccggctctccaggctgcccggctgacaagtacctaaagcaggtagacttcagccgctatgacttcttcctgctggtctccccccgccgctgcggggccgtcgagacccgcctggccgctgagatcctgtgccagggcaagaagttctactttgtgcgcaccaaggtggacgaggacctggcggccacgcgcacccagcggccgtcgggcttcagagaggccgctgtcctgcaggagatccgagaccactgtgccgagcggctgcgggaggccggcgtggctgaccctcgcatcttcctggtgtccaacctctcgccggcccgctacgactttcccacgctggtgtccacctgggagcacgacctgccctcccaccggcgccacgctggcctgctgtcgctccccgacatctcgctggaggccttgcagaagaagaaggccatgcttcaagagcaagtcctcaagaccgccctggtgttgggcgtcatccaggccctgccggtcccagggctggcggccgcctacgatgatgcgttgctcatccactcactgcgtggctaccaccgcagctttggtctggacgacgactcgctggccaagctggccgagcaggtgggcaaacaggcaggtgacctgcgctcggtcatccgctccccactggccaacgaggtctcgcctgagactgtcctgcggctctattcccagtcgtccgacggcgccatgcgggtggcccgcgcctttgagaggggcatccctgtgtttgggacgctggtggctggcggcatcagctttggcgctgtctacaccatgctccagggctgcctcaacgagatggctgaggacgcccagcgtgtccgcatcaaggccctggaggatgacgagccgcagccggaggtcagcttggaagtggccagtgacaatggcgtggaaaaggggggctccggggagggaggtggggaggaagccccactctcaacctgcaggaagctcggcctccttcttaagtacattctggacagctggaagaaacacgactcagaagagaaataa

SEQ ID NO: 729114 - DNA, 1633 bp, Homo sapiens
agcgggaaggagatcctatcagtggggagagtgtgaggggagagggagagcctgcagggcaggaaaaagagagctgtgggcttccagggcgactcccttcacatccgtggtatctgtctctccctgccccatgccaaggcccaggaggtgtgaatggctcccttctcctctgcaggcgctgaggatcacgcatcctgtgactctcccctgtcccccgccaccctctgaaccactggccaccatggctacttcaaagttgcccgtggtgcctggggaggaggaaaacaccatccttatggccaaggaaaggctggaggccctgcgcacagcctttgagtcgggtgacctcccccaggccgcctctcacctccaggagctgctggcctccacggaaagcatccgcctggaggtgggcgtcacgggcgagtcgggcgcgggcaagtcctccctcatcaatgccctgcgtggcctggaggccgaggaccctggcgcggctctcacgggcgtcatggagaccacgatgcaaccgtcgccctatccacacccacagttccctgacgtgaccctctgggacctgccaggagccggctctccaggctgcccggctgacaagtacctaaagcaggtagacttcagccgctatgacttcttcctgctggtctccccccgccgctgcggggccgtcgagacccgcctggccgctgagatcctgtgccagggcaagaagttctactttgtgcgcaccaaggtggacgaggacctggcggccacgcgcacccagcggccgtcgggcttcagagaggccgctgtcctgcaggagatccgagaccactgtgccgagcggctgcgggaggccggcgtggctgaccctcgcatcttcctggtgtccaacctctcgccggcccgctacgactttcccacgctggtgtccacctgggagcacgacctgccctcccaccggcgccacgctggcctgctgtcgctccccgacatctcgctggaggccttgcagaagaagaaggccatgcttcaagagcaagtcctcaagaccgccctggtgttgggcgtcatccaggccctgccggtcccagggctggcggccgcctacgatgatgcgttgctcatccactcactgcgtggctaccaccgcagctttggtctggacgacgactcgctggccaagctggccgagcaggtgggcaaacaggcaggtgacctgcgctcggtcatccgctccccactggccaacgaggtctcgcctgagactgtcctgcggctctattcccagtcgtccgacggcgccatgcgggtggcccgcgcctttgagaggggcatccctgtgtttgggacgctggtggctggcggcatcagctttggcgctgtctacaccatgctccagggctgcctcaacgagatggctgaggacgcccagcgtgtccgcatcaaggccctggaggatgacgagccgcagccggaggtcagcttggaagtggccagtgacaatggcgtggaaaaggggggctccggggagggaggtggggaggaagccccactctcaacctgcaggaagctcggcctccttcttaagtacattctggacagctggaagaaacacgactcagaagagaaataa

SEQ ID NO: 729115 - DNA, 406 bp, Homo sapiens
gcgctgaggatcacgcatcctgtgactctcccctgtcccccgccaccctctgaaccactggccaccatggctacttcaaagttgcccgtggtgcctggggaggaggaaaacaccatccttatggccaaggaaaggctggaggccctgcgcacagcctttgagtcgggtgacctcccccaggccgcctctcacctccaggagctgctggcctccacggaaagcatccgcctggaggtgggcgtcacgggcgagtcgggcgcgggcaagtcctccctcatcaatgccctgcgtggcctggaggccgaggaccctggcgcggctctcacgggcgtcatggagaccacgatgcaaccgcccccctgcctcacccacaaactaagtcttaacaaaatccaaattaccaaca

SEQ ID NO: 729116 - DNA, 654 bp, Homo sapiens; identical to SEQ ID NO: 285945

SEQ ID NO: 729117 - DNA, 574 bp, Homo sapiens
cttcttgggccctggtacgtgcttgcggtggcctcccgggaaaagggctttgccatggagaaggacatgaagaacgtcgtgggggtggtggtgaccctcactccagaaaacaacctgcggacgctgtcctctcagcacgggctgggagggtgtgaccagagtgtcatggacctgataaagcgaaactccggatgggtgtttgagaatccctcaataggcgtgctggagctctgggtgctggccaccaacttcagagactatgccatcatcttcactcagctggagttcggggacgagcccttcaacaccgtggagctgtacagtctgacggagacagccagccaggaggccatggggctcttcaccaagtggagcaggagcctgggcttcctgtcacagtagcaggcccagctgcagaaggacctcacctgtgctcacaagatccttctgtgagtgctgcgtccccagtagggatggcgcccacagggtcctgtgacctcggccagtgtccacccacctcgctcagcggctcccggggcccagcaccagctcagaataaagcgattccacagca

SEQ ID NO: 729118 - DNA, 148 bp, Homo sapiens
gaagaacgtcgtgggggtggtggtgaccctcactccagaaaacaacctgcggacgctgtcctctcagcacgggtgagtgggcgggtcctgccaggccttcccgcaggcaggactgtggctcagccacatcatgtactttgcacatctg

SEQ ID NO: 729119 - DNA, 426 bp, Homo sapiens
caggcgagtcttgtgggtggggccctggggtgctggggggctcagtcctttttcacagccagtcttgcctccccttctagtcacctgtgctcacaagatccttctggtaagccgccatcctgagcctcaccctgggctctcttgggggaagggggtgggggaggccaccctacgcacagtgggtgggaggaccctctgcccaagcccacggggttcatggctccactgtctctaaggcagctgagggtgtggaggagcctccatggtgggctgggccccctcacactcctcttggttttcagtgagtgctgcgtccccagtagggatggcgcccacagggtcctgtgacctcggccagtgtccacccacctcgctcagcggctcccggggcccagcaccagctcagaataaagcgattccacagca

SEQ ID NO: 729120 - DNA, 567 bp, Homo sapiens
tcgaaggggccgaagaactcggcggcgaaggtgaccacgtcctccggctggcgcacagcaggaagagcaggaagtcggagatgagcgcgtgggcttcggggtgctgccgcagatagctggcgtggccgagccggagctcctcctggcaggggacagagcccgagcctcagccggacgggacccccgcgccccaggagcccccagccgctcgctccaaggagagctaaggggcgctggagccttctagcccctacgggtgtgcatttcaatcaggcatcttggtgatgatgcagcaccctggggagcccacctgtattctcttggccaggtgcctggagtgcaacacaacatgtgagagtgagaatcttcccagaccgcctgctatggactgaattgtctctctaacccccagtgtggtggtatttggagaaaggccatgtgaggacacattgagaaggcacttgtctgcaagctaggaagacagccctcaccagaaaccaaccctgatggcaccatgatcttggacttcctgccttccagcaaatatatttctcttgaagccaccca

SEQ ID NO: 729121 - DNA, 1368 bp, Homo sapiens
  misc_feature (66)..(66): n is a, c, g, or t
atggccacagcaggaaatccctggggctggttcctggggtacctcatccttggtgtcgcaggatcnctcgtctctggtagctgcagccaaatcataaacggcgaggactgcagcccgcactcgcagccctggcaggcggcactggtcatggaaaacgaattgttctgctcgggcgtcctggtgcatccgcagtgggtgctgtcagccgcacactgtttccagaactcctacaccatcgggctgggcctgcacagtcttgaggccgaccaagagccagggagccagatggtggaggccagcctctccgtacggcacccagagtacaacagacccttgctcgctaacgacctcatgctcatcaagttggacgaatccgtgtccgagtctgacaccatccggagcatcagcattgcttcgcagtgccctaccgcggggaactcttgcctcgtttctggctggggtctgctggcgaacggcagaatgcctaccgtgctgcagtgcgtgaacgtgtcggtggtgtctgaggaggtctgcagtaagctctatgacccgctgtaccaccccagcatgttctgcgccggcggagggcaagaccagaaggactcctgcaacggtgactctggggggcccctgatctgcaacgggtacttgcagggccttgtgtctttcggaaaagccccgtgtggccaagttggcgtgccaggtgtctacaccaacctctgcaaattcactgagtggatagagaaaaccgtccaggccagttaactctggggactgggaacccatgaaattgacccccaaatacatcctgcggaaggaattcaggaatatctgttcccagcccctcctccctcaggcccaggagtccaggcccccagcccctcctccctcaaaccaagggtacagatccccagcccctcctccctcagacccaggagtccagaccccccagcccctcctccctcagacccaggagtccagcccctcctccctcagacccaggagtccagaccccccagcccctcctccctcagacccaggagtccagcccctcctccctcagacccaggagtccagaccccccagcccctcctccctcagacccaggggtccaggcccccaacccctcctccctcagactcagaggtccaggcccccaacccctccttccccagacccagaggtccaggtcccagcccctcctccctcagacccagcggtccaatgccacctagactctccctgtacacagtgcccccttgtggcacgttgacccaaccttaccagttggtttttcattttttgtccctttcccctagatccagaaataaatcccctagatccagaaataaagtctaagagaagcgc

SEQ ID NO: 729122 - DNA, 1812 bp, Homo sapiens
  misc_feature (66)..(66): n is a, c, g, or t
atggccacagcaggaaatccctggggctggttcctggggtacctcatccttggtgtcgcaggatcnctcgtctctggtagctgcagccaaatcataaacggcgaggactgcagcccgcactcgcagccctggcaggcggcactggtcatggaaaacgaattgttctgctcgggcgtcctggtgcatccgcagtgggtgctgtcagccgcacactgtttccagaactcctacaccatcgggctgggcctgcacagtcttgaggccgaccaagagccagggagccagatggtggaggccagcctctccgtacggcacccagagtacaacagacccttgctcgctaacgacctcatgctcatcaagttggacgaatccgtgtccgagtctgacaccatccggagcatcagcattgcttcgcagtgccctaccgcggggaactcttgcctcgtttctggctggggtctgctggcgaacggcagaatgcctaccgtgctgcagtgcgtgaacgtgtcggtggtgtctgaggaggtctgcagtaagctctatgacccgctgtaccaccccagcatgttctgcgccggcggagggcaagaccagaaggactcctgcaacggtgactctggggggcccctgatctgcaacgggtacttgcagggccttgtgtctttcggaaaagccccgtgtggccaagttggcgtgccaggtgtctacaccaacctctgcaaattcactgagtggatagagaaaaccgtccaggccagttaactctggggactgggaacccatgaaattgacccccaaatacatcctgcggaaggaattcaggaatatctgttcccagcccctcctccctcaggcccaggagtccaggcccccagcccctcctccctcaaaccaagggtacagatccccagcccctcctccctcagacccaggagtccagaccccccagcccctcctccctcagacccaggagtccagcccctcctccctcagacccaggagtccagaccccccagcccctcctccctcagacccaggagtccagcccctcctccctcagacccaggagtccagaccccccagcccctcctccctcagacccaggggtccaggcccccaacccctcctccctcagactcagaggtccaggcccccaacccctccttccccagacccagaggtccaggtcccagcccctcctccctcagacccagcggtccaatgccacctagactctccctgtacacagtgcccccttgtggcacgttgacccaaccttaccagttggtttttcattttttgtccctttcccctagatccagaaataaagtctaagagaagcgcaggttctgtttgtagtgtcctccttgcttccccttccattcaagagattccagcaaatggctttccctccatgggtcgcatttccctatctgggaaatgcgagctttgaccaggagggccacagagtttcagagggaggggccattccctggatagttaagagaaaccagtgccatggatgttgtccagtttctgaaaagtcaggtcagcaaatggtaaccgtagagattttcttgcttagtttaactattcagctttagttgatctatattcatttttgtcttcttaactgcatttcaagaatttttaatttgcatgtgtctcagaagttggctgctgcagctagagtctagtggggagaattgtggcgagggctactgtgagtgacagcaacagagaccaaggagtagaaagagggaagtttgaggggcacaatggggcaactgaggggcaaggagatgggag

SEQ ID NO: 729123 - DNA, 1230 bp, Homo sapiens
  misc_feature (5)..(5): n is a, c, g, or t
gatcnctcgtctctggtagctgcagccaaatcataaacggcgaggactgcagcccgcactcgcagccctggcaggcggcactggtcatggaaaacgaattgttctgctcgggcgtcctggtgcatccgcagtgggtgctgtcagccgcacactgtttccagaactcctacaccatcgggctgggcctgcacagtcttgaggccgaccaagagccagggagccagatggtggaggccagcctctccgtacggcacccagagtacaacagacccttgctcgctaacgacctcatgctcatcaagttggacgaatccgtgtccgagtctgacaccatccggagcatcagcattgcttcgcagtgccctaccgcggggaactcttgcctcgtttctggctggggtctgctggcgaacggcagaatgcctaccgtgctgcagtgcgtgaacgtgtcggtggtgtctgaggaggtctgcagtaagctctatgacccgctgtaccaccccagcatgttctgcgccggcggagggcaagaccagaaggactcctgcaacggtgactctggggggcccctgatctgcaacgggtacttgcagggccttgtgtctttcggaaaacccctcctccctcagacccagcggtccaatgccacctagactctccctgtacacagtgcccccttgtggcacgttgacccaaccttaccagttggtttttcattttttgtccctttcccctagatccagaaataaagtctaagagaagcgcaggttctgtttgtagtgtcctccttgcttccccttccattcaagagattccagcaaatggctttccctccatgggtcgcatttccctatctgggaaatgcgagctttgaccaggagggccacagagtttcagagggaggggccattccctggatagttaagagaaaccagtgccatggatgttgtccagtttctgaaaagtcaggtcagcaaatggtaaccgtagagattttcttgcttagtttaactattcagctttagttgatctatattcatttttgtcttcttaactgcatttcaagaatttttaatttgcatgtgtctcagaagttggctgctgcagctagagtctagtggggagaattgtggcgagggctactgtgagtgacagcaacagagaccaaggagtagaaagagggaagtttgaggggcacaatggggcaactgaggggcaaggagatgggag

SEQ ID NO: 729124 - DNA, 1046 bp, Homo sapiens
tgtccttcctttgagcagccactgagagggagaaggagttgcagagatcaggaaggagaggatttatttccagttttctggcagtttttcctcactctttcggagacctaggatgggttaggagagggcatggcaaaggcagaggtggctctgctagaggaggccgcaggtccgcaggccgaacctggggagccagccatgtctggcctgaggccctgctttgaggagaagataaagccttgaggagccttttgggccgatctgggaacccagcaagactagattagcctgactgatgacagacctgggatgaggatgagggcagttaagtatttgtttaatcttgctttgtcttttcaaacagcgatttagtaatcctgtttgaggctgcagtgtggcaatgctttccagaggatggagtcctttttgtttgttttgaaaaaatagagataaggtttcactatgttgcctaggctggtctcatactcggcctcaagccatcctcctgcctgggcctcccaaagtgttgggattacaggcgtgagccatggtgccagactggagtccttttattaaaattaactgccctgctcagctttctgctgggccaccccagagccaatccttggttcttgggcccaaggctggacccaggggttgcaggaaacagtctgtagcatccaagtggggcctgtcgtacccactccagtgtgtaggtgcagaacgctctttgggggatttctctgctgggccaccttactccagggatccctcagttttcaaaacaaagcaagagggcaaggaagaatggagaaacagctcagtgttgactctcttccccctggtgagtgctgtgctggggcctctgtgcacatcataccacttcccccttgaatcagccccacaaggcagggtgagagatgaggactcagggtgcaaggaggtctcacagcttggaaatggatcaggacagctctgattctccaaggccaaggtcttctctatatcatgaggcagcccaaaaatgtgtttctacacatattctg

SEQ ID NO: 729125 - DNA, 2824 bp, Homo sapiens; identical to SEQ ID NO: 288696

SEQ ID NO: 729126 - DNA, 2803 bp, Homo sapiens
ggagccagtcttgggcgctggagggcctgtcctgaccatggtccctgcctggctgtggctgctttgtgtctccgtcccccaggctctccccaaggcccagcctgcagagctgtctgtggaagttccagaaaactatggtggaaatttccctttatacctgaccaagttgccgctgccccgtgagggggctgaaggccagatcgtgctgtcaggggactcaggcaaggcaactgagggcccatttgctatggatccagattctggcttcctgctggtgaccagggccctggaccgagaggagcaggcagagtaccagctacaggtcaccctggagatgcaggatggacatgtcttgtggggtccacagcctgtgcttgtgcacgtgaaggatgagaatgaccaggtgccccatttctctcaagccatctacagagctcggctgagccggggtaccaggcctggcatccccttcctcttccttgaggcttcagaccgggatgagccaggcacagccaactcggatcttcgattccacatcctgagccaggctccagcccagccttccccagacatgttccagctggagcctcggctgggggctctggccctcagccccaaggggagcaccagccttgaccacgccctggagaggacctaccagctgttggtacaggtcaaggacatgggtgaccaggcctcaggccaccaggccactgccaccgtggaagtctccatcatagagagcacctgggtgtccctagagcctatccacctggcagagaatctcaaagtcctatacccgcaccacatggcccaggtacactggagtgggggtgatgtgcactatcacctggagagccatcccccgggaccctttgaagtgaatgcagagggaaacctctacgtgaccagagagctggacagagaagcccaggctgagtacctgctccaggtgcgggctcagaattcccatggcgaggactatgcggcccctctggagctgcacgtgctggtgatggatgagaatgacaacgtgcctatctgccctccccgtgaccccacagtcagcatccctgagctcagtccaccaggtactgaagtgactagactgtcagcagaggatgcagatgcccccggctcccccaattcccacgttgtgtatcagctcctgagccctgagcctgaggatggggtagaggggagagccttccaggtggaccccacttcaggcagtgtgacgctgggggtgctcccactccgagcaggccagaacatcctgcttctggtgctggccatggacctggcaggcgcagagggtggcttcagcagcacgtgtgaagtcgaagtcgcagtcacagatatcaatgatcacgcccctgagttcatcacttcccagattgggcctataagcctccctgaggatgtggagcccgggactctggtggccatgctaacagccattgatgctgacctcgagcccgccttccgcctcatggattttgccattgagaggggagacacagaagggacttttggcctggattgggagccagactctgggcatgttagactcagactctgcaagaacctcagttatgaggcagctccaagtcatgaggtggtggtggtggtgcagagtgtggcgaagctggtggggccaggcccaggccctggagccaccgccacggtgactgtgctagtggagagagtgatgccaccccccaagttggaccaggagagctacgaggccagtgtccccatcagtgccccagccggctctttcctgctgaccatccagccctccgaccccatcagccgaaccctcaggttctccctagtcaatgactcagagggctggctctgcattgagaaattctccggggaggtgcacaccgcccagtccctgcagggcgcccagcctggggacacctacacggtgcttgtggaggcccaggatacagatgagccgagactgagcgcttctgcacccctggtgatccacttcctaaaggcccctcctgccccagccctgactcttgcccctgtgccctcccaatacctctgcacaccccgccaagaccatggcttgatcgtgagtggacccagcaaggaccccgatctggccagtgggcacggtccctacagcttcacccttggtcccaaccccacggtgcaacgggattggcgcctccagactctcaatggttcccatgcctacctcaccttggccctgcattgggtggagccacgtgaacacataatccccgtggtggtcagccacaatgcccagatgtggcagctcctggttcgagtgatcgtgtgtcgctgcaacgtggaggggcagtgcatgcgcaaggtgggccgcatgaagggcatgcccacgaagctgtcggcagtgggcatccttgtaggcaccctggtagcaataggaatcttcctcatcctcattttcacccactggaccatgtcaaggaagaaggacccggatcaaccagcagacagcgtgcccctgaaggcgactgtctgaatggcccaggcagctctagctgggagcttggcctctggctccatctgagtcccctgggagagagcccagcacccaagatccagcaggggacaggacagagtagaagcccctccatctgccctggggtggaggcaccatcaccatcaccaggcatgtctgcagagcctggacaccaactttatggactgcccatgggagtgctccaaatgtcagggtgtttgcccaataataaagccccagagaactgggctgggccctatgggattggtaaaactg

SEQ ID NO: 729127 - DNA, 713 bp, Homo sapiens
gcttcagcagcacgtgtgaagtcgaagtcgcagtcacagatatcaatgatcacgcccctgagttcatcacttcccagattgggcctataagcctccctgaggatgtggagcccgggactctggtggccatgctaacagccattgatgctgacctcgagcccgccttccgcctcatggattttgccattgagaggggagacacagaagggacttttggcctggattgggagccagactctgggcatgttagactcagactctgcaagaacctcagttatgaggcagctccaagtcatgaggtggtggtggtggtgcagagtgtggcgaagctggtggggccaggcccaggccctggagccaccgccacggtgactgtgctagtggagagagtgatgccaccccccaagttggaccaggagagctacgaggccagtgtccccatcagtgccccagccggctctttcctgctgaccatccagccctccgaccccatcagccgaaccctcaggttctccctagtcaatgactcagagggctggctctgcattgagaaattctccggggaggtgcacaccgcccagtccctgcagggcgcccagcctggggacaccaactttatggactgcccatgggagtgctccaaatgtcagggtgtttgcccaataataaagccccagagaactgggctgggccctatgggattggtaaaactg

SEQ ID NO: 729128 - DNA, 802 bp, Homo sapiens
ttgccgctgccccgtgagggggctgaaggccagatcgtgctgtcaggggactcaggcaaggcaactgagggcccatttgctatggatccagattctggcttcctgctggtgaccagggccctggaccgagaggagcaggcagagtaccagctacaggtcaccctggagatgcaggatggacatgtcttgtggggtccacagcctgtgcttgtgcacgtgaaggatgagaatgaccaggtgccccatttctctcaagccatctacagagctcggctgagccggggtaccaggcctggcatccccttcctcttccttgaggcttcagaccgggatgagccaggcacagccaactcggatcttcgattccacatcctgagccaggctccagcccagccttccccagacatgttccagctggagcctcggctgggggctctggccctcagccccaaggggagcaccagccttgaccacgccctggagaggacctaccagctgttggtacaggtcaaggacatgggtgaccaggcctcaggccaccaggccactgccaccgtggaagtctccatcatagagagcacctgggtgtccctagagcctatccacctggcagagaatctcaaagtcctatacccgcaccacatggcccagtacctgctccaggtgcgggctcagaattcccatggcgaggactatgcggcccctctggagctgcacgtgctggtgatggatgagaatgacaacgtgcctatctgccctccccgtgaccccacagtcagcatccctgagctcagtccaccag

SEQ ID NO: 729129 - DNA, 1191 bp, Homo sapiens
gcttcagcagcacgtgtgaagtcgaagtcgcagtcacagatatcaatgatcacgccccctggagccaccgccacggtgactgtgctagtggagagagtgatgccaccccccaagttggaccaggagagctacgaggccagtgtccccatcagtgccccagccggctctttcctgctgaccatccagccctccgaccccatcagccgaaccctcaggttctccctagtcaatgactcagagggctggctctgcattgagaaattctccggggaggtgcacaccgcccagtccctgcagggcgcccagcctggggacacctacacggtgcttgtggaggcccaggatacagatgagccgagactgagcgcttctgcacccctggtgatccacttcctaaaggcccctcctgccccagccctgactcttgcccctgtgccctcccaatacctctgcacaccccgccaagaccatggcttgatcgtgagtggacccagcaaggaccccgatctggccagtgggcacggtccctacagcttcacccttggtcccaaccccacggtgcaacgggattggcgcctccagactctcaatggttcccatgcctacctcaccttggccctgcattgggtggagccacgtgaacacataatccccgtggtggtcagccacaatgcccagatgtggcagctcctggttcgagtgatcgtgtgtcgctgcaacgtggaggggcagtgcatgcgcaaggtgggccgcatgaagggcatgcccacgaagctgtcggcagtgggcatccttgtaggcaccctggtagcaataggaatcttcctcatcctcattttcacccactggaccatgtcaaggaagaaggacccggatcaaccagcagacagcgtgcccctgaaggcgactgtctgaatggcccaggcagctctagctgggagcttggcctctggctccatctgagtcccctgggagagagcccagcacccaagatccagcaggggacaggacagagtagaagcccctccatctgccctggggtggaggcaccatcaccatcaccaggcatgtctgcagagcctggacaccaactttatggactgcccatgggagtgctccaaatgtcagggtgtttgcccaataataaagccccagagaactgggctgggccctatgggattggtaaaactg

SEQ ID NO: 729130 - DNA, 420 bp, Homo sapiens
gcttcagcagcacgtgtgaagtcgaagtcgcagtcacagatatcaatgatcacgccccctggagccaccgccacggtgactgtgctagtggagagagtgatgccaccccccaagttggaccaggagagctacgaggccagtgtccccatcagtgccccagccggctctttcctgctgaccatccagccctccgaccccatcagccgaaccctcaggttctccctagtcaatgactcagagggctggctctgcattgagaaattctccggggaggtgcacaccgcccagtccctgcagggcgcccagcctggggacaccaactttatggactgcccatgggagtgctccaaatgtcagggtgtttgcccaataataaagccccagagaactgggctgggccctatgggattggtaaaactg

SEQ ID NO: 729131 - DNA, 1912 bp, Homo sapiens
tgtctaggttcagcctactagggagatctgacacacatctgcactgatcaccgagtaaactgtttcacgttagacctgtaacccaaggagatgtgtatagagctgaaactgaagaaattcctaaaatattccagatactatatgcaaatgaaggtgaatgtagaaaagatgtagagatggaaccagtacaagaagctgaaaaaactaatttccaaaatcacaaaggccatgagtttattcctacactctaccactttcctgccaattgtgatgcctgtgccaaacctctctggcatgtttttaagccaccccctgccctagagtgtcaaagacgccatgttaagtgccacagagatcacttagataagaaagaggacttaatttgtccatgtaaagtaagttatgatgtaacatcagcaagagatatgctgctgttagcatgttctcaggatgaacaaaaaaaatgggtaactcatttagtaaagaaaatccctaagaatccaccatctggttttgttcgtgcttccccttgaacgctttctacaagatccactgcaaatcagtctttccggaaagtggtcaaaaatacatctggaaaaactagttaaccatgtgaccgagtgccttgtggaatcgtgtgggatgctacctgataaaccaggcttctttaaccatgcagagcagacaggctgtttctttgacacaaatatcacaggcttcagggtgctgcctttttggatttataagaaaatggctgtcagtcgtgatagaacagagttttcctcatatgagtaagaggaagggactttcactttcaagtggaacggccatcactatcaagatcagctcatggaaggagtaaagaaaatatctcaaaatgagacaaactgaagttttgttttttttttaatgacttaagtttttgtgctcttgcaagactatacaaaactattttaagaaagcagtgatatcacttgaacttcagtgccctcactgtagaatttaaaagccttactgttgattgcccatggtggacttgatggagaaattaaatatctttcattatgctttacaaaatactgtatatgtttcagcaagtttggggaatgggagaggacgaaaaaaagttacatttaatctatgcatttttgccaagccatattgagttattttactactagagacattaggaaactaactgtacaaaagaaccaagtttaaaagcattttgtggggtacatcatttctataattgtataatgtatttctttgtggttttaaatgataaagacattaagttaacaaacatataagaaatgtatgcactgtttgaaatgtaaattattcttagaacactttcaatgggggttgcattgtccttttagtgccttaatttgagataattattttactgccatgagtaagtatagaaatttcaaaaaatgtattttcaaaaaattatgtgtgtccgtgagtttttcattgataattggtttaatttaaaatatttagaggtttgttggactttcataaattgagtacaatctttgcatcaaactacctgctacaataatgactttataaaactgcaaaaaatgtagaaggttgcaccaatataaaaaggaaatatggcaatacatccatgatgttttccagttaacataggaattaccagataaatactgttaaactcttgtccggtaacaagagttgattcatatggacagtatgatttattgtttctttttttaaccaaatacctcctcagtaatttataatggctttgcagtaatgtctatcagataagaagcactggaaaaccgatcgtctctaggatgatatgcatgtttcaagtggtattgaaagccgcactgatggatatgtaataataaacatatctgttattaatata

SEQ ID NO: 729132 - DNA, 2010 bp, Homo sapiens
taaactgtttcacgttagacctgtaacccaaggagatgtgtatagagctgaaactgaagaaattcctaaaatattccagatactatatgcaaatgaaggtgaatgtagaaaagatgtagagatggaaccagtacaagaagctgaaaaaactaatttccaaaatcacaaaggccatgagtttattcctacactctaccactttcctgccaattgtgatgcctgtgccaaacctctctggcatgtttttaagccaccccctgccctagagtgtcaaagacgccatgttaagtgccacagagatcacttagataagaaagaggacttaatttgtccatgtaaagtaagttatgatgtaacatcagcaagagatatgctgctgttagcatgttctcaggatgaacaaaaaaaatgggtaactcatttagtaaagaaaatccctaagaatccaccatctggttttgttcgtgcttccccttgaacgctttctacaagatccactgcaaatcagtctttccggaaagtggtcaaaaatacatctggaaaaactagttaaccatgtgaccgagtgccttgtggaatcgtgtgggatgctacctgataaaccaggcttctttaaccatgcagagcagacaggctgtttctttgacacaaatatcacaggcttcagggttaagattgctgtttttctgtccttgctttggcacaacacactgagggttttttttatcgcgggtttgcctacaggtagattagattaattattactatgtaatgcaagtacagttgggggaaagcttaggtagatatattttttttaaaaggtgctgcctttttggatttataagaaaatggctgtcagtcgtgatagaacagagttttcctcatatgagtaagaggaagggactttcactttcaagtggaacggccatcactatcaagatcagctcatggaaggagtaaagaaaatatctcaaaatgagacaaactgaagttttgttttttttttaatgacttaagtttttgtgctcttgcaagactatacaaaactattttaagaaagcagtgatatcacttgaacttcagtgccctcactgtagaatttaaaagccttactgttgattgcccatggtggacttgatggagaaattaaatatctttcattatgctttacaaaatactgtatatgtttcagcaagtttggggaatgggagaggacgaaaaaaagttacatttaatctatgcatttttgccaagccatattgagttattttactactagagacattaggaaactaactgtacaaaagaaccaagtttaaaagcattttgtggggtacatcatttctataattgtataatgtatttctttgtggttttaaatgataaagacattaagttaacaaacatataagaaatgtatgcactgtttgaaatgtaaattattcttagaacactttcaatgggggttgcattgtccttttagtgccttaatttgagataattattttactgccatgagtaagtatagaaatttcaaaaaatgtattttcaaaaaattatgtgtgtccgtgagtttttcattgataattggtttaatttaaaatatttagaggtttgttggactttcataaattgagtacaatctttgcatcaaactacctgctacaataatgactttataaaactgcaaaaaatgtagaaggttgcaccaatataaaaaggaaatatggcaatacatccatgatgttttccagttaacataggaattaccagataaatactgttaaactcttgtccggtaacaagagttgattcatatggacagtatgatttattgtttctttttttaaccaaatacctcctcagtaatttataatggctttgcagtaatgtctatcagataagaagcactggaaaaccgatcgtctctaggatgatatgcatgtttcaagtggtattgaaagccgcactgatggatatgtaataataaacatatctgttattaatata

SEQ ID NO: 729133 - DNA, 724 bp, Homo sapiens
gtatgtaaagataatgtatatttacctttcctcctaatgtttgtttctcgtatttttaaactgagtgcatttcttaaattagtttttcccccctccctcaacagttaaccatgtgaccgagtgccttgtggaatcgtgtgggatgctacctgataaaccaggcttctttaaccatgcagagcagacaggctgtttctttgacacaaatatcacaggcttcagggttaagattgctgtttttctgtccttgctttggcacaacacactgagggttttttttatcgcgggtttgcctacaggtagattagattaattattactatgtaatgcaagtacagttgggggaaagcttaggtagatatattttttttaaaaggtgctgcctttttggatttataagaaaatggctgtcagtcgtgatagaacagagttttcctcatatgagtaagaggaagggactttcactttcaagtggaacggccatcactatcaagatcagctcatggaaggagtaaagaaaatatctcaaaatgagacaaactgaagttttgttttttttttaatgacttaagtttttgtgctcttgcaagactatacaaaactattttaagaaagcagtgatatcacttgaacttcagtgccctcactgtagaatttaaaagccttactgttgattgcccatggtggacttgatggagaaattaaatatctttcattatgcttt

SEQ ID NO: 729134 - DNA, 414 bp, Homo sapiens
tgttaggcctgtggttaaaagatgagttttgctagttgtcctgaggtccccaaggatagagctttagcctctgtgtaccctgcatatatagtttcattctgaacaaaactgctcccatctgaaaaccatattttgaccagattgtccaagggctgatcctttaagtcttcccatctggcataaatttggttaagtatctcacaacatgaatgtgttgagtcatcctctcctggtaatggcagtaaggaggctgggatgagggtggagcaccactcaactgttacctgtgggatttctaacaacacttgatactttagcaatctgttgtcagtgagccattgtggcacttttatgtccagtaaggggcttatttgttggacatcaggagctggattgattgtatcatggtgattt

SEQ ID NO: 729135 - DNA, 506 bp, Homo sapiens
ctgtgggatttctaacaacacttgatactttagcaatctgttgtcagtgagccattgtggcacttttatgtccagtaaggggcttatttgttggacatcaggagctggattgattgtatcatggtgattttgaggacctcctccagtaggagggcttgtgcagccactaccttgaggcagtgtggccacctgtgtgctactgggtctaggttctttaaaaagtaacctacaggacatttgattgacccaacagtttgagttaggactcctaaggctacaccttggcttttggtgatgaaaagctaaaacagtttgcttagtatgggtagcccaagggctggggcttatgagagagcagtctttagctgcctaaaggcttgctcctgatctttttcccagagaagtgagtccctatcagtcccttcttttagatgtctggactagatgttggattcccagttgtcttgtgggggaggagattagcaggtcattcacatactgtagga

SEQ ID NO: 729136 - DNA, 281 bp, Homo sapiens
gaagtgagtccctatcagtcccttcttttagagtctaatataaggacttaacaatcccaccataacccagtctaaagtctgcaatatcctgtgatccctagaaaggcctgatgctgattttgggtggctgggataggtattttaaggatggcctgtatccgttctggggagaacttatgttctcgagggatcaggattatccccacgtattggacctcttgtctgagaagctgtgccttggccttggatgctttgtaccctctgtctgcaagaaaatgtag

SEQ ID NO: 729137 - DNA, 555 bp, Homo sapiens
catttaagcatctgctaactctactaggtaagtgttatcatccttattttatataaaaggaaactgaggctcaaaaaagttaagtgaatagacttgttacagccatgtttgcttccactcaaccctagtatgagtttgttgttgtggaaagaatttatctggaatgtcttggtgcaaattagctgttttggtcaattttatttcttcaacaaatatgaatgatttatgtggcaggcacttgtgtaggcactggggatatgggatgaataggacagacacagtcctgctctcaagaaggttatctccatcacgtgagccagacataaagcaaacaattatctaagtacattttgattatattaatagttctgattagtgttatttatttattctgtgttcctaagtcccaatggtttgaaactgactgatgataaataatagaactgtaaaatttataacaataaatttgttacagaaaaggtcttattttttaacagtgtaagtactctggtttattccagaggctactaaaaattagaacatatgaggctatgg

SEQ ID NO: 729138 - DNA, 474 bp, Homo sapiens
attcatcatactactctgatccaagtgagacccacactgggtcagctccatcaaggagaagaacattccacccacgtttggattctggaatatcatccttgcttccatcagattcttgtaagtacctcacttggcacaaggtagacatgacgttcaaggaagtcaactgcgttgcccaagagtaagagaaggaatctctgaagaagagcaacttttcagacaggtagagtgtgccttgctcccaaggaaaagagttcttgaaaaaaacaaatgggaaacatggctacaagaaaactgggaagactgcaagaaattgatggcaaaatatggaaataaaaaaattaagttgacttttaggaatgcagtttacaagagcaatgcgaccactgagagtggtagcaatgtattttacaccaaagttgcctgatattaaaagtgaaaataaaatattcagtatctttgaagcacaccaaa

SEQ ID NO: 729139 - DNA, 439 bp, Homo sapiens
agaatttgaacatttcatttcagggtttgggggatccttaccaagttgaaaattttaacagaattcttagaagactaattcgagttgaaaccctctgggattgctagagaaccccttttacagggagctgctatttgcttcagcaggcagaatgcgtaggtggagtgagctttggtggcaatgagaggggccaacagaggtcctcaggagtgaattagatgaaggaaattgagcatccacaaaaaggaaagagtattctcctgtttgccaaacttaaaaatgctggatggaatcttgaagctaccagaagattgcttatcaccagaaaccaatattttttcaaaaatatgccttgtatcctaatgcagtctgtatagaaagaaagcaatcatcattgttgctaaaagctaataaacacaggacatgcatgattaaatat

SEQ ID NO: 729140 - DNA, 1255 bp, Homo sapiens
attcatcatactactctgatccaagtgagacccacactgggtcagctccatcaaggagaagaacattccacccacgtttggattctggaatatcatccttgcttccatcagattcttgtaagtacctcacttggcacaaggtagacatgacgttcaaggaagtcaactgcgttgcccaagagtaagagaaggcaaaaacatgctaactgacaagaaaatcatgggttttatacaaggataacaagtgctgggttgcttagctatgaggaaggctaggctcactgcataccagaagatgtacagcgttggagaattcagggatttttatcaacaatcaaactatatttgtggaaattttgtgcataagtgccaaagatggctgacatcggaccacattctatttaactcaactgaatgacaccaagctctcatcctaaaacttatagttacatccacccttctgaaatatttaattattctccaatacactggaggtaataggtataaaaagaatgagcatgtgcaacttagtatctcatatctaattttgtgtcccaagttcattcttcccctgaatgtcccatgtctaccaggtgcaggattatctggatgggtcagttcaaaacaatttcagggaataaattgtgtaggggactcaattttctgagacagaaacataatgtgaataactcctttgttagaaaataatttcagtgacagaaagcctttcagttcataaagaaaacttacatatcaacaagcctagctcctcactagtcccagtgaatgcttacatcaatcagctctacaatatccagtaaaggactttccaattcgcctttgaataaactgaggtattggaaacatctaaaaaatggtttttaattcttcctaatcttcagggagttcttccttatattgagctgatatctgccctctgtaactttcaactaattattcaaatctctcaagtgattataattaattccatcttataaggaatttttctcagcttccagcctcttgaaaatactctgatattttctctaatattcaagtggaaatgtaaatgggtaacgtaagagtctgtggggttaggagggtggaggaaaggtaagggaaagctaatgagaaataaccaaagcaagaaaaagaattttattttcttcaagttctttgtacatccaaagtggaagattcctaaaataaattccccataccacattttaaaaattaggttagcaagcttactttt

SEQ ID NO: 729141 - DNA, 1266 bp, Homo sapiens
gttagtggataattcactggtggacttaagtgccataagattgccaagggattgctagagaaccccttttacagggagctgctatttgcttcagcaggcagaatgcgtaggtggagtgagctttggtggcaatgagaggggccaacagaggtcctcaggagtgaattagatgaaggaaattgagcatccacaaaaaggaaaggcaaaaacatgctaactgacaagaaaatcatgggttttatacaaggataacaagtgctgggttgcttagctatgaggaaggctaggctcactgcataccagaagatgtacagcgttggagaattcagggatttttatcaacaatcaaactatatttgtggaaattttgtgcataagtgccaaagatggctgacatcggaccacattctatttaactcaactgaatgacaccaagctctcatcctaaaacttatagttacatccacccttctgaaatatttaattattctccaatacactggaggtaataggtataaaaagaatgagcatgtgcaacttagtatctcatatctaattttgtgtcccaagttcattcttcccctgaatgtcccatgtctaccaggtgcaggattatctggatgggtcagttcaaaacaatttcagggaataaattgtgtaggggactcaattttctgagacagaaacataatgtgaataactcctttgttagaaaataatttcagtgacagaaagcctttcagttcataaagaaaacttacatatcaacaagcctagctcctcactagtcccagtgaatgcttacatcaatcagctctacaatatccagtaaaggactttccaattcgcctttgaataaactgaggtattggaaacatctaaaaaatggtttttaattcttcctaatcttcagggagttcttccttatattgagctgatatctgccctctgtaactttcaactaattattcaaatctctcaagtgattataattaattccatcttataaggaatttttctcagcttccagcctcttgaaaatactctgatattttctctaatattcaagtggaaatgtaaatgggtaacgtaagagtctgtggggttaggagggtggaggaaaggtaagggaaagctaatgagaaataaccaaagcaagaaaaagaattttattttcttcaagttctttgtacatccaaagtggaagattcctaaaataaattccccataccacattttaaaaattaggttagcaagcttactttt

SEQ ID NO: 729142 - DNA, 378 bp, Homo sapiens; identical to SEQ ID NO: 130952

SEQ ID NO: 729143 - DNA, 1702 bp, Homo sapiens
agcggttgaggcgcgtgtggaagcgcttccgggcggtagcacgctgtgttggcggcggctccccgcttgcctcagctgcagcagcgggaagctcggtggcaagcccttgtagtcctgtgcgatggcgtctcgatatgacagggcgatcactgtcttctccccagacggacacctttttcaagttgaatatgcccaggaagcggtgaagaaaggatccaccgcggtttcgaggacttactgctgatgctagagtagtaataaacagagcccgtgtggagtgccagagccataagcttacggttgaggacccagtcactgtagaatacataactcgcttcatagcaactttaaagcagaaatatacccaaagcaatggacgaagaccttttggtatttctgccttaattgtaggttttgatgatgatggtatctcaagattgtatcagacagatccttctggtacttatcatgcttggaaggcaaatgcaataggccgaagtgctaaaactgttcgagaatttctagaaaagaattacacagaagatgccatagcaagtgacagtgaagctatcaagttagcaataaaagctttgctagaagttgtccagtctggtggaagaaacattgaacttgctataataagaagaaatcaacctttgaagatgtttagtgcaaaagaagttgaattatatgtaactgaaatagaaaaggaaaaggaagaagcagagaagaaaaaatcaaagaaatctgtctaattcttaggatgaccactgggaggtcttaatgttttgttttattgtactgcctgaggttgtttagtgaaattttagaggaaaacagttattttgcagcattacatgcagtacttgtgtgatgttttgagaatgccagatctgtggctgtcttcattctattacatagtcaaacataggtttatgtgaagattttctttgaaaggggatttcagtaattgttgagagcagtcataattccacataagcctgagactctataatttgtccagtgtcttacttaccttcatatatgcaaatataattttaaaaaattttttaattaaaaaaatttaataatttggtgatgtttgaatattgactgtcagttaaggacatagctattccaaataaactaaatataatattgagctgcatttctcaaagaatgacaaaagcatccttatactgatgagttcttaaaattttgtcagagccttcttcattttacaatattttgttatttttattttacctttttcattttacaatatttcgttatttttattttacctttttcattttacaagttgcaatatattgtttcgttcatggaacaaatataggctgaattcaaacatgcaattaaagcatgggaagagcttctaagggcatcttaacaggatgctacatgaaaataaggaaagaaattaatacatatcacttttagtttagatttttattttatctcaagtatgtccagtgtgttcggtttgttacatattccatgaaatatctgagtgtgtattttatgattggtattatggaaggcttattgggggaacaagaaaaatataaaaagtgatctctgcccacggaaaggatttaatccaaatggtccacaagaggaatgtgcttaattcctacagtgagtttatatttttgaaaataaaagctagtaaatattcaaa

SEQ ID NO: 729144 - DNA, 1829 bp, Homo sapiens
agcggttgaggcgcgtgtggaagcgcttccgggcggtagcacgctgtgttggcggcggctccccgcttgcctcagctgcagcagcgggaagctcggtggcaagcccttgtagtcctgtgcgatggcgtctcgatatgacagggcgatcactgtcttctccccagacggacacctttttcaagttgaatatgcccaggaagcggtgaagaaaggatccaccgcggtgtcggaattcgaggtaccaatatagttgttcttggggtagaaaaaaaatctgttgccaagcttcaagatgaaagaactgtgaggaaaatttgtgcccttgatgaccatgtctgcatggcttttgcagttcgaggacttactgctgatgctagagtagtaataaacagagcccgtgtggagtgccagagccataagcttacggttgaggacccagtcactgtagaatacataactcgcttcatagcaactttaaagcagaaatatacccaaagcaatggacgaagaccttttggtatttctgccttaattgtaggttttgatgatgatggtatctcaagattgtatcagacagatccttctggtacttatcatgcttggaaggcaaatgcaataggccgaagtgctaaaactgttcgagaatttctagaaaagaattacacagaagatgccatagcaagtgacagtgaagctatcaagttagcaataaaagctttgctagaagttgtccagtctggtggaagaaacattgaacttgctataataagaagaaatcaacctttgaagatgtttagtgcaaaagaagttgaattatatgtaactgaaatagaaaaggaaaaggaagaagcagagaagaaaaaatcaaagaaatctgtctaattcttaggatgaccactgggaggtcttaatgttttgttttattgtactgcctgaggttgtttagtgaaattttagaggaaaacagttattttgcagcattacatgcagtacttgtgtgatgttttgagaatgccagatctgtggctgtcttcattctattacatagtcaaacataggtttatgtgaagattttctttgaaaggggatttcagtaattgttgagagcagtcataattccacataagcctgagactctataatttgtccagtgtcttacttaccttcatatatgcaaatataattttaaaaaattttttaattaaaaaaatttaataatttggtgatgtttgaatattgactgtcagttaaggacatagctattccaaataaactaaatataatattgagctgcatttctcaaagaatgacaaaagcatccttatactgatgagttcttaaaattttgtcagagccttcttcattttacaatattttgttatttttattttacctttttcattttacaatatttcgttatttttattttacctttttcattttacaagttgcaatatattgtttcgttcatggaacaaatataggctgaattcaaacatgcaattaaagcatgggaagagcttctaagggcatcttaacaggatgctacatgaaaataaggaaagaaattaatacatatcacttttagtttagatttttattttatctcaagtatgtccagtgtgttcggtttgttacatattccatgaaatatctgagtgtgtattttatgattggtattatggaaggcttattgggggaacaagaaaaatataaaaagtgatctctgcccacggaaaggatttaatccaaatggtccacaagaggaatgtgcttaattcctacagtgagtttatatttttgaaaataaaagctagtaaatattcaaa

SEQ ID NO: 729145 - DNA, 1894 bp, Homo sapiens
agcggttgaggcgcgtgtggaagcgcttccgggcggtagcacgctgtgttggcggcggctccccgcttgcctcagctgcagcagcgggaagctcggtggcaagcccttgtagtcctgtgcgatggcgtctcgatatgacagggcgatcactgtcttctccccagacggacacctttttcaagttgaatatgcccaggaagcggtgaagaaaggatccaccgcggttatcatgtttctctgattgttcacgattcttgtggcctggcatggatgtctgcacatttgaaaaagtcggaattcgaggtaccaatatagttgttcttggggtagaaaaaaaatctgttgccaagcttcaagatgaaagaactgtgaggaaaatttgtgcccttgatgaccatgtctgcatggcttttgcagttcgaggacttactgctgatgctagagtagtaataaacagagcccgtgtggagtgccagagccataagcttacggttgaggacccagtcactgtagaatacataactcgcttcatagcaactttaaagcagaaatatacccaaagcaatggacgaagaccttttggtatttctgccttaattgtaggttttgatgatgatggtatctcaagattgtatcagacagatccttctggtacttatcatgcttggaaggcaaatgcaataggccgaagtgctaaaactgttcgagaatttctagaaaagaattacacagaagatgccatagcaagtgacagtgaagctatcaagttagcaataaaagctttgctagaagttgtccagtctggtggaagaaacattgaacttgctataataagaagaaatcaacctttgaagatgtttagtgcaaaagaagttgaattatatgtaactgaaatagaaaaggaaaaggaagaagcagagaagaaaaaatcaaagaaatctgtctaattcttaggatgaccactgggaggtcttaatgttttgttttattgtactgcctgaggttgtttagtgaaattttagaggaaaacagttattttgcagcattacatgcagtacttgtgtgatgttttgagaatgccagatctgtggctgtcttcattctattacatagtcaaacataggtttatgtgaagattttctttgaaaggggatttcagtaattgttgagagcagtcataattccacataagcctgagactctataatttgtccagtgtcttacttaccttcatatatgcaaatataattttaaaaaattttttaattaaaaaaatttaataatttggtgatgtttgaatattgactgtcagttaaggacatagctattccaaataaactaaatataatattgagctgcatttctcaaagaatgacaaaagcatccttatactgatgagttcttaaaattttgtcagagccttcttcattttacaatattttgttatttttattttacctttttcattttacaatatttcgttatttttattttacctttttcattttacaagttgcaatatattgtttcgttcatggaacaaatataggctgaattcaaacatgcaattaaagcatgggaagagcttctaagggcatcttaacaggatgctacatgaaaataaggaaagaaattaatacatatcacttttagtttagatttttattttatctcaagtatgtccagtgtgttcggtttgttacatattccatgaaatatctgagtgtgtattttatgattggtattatggaaggcttattgggggaacaagaaaaatataaaaagtgatctctgcccacggaaaggatttaatccaaatggtccacaagaggaatgtgcttaattcctacagtgagtttatatttttgaaaataaaagctagtaaatattcaaa

SEQ ID NO: 729146 - DNA, 1666 bp, Homo sapiens
ccagaaccagccgttgtcccctggcaaaaagaggcccagggctgagccctgggcaagtgtctcccgacatcgctacccctcctccctttattagtttccctttcccaacagaaaccatttccttctgccaccaaaactaggttgcatccaaaagtttttcacaagcttaaaaaagaaaaacgaaaaattgacaagtattacacagaagagcccacaaaagcttcagcaacaccaagggcgaagaagcagcgtcagatccaggtctgcaggacacaccaaagaactcctccaagtcacacaagggagaaaattaacttcattggcttctatcaggaaagctattttttttttcctcttctttcctgcaagtttcccaaaccccatgactctgatttccaggtcagagactaaggttttatttttcttactctgtatactttatatgtggagagtccctgaaggaacactgtgatgggctgattactgtgagccagttgtgggccagacctggcctcaggtgctgcaaagggaattcagtcacccctgtgcagtgatctgtgagccccaagtcagatccaactttttcctgatagacagcaccctcctcctccctaccaagaaatagcagggttggaggtagtgacccaatattcaagaggtttgaaattctacatgagatatttctgagttaactcctaaatagcagtttccttaatcatgtggaaaataagaacacttactaaagagaccattggtttaagagaaatggaaacttatgtccacgtaaaaacctgtaaatgaatgttcacagcagccttttcataatagccaaaaagggaaagcaatccacacgtccatcaaccaatgaatggataaacttaacgtgggatatacgtgtaatggaatgctatttggtgaagaaagaaatgaaatattaatacatgcgttaacaaggatggaccttaaaatatcatgctaagtaagagaagcctgtcacaaaagaatatgtattgtaccattctacttatatgaaattcctagaataggcaattctatagggacagaaactagactagtgattggctagagcttggggagagtttggggagcctggaggatgacagcaaagtggtgcagagtttctttttaggttgattaaatgttgtaaaattaattgtagtgatggttgtgcaactttgtgattttgttaaaaaccattgcattttgccctttaaatggatgaattgcacaatgtgtgaattagacataagtttatttacataattaatatctatttattgatatataactcatatatcaataaatatatactatataaaataattttatatttatataaaatgtgaattatatataaatacataaataaaactgctaaaaactaaaaaatatatactttaaaaaaaggctgttcgtttctttcacattttctgagcacaatcactttgggataaatgtgtccaggcttaaaaagccagattttatgggctaactaaaatggaaatgtgaaaaactgtgtttttttccataggaggagagagtctgatttgcaggtacgtgcatacccacagcagtcatacttgtaattcttggaaactttgctgaaagttttttcctagcctgaaatcattaaaatatgttgaaa

SEQ ID NO: 729147 - DNA, 1319 bp, Homo sapiens; identical to SEQ ID NO: 143637

SEQ ID NO: 729148 - DNA, 691 bp, Homo sapiens
acactgctgcaaaactgatctttctaaacacaggtcagctcatgtcactcacctcctcagaaatcttcagtagctcttcattaaccaacagggggttcctaactccccgtcttggcattggaggacctttccctgcctgatccccgcgatcatcttttcctgcaatatttactcaggccagtgctcaccccttctttaaaatgctggtgctggctcaagagaggcaaacagccatctctctcattcttatcttccctgtcaagacttcacataggtggactgatgctagactatgatgatgagtctccagtgaaagtttctaagtagaactctctcagggtttctagaagcatttttgtttaagaaaatattgtggggggagcgggatttttaaatggtggagctcatggtaaacaaaattatgtgtgcaaaatgttaatagagcctttctaatattcttgtgattaactctggtgacagttggctgagtgttcttgtttctgcaacgcctgtctttggaaatgtgatagggggcttattgagcagactgcaactggaaatgaggaatgttgacttgaagtctgtaattcacttatacttttctctaaatcctagactgagtcactcaatgtgagataagtactgcacataaaatgcaatggatttcacgttatacagtggagtgggtaag

SEQ ID NO: 729149 - DNA, 1683 bp, Homo sapiens; identical to SEQ ID NO: 141844

SEQ ID NO: 729150 - DNA, 616 bp, Homo sapiens
aaagaaagagaccgtgtcgcccaaccaaaaaagtcatttaacaagatagtcaggatactaccaaccacactgcccaccacaagaattcacctaaagaagtctgttccaaggacactgcttcactggactgcaagaagaactatacatgattgttcagataaatttgaggatttacatgacatgacctcatttacacaccttaaaaaagtaaaatcaagatcaaggcttttaggaaaaagctcagatgatatccataaccatgccagacactctgcaagaccatatactgctccggaggttaacaagcaacgagaaagctacagtggaaagtttacaagtcgtcgaatggtttcatcaggcttagttcatataaatgataaaacatcagattatgaaatgcataaaatgcggccaaaaaaaattaaaagaggatattgaaaaatgttcgctcatttgtgatattataaaacatgtttaactcagaatgatatgtgaggccagcagtcagaatatcacttctccattaacaaaatggtttggagatctcttcttttgtgtgacagaagtcagcaaccaaatttcatcttgttagaaccattttgttttgattaaaatg

SEQ ID NO: 729151 - DNA, 569 bp, Homo sapiens
gtgtgttatagaaatgcagtattttgaggcaaacttctggagtactaaatctgaattggaaaggactgataacatctctttcaactcatagctgattcaggattgttcagataaatttgaggatttacatgacatgacctcatttacacaccttaaaaaagtaaaatcaagatcaaggcttttaggaaaaagctcagatgatatccataaccatgccagacactctgcaagaccatatactgctccggaggttaacaagcaacgagaaagctacagtggaaagtttacaagtcgtcgaatggtttcatcaggcttagttcatataaatgataaaacatcagattatgaaatgcataaaatgcggccaaaaaaaattaaaagaggatattgaaaaatgttcgctcatttgtgatattataaaacatgtttaactcagaatgatatgtgaggccagcagtcagaatatcacttctccattaacaaaatggtttggagatctcttcttttgtgtgacagaagtcagcaaccaaatttcatcttgttagaaccattttgttttgattaaaatg

SEQ ID NO: 729152 - DNA, 2073 bp, Homo sapiens
  misc_feature (27)..(27): n is a, c, g, or t
  misc_feature (611)..(611): n is a, c, g, or t
  misc_feature (1093)..(1093): n is a, c, g, or t
aggcgattgggtaccgggccttcctcngcccagcgtccgctgtcctcccagctactcgggaggccaaggcaggagaattgctcgaactcagggggtggaggttgcagtgagttgagattgtgccattgcactccagcctgggcaacagagcaagactctgtctcaggaaaaaaaaaaaaaaaaaagaaaagcaacatagtggggtttctgtcaatctgtcctcggctgcccttctcatttgttgatgggaccttgaaagcaagcttgctaggtgccctctgtggctccagcctttaccggaagtgtggtgcatgtttttaacttcagggaagcggtatcctgtcactggggtatgggatgagcatggagaagaggcaccagccacgattccttcctaagcatctcctgttctgactgctcatgaattgaagaaactgacccttgtgttcactctgcttcctctgattgtttctatcatggtttccaaaaattgccatgggaacatgtcaaagggccacttttggagactctgctccaggaagaactagtccccatagctcccctatcccccaccataccacagacatgctgtgacttagagaactacacanacatccttgggacctagatgctggaggaatgacttaatttgatgcagaaactccatcacccaagggagtacctctcactgtaaacagtgctgtgcttgctctgaaggattaagcaagaagtcccaacagaagcaatgcaccagtcctgctatgggaatgaaactgcgaagcctaggagatgggtgaagtccctttctggagacctttaatgagtacttcaaagcactcgacacagatgcagcaaatagggcatcacacatacacaggcattaatactcacgggcatatagatgctgacatgtgtacactgacttacgcccttcccacagctacagataagggctcgcaaagttggcctcagagacacatcaggaaccaaggtggaccagcaggtgccgagcctgtgtatctgcttggaggagacgttccaatgtgctgccttgttcagagatggtgtagttgcaagaaacagaaacccaccncaatttctcaggcaaaaagggagttaattataaggacataagagcacaaagttccagtgcaagagatacatccaggctgcacaagctccgggagtggggcctggcaagccaaaagaaaccaaagtttgtcttgccttctgttcctctttctgaagccacatagccttttatgactgtgtatctttgcatcgcttttgttttctttttatgtctctgaagccagcttttcctgttcactcatcccttgattaaatatggacattctagcttcacatcacttcctaattcagggaccaacagagactggttagcatgttgctatcccacctccaaattgcatcagggaatttgattttgctgcttgggtcagggtccagtagtctgggccaggggactgggaccatctagcacatagccaaaggggctgacctaatggggcaggtctgacacaaatggggtcatttcttggacagacatcccaagggccactatgatagtagcttctctaaaagacgggttcctgagaagaattgcattctgtttcccagtgagttagcggagtcatacttactacatcccaaggcaggtggcatggtagaaacaggcctgaaagagaggtcaggttctaaccttctcccctctctgaggctcagctgctcccttctgtagaataaaaggggttggtctgtaacaagattttcaaaaatttatagtagtgaaactttacaattcgacttggacaaccagagattaaaagcaaatagattcttgttgatgtcaggtggggagcttagctctcccattctgtgattccttcctctgaaggccctcaaagcaactccataataactcacagagctgccagagccgatgttttggagcaccctgagacatatgaactctaatataacttccaggagaaagtacataggattccacttagagccaatctcagctgtctatctgtctagctacctgtc

SEQ ID NO: 729153 - DNA, 211 bp, Homo sapiens
  misc_feature (20)..(20): n is a, c, g, or t
  misc_feature (22)..(22): n is a, c, g, or t
  misc_feature (85)..(85): n is a, c, g, or t
ctcgtgcaatttcgggcagntngtacattctggattctcctcttgagtaaaaggactcagccaactatgaagttttttgtttttnctttaatcttggctctcatgctttccatgactggagctgattcacatgcaaagagacatcatgggtataaaagaaaattccatgaaaagcatcattcacatcaaggctatagatcaaattaactgt

SEQ ID NO: 729154 - DNA, 538 bp, Homo sapiens; identical to SEQ ID NO: 17232

SEQ ID NO: 729155 - DNA, 495 bp, Homo sapiens
tgcttactggcaggcactgtgctaggcactgaggagacaggacaggcacggttctgttatggagctcgctgcctttaggagcaagcaaagaaagtgctgcataaacaaagctcaagataaatctagaggtggaaggggctcacttgctatggctgacatcccttacaggtaaaggtggggaagggggagagctccaggtgtggatcaaagaagccaagaacttgacggctgccaaagcaggagggacttcagacagctttgtcaagggatacctccttcccatgaggaacaaggccagtaaacgtaaaactcctgtgatgaagaagaccctgaatcctcactacaaccatacatttgtctacaatggtgtgaggctggaagatctacagcatatgtgcctggaactgactgtgtgggaccgggagcccctggccagcaatgacttcctgggaggggtcaggctgggtgttggcactggtgagatcccctccccca

SEQ ID NO: 729156 - DNA, 279 bp, Homo sapiens
ctgcatctccccgccacccgctcgtccccttctctttctgccaccctcctttccttcctccctcgctccactccactccctccctcttttctcagtaccctcctctttactctccgagttaactgagagccgacctgacatctccaacattttcaccctcttcccccacccccatcaccgagaatggagtcagggtttccggagagaccgaactctgctctcagcacctttcccagccgctgttgctaaactgacctcggaggacgagaggggaaggag

SEQ ID NO: 729157 - DNA, 828 bp, Homo sapiens
cttgttctcatggtggctacatggaagtatgctagacctcctacaggtttaggctcagaactggcagaatgtcacttctgctgcattctattaaaaacacgtcacaaggctagcccagattcaagtgggtgtagaaatagactattctacttgatgactgatactcttgatatagccaatgtagggtggggatctaggacaaagggtgttgtaggaatctgcactggcactgaaggggcacaaggagaacttgggactcagttgactaataccagtaaagatgtcatctggccaatttgtgtgaaaaaagagaataattctcatccaaaccgcctgtctctggaaataagaaaagctctgagggtctccaaagttaccagaggaaggctgaattttatgagtctagtcctcaactctaaccaaagtaaaggaaactggaaagacacacgctttttcagtcattaatagaaagttgtccagaaacccggcgagtgaatctacccagagctgaagcttcctttgcaacttgggaacaccagggccacagtgactttgtggcttggctttagataaatttgaccatggctgtagaacccagcagctcagaatccattaaaaggagagctgggaggaggctcctgccatacgccagacagttttgtagacacgaaggatccagagattagcaacacctttaccatttttggtgacagttaagcacccatctaagaagttttctttgggtttccggagagaccgaactctgctctcagcacctttcccagccgctgttgctaaactgacctcggaggacgagaggggaaggag

SEQ ID NO: 729158 - DNA, 416 bp, Homo sapiens
ataccagtaaagatgtcatctggccaatttgtgtgaaaaaagagaataattctcatccaaaccgcctgtctctggaaataagaaaagctctgagggtctccaaagttaccagaggaaggctgaattttatgaaacccggcgagtgaatctacccagagctgaagcttcctttgcaacttgggaacaccagggccacagtgactttgtggcttggctttagataaatttgaccatggctgtagaacccagcagctcagaatccattaaaaggagagctgggaggaggctcctgccatacgccagacagttttgtagacacgaaggatccagagattagcaacacctttaccatttttggtgacagttaagcacccatctaagaagttttctttggtgagtgccaaaaagtgtaactc

SEQ ID NO: 729159 - DNA, 656 bp, Homo sapiens; identical to SEQ ID NO: 61429

SEQ ID NO: 729160 - DNA, 3281 bp, Homo sapiens; identical to SEQ ID NO: 49148

SEQ ID NO: 729161 - DNA, 1086 bp, Homo sapiens
cttttttcaccctgatttctaattattttattgaaacaactataaaatgtatggtttctccaggaagatatctgctttttaaaacaacaaacaagaacaacaacacaaaactggtaatgatttggagtaatcatgcgggcatattgagtctgggtagtgtttcgctggtggtagagtggttgagacttcctgggaggactttttccgccttcactcctacagatttaagattctttatttttaggccgggcatggtgactcacctgaggtgaggagttcgagactagcctggccaacatggcaaaaccctgtctctactaaaagtacaaaaattagccaggcgtggtggtgcatgcctataatcccagctactcgggaggctgaggcaggagaatcgcttgaacccaggaggcagaggttgcagtaagccaaggtcacaccactgcactccagcctaggtgacagggcgagactctgtctctcaaaaaaaaaaaaaaaaaaatttctttgaaacagggtctctaatatgttgcccaagctgatctcaaactcgtggctcaactggattctcccgtttcaaccttgagtagctggggacgacagatacttgctactggcacccagctaggttaaggttctgtatactctgtctttctaaagcaattccctggaaattttctcaacatgggttataactgaatgcttgggaaggggaggggcagccccttcaacaggaaaggggactgccaaatcttaaatgccagtcaagattctcctgaagctagcagggttctccggtacgagcattagctgcctgtgtgagaattgaccagatggggggttttacggcccccccgaatgagacacgccaaacaatgtcccctatcccttgggcgtgcgccgcgggaaaggacataaggggggtttgcggacaatacacttacaagccggcccgccggacaccacagggggttgggcgtcaccaacacgatgcgcgcgggagaacaaggtgacagccgacgcagaagtaaacccccggcacaaatcaagcaagcggcacataccatcttgtgcacgccacactga

SEQ ID NO: 729162 - DNA, 818 bp, Homo sapiens
caggagagcgacatcttcctgagctcctgtccatgcctgccatacctgccagcttcagacatttagggaaaaggggcagcatgtggggaatgccccccgccttccacaaatccttttgctgacccaggaagttctgggagttgccgtttttcatcaaaacgtttgggggcttccaagttgtttgtgagatctgaaaacttaactttgcccaatatcctggttggggaccgtgagaaatatctgtcccatttagatctctggggccactgatgggatgccctgggaagatccttggctgccgctttctctccccacagcctcaaggccaccctaccgtcatatatatcactcaggcgtagaagaaaagacacatattttataaaatctttttaataaaaggaagttccaagaagaatttttaagaactacctctaggtgtgcctccacgctggccctagctttcccattgctgttccattgctgagacaaactggaaggctccctttctgtttgaagttttatgacttgtagtcaggctttgctgttcgtcacagtgtcattttccattcaggtaccatcacctggtcccatcaacaggtctagtatgtagctcactgataacagaggaagatgtgtctcctcccaccctcttcctaatggtcattatgcctttctccatctattgtctctttcaccccttcccctctcccttgggctctgatgaaaaattgttgactgcagtttcggaagtttgatctgagaaccaaccatagaatgtttcagttctaggaaataaaaccagttgattaaagcaaaaa

SEQ ID NO: 729163 - DNA, 566 bp, Homo sapiens
caatttcagatacagacatcaaggatgcagtcgacccagagtccactcagcggccaaacccattccgtcgacaaagcattgtcttagatcccatgttacaggagggtacctttaacagccagagggcaaccttcataagagactggtccaacaagatgcctgacatggcttacgaacgcaagctaaagagcctcatggagaaaagcaccgaacctaagatggaaaccatgaggatgttgaagccagaggaggtgctgagctgccgatacctgaggttatccaaggagaacattcggaccttgctcaagttgtgcaaggatgcaggaatgaatgtggatatccacccccacatggtcgaagaggacatagatgctaaaaaggtgttcaccggaatacccagcatggccctctaaatagctcctctcgccaccaccttcaggctccttctgtcatgggacccttcacctccagatgccatcctctggcacactacaagtggtccttccaacttagtgcatccctttagaaagtaagcaatcagaaaacaagcctcggctgtgtgatca

SEQ ID NO: 729164 - DNA, 495 bp, Homo sapiens
caccccggcaccagtcgcccgcatcgcggctctcgctaagatcggccctaagagagaatggaaggctgtttcctagaaaggagcattggtggcggctgctgggaagacacggggaatggaacgggcctttgcttccgcagcacaaagcgtcacgaggtggggaggaggaaaggccggcgactatctacaccgccgcctgcagcttttactgggagcgctgagcgccagcctggaggtgcacgtgttgcagtgaggagccctgaaacatgcgtgttttactgcacaagatgtgcccttgaatggagtctaggccagtcggggtcaccaaaaaaaatccaccaaaaaacacccaagaagggagaagcggtcaccccccacgtgctggaatgacagctttttacttgctaggcagttggaccttttccgaattttctacaatgcacatagatttgtacttacatctttaaattaaaacccacgcaactccgaaaaata

SEQ ID NO: 729165 - DNA, 969 bp, Homo sapiens
aggtgattttctgagtgtgactcctctgttcctggcaccctgtgcatccttagccatagcttacaagagaacagctggttgtgatggcaggaggccctcccaacaccaaggcggagatggaaatgtccctggcagaagaactgaatcatggacgccaaggggaaaaccaagagcacctggtgatagcagaaatgatggagcttggatctcggtcccggggtgcctcccagaagaagcagaagttggaacaaaaagctgctggctctgcttcagccaaacgagtttggaatatgactgccacccgacccaagaaaatgcaacccagggacagatgcagtggcgcagactagcctggaagagttcaatgtactggagatggaagtcatgagaagacagctgtatgcagtcaaccggcgtctgcgcgccctggaggaacagggcgccacctggcgccacagggagaccctgatcatcgccgtgctggtgtcggccagcattgccaacctgtggctgtggatgaaccagtgatcgccccagcgcggctccgtattggagccctccctgcttccccttctttctttcctctttccccaggccgccactgcccttgcccctttcatctcccagcagccctcaggagcgtcaggatcattttcaactctggttaggcctcctacctggggaggccaggtcactgcactgggaggtcctggctgctgcgaagctggaggaggactgcgtgggctgagatgccaccctttgaagggtgaacagcatggcggcatctgggccccacagtaacacctagtggcaaccttgccttcctgacctcagcggcccttctgttccatcctctgtgggcaggggtgtggctttgttttcctccctcgtttgcttccacctcgtgcacagcgctctgcacagacaacacgctcaataaaagttcagccatagcagcaaaaacctgtg

SEQ ID NO: 729166 - DNA, 1076 bp, Homo sapiens
aggtgattttctgagtgtgactcctctgttcctggcaccctgtgcatccttagccatagcttacaagagaacagctggttgtgatggcaggaggccctcccaacaccaaggcggagatggaaatgtccctggcagaagaactgaatcatggacgccaaggggaaaaccaagagcacctggtgatagcagaaatgatggagcttggatctcggtcccggggtgcctcccagaagaagcagaagttggaacaaaaagctgctggctctgcttcagccaaacgagtttggaatatgactgccacccgacccaagaaaatggggtcccagctgccaaagcccagaatgctgagagaatcaggccatggggatgcccatctccaggagtacgctggcaatttccaaggcatacgtttccattatgatcgcaacccagggacagatgcagtggcgcagactagcctggaagagttcaatgtactggagatggaagtcatgagaagacagctgtatgcagtcaaccggcgtctgcgcgccctggaggaacagggcgccacctggcgccacagggagaccctgatcatcgccgtgctggtgtcggccagcattgccaacctgtggctgtggatgaaccagtgatcgccccagcgcggctccgtattggagccctccctgcttccccttctttctttcctctttccccaggccgccactgcccttgcccctttcatctcccagcagccctcaggagcgtcaggatcattttcaactctggttaggcctcctacctggggaggccaggtcactgcactgggaggtcctggctgctgcgaagctggaggaggactgcgtgggctgagatgccaccctttgaagggtgaacagcatggcggcatctgggccccacagtaacacctagtggcaaccttgccttcctgacctcagcggcccttctgttccatcctctgtgggcaggggtgtggctttgttttcctccctcgtttgcttccacctcgtgcacagcgctctgcacagacaacacgctcaataaaagttcagccatagcagcaaaaacctgtg

SEQ ID NO: 729167 - DNA, 1029 bp, Homo sapiens
aggtgattttctgagtgtgactcctctgttcctggcaccctgtgcatccttagccatagcttacaagagaacagctggttgtgatggcaggaggccctcccaacaccaaggcggagatggaaatgtccctggcagaagaactgaatcatggacgccaaggggaaaaccaagagcacctggtgatagcagaaatgatggagcttggatctcggtcccggggtgcctcccagaagaagcagaagttggaacaaaaagctgctggctctgcttcagccaaacgagtttggaatatgactgccacccgacccaagaaaatgggatgcccatctccaggagtacgctggcaatttccaaggcatacgtttccattatgatcgcaacccagggacagatgcagtggcgcagactagcctggaagagttcaatgtactggagatggaagtcatgagaagacagctgtatgcagtcaaccggcgtctgcgcgccctggaggaacagggcgccacctggcgccacagggagaccctgatcatcgccgtgctggtgtcggccagcattgccaacctgtggctgtggatgaaccagtgatcgccccagcgcggctccgtattggagccctccctgcttccccttctttctttcctctttccccaggccgccactgcccttgcccctttcatctcccagcagccctcaggagcgtcaggatcattttcaactctggttaggcctcctacctggggaggccaggtcactgcactgggaggtcctggctgctgcgaagctggaggaggactgcgtgggctgagatgccaccctttgaagggtgaacagcatggcggcatctgggccccacagtaacacctagtggcaaccttgccttcctgacctcagcggcccttctgttccatcctctgtgggcaggggtgtggctttgttttcctccctcgtttgcttccacctcgtgcacagcgctctgcacagacaacacgctcaataaaagttcagccatagcagcaaaaacctgtg

SEQ ID NO: 729168 - DNA, 505 bp, Homo sapiens
agtctgcctgtccttcaggaaatgccagaggaaaaagattctttggctgagctgatgctctcagtgtcaatagctccagccctatgcaatctccattcttccaccctcatctctatttcacaggttgctgtaaagagaagaaaattcttattgtaatctttattcaagccaagtcttgataccctggggctgtgggagaggaatggcaagccatggaagaatagaggagccagaaagatgggaatagaaagtctgtgctaagtaccaggcaggactggtcttcaaccttgatgtcttatgctactgtagttaattttgttcactaccagctatttatttgcaaacgttcgtggttcaacattctgcttaaagtatggacagttatcttcttcatcgatgtgtggacatatgtttctattcctctccttaaatcctccctccatcctgagaccactctttcttaatgttctaattttaaataaatgcatgtaaatgtatgtaaaaa

SEQ ID NO: 729169 - DNA, 743 bp, Homo sapiens
gcttgcgtgaatgatcacttgctgattcgaggtaggcatgatgaaggagggtttagaggagacacagacacaatgaactgacctagatagaaagccttagtatactcagctaggaatagtgattctgaggacacactgtgacatgattatgccattacatgtatggtagtgatggggatgatagaaggaagaacttatggcatattttcacccccccaaaaatcagttaaatattgggacactaaccatccaggtctagaaaagtcacatgccatagccatggtattgcacatcattcatcttgcattctttgagaataagaagatcagtaaatagttcagaagtgggaagctttgtccaggcctctgtgtgaacccaatattttgtttcgaaatagaacaagtaagttcattgctatagcataacacaaaatttgcttaagtggtggtcagcaaatccttgaatgctgcttaatgtgacgaggttggtaaaatcctttgtgcaacactcttactccctgaatgttttgctgtgctggggcctgtgcatgccaggcaaggccaagatggctcaaagagcaaccagccacctctgcagcctgccacctcctgctggcaagatttgtttttgcatcctgtgaagagccaaggaggcaccagggcataagtctactcacttatatctgtctggaacataacgcttgtttgtttttacaacaaataaaattgatcttgaataaaaac

SEQ ID NO: 729170 - DNA, 488 bp, Homo sapiens
tctttcattagtttttcattcagttgtatttatttaatttttatttcattttccagacctaagtcagtgttagtctaccactgtacatctggtaacctcaatccctgcaaccggggcaaaatgggtttccaggtcttggcaacctttgaaattccaattccatttgagagagctttgacgaggccatatgctgatttcaccaccagcaacttcagaacccagtactggaatgccatcagccagcaggcccctgccatcatctatgacttctatctgtggctcactggaaggaaacccaggcaaggccaagatggctcaaagagcaaccagccacctctgcagcctgccacctcctgctggcaagatttgtttttgcatcctgtgaagagccaaggaggcaccagggcataagtctactcacttatatctgtctggaacataacgcttgtttgtttttacaacaaataaaattgatcttgaataaaaac

SEQ ID NO: 729171 - DNA, 511 bp, Homo sapiens
gtttccaggtcttggcaacctttgaaattccaattccatttgagagagctttgacgaggccatatgctgatttcaccaccagcaacttcagaacccagtactggaatgccatcagccagcaggcccctgccatcatctatgacttctatctgtggctcactggaaggaaacccagtttttctcaaaatctgaggagctgctacggaaagcacaccagatctcatgtgttgaaacgtgaacatgctcaccacagaccaaggacgttcaacctgtcaatccccaggatttccaagccaggggtttcatctcttacttgtggaaaatttgttcatttgattatgaaccaatcagcttttcattgtgtcaaaatcaaatctagatagtgaaactgatattttatctttattgttatcttaaatatatcttggcttaaagagacataagtggctcttccccactataccagataacaagttgcaaataaatcattcagtagtaaagttcaaagaaa

SEQ ID NO: 729172 - DNA, 485 bp, Homo sapiens
gtttccaggtcttggcaacctttgaaattccaattccatttgagagagctttgacgaggccatatgctgatttcaccaccagcaacttcagaacccagtactggaatgccatcagccagcaggcccctgccatcatctatgacttctatctgtggctcactggaaggaaacccaggtgagaagctgagtcaatggctttgagaatgtcactgcatatgggagattgaggccccaaagtctttagggcttccttcagccaaagattaaaggagacaactgaatctgacccatatatacagattgaacacacctactctgaaaatccaaaatctgaaattctccaaaatccaaaagttttgagtgctgacatgatgccacaagtggaaaattccgcacatcttacctcatgtgatgggtcacagtcaaaacacattcaaaactttgtttcatgcataaaattatttaaaatattgtataagattacc

SEQ ID NO: 729173 - DNA, 1533 bp, Homo sapiens; identical to SEQ ID NO: 51260

SEQ ID NO: 729174 - DNA, 1219 bp, Homo sapiens
agcaaaaatgtaaaattggatgcacagaaaagtgactcaaagtgcttaatgactagaagaaatctaggagcagcaagaagcctcagtgtatgggcgctgttcatcctctggtgctgaagcagccaagagacccaagtctgcctggctgcctcttaggatatgacagcagagccagtggcctctactagatcctgtacaacctcacaaaacacccagacatcgggagtgctgccagcctgtgatgcaagagtcctaatcctgaagacattgaatgacctgtcattctgctgtttttaccaaaaaggatcatgaggatcagagaggaaaagtcacttgcccaaagtcacacagctgaacagtggtggagttcaactttgaccatgggctgtctggccccaaggtgtatgcttgcttctctcccaagagactcctttcttatcaggctcaaatgaatgaaaggaggatgttaaagttcctagaagctttaattgaatgaaagttcctagtagatctgtacctactaaaaaccacacttctgaagctacgtggccaccagaagacacagctagtctgccatgtaaaaaaggaaaggtggcgtgtgccctgaaggcgcaggggtgagaggcagggaaatggagaccccaacagccagcatcagtggccctcatcacagccctccaggagatatcaaaggagacaacgccattattgacgagatcactcccaagcggattggagattgtcccaatacttagacctatagcaaggccttgggagaaatggtggtgcagcaggagagcaggaacctaaccattgccatcctaaggccctccattgtgcggagcaacgtcgcaccagcttttcctgggttgggttgataatctaaatggatgtagctgactcattattgcggtatgtatagggatgaggaagtaactgtaatgtagtggaggaatagtaagaaaattcttagtgctggcttagcttcattgatccaaaaacataaatgctactttactatcaattgaagcatattatttcaattattctggttataatatggaggcaggatgaaattgtttttattcttttagaattttttttatcaggaaaacagaggtaaagtgctatcaattactatttaagagttctattttgaaaagtgagaattaaggatttttcttttctttttaaaaaaaacttttttaaaaattaaaaa

SEQ ID NO: 729175 - DNA, 1529 bp, Homo sapiens
tggtgccagcactagcccccatgtcggtctcagagaaccttctccccacctctgagttattctctcagtgtatcgaagatatcagtcaactatcttctggattgcattgatgctattgagaaggcagcctgcagtctaaaagtcatggttttaaaggcggaacacaccaggagccccagcgcaaccctcccctccaatgtgccttcatgccggtccctgtcatccagcgaagacggccccagtggcccttccagcctcgcagatggaggcctagcccacaacttacaggatagtgtcaggcaccgcatcctctacctctcagagcagctgagagtggagaaggccagtcgggatggcaacactgtgagctacctcaagctggtatccaaagcagaccggcaccaggtgccgcacatccagcaggcctttgagaaggtgaaccagcgcgcctctgccaccatcgcccagatcgagcacaggctccaccagtgtcaccagcagctccaggagctggaggaaggctgcaggcccgagggcttactgctgatggcagaaagcgacccagccaactgcgagccacccagtgagaaggccctgctttcagagccccccgagccaggtggggaagacgggccggtcaacctgcctcatgccagcaggcccttcatcttggagagtcgcttccagagcttacagcaggggacgtgcttagagacagaggatgtggcccagcaacaaaacctgctgttgcagaaggtaaaggcagagctggaagaagccaagaggttccacatcagcctccaggagtcctatcacagcctaaaggagaggtctctgactgacctgcagctgttgctggagtcccttcaggaggagaagtgtaggcaagcattgatggaagaacaggtgaatggtcgcctgcagggacagctgaatgagatttacaacctcaaacacaatctggcctgcagcgaagagagaatggcctatctatcctatgagagagccaaggaaatatgggagatcacggagaccttcaagagccgaatatccaagctggagatgctacagcaagtcacccaactggaggcagcggagcacctccaaagccgtcccccgcagatgttgttcaagttcctgagtccgcgcctctcactggcaaccgtcctcttggtctttgtctccaccttgtgtgcctgcccctcgtcactgatcagctcacgcctgtgcacctgcaccatgctgatgctgatcgggcttggggtcctggcctggcagaggtggcgcgccatccctgccacagactggcaggaatgggtcccctccaggtgtagactgtactccaaggactctgggcctccagcagatggaccttaaggggccaggagggccacctgccttagcttgctagctccctccctcctcctgggtgctgagggcatccagcaagcccctccacagctcttgcttgccgattatgtaaccaccagcctggtgaaatggatatagacgcccacctgcctcacact

SEQ ID NO: 729176 - DNA, 1228 bp, Homo sapiens
aggcatctcgaacccttggcccccatggaccccctgaggcgctccccctctccctgcctgtcctcgcagccctccagccccagcaccccaccctgcgagatgcttggtcctgtgggcattgaggctgtgctggaccagctgaagatcaaggctatgaagatggggtttgagttcaacatcatggtggtggggcaaagcgggctgggcaagtccacgatggtgaacacgctgttcaagtccaaagtgtggaagtcaaacccaccgggcttgggggtgcccacaccccagacgctgcagctgcattcactgacccatgtcatagaggagaagggtgtgaagctgaagctgacggtgacggacacgcccggcttcggggaccagatcaacaatgacaactgctgggaccccatcctgggctacatcaacgagcaatacgagcagtacctgcaggaggagatcctcatcacccgccagcgccacatcccagacacccgggtgcactgctgcgtgtactttgtaccacccactgggcactgcctgcgggccctggacattgagttcctgcagcggcttgtgccggactgtgaatgtggtgcccgtgattgcagggccgacagcctgaccatggaggagcgagaggccttcaggcgcaggagcagaacctgaggacccactgcatcgacgtctacccccagatgtgctttgacgaggacatcaatgacaaaatcctcaacagcaagttacgggaccgaatcccttttgccgtggtaggggctgaccaagagcacctggtgaacgggaggtgtgtcctgggccggaagaccaagtggggcatcattgaagtggagaacatggcgcactgtgaatttcctctcctgagagacctgcttatccgctcccacctccaagacctgaaggacataacccacaacatccactatgagaactaccgcgtcatcagactcaatgaaagccacctgctgccccgcgggcccggctgggtgaacctggccccggcctccccaggacagctgaccaccccccggaccttcaaggtctgcaggggggcccatgacgattctgatgatgagttctgaccaccggcggatcccggggctgctgggcttcctgagtccccagcggctctcaacacacacctatgtaccagagcatctattaaatgtgagccttgctttttatgaaaagctgtgctttgaaaacaaaaaca

SEQ ID NO: 729177 - DNA, 1014 bp, Homo sapiens
aggcatctcgaacccttggcccccatggaccccctgaggcgctccccctctccctgcctgtcctcgcagccctccagccccagcaccccaccctgcgagatgcttggtcctgtgggcattgaggctgtgctggaccagctgaagatcaaggctatgaagatggggtttgagttcaacatcatggtggtggggcaaagcgggctgggcaagtccacgatggtgaacacgctgttcaagtccaaagtgtggaagtcaaacccaccgggcttgggggtgcccacaccccagacgctgcagctgcattcactgacccatgtcatagaggagaagggtgtgaagctgaagctgacggtgacggacacgcccggcttcggggaccagatcaacaatgacaactgctgggaccccatcctgggctacatcaacgagcaatacgagcaagcagaacctgaggacccactgcatcgacgtctacccccagatgtgctttgacgaggacatcaatgacaaaatcctcaacagcaagttacgggaccgaatcccttttgccgtggtaggggctgaccaagagcacctggtgaacgggaggtgtgtcctgggccggaagaccaagtggggcatcattgaagtggagaacatggcgcactgtgaatttcctctcctgagagacctgcttatccgctcccacctccaagacctgaaggacataacccacaacatccactatgagaactaccgcgtcatcagactcaatgaaagccacctgctgccccgcgggcccggctgggtgaacctggccccggcctccccaggacagctgaccaccccccggaccttcaaggtctgcaggggggcccatgacgattctgatgatgagttctgaccaccggcggatcccggggctgctgggcttcctgagtccccagcggctctcaacacacacctatgtaccagagcatctattaaatgtgagccttgctttttatgaaaagctgtgctttgaaaacaaaaaca

SEQ ID NO: 729178 - DNA, 540 bp, Homo sapiens
tttttctatctcttcagtgcctctttcaacaatgaagatcaaaccaggttttgtgcaaatatctgctgagtgaactacttatttgaaaatacatcattggttaatattcccttttgctcattgaaatctcaaagactacagaccccgcacaagacattctgacattcccgtctttgaaatgaatgacagcaatgataaatatggctcacctccagagatacagatctcacaacttcatatttttaatataaattattaatctgaggtgtggtgcaattccattagatgaaagagatctacatattcagaagcacatgattcttcccccttccatgattccagtggccaataggtaatcagaacttctctgttcagctaaaagacagaaaaagagcatatgaaagacgtattttcccagaagtgctcatcctgataactgtgtacagcactactgctcatattccattggccaatatttaggtagataacttcactaactacaaggtatgctgggaaataaagtccagatatgtgtgacat

SEQ ID NO: 729179 - DNA, 789 bp, Homo sapiens
tttttctatctcttcagtgcctctttcaacaatgaagatcaaaccaggttttgtgcaaatatctgctgagtgaactacttatttgaaaatacatcattggttaatattcccttttgctcattgaaatctcaaagactacagaccccgcacaagacattctgacattcccgtctttgaaatgaatgacagcaatgataaatatggctcacctccagagatacagatctcacaacttcatatttttaatataaattattaatctgaggtgtggtgcaattccattagatgaaagagatctacatattcagaagcacatgattcttcccccttccatgattccagtggccaatagaatggagtgtagtggcgtgatcttggctcacaacaacttctgcttcccacattcaagcgatcctcccaccttatactcctgagtagctggaaccacagacaaactacaataaagccatgccctgactggatgtgcctaacatttgtctggtgcttaaaggagttggctgcatgcatgggatggagaaggattcaacatttaatggcagttagaatcaaatttttaactcaagaaggcagaaggaatccacctaaataaatgttggaaagtcaccaaaaatagttctccaagtcagaagcggtgcaaaagctgcctcagctcttggtggattttcaatttctcccagccatctctgtttcgctaaaggtttctgaagacagtgggtatgtggcaaacttctgcaattctatattaagataaactgttagatcaataaa

SEQ ID NO: 729180 - DNA, 691 bp, Homo sapiens
tttttctatctcttcagtgcctctttcaacaatgaagatcaaaccaggttttgtgcaaatatctgctgagtgaactacttatttgaaaatacatcattggttaatattcccttttgctcattgaaatctcaaagactacagaccccgcacaagacattctgacattcccgtctttgaaatgaatgacagcaatgataaatatggctcacctccagagatacagatctcacaacttcatatttttaatataaattattaatctgaggtgtggtgcaattccattagatgaaagagatctacatattcagaagcacatgattcttcccccttccatgattccagtggccaatagacaaactacaataaagccatgccctgactggatgtgcctaacatttgtctggtgcttaaaggagttggctgcatgcatgggatggagaaggattcaacatttaatggcagttagaatcaaatttttaactcaagaaggcagaaggaatccacctaaataaatgttggaaagtcaccaaaaatagttctccaagtcagaagcggtgcaaaagctgcctcagctcttggtggattttcaatttctcccagccatctctgtttcgctaaaggtttctgaagacagtgggtatgtggcaaacttctgcaattctatattaagataaactgttagatcaataaa

SEQ ID NO: 729181 - DNA, 859 bp, Homo sapiens
tttttctatctcttcagtgcctctttcaacaatgaagatcaaaccaggttttgtgcaaatatctgctgagtgaactacttatttgaaaatacatcattggttaatattcccttttgctcattgaaatctcaaagactacagaccccgcacaagacattctgacattcccgtctttgaaatgaatgacagcaatgataaatatggctcacctccagagatacagatctcacaacttcatatttttaatataaattattaatctgaggtgtggtgcaattccattagatgaaagagatctacatattcagaagcacatgattcttcccccttccatgattccagtggccaataggaattctaattggaacagacaaaaacccaatacatgtttaagcagtaaagtattcatcaggtcacaaaaagaggagcaagaggagctgactctttatgtcatatcttggccttgtaatttgattctttgccaacatgcatggtttttctccataggctgtgcattgggacaaactacaataaagccatgccctgactggatgtgcctaacatttgtctggtgcttaaaggagttggctgcatgcatgggatggagaaggattcaacatttaatggcagttagaatcaaatttttaactcaagaaggcagaaggaatccacctaaataaatgttggaaagtcaccaaaaatagttctccaagtcagaagcggtgcaaaagctgcctcagctcttggtggattttcaatttctcccagccatctctgtttcgctaaaggtttctgaagacagtgggtatgtggcaaacttctgcaattctatattaagataaactgttagatcaataaa

SEQ ID NO: 729182 - DNA, 1816 bp, Homo sapiens
cgcctgtagcaccacttagggagttatgtgctggaaccacacagaaaagcttcttgtagacactcaaggaagagaggggggtggacctgccttacccgactgtcctgctggaggtaacttctcttcctccccagcggtgcccaagcacaccctgtgcgggtccctcccttctgctctttctactttggccctccccacattcaacaacaggctctctatcagttattgtcagggaacagcaagacacaagcgattttgtcaaattcatgatcaaaaggctatgttacctgtgacagtgaccagaaaaatgacaggatgggggagcagccaggggttggagcaggaggaatctgactgtcctttgctactttctatcttcccttactcaacagcagtcaaagccaaagatgcgaagtcactcttacctctgatgataataatggtgataattttcttggtgcttctgttctgggaaaatgaggtgaatgatgaagcagtgatgtcaactttagaacacttgcatgtggactaccctcagaatgacgttcccgttcctgcaagtagtacagaaaatggctatattatagccattgttggaggggagaatttgtattgtgaggtagtaagaaataaggggcaattggcaaataaaggccagattatgttgtcactaattctgagctatggcatttcaatcctgtatgtgagagctagagactcatacagtgacctagagcaggcatgggtgggtcacaggctttggagagcactctctgtcctgatcttttcagttgagagacttcagctgttcattgctcatttggacttagttcaaggtcatgtcaaagaagaaggtgcacttacgctagttgttagctctgtcttttgtaaccatcaagttccatgcgattgatcagatttaggagggggcgttgggggataatcaattttgggtgtcaccaggtaaacagagccctcagcatctgaatagaaactgaacaggaacagaagagattacactacatctgagatggagacctttcctctgctgctgctcagcctgggcctggttcttgcagaagcatcagaaagcacaatgaagataattaaagaagaatttacagacgaagagatgcaatatgacatggcaaaaagtggccaagaaaaacagaccattgagatattaatgaacccgatcctgttagttaaaaataccagcctcagcatgtccaaggatgatatgtcttccacattactgacattcagaagtttacattataatgaccccaagggaaacagttcgggtaatgacaaagagtgttgcaatgacatgacagtctggagaaaagtttcagaagcaaacggatcgtgcaagtggagcaataacttcatccgcagctccacagaagtgatgcgcagggtccacagggcccccagctgcaagtttgtacagaatcctggcataagctgctgtgagagcctagaactggaaaatacagtgtgccagttcactacaggcaaacaattccccaggtgccaataccatagtgttacctcattagagaagatattgacagtgctgacaggtcattctctgatgagctggttagtttgtggctctaagttgtaaatcccacagagctttaggactagggtcttactaaagaaggacctcttcttgttcattcttgtttaaacctttccttaatatctactctttagcactatagtgaactcctgattatttattctaactggaggagtgaaaaatccaaaattgtggataattcaattaaaagttatgactgatactggc

SEQ ID NO: 729183 - DNA, 1055 bp, Homo sapiens
tagtacagaaaatggctatattatagccattgttggaggggagaatttgtattgtgaggtagtaagaaataaggggcaattggcaaataaaggccagattatgttgtcactaattctgagctatggcatttcaatcctgtatgtgagagctagagactcatacagtgacctagagcaggcatggaattttgggtgtcaccaggtaaacagagccctcagcatctgaatagaaactgaacaggaacagaagagattacactacatctgagatggagacctttcctctgctgctgctcagcctgggcctggttcttgcagaagcatcagaaagcacaatgaagataattaaagaagaatttacagacgaagagatgcaatatgacatggcaaaaagtggccaagaaaaacagaccattgagatattaatgaacccgatcctgttagttaaaaataccagcctcagcatgtccaaggatgatatgtcttccacattactgacattcagaagtttacattataatgaccccaagggaaacagttcgggtaatgacaaagagtgttgcaatgacatgacagtctggagaaaagtttcagaagcaaacggatcgtgcaagtggagcaataacttcatccgcagctccacagaagtgatgcgcagggtccacagggcccccagctgcaagtttgtacagaatcctggcataagctgctgtgagagcctagaactggaaaatacagtgtgccagttcactacaggcaaacaattccccaggtgccaataccatagtgttacctcattagagaagatattgacagtgctgacaggtcattctctgatgagctggttagtttgtggctctaagttgtaaatcccacagagctttaggactagggtcttactaaagaaggacctcttcttgttcattcttgtttaaacctttccttaatatctactctttagcactatagtgaactcctgattatttattctaactggaggagtgaaaaatccaaaattgtggataattcaattaaaagttatgactgatactggc

SEQ ID NO: 729184 - DNA, 962 bp, Homo sapiens
gtgggtcacaggctttggagagcactctctgtcctgatcttttcagttgagagacttcagctgttcattgctcatttggacttagttcaagaattttgggtgtcaccaggtaaacagagccctcagcatctgaatagaaactgaacaggaacagaagagattacactacatctgagatggagacctttcctctgctgctgctcagcctgggcctggttcttgcagaagcatcagaaagcacaatgaagataattaaagaagaatttacagacgaagagatgcaatatgacatggcaaaaagtggccaagaaaaacagaccattgagatattaatgaacccgatcctgttagttaaaaataccagcctcagcatgtccaaggatgatatgtcttccacattactgacattcagaagtttacattataatgaccccaagggaaacagttcgggtaatgacaaagagtgttgcaatgacatgacagtctggagaaaagtttcagaagcaaacggatcgtgcaagtggagcaataacttcatccgcagctccacagaagtgatgcgcagggtccacagggcccccagctgcaagtttgtacagaatcctggcataagctgctgtgagagcctagaactggaaaatacagtgtgccagttcactacaggcaaacaattccccaggtgccaataccatagtgttacctcattagagaagatattgacagtgctgacaggtcattctctgatgagctggttagtttgtggctctaagttgtaaatcccacagagctttaggactagggtcttactaaagaaggacctcttcttgttcattcttgtttaaacctttccttaatatctactctttagcactatagtgaactcctgattatttattctaactggaggagtgaaaaatccaaaattgtggataattcaattaaaagttatgactgatactggc

SEQ ID NO: 729185 - DNA, 1149 bp, Homo sapiens
agccccgtgccaggcaaggcgggtcaccgggcagcgtcggggccctcttctgcctcggggtctcttcacggagggcgccctgcggcgacagctttcgccggccgcgcgcacggcggtcggtacctgttaaggacgagatgccttccgaccaccggataactcgggacggtccctgatttgcctgctccctgtccaacagcatcttcgggtcactcggaagtgaaaacatgcaatttcatgttataacatgcaatttcatgtcataaattattcccactgacgcctgaacatttttcctaaaagggatctgcagtcacaaggcgccgccttccggaatttagaagagattacactacatctgagatggagacctttcctctgctgctgctcagcctgggcctggttcttgcagaagcatcagaaagcacaatgaagataattaaagaagaatttacagacgaagagatgcaatatgacatggcaaaaagtggccaagaaaaacagaccattgagatattaatgaacccgatcctgttagttaaaaataccagcctcagcatgtccaaggatgatatgtcttccacattactgacattcagaagtttacattataatgaccccaagggaaacagttcgggtaatgacaaagagtgttgcaatgacatgacagtctggagaaaagtttcagaagcaaacggatcgtgcaagtggagcaataacttcatccgcagctccacagaagtgatgcgcagggtccacagggcccccagctgcaagtttgtacagaatcctggcataagctgctgtgagagcctagaactggaaaatacagtgtgccagttcactacaggcaaacaattccccaggtgccaataccatagtgttacctcattagagaagatattgacagtgctgacaggtcattctctgatgagctggttagtttgtggctctaagttgtaaatcccacagagctttaggactagggtcttactaaagaaggacctcttcttgttcattcttgtttaaacctttccttaatatctactctttagcactatagtgaactcctgattatttattctaactggaggagtgaaaaatccaaaattgtggataattcaattaaaagttatgactgatactggc

SEQ ID NO: 729186 - DNA, 1097 bp, Homo sapiens
gtgggtcacaggctttggagagcactctctgtcctgatcttttcagttgagagacttcagctgttcattgctcatttggacttagttcaaggtcatgtcaaagaagaaggtgcacttacgctagttgttagctctgtcttttgtaaccatcaagttccatgcgattgatcagatttaggagggggcgttgggggataatcgtaagtgaaggacagtttgcaaccttaattttgggtgtcaccaggtaaacagagccctcagcatctgaatagaaactgaacaggaacagaagagattacactacatctgagatggagacctttcctctgctgctgctcagcctgggcctggttcttgcagaagcatcagaaagcacaatgaagataattaaagaagaatttacagacgaagagatgcaatatgacatggcaaaaagtggccaagaaaaacagaccattgagatattaatgaacccgatcctgttagttaaaaataccagcctcagcatgtccaaggatgatatgtcttccacattactgacattcagaagtttacattataatgaccccaagggaaacagttcgggtaatgacaaagagtgttgcaatgacatgacagtctggagaaaagtttcagaagcaaacggatcgtgcaagtggagcaataacttcatccgcagctccacagaagtgatgcgcagggtccacagggcccccagctgcaagtttgtacagaatcctggcataagctgctgtgagagcctagaactggaaaatacagtgtgccagttcactacaggcaaacaattccccaggtgccaataccatagtgttacctcattagagaagatattgacagtgctgacaggtcattctctgatgagctggttagtttgtggctctaagttgtaaatcccacagagctttaggactagggtcttactaaagaaggacctcttcttgttcattcttgtttaaacctttccttaatatctactctttagcactatagtgaactcctgattatttattctaactggaggagtgaaaaatccaaaattgtggataattcaattaaaagttatgactgatactggc

SEQ ID NO: 729187 - DNA, 827 bp, Homo sapiens; identical to SEQ ID NO: 728345

SEQ ID NO: 729188 - DNA, 398 bp, Homo sapiens
tgcgcgtccgctcccgccgttgcgacggacgggtaggggaggcgaccccggcgttctgctccgcactgtggaggaggtggggaggtgttgggccagggctgaggtaggagggagtctgtccctcgacgcctcctgcgacgccagcccctgagcgatgatgcgaacgtgcgtcctactctccgcggtgctctggtgcctcacaggagtccaatgcccgcgttttaccttattcaataagaagggcttcatttatggcaagacaggacagccagacaaaatatatgtagagttacatcaaaatagtccagtccttatctgtatggattttaagctttctaaaaaagaaatagtggaccccacctacttatggattgggcctaatgaaaagacgttaacag

SEQ ID NO: 729189 - DNA, 535 bp, Homo sapiens; identical to SEQ ID NO: 728348

SEQ ID NO: 729190 - DNA, 439 bp, Homo sapiens; identical to SEQ ID NO: 186291

SEQ ID NO: 729191 - DNA, 438 bp, Homo sapiens; identical to SEQ ID NO: 728349

SEQ ID NO: 729192 - DNA, 691 bp, Homo sapiens
cgccgcccacactgcagccaccagcgctccagccaacgccgctgccggtggctcccccgctcaccccgggtctgggccacaaggagtcagccctggctcccaccgcagcccctgctctgcccccagccttagccgccgaccaggccccggccccatccccggctccagctcccaccgtggctgagccctcgccgcctgtgtccgcgcccgcacccgcgctgcgcccatcaagacccgcacgcgcaggaacaagggttcccgtgcagcccggggcgcgacccgtaaggatggcttgcatggagatggtcctcgcgaacgagctacagctaccgtgcctgacagcagtggtggagggggtggtggcagcggggcctctcagactggggcagctaacacccgtgcgcgccactggctgcccttccaggtgcttaactcctgtccctgcaagtgttactgccaccaccagccacgccatcgccgcctgccacgcaacgtctctgcctggctgagcacatccaccaaccacctgggcgagccaccctgggttgccaccatcaagctgtccggctctctggtggccaagctggagcactacgacttgcaggccacccattccaactgagtgtagtcggctcaacaccctccaccttcccctccatgccaataaaataaccaatccagaaaaaaaaaa

SEQ ID NO: 729193 - DNA, 581 bp, Homo sapiens
tggagacttggaagccgccaccaccattaccttctgaacggcagccggcggaccgcagaatcactcctgctctggccacacccgcctgtgtccgcgcccgcacccgcgctgcgcccatcaagacccgcacgcgcaggaacaagggttcccgtgcagcccggggcgcgacccgtaaggatggcttgcatggagatggtcctcgcgaacgagctacagctaccgtgcctgacagcagtggtggagggggtggtggcagcggggcctctcagactggggcagctaacacccgtgcgcgccactggctgcccttccaggtgcttaactcctgtccctgcaagtgttactgccaccaccagccacgccatcgccgcctgccacgcaacgtctctgcctggctgagcacatccaccaaccacctgggcgagccaccctgggttgccaccatcaagctgtccggctctctggtggccaagctggagcactacgacttgcaggccacccattccaactgagtgtagtcggctcaacaccctccaccttcccctccatgccaataaaataaccaatccagaaaaaaaaaa

SEQ ID NO: 729194 - DNA, 316 bp, Homo sapiens
cccgggcccagggcgccgcggtctgaactctgctcggctggaggactcggtgcttaactcctgtccctgcaagtgttactgccaccaccagccacgccatcgccgcctgccacgcaacgtctctgcctggctgagcacatccaccaaccacctgggcgagccaccctgggttgccaccatcaagctgtccggctctctggtggccaagctggagcactacgacttgcaggccacccattccaactgagtgtagtcggctcaacaccctccaccttcccctccatgccaataaaataaccaatccagaaaaaaaaaa

SEQ ID NO: 729195 - DNA, 398 bp, Homo sapiens; identical to SEQ ID NO: 59272

SEQ ID NO: 729196 - DNA, 872 bp, Homo sapiens
gatttctcaacctggaatcatttccctacacctttcctcaaaggactgttaatgagttttcagagcaggtacttcactgaaatgtaactaccacaatgcatcctttccatgtgactaacttcgctcatggaccagaatcactgtggctctgccctggagtggtgcaaagagctcgcattctgtttggaaagcaaattatttaaatccagtagaggactctcaaatgtggttggaaaatctaagaagacttcccagaggcagcagcactagtgttagggaaagagctcacaaattccattgctgtagaacccatgtgttgaagaccgctacactggaatctagttttctatcctaaaatctacctcctgagtttgagtaagacttgaactagtttgcaaatatctgtgatcttcaccttgcctgcctgcaaagcccataagcaagttcagaagagacttctacttgtccaaagcaacatggagtaaagtgggtcaactagaattaaaatatgctccagccaaaggtgaccatggaaacctattgataaggctctggggtcagattcatctctgttcagacaactctagcggtgtgactctgagcaagtgttttttaacctaagttcctgcttcctcaactgcaaatgtaggaatggtaacatcttcctcaaagttgtatgctggggataacacatgaaggagatgcctgggccatataattatttaagaaatgttcatttctttcttgaactaccttctaccaactatttggtctgagtttatgaaactgtaaattttgtctaacatttgcctaacaaagcattattaccttgcttaaagaaacacacaatacattctaaaccaaaaataaaa

SEQ ID NO: 729197 - DNA, 739 bp, Homo sapiens
tccccaccaaaaacggcaaaatgtcatttttgggggcaaatctaaggttttccctacaattgttcaagctttcacactaaaacatttacctaaaaacgggcagaaattcagccttaaacccacaaatctcacgatggtatagaccctgggcccactcaggtttcctgaaaactaaacagttctggagttaggggtttggagaacgggctattgttaaagaaaaaagtatttagtgacacttgttaaagcacaaaaagagggctttattcaggaccatcgcaacaggtatagggaccactgactgcaatggagacttgcagtagggaaagagatattgggctcaactcctcatacagcatgggcaagtggagatttatagccaaggagcggtgacaggccaagataatgaggcatcacctgggggatggtggagactgaagaacctgatcagatattgaggatgatcagctatcaaggatgggggtttattgctaatctgacttagcaaagttctttgcttaaactggattttacaaagaaagtgtacagaagagcctagcagaagattcagaaacctgactaaagttggccaagcaaaaaaaaaaatctttgtatctgaagggatatgttatcctctggacaaattgagggggactgtgcgttaacaatcttagcagtcctcttcagttgtaccaccatctccactttaataaaaaaaaattttctttcaaatctggcc

SEQ ID NO: 729198 - DNA, 1564 bp, Homo sapiens
  misc_feature (1028)..(1028): n is a, c, g, or t
agcggggtgacgccatctggagcgcgcttggaatccagcaggcggttgctgccgcgtcttccacaacctccgcggtctggagctggcctcccccaccgccgccccaaccaccggccccgccgccatcaccaccaccgtcacctccgccgctgcctccttggggccctcctccttcaccgcccccttagccacctctacacattctaggctttctgtcctggagaagaagctataatcggtttccttgtgggcccggtgcgcagccatggcggacggtggcggcggcggcagcggcggtgcgggcccggcctcgacccgggccagcgggggcggcggccccatcaacccggcctcgttgccccctggcgaccctcagctcatcgctatcatcgtggggcagctcaagagcaggggcctttttgacagcttccgccgggactgcaaggctgacgtggacaccaagccagcttaccaaaacctgagccagaaagcggataattttgtgtcgacacatctggacaagcaggaatggaatcctccagcaaacgacaaccaactgcacgatggtctgaggcagagtgtggttcagtcagggaggtcagaagctggagtggacaggattagttctcaggtggtggatccaaaactaaaccacatcttcaggccacaaatagaacaaataattcatgaattcctggtggcccagaaagaagcagctgtgccagcactccctccagagccagaaggccaggaccctccagctccgtctcaggacacttcctaagaatatgcctgacagcttttgaaagcgctatttaatttttggtgaagaaatggattcggttacataagagtgcagtttcagattgaagataagccaagtcatcactgagctcaagatttccacctcgaccatgagcagtgaccagattgaaagggaagcaagttcgccagagagaaagttgaccgtggtacccccctgcattgcgctgccatttggccagcctttccaagggcatgacaccaancacacactacagagagggaaacactaccgcgacccaggattgtcctgaaacagacatctatacttgaacatggagactgcacatggattttagggtttgtgctctgagataaacgaaagctacagcgagagaacataaccaatcccaaagacaatttcaaagaacaatgacagtaaaggttaactgggaggaatatttgacagtacttatttgatattgtctctcagagttgcaaactagattgtacacaacattagtgtcagatagctttgaagttgtgaccttcttgtacatgaatcttctagccagtttcctttcctttgtaagagataacaaagcatgaaaccctagaatgagtgagaagttcagacattaggtataaggaaactcatttgcagactctctgtccaagaatgcttcctgtcttgcaggggctagtgagtcttgggtgtgtttatgttatgctcacatttgtgttttatttgaaaagtggatggtcaataaatggcttatctttcaactgcaacaacaaaaaa

SEQ ID NO: 729199 - DNA, 786 bp, Homo sapiens
ctcgttagaatcagacatggcttcaggggatgcaggacgctcccctgagctgcctgtcaccgactaagtggagcagtgtttcttccgcagactcaactgagaagtcagcctctggggcaggcaccaggaatctgccttttcagttctgtctccggcaggctttgaggatgaaggctgcgggcattctgaccctcattggctgcctggtcacaggcgccgagtccaaaatctacactcgttgcaaactggcaaaaatattctcgagggctggcctggacaattactggggcttcagccttggaaactggatctgcatggcatattatgagagcggctacaacaccacagcccagacggtcctggatgacggcagcatcgactatggcatcttccagatcaacagcttcgcgtggtgcagacgcggaaagctgaaggagaacaaccactgccatgtcgcctgctcagccttgatcactgatgacctcacagatgcaattatctgtgccaggaaaattgttaaagagacacaaggaatgaactattggcaaggctggaagaaacattgtgagggcagagacctgtccgagtggaaaaaaggctgtgaggtttcctaaactggaactggacccaggatgctttgcagcaacgccctaggatttgcagtgaatgtccaaatgcctgtgtcatcttgtcccgtttcctcccaatattccttctcaaacttggagagggaaaattaagctatacttttaagaaaataaatatttccatttaaatgtcaaaaaa

SEQ ID NO: 729200 - DNA, 415 bp, Homo sapiens
ctcgttagaatcagacatggcttcaggggatgcaggacgctcccctgagctgcctgtcaccgactaagtggagcagtgtttcttccgcagactcaactgagaagtcagcctctggggcaggcaccaggaatctgccttttcagttctgtctccggcaggctttgaggatgaaggctgcgggcattctgaccctcattggctgcctggtcacaggcgccgagtccaaaatctacactcgttgcaaatggaactggacccaggatgctttgcagcaacgccctaggatttgcagtgaatgtccaaatgcctgtgtcatcttgtcccgtttcctcccaatattccttctcaaacttggagagggaaaattaagctatacttttaagaaaataaatatttccatttaaatgtcaaaaaa

SEQ ID NO: 729201 - DNA, 734 bp, Homo sapiens
ctcgttagaatcagacatggcttcaggggatgcaggacgctcccctgagctgcctgtcaccgactaagtggagcagtgtttcttccgcagactcaactgagaagtcagcctctggggcaggcaccaggaatctgccttttcagttctgtctccggcaggctttgaggatgaaggctgcgggcattctgaccctcattggctgcctggtcacaggcgccgagtccaaaatctacactcgttgcaaactggcaaaaatattctcgagggctggcctggacaattactggggcttcagccttggaaactggatctgcatggcatattatgagagcggctacaacaccacagcccagacggtcctggatgacggcagcatcgactatggcatcttccagatcaacagcttcgcgtggtgcagacgcggaaagctgaaggagaacaaccactgccatgtcgcctgctcagccttgatcactgatgacctcacagatgcaattatctgtgccaggaaaattgttaaagagacctgtccgagtggaaaaaaggctgtgaggtttcctaaactggaactggacccaggatgctttgcagcaacgccctaggatttgcagtgaatgtccaaatgcctgtgtcatcttgtcccgtttcctcccaatattccttctcaaacttggagagggaaaattaagctatacttttaagaaaataaatatttccatttaaatgtcaaaaaa

SEQ ID NO: 729202 - DNA, 863 bp, Homo sapiens
ctcgttagaatcagacatggcttcaggggatgcaggacgctcccctgagctgcctgtcaccgactaagtggagcagtgtttcttccgcagactcaactgagaagtcagcctctggggcaggcaccaggaatctgccttttcagttctgtctccggcaggctttgaggatgaaggctgcgggcattctgaccctcattggctgcctggtcacaggcgccgagtccaaaatctacactcgttgcaaactggcaaaaatattctcgagggctggcctggacaattactggggcttcagccttggaaactggatctgcatggcatattatgagagcggctacaacaccacagcccagacggtcctggatgacggcagcatcgactatggcatcttccagatcaacagcttcgcgtggtgcagacgcggaaagctgaaggagaacaaccactgccatgtcgcctgctcagccttgatcactgatgacctcacagatgcaattatctgtgccaggaaaattgttaaagagacacaaggaatgaactattgaagtcctcagcacatgttcttcatggaggtcatctttccctggactgcttggctactttagaagtcaaatcaagactagaagtatgaaagccaatcacaatttcccaacaattaggatccatcattcaccatttggttggtccctgctgctaagaattccaaactacaagggaaaaagttaaactcagctagatttccctgcctgctcaagaccacaaccccagtggcaacataattcttggtgaggatgaaaaaacgaaatctatacttgccttgagaaagcattcatgcaaaataaagcccagattcataagtaatc

SEQ ID NO: 729203 - DNA, 515 bp, Homo sapiens
ctttcccaggcttcgttatctcgttctgaggaatacctgtcccagatcagtgcagaactcatggaggaggctttgtgcactgcttgctgccacttgaaccctgtgcccatcaaaaaaaagcagtcacaagaccaagcgactcagatatccaaacgcgcattcttcaccaagacctgaggcacagacacctggtgagtgaggcttcaagggagatgctctttgtcctgggagagagccctctcccctctcttccaccatctcctgctcggacagaaaccgtacctgcagcaaggcatacctcctgccaactcctggtgaaaagaacatgcctcaaaactactcttttgccactcgttaaccacttccgtttgtggggacctcctggtcatgagcagcatcatcccgaagccttcaaagtgttctggattcatcacaggaccctccagcctcagccagcaaggataccaccaggaatgaaagtgctttaataaagagacagggtgtgcaaaaaaaaa

SEQ ID NO: 729204 - DNA, 477 bp, Homo sapiens
ctttcccaggcttcgttatctcgttctgaggaatacctgtcccagatcagtgcagaactcatggaggaggctttgtgcactgcttgctgccacttgaaccctgtgcccatcaaaaaaaagcagtcacaagaccaagcgactcagatatccaaacgcgcattcttcaccaagacctgaggcacagacacctggtgagtgaggcttcaagggagatgctctttgtcctgggagagagaaaccgtacctgcagcaaggcatacctcctgccaactcctggtgaaaagaacatgcctcaaaactactcttttgccactcgttaaccacttccgtttgtggggacctcctggtcatgagcagcatcatcccgaagccttcaaagtgttctggattcatcacaggaccctccagcctcagccagcaaggataccaccaggaatgaaagtgctttaataaagagacagggtgtgcaaaaaaaaa

SEQ ID NO: 729205 - DNA, 647 bp, Homo sapiens
ttagaaggcttcatttgctctgagttatcattgagaactaaatggagaagaaaagaactgaaggcctgaagatatgtcatctgtagaaaagccccatccttctgcaggtggcctcttctcaagctttcttggcaaatcaagagcttctgccttttggaggacatcctcttgacctcccacccatatcagctcttagaggacattccacaggaacattgccttcttgtcctccagtattttttatggaaacagaaattaggttatcttccttatgctctagatggacatctgaaatcatcaaacccttgagagaaacagccctcattcttttatgagacaacctggaagaaaacaggactctgaagatttgtctccatattctctggaaagatgtactctgtttgcaataagagggagccacatggtttattagatggttattaattgagcattctgtgcaaagaagtttgtgccttagatttagaattccaccctcagttggaatacagatgatccctaacaagtcacatgaaaaaatgaattgtggagccagaagagtgagttcttggagaactaagggccagagacctgtgagcaagatttgataattttataaaaattaaaagacgatttgaaatgttaaaagt

SEQ ID NO: 729206 - DNA, 662 bp, Homo sapiens; identical to SEQ ID NO: 409205

SEQ ID NO: 729207 - DNA, 185 bp, Homo sapiens
aaaaggtgagctgaacttttctctgtctgaacatactttgggtttacaatgagacatttacgtatttgtataaatcggttatactctgagctaatgtgaacacaaacttggtataaatacagatgactccctctctgctgctgtgggaggttcaactgacacctggggctcagaccagtcttgtt

SEQ ID NO: 729208 - DNA, 830 bp, Homo sapiens; identical to SEQ ID NO: 728357

SEQ ID NO: 729209 - DNA, 776 bp, Homo sapiens; identical to SEQ ID NO: 383933

SEQ ID NO: 729210 - DNA, 1034 bp, Homo sapiens
agcggaatgtgagcaagccctggtggcagcgccaggtccagtgcagcccctccccacagcatgctgggggctaattctgatgtcatctttctgcagaaaaccattagaccatccctccagactgccaccctcaaagccgtctgcccaggccccatctgacactcttgacatctgcaggtcccagaccctatgatgtgtccactctggaggctcctcatcttcctcgggttgctggccttgcccttggcaccacacaagcagccttggcctggcctggcccaagcccacagagacaacaaatccaccctggcaagaattattgctcagggcctcataaagcacaacgcagaaagccgaattcagaacatccactttggggacagactgaatgcctcagcacaagtggccccaggctggtgggctggctaatcagcggcaggaaacaccagcagcagcaagagagcaggtccttcgataacaacatcgtaaagatgtgtgcacatatgagcatcgttgtggagttctggctggagaaagacgagtttggccggagggatctggtgataggcaaatgcgatgcagagcccagcagtgtccatgtggccatcctcactgaggctatcccaccaaagatgaatcagtttctctacaacctcaaagagaatctgcaaaaagttctcccacacatggtagaaagtcaggtatgtcctctgatcggtgaaatcctcgggcagctggatgtgaaactgttgaaaagcctcatagaacaggaggctgctcatgaaccaacccaccatgaaaccagccaaccctctgcatgccaggctggagagtcccccagctgacttctgctgatcagaaggaaagtccacatcttgcaaccttaagtctcccttagagtggggcttctgctaccctaaaaactttaccccaggctctgtggacataccatcctctcctacaataaactctagctctgaagggtgcacaggtccctcccacctgggccctggggtttaggtctagaagtcaga

SEQ ID NO: 729211 - DNA, 738 bp, Homo sapiens
agtggatgtctgttcatttattcatcagatattcattgagtacctagattgtaccagacattcatgggaggacggtgtaagggaaagactctggaatctggtgctctattgccatgtttctaatataaccagcacttattagctgtgtgaccttgggcaaggtctgagctacccctttgatgatcactgacaatgatacttctggcatggggctgagtgaggactaaaagactgtggaaagtatactcaacacatacctcctggctttaatattgcctggattgctctgttctgttctgtgcctctacctttctttctagggctatcccaccaaagatgaatcagtttctctacaacctcaaagagaatctgcaaaaagttctcccacacatggtagaaagtcaggtatgtcctctgatcggtgaaatcctcgggcagctggatgtgaaactgttgaaaagcctcatagaacaggaggctgctcatgaaccaacccaccatgaaaccagccaaccctctgcatgccaggctggagagtcccccagctgacttctgctgatcagaaggaaagtccacatcttgcaaccttaagtctcccttagagtggggcttctgctaccctaaaaactttaccccaggctctgtggacataccatcctctcctacaataaactctagctctgaagggtgcacaggtccctcccacctgggccctggggtttaggtctagaagtcaga

SEQ ID NO: 729212 - DNA, 1180 bp, Homo sapiens
agcggaatgtgagcaagccctggtggcagcgccaggtccagtgcagcccctccccacagcatgctgggggctaattctgatgtcatctttctgcagaaaaccattagaccatccctccagactgccaccctcaaagccgtctgcccaggccccatctgacactcttgacatctgcaggtcccagaccctatgatgtgtccactctggaggctcctcatcttcctcgggttgctggccttgcccttggcaccacacaagcagccttggcctggcctggcccaagcccacagagacaacaaatccaccctggcaagaattattgctcagggcctcataaagcacaacgcagaaagccgaattcagaacatccactttggggacagactgaatgcctcagcacaagtggccccaggctggtgggctggctaatcagcggcaggaaacaccagcagcagcaagagagcagcatcaacatcaccaacattcagctggactgtggtgggatccagatatcattccataaggagtggttctcggcaaatatctcacttgaatttgaccttgaattgagaccgtccttcgataacaacatcgtaaagatgtgtgcacatatgagcatcgttgtggagttctggctggagaaagacgagtttggccggagggatctggtgataggcaaatgcgatgcagagcccagcagtgtccatgtggccatcctcactgaggctatcccaccaaagatgaatcagtttctctacaacctcaaagagaatctgcaaaaagttctcccacacatggtagaaagtcagcccctggcctgatccttctctctgtgctgatggtccaggtatgtcctctgatcggtgaaatcctcgggcagctggatgtgaaactgttgaaaagcctcatagaacaggaggctgctcatgaaccaacccaccatgaaaccagccaaccctctgcatgccaggctggagagtcccccagctgacttctgctgatcagaaggaaagtccacatcttgcaaccttaagtctcccttagagtggggcttctgctaccctaaaaactttaccccaggctctgtggacataccatcctctcctacaataaactctagctctgaagggtgcacaggtccctcccacctgggccctggggtttaggtctagaagtcaga

SEQ ID NO: 729213 - DNA, 1142 bp, Homo sapiens
agcggaatgtgagcaagccctggtggcagcgccaggtccagtgcagcccctccccacagcatgctgggggctaattctgatgtcatctttctgcagaaaaccattagaccatccctccagactgccaccctcaaagccgtctgcccaggccccatctgacactcttgacatctgcaggtcccagaccctatgatgtgtccactctggaggctcctcatcttcctcgggttgctggccttgcccttggcaccacacaagcagccttggcctggcctggcccaagcccacagagacaacaaatccaccctggcaagaattattgctcagggcctcataaagcacaacgcagaaagccgaattcagaacatccactttggggacagactgaatgcctcagcacaagtggccccaggctggtgggctggctaatcagcggcaggaaacaccagcagcagcaagagagcagcatcaacatcaccaacattcagctggactgtggtgggatccagatatcattccataaggagtggttctcggcaaatatctcacttgaatttgaccttgaattgagaccgtccttcgataacaacatcgtaaagatgtgtgcacatatgagcatcgttgtggagttctggctggagaaagacgagtttggccggagggatctggtgataggcaaatgcgatgcagagcccagcagtgtccatgtggccatcctcactgaggctatcccaccaaagatgaatcagtttctctacaacctcaaagagaatctgcaaaaagttctcccacacatggtagaaagtcaggtatgtcctctgatcggtgaaatcctcgggcagctggatgtgaaactgttgaaaagcctcatagaacaggaggctgctcatgaaccaacccaccatgaaaccagccaaccctctgcatgccaggctggagagtcccccagctgacttctgctgatcagaaggaaagtccacatcttgcaaccttaagtctcccttagagtggggcttctgctaccctaaaaactttaccccaggctctgtggacataccatcctctcctacaataaactctagctctgaagggtgcacaggtccctcccacctgggccctggggtttaggtctagaagtcaga

SEQ ID NO: 729214 - DNA, 596 bp, Homo sapiens
aattgtgggagctaagaacataaattaccccacgacccagtttccagcatagcagtcaagtggtcagggaggcagaggtctgcagggaaggagaactcccagagactcttataatgaaaccccttcaccggcttcaactcatagcctatcttatagaacttcatctgcctcctctggacaggggattttttctttcagaccatccccaaatgggcattcaggccacacaagagtcctcacccccaacaattttgctcagagggagagcacaactacactagagagtcttcctagtttccagctaccagtcctgcagactctctaccaacaacggaggcatatgggattacccagtgggagagaagcatggaccacttctagatagatcatcttcaagatctgatctatacatgctgctgaaggatggactgtagcttccagtacgcattaggggtgatggccctggaaaatttactattaaatgttaattttcctttctattgaaaacaactgttggagacactgattttcagcttagtatatagatagtaaaataaagacgatgcccttttattgctacaattctatcactttta

SEQ ID NO: 729215 - DNA, 353 bp, Homo sapiens
ttaccccacgacccagtttccagcatagcagtcaagtggtcagtcggtcctcctcagcggaatctattccttatagagaggctggctttggtagcttgggacaaggaggcagaggtctgcagggaaggagaactcccagagactcttataatgaaaccccttcaccggcttcaactcatagcctatcttatagaacttcatctgcctcctctggacaggggattttttctttcagaccatccccaaatgggcattcaggccacacaagagtcctcacccccaacaattttgctcagagggagagcacaactacactagagagtcttcctagtttccagctaccagtcctgcag

SEQ ID NO: 729216 - DNA, 971 bp, Homo sapiens
accagtgggcattacttccccatcacagtcagtcggtcctcctcagcggaatctattccttatagagaggctggctttggtagcttgggacaaggaggcagaggtctgcagggaaggagaactcccagagactcttataatgaacttcatctgcctcctctggacaggggattttttctttcagaccatccccaaatgggcattcaggccacacaagagtcctcacccccaacaattttgctcagagggagagcacaactacactagagagtcttcctagtttccagctaccagtcctgcagactctctaccaacaacggaggcatatgggattacccagtgggagagaagcatggaccacttctagatagatcatcttcaagatctgatctatacatgctgctgaaggatggactgtagcttccagtacgcattaggggtgatggccctggaaaatgtatccctgcattgtttcctagtttcactctgtaccttatgctccccccatctttaccctattcacccttatcacctcccaggacagtggtcaggtcttacaaaaggctagtgcttcaggaagatgtttatatctcttccagaagacattggtagctcccctcatttcctacaatttggaacaaaggtcaaaaaaataattcttggcatcatgcttggttgggagttgggaatggggattgtgatggatcatatactcatcactgtttcatttctggatttcatttttagctttggatatactgtcccattgccaatgttaacgagcaatatctctgttcttttccttattatacttttttatttgtctattatttcctctatgcttagttactattaaatgttaattttcctttctattgaaaacaactgttggagacactgattttcagcttagtatatagatagtaaaataaagacgatgcccttttattgctacaattctatcactttta

SEQ ID NO: 729217 - DNA, 226 bp, Homo sapiens
gtgtggagtttccagaagaaacaaacagatctcctcatcgccttttataagcatagaattacaaagttagaaacagccatgcaggaggcacagcaagcactggtgagccaggacaatcggtcctcctcagcggaatctattccttatagagaggctggctttggtagcttgggacaaggaggcagaggtctgcagggaaggagaactcccagagactcttataatg

SEQ ID NO: 729218 - DNA, 805 bp, Homo sapiens; identical to SEQ ID NO: 728358

SEQ ID NO: 729219 - DNA, 283 bp, Homo sapiens
ctgcacgttctgtctgatgcgctgctcattgtagctcttggccaggaccacaacccttgccaaggcacaaaggactgggtcctccaagagcaccggggagttcgggtccacccatggttcttctcgatgggatcccagagcactataggcaaccagaacaatgtcttttgacttgcagaaatccagcagttttctctggttgaagtaaggatgacattccacctggttgcagacaggcttgtacttgagccctggcttgttgaggatcatctccagcagcctg

SEQ ID NO: 729220 - DNA, 361 bp, Homo sapiens
ctgcacgttctgtctgatgcgctgctcattgtagctcttggccaggaccacaaccccacgctgcagctggtagcgcagggcaatcagggctggggttcgcttgtgcttttttgccaaggcacaaaggactgggtcctccaagagcaccggggagttcgggtccaccctggaaggaaaggcagaaaggctgaggccctgaggctggcgatagtttgttaggcggctccctaaacagactaaggcgtccactctgcaccggagcttctcaagcgaggcccccgaacagcagcctcaacatcacctgggatctcgtcagaaatgcaaattcttccctcaccccaagtcagctgtgagtgaactc

SEQ ID NO: 729221 - DNA, 588 bp, Homo sapiens
aattttttttatcaaaccagtgttttaggtaaacttcctgtatctcttattaccatggttcttctcgatgggatcccagagcactataggcaaccagaacaatgtcttttgacttgcagaaatccagcagttttctctggttgaagtaaggatgacattccacctgcagacgagcaagatggaaaagcatcagataatccaaaagttacactaatattaaaatcaccaaagtaaaagaagctgaataatgtagagcattaaatttgaactgagaatattattgtcaaaaatgatctttttcataaaaataaattttatgcccctctctcctaagaaaatagaaatgctatttctgagcacaagcaactccatgaaccctatcctggtttctcaataactccgaccactagaaggagacacggccaatttcagagctgggatgaggaaccttcaactgggaaaaacaagttaactgatatcaaatacaacaatataaaaacaattgaattctggttaaaaaaagaagagctacaaaagatattttgattaagcaatgaaaaattaaaatatggaccggataccaaatga

SEQ ID NO: 729222 - DNA, 321 bp, Homo sapiens
ctgcagacgagcaagatggaaaagcatcagataatccaaaagttacactaatattaaaatcaccaaaaaaatagaaatgctatttctgagcacaagcaactccatgaaccctatcctggtttctcaataactccgaccactagaaggagacacggccaatttcagagctgggatgaggaaccttcaactgggaaaaacaagttaactgatatcaaatacaacaatataaaaacaattgaattctggttaaaaaaagaagagctacaaaagatattttgattaagcaatgaaaaattaaaatatggaccggataccaaatga

SEQ ID NO: 729223 - DNA, 381 bp, Homo sapiens
gcccacagccccgctcctcacctgcacgttctgtctgatgcgctgctcattgtagctcttggccaggaccacaaccccacgctgcagctggtagcgcagggcaatcagggctggggttcgcttgtgcttttttgccaaggcacaaaggactgggtcctccaagagcaccggggagttcgggtccaccctggaaggaaaggcagaaaggctgaggccctgaggctggcgatagtttgttaggcggctccctaaacagactaaggcgtccactctgcaccggagcttctcaagcgaggcccccgaacagcagcctcaacatcacctgggatctcgtcagaaatgcaaattcttccctcaccccaagtcagctgtgagtgaact

SEQ ID NO: 729224 - DNA, 470 bp, Homo sapiens
  misc_feature (120)..(120): n is a, c, g, or t
gccggggcggcgcgtgagacccacctgctccagagcctccgcccgcagctgtcggtgcctctggcctgcgcccaccccgcccgctcctcggggcgctttggaggaggcggcatcggcgcntcgcccaggggaatgaggctccaaaatgaatcacaactggcgggtctgacttcgggcctttgcagatgctgttcccctgcctggagcgcacttatcacaagatgcctcagcagcccccacacacctgggatgagtatcaggtgctttgttgatcccatgctgtgtgctcagggagacaaagcatgcacgcatggggctgtatccacctgcagcagctggtgaatgactgcagaaggcagccccagcccacatactgctacttcagtgtgactgccactcctctcactgagagtccgggggcgtattccttccccttgactgctctaacaaataaagaatggcagaagtga

SEQ ID NO: 729225 - DNA, 455 bp, Homo sapiens; identical to SEQ ID NO: 240547

SEQ ID NO: 729226 - DNA, 180 bp, Homo sapiens
cctgcctcagtgccacccacatgggagctgtggttaccagtctgcaggcagctccgggagaggctgacagagtgggcccccatgtggaagaaagaagctccaaaatgaatcacaactggcgggtctgacttcgggcctttgcagatgctgttcccctgcctggagcgcacttatcacaag

SEQ ID NO: 729227 - DNA, 977 bp, Homo sapiens; identical to SEQ ID NO: 52885

SEQ ID NO: 729228 - DNA, 806 bp, Homo sapiens; identical to SEQ ID NO: 52890

SEQ ID NO: 729229 - DNA, 481 bp, Homo sapiens
ataacattcaggatgtcatcttgaaagcagagaccaaggtcttcaccagagacagtctgccaatggcttgattttgcacttcccagcctatataacttatcatgccttttcttgcagatgaggtttatataactttccaagacaaggaagttgtgcaaagcctcacagctactaagaggctgggctgggactcaggattaacttcgtgactccaaagcccatgcacctctgcaagccacacgaatcaagcagcttctctaaacctttgaagtcctggaaagtaactcttctgcaatagaagcaagaatcctgtgagattgggatccatctagtactcttcaccatttggaacaactgcctccagagaatgcttctgacgcatcttggaagaacttggaataacctgaggaaatggtcgatttgctaatttaggaaaccaatgttcgatacgtgtgtgatcccaataaagctattaacaaaa

SEQ ID NO: 729230 - DNA, 461 bp, Homo sapiens
ataacattcaggatgtcatcttgaaagcagagaccaaggtcttcaccagagacagtctgccaatggcttgattttgcacttcccagcctatataactatgaggtttatataactttccaagacaaggaagttgtgcaaagcctcacagctactaagaggctgggctgggactcaggattaacttcgtgactccaaagcccatgcacctctgcaagccacacgaatcaagcagcttctctaaacctttgaagtcctggaaagtaactcttctgcaatagaagcaagaatcctgtgagattgggatccatctagtactcttcaccatttggaacaactgcctccagagaatgcttctgacgcatcttggaagaacttggaataacctgaggaaatggtcgatttgctaatttaggaaaccaatgttcgatacgtgtgtgatcccaataaagctattaacaaaa

SEQ ID NO: 729231 - DNA, 938 bp, Homo sapiens
gtggtaatgtggcagctgggaccatggccagcttcagtctgcctggcgtcacataagccagcccacagggtcctgcagcttgtcctttctggctggaagctctgggcatagcctgggactgggtctttccagagagggctgcagccagggccctgccagcctcgggggccacagcggctctcacaccagcatcttgctggataggagcagttccaggactctctgatcacacctgatcatcgtcactgccagaattcaaggtagctgcctgccatggctgagaggtgtgcctcagcttaacccactcagtgatggactccagtgcctgcaagaagtctcaccagagtaagaagtggaggatccaggcccaggagaattttgccaagaagtttccgtacaggttgtcgtggctgacagagcccgaccctgagcccctgcagccctgggaggtcacaaacgactcgaacacggtgcagctgcccctgcagaagaggttggtgccaacgaggtccatcccagtccgagggctcggggctccagattttacatcaccgtctggctcctgcccggcaccactaccagcaccatcaccacctccactgtgcaacctttgggaactcaagttgctgagtcgccgcttccccagacaactcgccttcctgctgtccacccggcacactgaggctgcctgcccccagaccagcaaggcggcagggctgtccaggggcctctcctagagactgggctctgtgtgtggccttcttattggccaccttctccttggcaggctctgggcagtagccacagagactttagtaaagggatcagccttcatggccatcatagaccgggagtggtttgtggtccccccaaaaagctacaccaagctaataaactgcgagttcccaccccacttccagctggaatgaaaaaattgc

SEQ ID NO: 729232 - DNA, 217 bp, Homo sapiens
gttgtcgtggctgacagagcccgaccctgagcccctgcagccctgggaggtcacaaacgactcgaacacggtgcagctgcccctgcagaagaggttggtgccaacgaggtccatcccagtccgaggggttggtgtgaggattaaaaagagcatgaatgtcacttctaggactttatcccaaatgtacactcacacaggtaagtaaatgctgttcact

SEQ ID NO: 729233 - DNA, 1791 bp, Homo sapiens
cctcttggccgtcgggacttgtactgttggtgactccgtctccttagacggtggagcctgcgtgacccagaaaggcctttttgtagggaggtcgaaatagaaacacttcagcccctcttcggcgagggaggttagttggtaaggtgcccattgttcacccatggaaacaggcctgccaagggccgccccgcagacagcacttgcctcggtgacctggcaggacgtgcggttcttgagatgagtggagaaacggactcccaggtccctctcgttcttccaacacagggacagctagagctgctccaaaaatataccctacttcttccacaaccttttgaagaggggaagggaaagaaggcggaatgcttacctgggagaggactggcggccacagagcagggctcaggaaagggcatgagctggggccctggtgaggaatgtgtgagaatgtatgtaggtggtctggatgtagttgtatataattttgcaatctatgggctaaatgacagatgtaacagccctcaaaacaatacagtcgtatcttttgcaaaggtcctaaggctaaggaatactcaaatagctggtaacacattatttctgggtgtgtctgtgaggatgtttctggaagagattagcacttgaatcagtagattaagtagagatcaccctcaccaacatgggtgagtgtcattcaatccattgaggacctggatagaacaaaaaggtgaaggaagggtgcatttgttctctctgcttgaggtgggacatccatcttcttccaccctcagacagctgtgctcctgattctcaggcctcgggacccagaccaggatttccatcagctcccctggctcgcaggccttctgacttctgactcaccatcagctctcctggatccagcttgccaatggcagatcgtgggactccttgccctctaatcgcatgaaacaatgcccacaagagaaaataaaagcagtcagaggagaatggagaatttcccctattccccagcatgtggagccatggactctgccttctcccagtcaagatggggcaggtctcactatgttgcccattctggtcttgaactcttggactcaagcaatcctcccacctcggacttccaaagtgctggaatcacaggcttgagataccatgcccagccaatttattgtggttaagtatatataatagaatttaccattttaagtgttttcaagtatacaattcaggggcacgaattactttcacaatgttgtccaaccatcaacactgtccacttctagaatttttcatcattccaaacagaaactgcatactccttaaccaatagcttccattctcccctgccccccagcccctagtagcaccattctactttctgtctctgaattcgactacgctgggtacctctataagtggaatcatgcagtatttattcctttgtgtctggcttctttcacatagcataatgttttaaagttaatactcaatacatcagcaaaatgatgccattaaaatgtaagtttctcatgttattcttgttaatcaagaagcatgaaaggccggactgcaaagcagttaagacacttattggggtcttaggaattgtgattcaggagaaacagatgtggtcaaaggccacattgtgttctgaaaaataaagtggaatagtaatttttaaaaagatgccgagggtgattacactagttgttttgaaagaattattgttggtagaggaggctggcttagtacatgagtccatagttcattggttgtagctgtttaggc

SEQ ID NO: 729234 - DNA, 433 bp, Homo sapiens
gctaaggaatactcaaatagctggtaacacattatttctgggtgtgtctgtgaggatgtttctggaagagattagcacttgaatcagtagattaagtagagatcaccctcaccaacatgggtgagtgtcattcaatccattgaggacctggatagaacaaaaaggtgaaggaagggtgcatttgttctctctgcttgaggtgggacatccatcttcttccaccctcagacagctgtgctcctgattctcaggcctcgggacccagaccaggatttccatcagctcccctggctcgcaggccttctgacttctgactcaccatcagctctcctggatccagcttgccaatggcagatcgtgggactccttgccctctaatcgcatgaaacaatgcccacagtatgtctcctattaaataaatatatatctaatc

SEQ ID NO: 729235 - DNA, 616 bp, Homo sapiens; identical to SEQ ID NO: 728359

SEQ ID NO: 729236 - DNA, 627 bp, Homo sapiens
cagtggacacagcccgtggtccccgaagccgaaggttgattggagctcttccagggcttccttcctgggccatggacccctctgaggccattcgcctctgttccagtttggctctcctggacccctctggatggctaggttgttcctcctcagtctgcattgattggagctgggaccgaagcccccattccaaaaccggaccaggagataggcaaacaagaagaagccacccaatgtgagaaagaaataagcaacgggggtgatgtccgtctttatgcccagcaaagccagccccagtaggaaggaggcgcagcacaggaggagaagcggcttctccagtctccccagttcttcaatctcaaataaatcatctgtagagtcccctccagttccgaaattctctctatgtcttggagtgtgtggaatagccaggaaaccagcccaggagctttgactcccagccattctgcaccttaagcaaaaaggaagttagccacacatggtggctcatgactgtagtctcagctacatgggaggcaaggcgagaggatctcttgagcccaggagttcgaggccagcctaggcaatgtagtaagaccctgttcttaaatttttttaaaaagcaat

SEQ ID NO: 729237 - DNA, 1612 bp, Homo sapiens; identical to SEQ ID NO: 409299

SEQ ID NO: 729238 - DNA, 796 bp, Homo sapiens
gaagaaattaaggccaaaagaccaccatcacctccaaaggcatgctctactcctggctcctgttcttcagggatgacaagtaccaagaatgatgtgaaagcaaacaccatttgcataccaaactatctggatcaggaaataaaaaaaaagagtgggtctcagctttgattcattctgagcttgccgagataaacctgttaactcatcacagaagaaacacctcaatggaaccagcagcagagactgggaagccacccacagttaaatcaccacccacagttaaattgcccccaaattttactgcaaaatcaaaagtgctgaccagagatacagaaggggatcaaccaaccagagtgtcaagtcaaggatctgaagaaaacaaggaagtaccaaaagaggctgagcacaagcctccactacttataagaagaaataatatgaaaatacctgttgcagaatatttcagcaaaccaaattctcctcccaggcctaacactcaggagagtggatcagcaaaaccagtgtcagcaaggagtatacaagaatacaacctctgtccccaaagagcatgttatccttcaacacaccggaggtagaagttctagactgggtgaattctttcatgaatatgagcttcacatttacatcatcaaattatttttcaaatgaatatttttggtattgaggaatcaagtggtcctctttatggtggcacatgtaaatctaaaaatacctgtatgtaatgctacaaataaatattactggaaatgatatttccatttgtagttaatacgat

SEQ ID NO: 729239 - DNA, 625 bp, Homo sapiens
cggagcgaccctctatggtcccgggcccacccgaaagcgttgttcgtttcttcctgtggttttgttttctcctccccccaactcggaaggcgtcctgtgacccccgggacctcaagagctgtaaccgcccctgtgtgtggtcgaggcttttgaaaccaaactctagcctctccaacctagaaactgcatactttccacaaaatttgagatttttgagaccctggtacttttcacgaagtcaccttaattatcaccaaaaagctcctgcaagatgggagtggttatactccatttacaggaaaggaaccaaggctcagagaagaaatgtgctccgttcaccgtgtgctcctcctcagccatcctggccgtgctcagtcatctgaccagctgacctccgtgttcccccactccctggggagctcctccgccttttggcttccaatgctattgctgcatgctgaagactcccgcattggtaactccagtctgactgtgggacataaatgttattgaactttagacttgtatatcgaactgattactcaagagctgcatttgcatgtgtaatggacatcccaaacctaacataccccccaaatgaattcctgatatctacctaaactgt

SEQ ID NO: 729240 - DNA, 540 bp, Homo sapiens
  misc_feature (283)..(283): n is a, c, g, or t
  misc_feature (354)..(355): n is a, c, g, or t
cacatggcgcgaatgctgggtggcaggttggggccagaccaatgctgctgacaaaaactctgtgaaaacggatctgatgaaagtgccaatggtcatcatggactgggaggagtgttcaaagatgtttccaaaacttaccaaaaatatgctgtgtgccggatacaagaatgagagctatgatgcctgcaagggtgacagtggggggcctctggtctgcaccccagagcctggtgagaagtggtaccaggtgggcatcatcagctggggaaagagctgtggaganaagaacaccccagggatatacacctcgttggtgaactacaacctctggatcgagaaagtgacccagctagnnggcaggcccttcaatgcagagaaaaggaggacttctgtcaaacagaaacctatgggctccccagtctcgggagtcccagagccaggcagccccagatcctggctcctgctctgtcccctgtcccatgtgttgttcagagctattttgtactgataataaaatagaggctattctttcaaccgaaa

SEQ ID NO: 729241 - DNA, 554 bp, Homo sapiens
cacatggcgcgaatgctgggtggcaggttggggccagaccaatgctgctgacaaaaactctgtgaaaacggatctgatgaaagtgccaatggtcatcatggactgggaggagtgttcaaagatgtttccaaaacttaccaaaaatatgctgtgtgccggatacaagaatgagagctatgatgcctgcaaggtaactagggggtacctccctcaccttataggtcctcaccctctgggaactgccagtgcaagggtattctctctctgctgcaaatagacaattctgagtctggaaaatgtatgggaattagggcctgcagccatgagaatgagtatgtggatttcagatcctctggagctgtgagtgagcaccctgggagtcaatatgctgcaaccctgcttaactatttctgatcttcttcaggtacactaggtaaaaaggacgccaaggcttttctcatttctgggaattctttttaaaaatccaaggaggatttggtatctatataagaagtcattttagttcattaacttagaaacctttgttgagcata

SEQ ID NO: 729242 - DNA, 1109 bp, Homo sapiens
ctttgttgtcgttgttttgttttttagagatggggtctcactatgttgcccaggctggtgtcaaactcctgagctcaagcgattccccccacattggcctcccaaagtgctgggctacaggcgtgagccgctgccctgccgttgtttttatggtctctggcctaagcctgtgcttttgatgtcatatgcaacccattgccaaatccattgccatggagcttttcccctgtgtttttttccaagtgttttatggtttcaggtcttatatttaggtttgatccatatcgagttactttttgtatatggtgttaggtaagggtccagcttcattcttctggctgtggatatccagttttcccagcaccagttgttgaaaagactttcttttccccattgaatggtctgggcacccttttcaaaaatcagttgaccaagtattacaaaggtttatttctgtgctctctattttattcccttggtggatgtgtctgtctacatggcagtaccacactgattactttcagctttggaatcagggagtatgtcatctgccattgaatgagtatccactgtgtgctaggccttgtgggtggagcggtgacttggacatcgtccctgctggtccagtgccctgccgtccccctgagtcttgactttattctggatagtggaggttggcacaaaaatatctcccagttaaaggaattataattcagtcacctgactattactgacaagtcaaaaaaaaatgactcagtgggtttagtaccaaggtagcagtgttccatttgatgattcagcatatagcaggttctcttagtgaacatttctctttgtgtattgtttttcccccacatagcaacgaagttagtttctaatgacttccattctctacttttatcagaagcagatttcacctggaatattctataaaccctttgaaaccctctattttagccatggtgtcttctaagcaaagtaattttcttgaacttaaataacaaattgatagttgaattaaccttttaaaataaaatgtaaagtgtagctaagaaatcattatttaaaggtattccaacgataaattatttgggatggggctggggagg

SEQ ID NO: 729243 - DNA, 544 bp, Homo sapiens
ggccacctaagatggaagaagccatgagatgagtaagcgttgcctactcacaaggttgcaaactgtccttcacttacgattatcccccaacgccccctcctaaatctgatcaatcgcatggaacttgatggttacaaaagacagagctaacaactagctaccttgcaggaacgggaacgtcattctgagggtagtccacatgcaagtgttctaaagttgacatcactgcttcatcattcacctcattttcccagaacagaagcaccaagaaaattatcaccattattatcatcagagattaagaagcagcaatgcccctcttgtggcaagagttggcagcgtgcggttggtatgtcaatgcatccaaggtccaagggcctggattgtctgccaaatgcttgggagttgtttgatcaggttgacatgctccaacagcattgtggactgggcccacacctacgctgaggtgaccaatgtctccaactgttggatctgctccaccttccagcagcagctgcggagagtttgccctggaacgcgtatc

SEQ ID NO: 729244 - DNA, 656 bp, Homo sapiens
tttatggtttaattcagtaaagattattttattgaagcagaataaaacaatcccaacccagcaatacaggaaggataaattaattaccagtggcttccccttccgctcaaggcattgccccatgtccacggtccaggtctgcctcaggcacagccagctccaatgccattgagagaagagatctcagactcgggagctgatcttgagttatttaacatagccaaggaaactatctggcctcaagtcatcacaagtgacaagaacaaacccctctgtgggggaatagtggtacctgcaggcagggtatcttgtgccttcaatgagctgacagactgtcattttgaactttgtctcactctgaaagcagaaaatggccgaaaggttttggcaagcaaccttcttgggagaaatgcaaataccattgatttttcgaggcctctcatggatgaagacatgctcctttttacaagtgtggtcaggttccctgataactctttgtatgatcatgtggttgcagtaccttgcaggaacgggaacgtcattctgagggtagtccacatgcaagtgttctaaagttgacatcactgcttcatcattcacctcattttcccagaacagaagcaccaagaaaattatcaccattattatcatcagag

SEQ ID NO: 729245 - DNA, 611 bp, Homo sapiens; identical to SEQ ID NO: 57041

SEQ ID NO: 729246 - DNA, 1672 bp, Homo sapiens
tgccgtagagtgctgaaggtcctgccaacggctctcttggcgtctcaacgttcggatcagcagcttttttccattctctctctccacttcttcagtgagcagccatgagttggactgtgcctgttgtgcgggccagccagagaatgagctcggtgggagcgaatttcctatgcctggggatggccctgtgtctgcgtcaagcaacgcgcatcccgctcaacggcacctggctcttcacacccgtgagcaagatggcgactgtgaagagtgagcttattgagcgtttcacttccgagaagcccgttcatcacagtaaggtctccatcataggaactggatcggtgggcatggcctgcgctatcagcatcttattaaaaggcttgagtgatgaacttgcccttgtggatcttgatgaagacaaactgaagggtgagacgatggatcttcaacatggcagccctttcacgaaaatgccaaatattgtttgtagcaaagattactttgtcacagcaaactccaacctagtgattatcacagcaggtgcacgccaagaaaagggagaaacgcgccttaatttagtccagcgaaatgtggccatcttcaagttaatgatttccagtattgtccagtacagcccccactgcaaactgattattgtttccaatccagtggatatcttaacttatgtagcttggaagttgagtgcatttcccaaaaaccgtattattggaagcggctgtaatctggatactgctcgttttcgtttcttgattggacaaaagcttggtatccattctgaaagctgccatggatggatcctcggagagcatggagactcaagtgttcctgtgtggagtggagtgaacatagctggtgtccctttgaaggatctgaactctgatataggaactgataaagatcctgagcaatggaaaaatgtccacaaagaagtgactgcaactgcctatgagattattaaaatgaaaggttatacttcttgggccattggcctatctgtggccgatttaacagaaagtattttgaagaatcttaggagaatacatccagtttccaccataattaagggcctctatggaatagatgaagaagtattcctcagtattccttgtatcctgggagagaacggtattaccaaccttataaagataaagctgacccctgaagaagaggcccatctgaaaaaaagtgcaaaaacactctgggaaattcagaataagcttaagctttaaagttgcctaaaactaccattccgaaattattgaagagatcatagatacaggattatataacgaaattttgaataaacttgaattcctaaaagatggaaacaggaaagtaggtagagtgattttcctatttatttagtcctccagctcttttattgagcatccacgtgctggacgatacttatttacaattcctaagtatttttggtacctctgatgtagcagcacttgccatgttatatatatgtagttggcatttggttcccaaaaagtaggatgtaggtatttattgtgttctagaaattccgactcttttcattagatatatgctatttctttcattcttgctggtttatacctatgttcatttatatgctgtaaaaaagtagtagcttcttctacaatgtaaaaataaatgtacatac

SEQ ID NO: 729247 - DNA, 484 bp, Homo sapiens
cagcgggaaaacacatagctggtgccaatcacacacacaccttctatggccacagtcaccacagtcaccatggccacccaagccaccagagccacagcctgcctaatcgcagacactagatctgtgacttcttggaagccacctaaccatggatggagacgcccctgcccccagcaaggctggctcacacacacgtctgttttctctcctatggggccatctatgcaggccagggtgagatgctgtgcccaaatccctactttcttaggctcctcacggggattatgggctctttaaactccatgagtggggtctgccacagaagatggcccctgttggagggagagctgggaggacacagcgcaggtgagatagaccctgaggcccctgaagacccaccaagagaagacagatgggagcaggcaagagccccacactgatgtcattgcctggaacggagccaataaagctttgtgtgccttca

SEQ ID NO: 729248 - DNA, 1272 bp, Homo sapiens; identical to SEQ ID NO: 61034
  misc_feature (1267)..(1267): n is a, c, g, or t
  misc_feature (1269)..(1272): n is a, c, g, or t

SEQ ID NO: 729249 - DNA, 2270 bp, Homo sapiens
gggcacattgcagattgttcgggtaaatttaaaatgctagagcatgccctacgtgatgccaagatggcggagacttgtattgtgaaagaaaagcaagattataagcagaaattgaaggcacttaagattgaagtcaacaaactaaaagaggacctcaatgaaaagacgacagaaaataatgagcaacgagaagagatcattcgcctcaagcaagagaaaagttgcctgcacgatgaattgctttttactgtagagagagaaaagaggaaagatgaattgcttaatattgcgaagtcaaagcaagaacgcacaaattcagaactgcacaatctgagacagatttatgtaaaacaacagagtgatctgcagtttcttaatttcaatgtggaaaattctcaggaattaatacagatgtatgactcaaagatggaggaatcaaaggctctggactccagcagagacatgtgtttatcagaccttgaaaataaccacccaaaagtcgatattaagagggaaaaaaatcagaagtcactgtttaaggaccagaaatttgaagccatgttggttcagcaaaataggtcagacaagagctcttgcgatgaatgcaaagagaagaaacaacagatcgatactgtgtttggggagaaaagtgtaattacgctgtcatccatattcaccaaagacttagtagagaaacacaacctcccttggtctctgggaggaaaaacccagattgaacccgaaaacaaaattacattgtgcaagatccacacaaaatcaccaaaatgtcatggcactggggttcagaacgaaggaaaacaaccctcagaaacacccactttatctgatgagaagcagtggcatgatgtcagtgtttacctgggcctgaccaactgtccaagttcaaaacatccagaaaagctggatgtagaatgtcaagatcagatggaaaggtccgaaatctcatgctgccagaaaaatgaagcctgtctgggcgaaagtggcatgtgtgactccaagtgctgccacccgagtaacttcataattgaagccccaggccacatgtctgacgtggagtggatgagtattttcaagccttccaaaatgcagagaattgtccgcctcaaatctgggtgcacctgttcagaaagcatctgtggcacacaacatgactccccggcaagtgagctaattgccatccaagattcccactctttgggttcttcaaaatctgccttgagagaagatgagacggagtcctcttccaataaaaagaactcacctacgagtttgttaatctacaaagatgcaccagcattcaatgaaaaggcttcaattgtgttaccctcccaggatgatttctcgcccacgagcaagctccagcgtttgctggcggaatctcgtcagatggtgacggacctggagctgaacacactgctgcccatcagccatgagaatctcactggcagtgccacaaatatttctcatctatgtggaaggcagaaagcagacaccaatactgaatgaatacttaaccgtaaaactgaaagaggattctagttcttcataaacggcacttaattccagctgggagcagaactagaaagttaatttttaaacatctacacttcattttcaagttaaccatttttgtgctgaagaaatattttcatgtgtaagaaagtagaccttattgtacatatagaaagttggaattatgctaagaatgaaaaagacttctctgtaaagatacggactacagttaaatgctagagaagctctttaaaaatgtgaatgtcaaatagagaaagaacccctgcatagaaagtgctgttttaactatctgatttttaaaaaatctgtgcatacatttaaattctaaacaatagcttatcagagtcagctcaaaatatatgagaaacagtattctctcatggttttagcttttgactttgctgtgtaaatagacataaggtgctttgatataaaatataaaatgtaactggaaaatagctcgaggtccttctgtcccaagctgagcagagccccatctttctgggtctatattagtcccacctactgacacaaacaaaagcttgctggaagatcgagttttagacgcatttttaaaaatcttaaagactaaaacacttccattttaacttgtaaagtaatttaattttttaaagattatactatatgcctctgtgtcttctctaaaagaatagatcaacttcagtccataaaagatatttttaatattaaagaaa

SEQ ID NO: 729250 - DNA, 427 bp, Homo sapiens
aagtcagaggtcccagaagagtcagctcaaaaaaatacctttgtcagttattgaaggaaacaaaaggcaacttcagtattcatcgtgatcacgaatttctcatctatgtggaaggcagaaagcagacaccaatactgaatgaatacttaaccgtaaaactgaaagaggattctagttcttcataaacggcacttaattccagctgggagcagaactagaaagttaatttttaaacatctacacttcattttcaagttaaccatttttgtgctgaagaaatattttcatgtgagtaaaataaggaaggaacgttcatcactttaaactgaacctggcaagttaatttcctcgggaatggggatgtatttttttaagcattgcagatatcaaagttctattgtgctgaataaatgcccctttgttaaca

SEQ ID NO: 729251 - DNA, 2079 bp, Homo sapiens
cagagacatgtgtttatcagaccttgaaaataaccacccaaaagtcgatattaagagggaaaaaaatcagaagtcactgtttaaggaccagaaatttgaagccatgttggttcagcaaaataggtcagacaagagctcttgcgatgaatgcaaagagaagaaacaacagatcgatactgtgtttggggagaaaagtgtaattacgctgtcatccatattcaccaaagacttagtagagaaacacaacctcccttggtctctgggaggaaaaacccagattgaacccgaaaacaaaattacattgtgcaagatccacacaaaatcaccaaaatgtcatggcactggggttcagaacgaaggaaaacaaccctcagaaacacccactttatctgatgagaagcagtggcatgatgtcagtgtttacctgggcctgaccaactgtccaagttcaaaacatccagaaaagctggatgtagaatgtcaagatcagatggaaaggtccgaaatctcatgctgccagaaaaatgaagcctgtctgggcgaaagtggcatgtgtgactccaagtgctgccacccgagtaacttcataattgaagccccaggccacatgtctgacgtggagtggatgagtattttcaagccttccaaaatgcagagaattgtccgcctcaaatctgggtgcacctgttcagaaagcatctgtggcacacaacatgactccccggcaagtgagctaattgccatccaagattcccactctttgggttcttcaaaatctgccttgagagaagatgagacggagtcctcttccaataaaaagaactcacctacgagtttgttaatctacaaagatgcaccagcattcaatgaaaaggcttcaattgtgttaccctcccaggatgatttctcgcccacgagcaagctccagcgtttgctggcggaatctcgtcagatggtgacggacctggagctgaacacactgctgcccatcagccatgagaatctcactggcagtgccacaaataagtcagaggtcccagaagagtcagctcaaaaaaatacgtttgtcagttattgaaggaaacaaaaggcaacttcagtattcatcgtgatcacgatttctcatctatgtggaaggcagaaagcagacaccaatactgaatgaatacttaaccgtaaaactgaaagaggattctagttcttcataaacggcacttaattccagctgggagcagaactagaaagttaatttttaaacatctacacttcattttcaagttaaccatttttgtgctgaagaaatattttcatgtgtaagaaagtagaccttattgtacatatagaaagttggaattatgctaagaatgaaaaagacttctctgtaaagatacggactacagttaaatgctagagaagctctttaaaaatgtgaatgtcaaatagagaaagaacccctgcatagaaagtgctgttttaactatctgatttttaaaaaatctgtgcatacatttaaattctaaacaatagcttatcagagtcagctcaaaatatatgagaaacagtattctctcatggttttagcttttgactttgctgtgtaaatagacataaggtgctttgatataaaatataaaatgtaactggaaaatagctcgaggtccttctgtcccaagctgagcagagccccatctttctgggtctatattagtcccacctactgacacaaacaaaagcttgctggaagatcgagttttagacgcatttttaaaaatcttaaagactaaaacacttccattttaacttgtaaagtaatttaattttttaaagattatactatatgcctctgtgtcttctctaaaagaatagatcaacttcagtccataaaagatatttttaatattaaagaaaaaatatgtttccttggtttctttttattttacaggagtaaaataaggaaggaacgttcatcactttaaactgaacctggcaagttaatttcctcgggaatggggatgtatttttttaagcattgcagatatcaaagttctattgtgctgaataaatgcccctttgttaaca

SEQ ID NO: 729252 - DNA, 1908 bp, Homo sapiens
cagagacatgtgtttatcagaccttgaaaataaccacccaaaagtcgatattaagagggaaaaaaatcagaagtcactgtttaaggaccagaaatttgaagccatgttggttcagcaaaataggtcagacaagagctcttgcgatgaatgcaaagagaagaaacaacagatcgatactgtgtttggggagaaaagtgtaattacgctgtcatccatattcaccaaagacttagtagagaaacacaacctcccttggtctctgggaggaaaaacccagattgaacccgaaaacaaaattacattgtgcaagatccacacaaaatcaccaaaatgtcatggcactggggttcagaacgaaggaaaacaaccctcagaaacacccactttatctgatgagaagcagtggcatgatgtcagtgtttacctgggcctgaccaactgtccaagttcaaaacatccagaaaagctggatgtagaatgtcaagatcagatggaaaggtccgaaatctcatgctgccagaaaaatgaagcctgtctgggcgaaagtggcatgtgtgactccaagtgctgccacccgagtaacttcataattgaagccccaggccacatgtctgacgtggagtggatgagtattttcaagccttccaaaatgcagagaattgtccgcctcaaatctgggtgcacctgttcagaaagcatctgtggcacacaacatgactccccggcaagtgagctaattgccatccaagattcccactctttgggttcttcaaaatctgccttgagagaagatgagacggagtcctcttccaataaaaagaactcacctacgagtttgttaatctacaaagatgcaccagcattcaatgaaaaggcttcaattgtgttaccctcccaggatgatttctcgcccacgagcaagctccagcgtttgctggcggaatctcgtcagatggtgacggacctggagctgaacacactgctgcccatcagccatgagaatctcactggcagtgccacaaataagtcagaggtcccagaagagtcagctcaaaaaaatacgtttgtcagttattgaaggaaacaaaaggcaacttcagtattcatcgtgatcacgatttctcatctatgtggaaggcagaaagcagacaccaatactgaatgaatacttaaccgtaaaactgaaagaggattctagttcttcataaacggcacttaattccagctgggagcagaactagaaagttaatttttaaacatctacacttcattttcaagttaaccatttttgtgctgaagaaatattttcatgtgtaagaaagtagaccttattgtacatatagaaagttggaattatgctaagaatgaaaaagacttctctgtaaagatacggactacagttaaatgctagagaagctctttaaaaatgtgaatgtcaaatagagaaagaacccctgcatagaaagtgctgttttaactatctgatttttaaaaaatctgtgcatacatttaaattctaaacaatagcttatcagagtcagctcaaaatatatgagaaacagtattctctcatggttttagcttttgactttgctgtgtaaatagacataaggtgctttgatataaaatataaaatgtaactggaaaatagctcgaggtccttctgtcccaagctgagcagagccccatctttctgggtctatattagtcccacctactgacacaaacaaaagcttgctggaagatcgagttttagacgcatttttaaaaatcttaaagactaaaacacttccattttaacttgtaaagtaatttaattttttaaagattatactatatgcctctgtgtcttctctaaaagaatagatcaacttcagtccataaaagatatttttaatattaaagaaa

SEQ ID NO: 729253 - DNA, 1450 bp, Homo sapiens
cagagacatgtgtttatcagaccttgaaaataaccacccaaaagtcgatattaagagggaaaaaaatcagaagtcactgtttaaggaccagaaatttgaagccatgttggttcagcaaaataggtcagacaagagctcttgcgatgaatgcaaagagaagaaacaacagatcgatactgtgtttggggagaaaagtgtaattacgctgtcatccatattcaccaaagacttagtagagaaacacaacctcccttggtctctgggaggaaaaacccagattgaacccgaaaacaaaattacattgtgcaagatccacacaaaatcaccaaaatgtcatggcactggggttcagaacgaaggaaaacaaccctcagaaacacccactttatctgatgagaagcagtggcatgatgtcagtgtttacctgggcctgaccaactgtccaagttcaaaacatccagaaaagctggatgtagaatgtcaagatcagatggaaaggtccgaaatctcatgctgccagaaaaatgaagcctgtctgggcgaaagtggcatgtgtgactccaagtgctgccacccgagtaacttcataattgaagccccaggccacatgtctgacgtggagtggatgagtattttcaagccttccaaaatgcagagaattgtccgcctcaaatctgggtgcacctgttcagaaagcatctgtggcacacaacatgactccccggcaagtgagctaattgccatccaagattcccactctttgggttcttcaaaatctgccttgagagaagatgagacggagtcctcttccaataaaaagaactcacctacgagtttgttaatctacaaagatgcaccagcattcaatgaaaaggcttcaattgtgttaccctcccaggatgatttctcgcccacgagcaagctccagcgtttgctggcggaatctcgtcagatggtgacggacctggagctgaacacactgctgcccatcagccatgagaatctcactggcagtgccacaaataagtcagaggtcccagaagagtcagctcaaaaaaatacgtttgtcagttattgaaggaaacaaaaggcaacttcagtattcatcgtgatcacgatttctcatctatgtggaaggcagaaagcagacaccaatactgaatgaatacttaaccgtaaaactgaaagaggattctagttcttcataaacggcacttaattccagctgggagcagaactagaaagttaatttttaaacatctacacttcattttcaagttaaccatttttgtgctgaagaaatattttcatgtgagtaaaataaggaaggaacgttcatcactttaaactgaacctggcaagttaatttcctcgggaatggggatgtatttttttaagcattgcagatatcaaagttctattgtgctgaataaatgcccctttgttaaca

SEQ ID NO: 729254 - DNA, 1390 bp, Homo sapiens; identical to SEQ ID NO: 461382

SEQ ID NO: 729255 - DNA, 597 bp, Homo sapiens
gtgaacttgggcaagtgacctaatcctctgcatttcatctctaaattggggagaatagaagcatctacttcatgtagtagccaggattagaagagatggggccacttgagggaaaagacctacccaagggcacataatctgtacatgagagagagccagatgtaacagactgagtactggacttggggttaaacagactgtgaatctttccaccccattggcaagttaccttggacaagttactttaatctccctgagcctcaatctgctcatctttaaaatggaagtcttaataatctcctcataggggattaaacaagaacatgagcacaccttttctaacacagtgtctgagatgagtagatgttcaaaataggggttcatttgcttctttgctctttggctcccacctttttttcaactgccccaaatctctttctgctcaccttttcttgttccatggggtctttacaccaccgtgttagcatgtgtttctgctacatggttacttcttttttagaagcaagtgagtgagggagggcccagtgggcagctcagaactcagtaataaaaccacacagaatccatctcaaaaaa

SEQ ID NO: 729256 - DNA, 331 bp, Homo sapiens
gtgaacttgggcaagtgacctaatcctctgcatttcatctctaaattggggagaatagaagcatctacttcatgtagtagccaggattagaagagggaggaataactgggccctggatagaatgtgatgaatgtatattcttaatgagaagtggaaataatttgtggttgagagctgtgcctcagatcagagtgacaggatacatggctaggctatattttccagcagattaagagctgcagcccaagactctgaaatatgaagaaaaaaggagaagatgacagcatatctttttaaagaaatattttccagccaaatggtgcagcagaga

SEQ ID NO: 729257 - DNA, 476 bp, Homo sapiens; identical to SEQ ID NO: 59685

SEQ ID NO: 729258 - DNA, 530 bp, Homo sapiens
ttgtgcgcgtggagtgagacagaaaacctggagcccgatctcccggccagcgactccctccttctgggtgtgcggctgaagactggaagcaggttgccttgcctgctgcaagcccgccgtacctaccccttctccgcgtgcgcccctccctgtgcctgcgcattaccggctagccggcggcgggcgctgcagcccctacgtgattctgcggctcactcccctcggatggtctttccacccccacccgccacccccaccgtaccaaatgctagctctgccctttcttctgtgtttttcccatcaagagagatggttgtggtcatgaagttcttccgatgggttagacgggcttggcaaaggattatttcctgggttttcttctggaggcaaaaaattaaaccaaccatctcaggacaccctgactccaagaaacactcattgaagaagatggagaagactctccaggtggttgagactttgaggttggtcgagctcccaaaagaggctaagcccaagttgggtgagtcccc

SEQ ID NO: 729259 - DNA, 278 bp, Homo sapiens; identical to SEQ ID NO: 728321

SEQ ID NO: 729260 - DNA, 354 bp, Homo sapiens; identical to SEQ ID NO: 728322

SEQ ID NO: 729261 - DNA, 590 bp, Homo sapiens; identical to SEQ ID NO: 728323

SEQ ID NO: 729262 - DNA, 562 bp, Homo sapiens; identical to SEQ ID NO: 728324

SEQ ID NO: 729263 - DNA, 662 bp, Homo sapiens; identical to SEQ ID NO: 728325

SEQ ID NO: 729264 - DNA, 2824 bp, Homo sapiens; identical to SEQ ID NO: 288696

SEQ ID NO: 729265 - DNA, 656 bp, Homo sapiens; identical to SEQ ID NO: 728327

SEQ ID NO: 729266 - DNA, 574 bp, Homo sapiens; identical to SEQ ID NO: 728328

SEQ ID NO: 729267 - DNA, 666 bp, Homo sapiens; identical to SEQ ID NO: 728329

SEQ ID NO: 729268 - DNA, 333 bp, Homo sapiens
ccctgggatactcccctcccagggtgtctggtggcaggcctgtgcctatccctgctgtccaagagttggcctgtgtggtcacggagtgggttaagagatgataaaaaaatctgctctgtacagatggcacacctggtcccaactaaaccctggggccctagaaagataagacatcccctcctcacaagcccctcctcaagagccccctcctcaagagcccatttataaaaactctgacattcttaactacaacttggcaatcttctcaggatccctctctaacagagacctgttctttccttttgcctattaaactcctgctccaaactcact

SEQ ID NO: 729269 - DNA, 479 bp, Homo sapiens; identical to SEQ ID NO: 67847

SEQ ID NO: 729270 - DNA, 1153 bp, Homo sapiens
agaatgccaagcccggggagaaggcgttccgggcctcaactttggcgtcgtgagattcttgtgaggcgtctgcctggaagccggcagcaattttgcttctttaaagagaaaaagaaggctagggactcagattcctggattctgagatccagaccagctcctcccagacctctccagaagaagccatgggaacccctcgtatccagcatttgctgatcctcctggtcctaggagcctccctcctgacctcgggcctagagctgtattgtcaaaagggtctgtccatgactgtggaagcagatccagccaatatgtttaactggaccacagaggaagtggagacttgtgacaaaggggcactttgccaggaaaccatactaataattaaagcagggactgagacagccattttggccacgaagggctgcatcccggaaggggaggaggccataacaattgtccagcactcttcacctcccggcctgatcgtgacctcctacagtaactactgtgaggattccttctgtaatgacaaagacagcctgtctcagttttgggagttcagtgagaccacagcttccactgtgtcaacaaccctccattgtccaacctgtgtggctttggggacctgtttcagtgctccttctcttccctgtcccaatggtacaactcgatgctatcaaggaaaacttgagatcactggaggtggcattgagtcgtctgtggaggtcaaaggctgtacagccatgattggctgcaggctgatgtctggaatcttagcagtaggacccatgtttgtgagggaagcgtgcccacatcagctgctcactcaacctcgaaagactgaaaatggggccacctgtcttcccattcctgtttgggggttacagctactgctgccattgctgctgccatcatttattcacttttcctaagaaggcacttctgggcctgggtctgaggacatcttttttgactgggagccttcttactgttgaggttcaacaagctgaggagtagatgggaatttgagggagaatacagagatactatgaacgtatttgacatttttaatacaatttctgctataatttttgtatgcagtaggcgttactaataaacatttctgctgtgatttgtgtatgtttcaaca

SEQ ID NO: 729271 - DNA, 1253 bp, Homo sapiens; identical to SEQ ID NO: 60176

SEQ ID NO: 729272 - DNA, 1157 bp, Homo sapiens; identical to SEQ ID NO: 728362
  misc_feature (435)..(435): n is a, c, g, or t
  misc_feature (447)..(447): n is a, c, g, or t
  misc_feature (450)..(450): n is a, c, g, or t
  misc_feature (464)..(464): n is a, c, g, or t
  misc_feature (472)..(472): n is a, c, g, or t
  misc_feature (494)..(494): n is a, c, g, or t

SEQ ID NO: 729273 - DNA, 1033 bp, Homo sapiens; identical to SEQ ID NO: 728361

SEQ ID NO: 729274 - DNA, 1069 bp, Homo sapiens
tcccatccccaccctgcacattcctagccctttgcagaatttgtcccaccccctggtcccctgttcaccccttgtagcaacccctgtttgaagctcctgggctgggctctgctggcctaggtgggtcctcctcacccttcactgagcctccctgaagcagaggggaaactgaggcactgaggggacatgtgacttccctgagaggcagagctgggactggaacccaggtgtgtttcaggaaggagctgtgggctttgagggaggaggcctgggtccccacagtccccccctcaagcctcagtgtccttatatgcaaaccagcagtcacagtggtgaccttttctgtgcatcctccctcaatgaagcagtgagcactgaagaccaggaacagggcctggtgcgggcggggtccacctgctgctgctctctgtgcttgcgactcatggcaacacagttaattgaatgctctggcctcttgcgtgctgtgcccgggggctggtctcccactgggctcaggtccagttcctgatctgggtctccgggtcccatcctgcgaggggacaggcccagctccgggtgacgggggctgtagtggaggcagtactaggtgccagaactgcaggctccttggcgggggctgacacagcgagggatcttttctgtagcgcagtggccacatgataaggcagtaacagctgattatctcagccctcacagagaccctgttatccgccccatttttcagaaggggagactgaggcctagggaagcaaaacctcttgctcatagtttgtcagcggcagaggtctgattggaacatgactgaaaccccagcccagatcctcagacatgagacggtgcactcagccttaatggctagcaggcaacagcacttccactgtgtaggaagcaatgtcctaggccaagaaggggagagggagaggggcaggtaggcttcgtggaggaggtgtctgaaccgggtagaagggttcctacgtggagcaagacggggaggggcactgctggcagtgggcatcgcagggcacaggtggcagggcagggacgtgct

SEQ ID NO: 729275 - DNA, 937 bp, Homo sapiens
agcggacaggccaggtcgtcaactcaactgtcaaggtgtccattgtaccagctgggccatggatccctcccgcctgaaatctgactccacctgccaagagtctgagcctgcaggcctagatttcgactctgctggccaagattatttctctgcagcccaataattcgactctttctaccaagaattggacctggactctcttaacgaagatcttctttcccagtccatgccacatgccaggacagagacctctgtgggcacatatgaatcccactcgacttctgaactggaggatctgacagagcccgagcaaagagagctcaaaaccaaactcactaaattggaggctgaaattgtaaccctacgccacgtactagcagccaaagagagacgctgtggggaactcaagaggaagttaggcctcaccgccttggtagggctgagacagaatctgtccaagagctggcttgatgttcaggtctccaacacctatgtgaaacagaagacatcagctgctctgtccaccatgggcactctcatctgcaggaagcttggaggcgtgaagaagtcggccacactcagatcttttgaaggtctgatggggacaatcaagtccaaagtctcagggggcaaaagagcttggccctgactgtctttcttctgcggagggtggggttgatctgctctcagttttggggtgtggggaagacccactccagattccggggagtgggaatgagccactcccagttctggagagtgaggatgaccatctccactttctggaaccagaatgagcccccttggtaaccttgcctggtactaaaccagtgcaaggacccccttcccttattacatttgcaactctgcccaacaaaaacaagcaagcaaaccacaatggtaaagtggttaattcaggaaattgacagaatccagt

SEQ ID NO: 729276 - DNA, 1084 bp, Homo sapiens
agcggacaggccaggtcgtcaactcaactgtcaaggtgtccattgtaccagctgggccatggatccctcccgcctgaaatctgactccacctgccaagagtctgagcctgcaggcctagatttcgactctgctggccaagattatttctctgcagcccaataattcgactctttctaccaagaattggacctggactctcttaacgaagatcttctttcccagtccatgccacatgccaggacagagacctctgtgggcacatatgaatcccactcgacttctgaactggaggatctgacagagcccgagcaaagagagctcaaaaccaaactcactaaattggaggctgaaattgtaaccctacgccacgtactagcagccaaagagagacgctgtggggaactcaagaggaagttaggcctcaccgccttggtagggctgagacagaatctgtccaagagctggcttgatgttcaggtctccaacacctatgtgaaacagaagacatcagctgctctgtccaccatgggcactctcatctgcaggaagcttggaggcgtgaagaagtcggccacactcagatcttttgaaggaaaccctaaaggagaaggaagcagaatataaccctctggagagctcaagacagtaggaacctggacggtgcttgtttgaattttctgatatctgattttcacacgaatatactttttgtttgttttccttttccattttcaaaatgccaagatctgggagcctctttcactcctctagacacactgcctgagatagaagtttgcatcttattggctgtgggcagagactaggacccttatgggtacatttcagtaatctctcactgcctaaaatggtaatccctccagcctaagaggatgattctgttttgttgactcttgaatgctcccccaacattcctttggttttcctataagcaaaaccaaataccactataaatacaaaagcatctggtaaactgtaaagttactcatgtatcccaaccctccacagatttctgaagacaaagttttgcttggattaaaacaagatgttttactattaaaaaaa

SEQ ID NO: 729277 - DNA, 845 bp, Homo sapiens
agcggacaggccaggtcgtcaactcaactgtcaaggtgtccattgtaccagctgggccatggatccctcccgcctgaaatctgactccacctgccaagagtctgagcctgcaggcctagatttcgactctgctggccaagattatttctctgcagcccaataattcgactctttctaccaagaattggacctggactctcttaacgaagatcttctttcccagtccatgccacatgccaggacagagacctctgtgggcacatatgaatcccactcgacttctgaactggaggatctgacagagcccgagcaaagagagctcaaaaccaaactcactaaattggaggctgaaattgtaaccctacgccacgtactagcagccaaagagagacgctgtggggaactcaagaggaagttaggcctcaccgccttggtagggctgagacagaatctgtccaagagctggcttgatgttcaggtctccaacacctatgtgaaacagaagacatcagctgctctgtccaccatgggcactctcatctgcaggaagcttggaggcgtgaagaagtcggccacactcagatcttttgaaggattgatcttcaataaatacacgttaaatcaaggaaggaattaacatcatatacttcagacatcaaatatggaatccaagagactatcaacaacatgaacttgttcacaagttccttctgcttttaaacaaaaatatcgtgtttattcaaagccaatctgagaccctactctgtatcaagaactgtcccaggttctgaaagcatagaattagacatcgtatgtgccctctagaaacacttagactttcaaat

SEQ ID NO: 729278 - DNA, 690 bp, Homo sapiens; identical to SEQ ID NO: 67461

SEQ ID NO: 729279 - DNA, 541 bp, Homo sapiens
gcccagaccacagatgaaattgtgcaatatgtggaacaaacacctaaacaatatataacaccttccttggctctgtctacaaagggcacttttatatatcactgggaccatcaaccaggtgatgttgtgccatataactgagaccgtatcaaaagcctaataacaagacgtatgtctggagccccgatatgcacaggatggtgatataaccctcttctctggaatgggccccacacaaaggaaggatagtgacatattgcaagcccaggcacacaggcccagagcacagttgaaattgtgacatatgtacaccaagcaaccaagcaatgtataacacctcatttggcaatggaatcgagggcacttttacatatcactgagaccagcgcccagctgatgtgaaatattggcctgaaccctgcctacaaaagcattgtggcttttatctagctccattacataagtgatgtgacttccttctactgccttggccctgcacttatggtgaatcgtgacacaaaattgggtagagcaaccaggt

SEQ ID NO: 729280 - DNA, 459 bp, Homo sapiens
gcccagaccacagatgaaattgtgcaatatgtggaacaaacacctaaacaatatataacaccttccttggctctgtctacaaagggcacttttatatatcactgggaccatcaaccaggtgatataaccctcttctctggaatgggccccacacaaaggaaggatagtgacatattgcaagcccaggcacacaggcccagagcacagttgaaattgtgacatatgtacaccaagcaaccaagcaatgtataacacctcatttggcaatggaatcgagggcacttttacatatcactgagaccagcgcccagctgatgtgaaatattggcctgaaccctgcctacaaaagcattgtggcttttatctagctccattacataagtgatgtgacttccttctactgccttggccctgcacttatggtgaatcgtgacacaaaattgggtagagcaaccaggt

SEQ ID NO: 729281 - DNA, 729 bp, Homo sapiens
gtactactcaggaagtctggaggctaagtcaacacatcatgaaactctaggactaattcacactgcaacaaaggggctgattagagcttttgaagatggggggatagattctgtgatggaatgggaagtggatgaagtgctgaactggacaaatacactgaactttgatgaagacacaaaaaaaatggagaaaagcctggttctagaaaataatgcatttctactctacaaatcttcctcatttgtttacttacattattgaggacttcatgaaatcctaggcctcccatcatcttggtccccattctagcagccaattggtacataagaggcaaaaatttatatgttggaatcttcattccgtctctctaccattaaaaaaaagacacaaaattaagaaacaaggtatttcaaatattctcacatctaagcaagtaagttattttaagacagtgctcctctattagcacaagtggttaacaaaacttcactaactatattgttttccttcatttcttttcttatctgaaggtctttctaatgggtactctagattaatgcattggtaaatcaaaatatttggtcctaaattaaactggattcagaactagaatacttactgtttatattccaaaaaatctaaggaagacaaatgtgatctgagtgtgactgtgatcttgattcctgagaagtcagtgtacaataaaatgaagtaattgcttttcccca

SEQ ID NO: 729282 - DNA, 499 bp, Homo sapiens
tttttttctccagccctcttgcctgagcaatctgacgcagaggcacatgaggaatcagcacggaaccatcgacccacagggttaatcccaatgtcaatacctgctagatgtcagggatcccctgggctgctggcgagccatttgaaatgacccatctcctgccaccttggcctgctcctctgggccacctctctccacctgcacttgcttaccggaagacggcaaggccaccggtgcacttcgcagtgccaggagaaaggcgcctcatgctattagctcaaataaggaaaatcatgccgggaagattgaattttctgcagacttgtttaacctggtgatttctgagcacttggcgctggcagccacgggggagtgggctccagccggcactttatcagccacttctcaggactattcctaagcttattaaatcagcatgagtcactcccttgccttcctcacaagcatgaatcacgaatcatcaaaacccaagcaaaat

SEQ ID NO: 729283 - DNA, 685 bp, Homo sapiens; identical to SEQ ID NO: 318917

SEQ ID NO: 729284 - DNA, 522 bp, Homo sapiens
ccaggtgagtgcacgcagtggctcttgaagaggggtcctggggccggcagcacctgcattccccgggggtcttgtcggaaaggcacttgccccgcgtggccacaggacctccaggaccgctagagcagccgcaggtaggagggggcggagtagttgaaaagcaggaagtccatcttgtagaggtcgaagaggcgccgctggtagaaggggctgatgtcccggaagaggcgcgctgccaggtcgcgggaggcggcggctccccggggccgcggcggcccagggaagctcaggtcggatgcgcccgccaggcccagcacgaaggccgcgtcctccgccagcgtctcgaacttgcccacgacgtcgtagcggaggcgacacgggtggcagagcgcgtgcgcgcgctcccagtgctcgttgaagggctcctcacgccgcgtgcgcgggtccagcaggtaggccaggaactccgcgaagcgcacgtcgtggccgcgggcccgggcgtcggggagcgcgcgcggccgc

SEQ ID NO: 729285 - DNA, 645 bp, Homo sapiens
ccactgcccagagcaggtcaccgtgaacaaagccagggctccagcgttctctatgggcatccgccactcgaaacgggccagcaccatggccgccaccacgccctcccggcctgcggggcacaggctgcccggccgctgctgctaggccaggcctgtttcccacacagtgaacgggggctggcgggcctctcctggggcctggctttggctggaggggctagaaggcgagaggggctgggaaaggagtcttccctcccctttcctgaactgtccaggtccttctaggacacctgatccttccagtccctgggggctgtgacccatggccctgtgcagggtacagggtgagtctccttccagtgccccagtttcttccaggtcacgccaggccaggccaggccaggtggggaaagggacaccttccggccctccccagtagctggctggagatggagcttcttgtgtcccagaactcggcgtccagctccactagggcctggatccccatcacagcttgggttagccccggtcccagcccaaactcaggctggaggcagccccgaggcctgtgcctttcccactccaccttctacagttgcttagccaataaacctttcctgggctggagagctgtcagcatcaaaa

SEQ ID NO: 729286 - DNA, 984 bp, Homo sapiens; identical to SEQ ID NO: 462680

SEQ ID NO: 729287 - DNA, 488 bp, Homo sapiens; identical to SEQ ID NO: 462681

SEQ ID NO: 729288 - DNA, 572 bp, Homo sapiens; identical to SEQ ID NO: 462682

SEQ ID NO: 729289 - DNA, 454 bp, Homo sapiens
ccgggctttcctgagctgtggcccggcagggaagatcgcctggacgtggagccagcatcgccccgtgccctcggcgtttgcatttgtaaacttgtggtcttcctatgtgtcagaaacaactgtgtcttgggggggaagaccctcgctgcgccgcttcccgccgcagcgcccgcgcctccgaggggacagcgccctctggagctcgctgggagcatcaccgcctggacgcccgcgccgcggaggagccggcgcccatctccacccgcacggctcgccggtccagagccatgagccaagagccctcttcacgctgctaactccaggggacagacgaagggacatctttggaaaacgctggttttggtttttaaaaagcccaactttttttttttaatttccataactaaagtgttcagactggagtgctctccttcaggcctcttcatagctggga

SEQ ID NO: 729290 - DNA, 422 bp, Homo sapiens
ccgggctttcctgagctgtggcccggcagggaagatcgcctggacgtggagccagcatcgccccgtgccctcggcgtttgcatttgtaaacttgtggtcttcctatgtgtcagaaacaactgtgtcttgggggggaagaccctcgctgcgccgcttcccgccgcagcgcccgcgcctccgaggggacagcgccctctggagctcgctgggagcatcaccgcctggacgcccgcgccgcggaggagccggcgcccatctccacccgcacggctcgccggtccagagccatgagccaagagccctcttcacgctgctaactccaggggacagacgaagggacatctttggaaaacgctggttttggtttttaaaaagcccaactttttttttttaatttccataactaaagtgttcagactgga

SEQ ID NO: 729291 - DNA, 895 bp, Homo sapiens
cccactccttcgccatctaccaccaaagcctcttccggatcctcaaggtcttcaagagcttgcgggccctgagggcaatccgggtcctgcggaggctcagcttcctgaccagcgtccaggaagtgacagggaccctgggccagtccttgccgtccatcgcagccatcctcatcctcatgtttacctgcctcttcctcttctccgcggtcctccgggcactgttccgcaaatctgaccccaagcgcttccagaacatcttcaccaccatcttcaccctcttcaccttgctcacgctggatgactggtccctcatctacatggacagccgtgcccagggcgcctggtacatcattcccatcctcataatttacatcatcatccagtacttcatcttcctcaacctggtgattactgtcctggtggatagcttccagacggcgctgttcaaaggccttgagaaagcgaagcaggagagggccgcccggatccaagagaagctgctggaagactcactgacggagctcagagctgcagagcccaaagaggtggcgagtgaaggcaccatgctgaagcggctcatcgagaaaaagtttgggaccatgactgagaagcagcaggagctcctgttccattacctgcagctggtggcaagcgtggagcaggagcagcagaagttccgctcccaggcagccgtcatcgatgagattgtggacaccacatttgaggctggagaagaggacttcaggaattgaccccaggaggacaccagatacagacttcagcccctggcagtctgcccacctgggtgcactgggacgggtccccagatctgctggaatgattgtccggggctgcagagcaggggccccaacagagtttttaaaccccaaaaagc

SEQ ID NO: 729292 - DNA, 561 bp, Homo sapiens
gttaaaaaaagggagaaggactcatcaacacattgctgcctgcaaacccagggaaagaccaccttacaccacattatatggcatctgtaaatcaacatgggccagcgggagacaccaaggccctaccaggagctgctctttgatcacgaggttcacgctgcatcttttcgggaaggttaaaaaataataaatgaccaccaggatcacagaaggaaagagctcgtgatgtccatggaattcacgcagatcacatccaggaatctttggaacaaaaaattcacaacaccatggcctcatacaaaaatgctgggctgcaggaaacctgaggcagagagctccatcatcacagtgaagtccccgccttcagcagatcccaccaacagccacagtgcttcccatcacctgaaaaaaactcatgtatcaaactattacacttcttcagaatattggaaaatggtgcatagttcatatgttctcatttgtttatcttgtgtccaaagtgtcttgtcattccaggccactctatttcttgtgtattaataaaaagtttgaggtataaaa

SEQ ID NO: 729293 - DNA, 605 bp, Homo sapiens
aaaagacattaattgtgacgtgatgattcacagagacgacaagaaagaagtgagggccccttctccatactggataatggtgaagcaagacaatgaaagctcttcctcctctacctcctctacctcagatgcattttggctggaagattgtgcccaagttgaagagggtaaagcccaactggtatcaaaggttggttagcaaatctgtggtcatatgagcatttatcttgcagacacccaagttttgtgcctcaccaggcacaagtttgctgtacttatcaaggactgtctgtagactcaccaattctcttctcttatgactgcgttataaagcctttagagatgttcttcaacaggattatctaaagacttccttgggttcttgcaggcctcacaaatcttattttcagaataagaccctcctttttgagaagaatttctttcttttagaaaatgccgtagagaaatccaatatcagaatgtctgaacatagtagagaatgtcactttatgtaaacactacatttttctttaaatatttagtttctctcttttttttggtaaacttcaagtactataattaaaataactaagagacataaaaat

SEQ ID NO: 729294 - DNA, 1837 bp, Homo sapiens
tacactaagcatggcttccagttgggtgggctggcaagatgagtacaatgtcctctcctgagatctggatgctgcatctgttaatgaagcgacagaccacttataagccaccaggtcacttcctgactcgttctaaatccactaaactcatggttccttttcaagccctcaattccacttttgcctccagttctcagggattagacaacccaagcagacaggctacaggaaatagcagattgggagaggagtgggaacaggagaagctgtctttggctcggctggaaggtgaagggattccagatgccggttcctggcttgctccccgctctccatttggcttcatcctggggctctcttcctccccacagaggggtggtgggcactctgtgccacacctctcctctctgggatctcaggtctgtccctgaaacctgctggtagaagaacctctagagtccttgcctccttcccaccgtgtgaccattgcccattggcacatctgtcaagacacagatttttggaagaaaaaagaaagagtgaatgctgcagagatggattgttaattttccaaatgagatatgactctgagatcccacctacccagctggtaggacgttccaccatgctccctaaggtggtttgagtgtttggaatgacaaagactctctcatcaccctgaaaccttagtccggcggcgcctctgagtcttctgcttgacgaggcctgaccttgggcttccccatgtcctttcagaatccagtttgagcaagaatcctgctaagtcagatggagtctcgctctgtcgcccaggctggagtgcagtggtgcgatctcggctcactacaagctccgcctcctgggttcccactattctcctgcctcagcctcccaagtagctgggactacaggtgtctgccaccacgcccagctaattttttgtatttttagtagagatggggtttcaccgtgtcagccaggatggtctcggtctcctgaccttgtgatccgcctgcctcggcctcccaaagtgctgggattacgggcatgagccacagcgctcagccctaatttttgtatttttagtagaaaaggggtttcactatgttggccatgctggtcttgaattcctgaactcaggtgatccgcccaccttgacctcccaaaatgctgggattacaggcatgagccaccgcacctggtttcttaacattctttgccacctcctctgctatatctatttactttgtatccaccagatcgaaagctcaggtctaattccctgtacctagaatattgcctgtagtgtagtaggcacttaaggttttgttgagtgagagaatgaataaacaaacagaaggatttgcttttcaaaccagagcctccctgcctcctgctctgcctgctaaggatcaggaggagacagcagctaaggaaggcagtcctgaattttccctagggatagggagtaagtggggggatccctgagaaacgctggaagcacccactctgctgccaaggctgcgaggaaaacaggccagagtatcctaacagcctccactcagaaggggcctggaaacttttaaccagacaaaataacaaatgcagtggtttagggcttggtggggcttcccacccgtcccacccctgtcccacacacctaggcccacattgaatgccctcagcacctccggctgcacaggggcctgttttccctgactctgctgctgttcacagaaccaacttcctcccaccccacacagacgctcccttcccagagctcattgggaaccttctgatttgcatctccaaagaaataaaataaattccactaaat

SEQ ID NO: 729295 - DNA, 808 bp, Homo sapiens
ggccccactccaccagccggccccgcgggacggttactctgttcctgaggtaccccccgagattgtctgtggggtcagaaacagctctggaggggtctgcagaaattactttcccaagtctttgggctggaaggaacgaacagtgcctgaccaaggactttgagcaggagagagatgggagcagagaggagccaaggtctactattttcacttctgtcaattagatcaaagccctgcccagaagctttgagcgccgctgtcaagtcccattcctcccctaaaccatccaggttccatctgccttgaagccaaaggatcttcttagattcctcaagaaaaattcaggccccgagtttctccaccagcactctcctctccccgaaggagtgggtgggctgcatttctcttcatattctattccattccagaccgtcttggactaccagcctgtccgccacccctcggggccctccctcctactctgcccttgcccgctgaggtcccaagctgaggagatgagccgagcagtaaaaagagaggaggtttggaaaagcaatgtcctctcagtctttaataggtggcccccctgggaacctgctggaagtggaagttaataagctgaaggtggtcacaaccaatctctgccacactcgcaccctaccccaccccaaatcattccttttaattaatagtggaagacctttttaaaaatgtaacatgaattggctatttcttgaggcaaacaaaaggtggctctgaagcgatatatttgtactcgtataaattcattaaaatagaaagcttataa

SEQ ID NO: 729296 - DNA, 532 bp, Homo sapiens; identical to SEQ ID NO: 299230

SEQ ID NO: 729297 - DNA, 1884 bp, Homo sapiens; identical to SEQ ID NO: 67097
  misc_feature (1872)..(1872): n is a, c, g, or t
  misc_feature (1876)..(1878): n is a, c, g, or t
  misc_feature (1882)..(1884): n is a, c, g, or t

SEQ ID NO: 729298 - DNA, 1790 bp, Homo sapiens; identical to SEQ ID NO: 67096
  misc_feature (1778)..(1778): n is a, c, g, or t
  misc_feature (1782)..(1784): n is a, c, g, or t
  misc_feature (1788)..(1790): n is a, c, g, or t

SEQ ID NO: 729299 - DNA, 2290 bp, Homo sapiens
acaacggccatccctgtggctgggccgccggctacgcaatgctgtctctcttgctgatcctctcaggcctgggcgctgacctccgcgggcccacgccacttattccatcaaaattgaggggaaaccataccttcctgcttgaaaaacagtcatttttacacccacatttcctggtgtatttatacaacaaatcaggaacattgtatgcagattcttcattttcaaagggtcattgcttttaccaaggatatgctgcagacattccaaaatcagttgtggcactacgcacctgttctggactcagaggattactgcagttagataatatcagttatggtattgaaccattggaatcttcacctacatataagcatgtagtttatcgaattaaaaatgatgctattggtcattcctcctttcaagaaaattatcctgtggctcaatatatagatcagtcctacaggattcttgtcaaatcagacataaattcaggtgccatgctatcgaaaagaactctgaaaatacaaatcattatggataaagccatgtatgcttatatgggctccacggtggcagttgcagttgagaaagttttccaaatctttggtcttatcaacactatgttttcccagcttaatatgacagttatgctgtcttccttggagatctggtcagatcaaaataagatttcaacaagtggtcatgctgatgaaatactacagcgatttttgccttggaaagaaaaatttttgtttcaaaggtctcatgatatgacatacttattaatttataggaaccattctacttatgtgggagcaacatatcacggaatggcatgcgatccaaagtttgcaacaggaattgctctgtatccaaagaaaatcactgcagaggccttttcagttgttatggcacagttgcttggaattaatctgggattgacatatgatgatatctacaattgttactgtccaggaactacatgcataatgaatcctgatgcgatacgatcccatggtatgaagttttttagcagttgcagcatggatggatttaaacggatagttctgcagcctgaacttaaatgttttcaggataaaacagtttcaaaaatgacttaccgaaaatcttcaacttgtggcaatggaattttggaacctacagagcagtgtgattgtggctataaagaggcatgcactcataaaaaatgctgtaatcctgcagattgtactctagttagatctgcagaatgtggcactggatcatgctgtaacaataaaacttgtacgatccacgaaagaggccatgtctgcagaaaaagtgtagatatgtgtgattttccagaatattgcaatggaacatctgagttttgtgtacctgatgtgaaagctgctgatttagaatactgcagtaataagactagctattgctttaaaggagtatgcagagaaagggatagacagtgttcacagttatttggaaaatttgctaagtctgctaatcttctgtgcacagaagaagtgaattttcaaaatgacaaatttggaaactgtggttcccgttgtgatttttttgatatcctttgtggaaagattgtttgtcactggatacattcagaactagtaccaatgacagacttagacatacaatatacttaccttagaggtcacgtatgtttgtccgcacatgcaagaaatggttcaaaacaatcggagacctatacagaagatataactgcatgtggccaacacaaggtatgtcactcccgagaatgcagaaattttagtgaactaaatataacaaaatatactacaaattgtggacagaatgggatttgcaatgaacatttccattgtcaatgtgatcctggttatgctcctccagattgtgagccagcaatgtcatcaccaggaggaagtatcaatgatggattttggcttacagtagaaaaaagtgtacccttgcttccaaaacgacgtgctgctcctaaaaacaatggtcttttgatcagtttctacattttttcacctttgctcattttaattgctattgttagtcttaaatggaataaaatgaagagattttggagcaaagtgggaacagtaagcagcagatctatctcagaagacagcagtagtaacagcagccagtcacagagttaaagtaaccaagtgataaaatcaaagccatcggatgaagaaaggatattaccaagaaactcacgattaacttaaaactttcaacttcacagaaaaaaataaatcatatgactaaaagcataaaaaaaaaa

SEQ ID NO: 729300 - DNA, 2387 bp, Homo sapiens
  misc_feature (1288)..(1288): n is a, c, g, or t
acaacggccatccctgtggctgggccgccggctacgcaatgctgtctctcttgctgatcctctcaggcctgggcgctgacctccgcgggcccacgccacttattccatcaaaattgaggggaaaccataccttcctgcttgaaaaacagtcatttttacacccacatttcctggtgtatttatacaacaaatcaggaacattgtatgcagattcttcattttcaaagggtcattgcttttaccaaggatatgctgcagacattccaaaatcagttgtggcactacgcacctgttctggactcagaggattactgcagttagataatatcagttatggtattgaaccattggaatcttcacctacatataagcatgtagtttatcgaattaaaaatgatgctattggtcattcctcctttcaagaaaattatcctgtggctcaatatatagatcagtcctacaggattcttgtcaaatcagacataaattcaggtgccatgctatcgaaaagaactctgaaaatacaaatcattatggataaagccatgtatgcttatatgggctccacggtggcagttgcagttgagaaagttttccaaatctttggtcttatcaacactatgttttcccagcttaatatgacagttatgctgtcttccttggagatctggtcagatcaaaataagatttcaacaagtggtcatgctgatgaaatactacagcgatttttgccttggaaagaaaaatttttgtttcaaaggtctcatgatatgacatacttattaatttataggaaccattctacttatgtgggagcaacatatcacggaatggcatgcgatccaaagtttgcaacaggaattgctctgtatccaaagaaaatcactgcagaggccttttcagttgttatggcacagttgcttggaattaatctgggattgacatatgatgatatctacaattgttactgtccaggaactacatgcataatgaatcctgatgcgatacgatcccatggtatgaagttttttagcagttgcagcatggatggatttaaacggatagttctgcagcctgaacttaaatgttttcaggataaaacagtttcaaaaatgacttaccgaaaatcttcaacttgtggcaatggaattttggaacctacagagcagtgtgattgtggctataaagaggagacaggatttcaccatgttggccaggctagtctcaaacttcggacctcaggttatccacctgcctcagcctctcaaggtgctgggattacaaaccncatgcactcataaaaaatgctgtaatcctgcagattgtactctagttagatctgcagaatgtggcactggatcatgctgtaacaataaaacttgtacgatccacgaaagaggccatgtctgcagaaaaagtgtagatatgtgtgattttccagaatattgcaatggaacatctgagttttgtgtacctgatgtgaaagctgctgatttagaatactgcagtaataagactagctattgctttaaaggagtatgcagagaaagggatagacagtgttcacagttatttggaaaatttgctaagtctgctaatcttctgtgcacagaagaagtgaattttcaaaatgacaaatttggaaactgtggttcccgttgtgatttttttgatatcctttgtggaaagattgtttgtcactggatacattcagaactagtaccaatgacagacttagacatacaatatacttaccttagaggtcacgtatgtttgtccgcacatgcaagaaatggttcaaaacaatcggagacctatacagaagatataactgcatgtggccaacacaaggtatgtcactcccgagaatgcagaaattttagtgaactaaatataacaaaatatactacaaattgtggacagaatgggatttgcaatgaacatttccattgtcaatgtgatcctggttatgctcctccagattgtgagccagcaatgtcatcaccaggaggaagtatcaatgatggattttggcttacagtagaaaaaagtgtacccttgcttccaaaacgacgtgctgctcctaaaaacaatggtcttttgatcagtttctacattttttcacctttgctcattttaattgctattgttagtcttaaatggaataaaatgaagagattttggagcaaagtgggaacagtaagcagcagatctatctcagaagacagcagtagtaacagcagccagtcacagagttaaagtaaccaagtgataaaatcaaagccatcggatgaagaaaggatattaccaagaaactcacgattaacttaaaactttcaacttcacagaaaaaaataaatcatatgactaaaagcataaaaaaaaaa

SEQ ID NO: 729301 - DNA, 2636 bp, Homo sapiens
  misc_feature (1288)..(1288): n is a, c, g, or t
acaacggccatccctgtggctgggccgccggctacgcaatgctgtctctcttgctgatcctctcaggcctgggcgctgacctccgcgggcccacgccacttattccatcaaaattgaggggaaaccataccttcctgcttgaaaaacagtcatttttacacccacatttcctggtgtatttatacaacaaatcaggaacattgtatgcagattcttcattttcaaagggtcattgcttttaccaaggatatgctgcagacattccaaaatcagttgtggcactacgcacctgttctggactcagaggattactgcagttagataatatcagttatggtattgaaccattggaatcttcacctacatataagcatgtagtttatcgaattaaaaatgatgctattggtcattcctcctttcaagaaaattatcctgtggctcaatatatagatcagtcctacaggattcttgtcaaatcagacataaattcaggtgccatgctatcgaaaagaactctgaaaatacaaatcattatggataaagccatgtatgcttatatgggctccacggtggcagttgcagttgagaaagttttccaaatctttggtcttatcaacactatgttttcccagcttaatatgacagttatgctgtcttccttggagatctggtcagatcaaaataagatttcaacaagtggtcatgctgatgaaatactacagcgatttttgccttggaaagaaaaatttttgtttcaaaggtctcatgatatgacatacttattaatttataggaaccattctacttatgtgggagcaacatatcacggaatggcatgcgatccaaagtttgcaacaggaattgctctgtatccaaagaaaatcactgcagaggccttttcagttgttatggcacagttgcttggaattaatctgggattgacatatgatgatatctacaattgttactgtccaggaactacatgcataatgaatcctgatgcgatacgatcccatggtatgaagttttttagcagttgcagcatggatggatttaaacggatagttctgcagcctgaacttaaatgttttcaggataaaacagtttcaaaaatgacttaccgaaaatcttcaacttgtggcaatggaattttggaacctacagagcagtgtgattgtggctataaagaggagacaggatttcaccatgttggccaggctagtctcaaacttcggacctcaggttatccacctgcctcagcctctcaaggtgctgggattacaaaccnacaaggagtcccttgcgggaagactgccaatatgtctgttaggggatactttaagaacctgtaaaatcaacacaagttatttacttaaaagcacagcatacacaaccccattttggaaaaggagaaatagacaagaagaaatgggtaacaggcctcaagcaagtctgaaacccaagagagccaatgatggacattcagactcctgaataatttcctttgatgacatgtcctgcatcttctataaacaggcatgcactcataaaaaatgctgtaatcctgcagattgtactctagttagatctgcagaatgtggcactggatcatgctgtaacaataaaacttgtacgatccacgaaagaggccatgtctgcagaaaaagtgtagatatgtgtgattttccagaatattgcaatggaacatctgagttttgtgtacctgatgtgaaagctgctgatttagaatactgcagtaataagactagctattgctttaaaggagtatgcagagaaagggatagacagtgttcacagttatttggaaaatttgctaagtctgctaatcttctgtgcacagaagaagtgaattttcaaaatgacaaatttggaaactgtggttcccgttgtgatttttttgatatcctttgtggaaagattgtttgtcactggatacattcagaactagtaccaatgacagacttagacatacaatatacttaccttagaggtcacgtatgtttgtccgcacatgcaagaaatggttcaaaacaatcggagacctatacagaagatataactgcatgtggccaacacaaggtatgtcactcccgagaatgcagaaattttagtgaactaaatataacaaaatatactacaaattgtggacagaatgggatttgcaatgaacatttccattgtcaatgtgatcctggttatgctcctccagattgtgagccagcaatgtcatcaccaggaggaagtatcaatgatggattttggcttacagtagaaaaaagtgtacccttgcttccaaaacgacgtgctgctcctaaaaacaatggtcttttgatcagtttctacattttttcacctttgctcattttaattgctattgttagtcttaaatggaataaaatgaagagattttggagcaaagtgggaacagtaagcagcagatctatctcagaagacagcagtagtaacagcagccagtcacagagttaaagtaaccaagtgataaaatcaaagccatcggatgaagaaaggatattaccaagaaactcacgattaacttaaaactttcaacttcacagaaaaaaataaatcatatgactaaaagcataaaaaaaaaa

SEQ ID NO: 729302 - DNA, 697 bp, Homo sapiens; identical to SEQ ID NO: 71652

SEQ ID NO: 729303 - DNA, 896 bp, Homo sapiens
  misc_feature (849)..(849): n is a, c, g, or t
tcgcctcgcctccctggtggtcctgctcttctctctctggaatcagatcacttgtgggggcgactccgaggctgaggactgcaaaacctgtggctacaattacaaacaacttccgtgctgggagactgtcctgggccaggaaatgtacaaacttctgctctttgatctgctgactgtcttggcagtcgcgctgctcatccagtttcctagaaagctcctctgtggcctctgtcctggggcgctgggtcgtctggcggggacccaggagttccaggtgcccgacgaggtgctggggctcatctacgcgcagacggtggtctgggtggggagttttttctgccctttactgcccctgcttaacacggtcaagttcctgctgcttttctacctgaagaagcttaccctcttctccacctgctccccggctgcccgcaccttccgggcctccgcggcgaatttctttttccccttggtccttctcctgggtctggccatctccagcgttcccctgctttacagcatcttcctgatcccgccttctaagctgtgtggtccattccgggggcagtcgtccatctgggcccagatccctgagtctatttccagcctccctgagaccacccagaatttcctcttcttcctggggacccaggcttttgctgtgccccttctgctgatctccagcatcctgatggcgtacactgtggctctggctaactcctacggacgcctcatctctgagctcaaacgtcagagagagacggaggcgcagaataaagtcttcctggcacggcgcgctgtggcgctgacctccaccaaaccggctctttgacccccgcagcccacgtnccgccttcagaccccaggcccattgtaagcctaggtcacaacatctg

SEQ ID NO: 729304 - DNA, 684 bp, Homo sapiens
gatttgggaccgcgcttggtgttggtaccgggaatcgcggccgcgtcgacggattacaggcatgagccacggcgcccagcctaaataagatcttaagattagattggcaattttcagagtggttcatggatacttggggatccccaggacactttctagggagcacatgaggtcaaaattgttttcataataacactaaaacattacctgtcttgactgtttatatttatactgatggtgcaaaagcaatcattagtaaaacttgatggtaccttagcatgaatcaaaacagaagcaccctactttactagaaagttgttttctttattactgtgtacttgcaattttaaaaaacaccacttttgcttaagaatatcactgataaagcaatattttgttaaatctcaaccaataactacacgtattttaaatatctccatgataaaatgataaaagtgtaaagcactacttgtacatgtgaaattgtaatagtagttttgaggaaaaacaagcacttgtgtgatttgtaagctgaactagctgctttttttcatagaataccaaaactactagcgagaacaactaataaaatctattattcacacttgagtatttggcacacattttctcaaaaatgaacaagcttgtgtcactcaaagaaaaaactgacgtacatgaaacagg

SEQ ID NO: 729305 - DNA, 2365 bp, Homo sapiens
  misc_feature (1647)..(1647): n is a, c, g, or t
gggagtaataacattttgggggagctttttaaatttcacagaagaggaaagttgcctgctctggcaggtatgtgcaagatagagtgtgtttcatttgttctgttgccaagaattagtgctgtactattgtagttcctttaggatttgtatgtgctctgggctcatgaagatattgcatcatgagcttcagcagttgtactcttttttgatgacctaaaaagggcttatttctgaggaatgaaaggttcccatcattgactacggatgtggaaaacctttcctagcttagagcatttgtatctatattttaaagtcagagttcatgttacctgttttaatcacatgactgcatgtcccagtacacaaaagggcactggttggcattcttcttaatgtatttagtaaagatcagaagaaatcctttaagagtttaaatgtccctggaacacgcatacaggctctagtcaagaatgaattagagtgaaggaaagctgtgtgacacctggcattcctctgttcatggagcttctttgaggcttgaagattgattttaccatctagaccactctgcctattcttcaaccaccttggttactttgacataggaattgacttcttttccttgaatggaaaacactttgaaataataataaacattgttataaactaatatatgtgagagtgcttagttgaaacaaaaaggagttttagtagacagtattatactatctttgaaaatcaaggagaagtttatgcaacttaaaatgtgtacaaactgcagtgcaatctactgttggtgaatgtcagtgtattatcaggaaacatgtctatacaatcacagagttatatttcctcacaaacttctttgtgaagagtgaaatgtgtttctgtacctctgggtttcacttacgggcatattttgtgcagtatttatgtgattgtgcctatgcatgatgaatgaatgaatttcagttgtacattgcctaaatcataacttgatgatgcttgggaaagactcaacagttaaaacttcatgaagttctaatgtctgtgttccaaaacacatcacattattaggatgtagggagatatgtatgtgtgctccctggggtggggatttctagttactagaccatctccatttttagcatttggcatcctcatgatacttttataaatacgacattaacaggagagcagcagtacgattttgccgatggaataacagatttgccggcaatcactgaaagagtgcaaatatcgggtccttgtgacttcaacggactcttccaaattgtatgaatgtatcaatgtattagataaacccagtttcagaatgataaagaaaaaatgttagaccaaataatgcggctagttaacagtggtacgatttctagcccgtggctttaaaatgcacttaaagtcctgtccttgccttttattttctgaacttgatgtttttgcattctttgagttcagtttaaagacaactacgagcatctgtaaccaatctgacaataatgtgttcatcaggtgcctgtggattaaatcacatactggcatatttaagctgaatgtcaatctggaaaataaattgactgtattaacggaaataccactctttgtgtagatatttgtcgtatattnaagaaaaagctaaaaagaatggaaatcgcatgactataacttaagtctttcttcaaagtgcatgcagtcttttgcgatacctcattcagccaagtattggtattcttcctcattcggtataaggcagctttcaatttgcttagagggcaacattggaaggttagagttcatcagaaacagaattctaaaatgtgagttcaattcaataaatttgaatttctgtaggaagaatcaaatcaccgatttaaagattgcaatatataataatcatttttaaagtattggattaaatctgataggttttccagaaatgaacaaaaatcagctctaaaaccaaagctgatttttagaaaatttgaaaatgtaaatcagccctatccatactatagtttctctaaaactttatctgaaagagtcattttaaaataactattaaacaatgtaactgctatcttaatgttctgaaataagttaaaacattttaaaatatgaatactgtaaaggaaataaacggtgggaaggaaaagtagagaaagaaatgccaattccagtccaaagctttatttgccaagttttcttagaatgaattttaccaatttatgaattcttgtaagcggaatgtaaaacggaaatactgaaagacttttgcctaaagtggcattattgactgctggtgtgatgctactgtaatgtaataaattattaagttgttgcaaag

SEQ ID NO: 729306 - DNA, 359 bp, Homo sapiens
gattttaaaatatgaatactgtaaaggaaataaacggtgggaaggaaaagtagagaaagaaatgttttaacttatttcagaacattaagatagcagttacattgtttaatagttaaaacattttaaaatatgaatactgtaaaggaaataaacggtgggaaggaaaagtagagaaagaaatgccaattccagtccaaagctttatttgccaagttttcttagaatgaattttaccaatttatgaattcttgtaagcggaatgtaaaacggaaatactgaaagacttttgcctaaagtggcattattgactgctggtgtgatgctactgtaatgtaataaattattaagttgttgcaaag

SEQ ID NO: 729307 - DNA, 952 bp, Homo sapiens
agcattacatgttattcttaacacctgccacttctctcttcccacctctatctgccttattgaacttcatctttccttcattctcttcaacttccacttcttcttgtatggtcctgttgatgccatcttgtttccgtccccagactcatcatctttaccctctgtcaactgagttcccaccctggttctctctcaagatcttcctctcatagctttcacccttggtaaacaatgaggacacatctcaaaaagaatgatgtaatttaattgccttgagttggctgggccatcatctattataaagtgctcttaaaattaaagctaatttaattctgaagaactaaggattaagaagttaagagctggggttcttacaatatggcttgcagactacaagtgtgaactgaggaggtccccaaagtcacttcttactaagtatattatctttttctgaaaattgctcttatctgaaccacaatgaattcacatattcaagttggcttcttcggaaatttcaggccacaaatggcagtgatgcgaccaggagcagtaacacgattacaagtcgcaatttaggaagggtgctccatcatcatttcatgattctcactacagcccagacaggtgggcagagcagtgttctttcccctttaatgaatgaagaagctgagcctcaaacagatgagggggcttcctgggttcacagagctctaaaggtgggaacctagctttttcagtgacattagctagatgtggtgggcacttctcactagaaaaacaagaattaaatcaacgtgaggtccagaactggtgtcccctgttggaaaaataaattgaaactaatgttctggcaataggtagcaaaaactttaaacctatggtaccatctgtcttgacaatcttacctctagaaattgaccccttaataaattaaaactgtgtcttttttagc

SEQ ID NO: 729308 - DNA, 266 bp, Homo sapiens
ttgaaagcggtgtaaatggctcttatctgaaccacaatgaattcacatattcaagttggcttcttcggaaatttcaggccacaaatggcagtgatgcgaccaggagcagtaacacgattacaagtcgcaatttaggaagggtgctccatcatcatttcatgattctcactacagcccagacagggctgagctgtagatccacggccaccatgatgagctaagagtttctggattcagtgcctgctgttgctcctggagatttgtat

SEQ ID NO: 729309 - DNA, 678 bp, Homo sapiens
agcattacatgttattcttaacacctgccacttctctcttcccacctctatctgccttattgaacttcatctttccttcattctcttcaacttccacttcttcttgtatggtcctgttgatgccatcttgtttccgtccccagactcatcatctttaccctctgtcaactgagttcccaccctggttctctctcaagatcttcctctcatagctttcacccttggtaaacaatgaggacacatctcaaaaagaatgatgtaatttaattgccttgagttggctgggccatcatctattataaagtgctcttaaaattaaagctaatttaattctgaagaactaaggattaagaagttaagagctggggttcttacaatatggcttgcagactacaagtgtgaactgaggaggtccccaaagtcacttcttactaagttcagataggtgatggattgaaaataatcccaatattccacaagcaacatcaacatcccccacacacccagcaccgaggaataccctcctctctagaatgtgaggccactgtgtggaggaagacaccacggtgctctactgagccatgaaagtcacgcctgacctaaacagaagactacgtcccctggctaaaagaggaaatagttgaaagcggtgtaaatggctcttatctgaaccacaat

SEQ ID NO: 729310 - DNA, 2076 bp, Homo sapiens
caagacctcagtgaagcccagccagcccaaggagagtgatatccccaagtccccagaagaaaccatccagcccaaggagggtgacatccccaagtcctcagcaaagcccatccagcccaagctgggcaatattcccaaggcctcagtgaagcccagccagcccaaggagggtgacatctccaagtccccagaagaagccatccagcccaaggagggtgacctccccaagtccctagaggaagccatccagcccaaggaggggtgacatccccaagtccctagaggaagccatccagcctaaggagggtgacatccccaagtccccagaagaaaccatccagcccaagaagggtgacatccccaagtccccagaagaagccatccagcccaaggagggtgacattcccaagtctccaaaacaagccatccagcccaaggagggtgacattcccaagtccctagaggaagccatcccacccaaggagattgacatccccaagtccccagaagaaaccatccagcccaaggaggatgacagccccaagtccctagaagaagccaccccatccaaggagggtgacatcctaaagcctgaagaagaaacaatggagttcccggagggggacaaggtgaaagtgatcctgagcaaggaggactttgagacatcactgaaggaggccggggagaggctggtggctgtggacttctcggccacgtggtgtgggccctgcaggaccatcagaccattcttccatgccctgtctgtgaagcatgaggatgtggtgttcctggaggtggacgctgacaactgtgaggaggtggtgagagagtgcgccatcatgtgtgtcccaacctttcagttttataaaaaagaagaaaaggtggatgaactttgcggcgcccttaaggaaaaacttgaagcagtcattgcagaattaaagtaaacatgtattctgaaaacattgcagacagtcaggtgtttatagcttttgagttctcttttattatttacacaaagtgatcaggtataacaaaagtgtatgtccaaatggcactgcttgtacatgataatattaactctacccttttcaaaaaacagtccaagcattaaagtacattgcgactgtgtttctgttagtgggagagtataaaattagaaattcccatggtgaagactgctaagtcccatggtttcctatttttcaatcttgatatgtatttatttttcacttgtctttgaaaatttcacgcatttagtgtttgcagcaagactgaaaatttagataatttttctatagaggtagatgactgaaaggtgaatggaaacttcttttctcatgtcacacatctttggggattctgaaaagatatgtttggaaataaggaatttgaaagattcacatcttagctaacctccttcttgtgccggaagtgctacggaggccttgggaaattcagtgggttttccaagatctgatttgttggtgacggaagtgagatcaaggccgcttccagatttcaagtccagggctctacctactataatctacgctcacaaaatctcagacaagagatcggaacttcaggtttctcggaggttgaagtcctctggatctttgctgcctttatgacatcagtgccctgatggcagagttcctggttcgtctccctggtaattgagttcataatacctagaccttcctctgacttttttacttaaatttgttcttattttcaatattgaacaagccagcctttaacatgactctaccagcttagacatataggcctagactttaatgaattaacctaatcacagtgctaccagagtcttgtttggacaacttagtgagccccagatgtctatgagcccaaagtcccaggtctgaaccatagacagaggcttagtccagagtgggtttttaaaaatgaataaaaccagcttcattaggtataattgatatacaaagaactgcacatatttaatggagggagttggatgagtttggatgtgttgcatatgcccttgattgccatctccaccatcaaagtaattaacaccttcattgcctccag

SEQ ID NO: 729311 - DNA, 408 bp, Homo sapiens; identical to SEQ ID NO: 73218

SEQ ID NO: 729312 - DNA, 439 bp, Homo sapiens
tatctaaattgttacaaatgggacagtatatgtgccattccagatacctaatcacagctcaatcgatgctggtgtctttttcctttttccttctgcagaaaacatgctttacataggatctctgaacttaaagaatgggaagaagaaaaatcatgtttccagcttgggctgctgtttcatctgttggacttgctgatccctgaatggaaaggaatgctatgcacactttttggatacaggaagtgagattcagaggggttaaacagctttcctaaagccacacagcgagagagtcgatctgaactgaagattgtttgacatcaaagctcatttctttccctaaatgtcagcattctttcctgacttattaatttgatttctgtcctcccctcatggaagttaattaaaggaatgcgagaaccttttagaaaatctccag

SEQ ID NO: 729313 - DNA, 1049 bp, Homo sapiens
cttttctgcgggtcttggcacctttcttggccacagatttctgggttacagagcatgtgtgtctgaggcattgcaggcagaaaagggtggccgacgtgacctctagctggactgctgggcaggggagctgtcctagataaaattggaaagcaccttgtccaatgggaggacctaagtgggagagtgagagtcctgctttgagaagctaagatggtggatggtgcagaaacagtgacccagagacaggtggacaaagaattcggggactgatgggaactgagcttgggatccagactgaaactgattccagactgacctctagcacccaggacccagacacagggccatgggaccccagcatttgagacttgtgcagctgttctgccttctaggggccatctccactctgcctcgtatgtcctgtggggctggatgctataagacccagaaagggactgcaaggggagttgtgggctttaaaggctgcagctcgtcttcgtcttaccctgcgcaaatctcctaccttgtttccccacccggagtgtccattgcctcctacagtcgcgtctgccggtcttatctctgcaacaacctcaccaatttggagccttttgtgaaactcaaggccagcactcctaagtctatcacatctgcgtcctgtagctgcccgacctgtgtgggcgagcacatgaaggattgcctcccaaattttgtcaccactaattcttgccccttggctgcttctacgtgttacagttccaccttaaaatttcaggcagggtttctcaataccaccttcctcctcatggggtgtgctcgtgaacataaccagcttttagcagattttcatcatattgggagcatcaaagtgactgaggtcctcaacatcttagagaagtctcagattgttggtgcagcatcctccaggcaagatcctgcttggggtgtcgtcttaggcctcctgtttgccttcagggactgaccatctagctgcacccgacaagcacccagactctttcacataacaaataaaatagcagagttccctt

SEQ ID NO: 729314 - DNA, 928 bp, Homo sapiens
aaacagtgacccagagacaggtggacaaagaattcggggactgatgggaactgagcttgggatccagactgaaactgattccagactgacctctagcacccaggacccagacacagggccatgggaccccagcatttgagacttgtgcagctgttctgccttctaggggccatctccactctgcctcgggctggagctcttttgtgctatgaagcaacagcctcaagattcagagctgttgctttccataactggaagtggcttctgatgaggaacatggtgtgtaagctgcaagagggctgcgaggagacgctagtgttcattgagacagggactgcaaggggagttgtgggctttaaaggctgcagctcgtcttcgtcttaccctgcgcaaatctcctaccttgtttccccacccggagtgtccattgcctcctacagtcgcgtctgccggtcttatctctgcaacaacctcaccaatttggagccttttgtgaaactcaaggccagcactcctaagtctatcacatctgcgtcctgtagctgcccgacctgtgtgggcgagcacatgaaggattgcctcccaaattttgtcaccactaattcttgccccttggctgcttctacgtgttacagttccaccttaaaatttcaggcagggtttctcaataccaccttcctcctcatggggtgtgctcgtgaacataaccagcttttagcagattttcatcatattgggagcatcaaagtgactgaggtcctcaacatcttagagaagtctcagattgttggtgcagcatcctccaggcaagatcctgcttggggtgtcgtcttaggcctcctgtttgccttcagggactgaccatctagctgcacccgacaagcacccagactctttcacataacaaataaaatagcagagttccctt

SEQ ID NO: 729315 - DNA, 457 bp, Homo sapiens; identical to SEQ ID NO: 317712

SEQ ID NO: 729316 - DNA, 518 bp, Homo sapiens
agtggaggttggattcagaggacatggggatcagtgtgggctgtgctggtcaaggagggcttccagggagaggcaactgaggattcactgcaattgttccttgagaagatgaggatcaggtcgggaattggaaacatctgagggctcaattcaacctggcttctaaaacgaacatggtgaacatagatcaactactgaacttcttttaacctctggcatcctatctgtgaattgtggggaggaaacagggtccacccgctgctgcacaagaggggtgtgtgcagaccgtcaccttgtgtctgctgtagcaggagacccctggccatgcgggactgaacccatgattgcagctgatcttactctgtctcttctctgtgtgagtaaagtgttgttccatctagtgcctgtgtgagtcgtgtctttcgtggcgacacctataaaccatggagtgggctgacatcctggttctgctgctcctggtggcgggcattgttgtgctgtttgccgtcctctacaca

SEQ ID NO: 729317 - DNA, 1323 bp, Homo sapiens
gcaactgaggattcactgcaattgttccttgagaagatgaggatcaggtcgggaattggaaacatctgagggctcaattcaacctggcttctaaaacgaacatggtgaacatagatcaactactgaacttcttttaacctctggcatcctatctgtgaattactcagcgtgtactctttgttctgcttaagcttgtgcgtcatgtggcaggcacctggccaaccccactgttatatctgttccaggtggggaggaaacagggtccacccgctgctgcacaagaggggtgtgtgcagaccgtcaccttgtgtctgctgtagcaggagacccctggccatgcgggactgaacccatgattgcagctgatcttactctgtctcttctctgtgtgagtaaagtgttgttccatctagtgcctgtgtgagtcgtgtctttcgtggcgacacctataaaccatggagtgggctgacatcctggttctgctgctcctggtggcgggcattgttgtgctgtttgccgtcctctacacagacttgtccacaaaaatcactatgaaaatttacttctgtgaactagactcacatcaaaatgctgcctgcttccatgaggcttgtagtgacatccatgtacaagttcaaagaccctctgagccaatttccacttctctgcatgtctctggggacctaggggaccaggattactataaaagcagtatcaaccccttcaaaggatacctacccatgactgtctcagtctgcggcactctagatcttgatagaaatcacacgcattctgattttatttcattgcaaaatgccaaggatcttccatgccaaagctgcacttttctctttacccctctttgtggaggaccaggggccttttctctgtgggtgctcagccctgttgtgtctctgagagtccaaatttcctcttataaggacaccagtcagactagattaaggccgaccctaatagcctcagtccacgttaatgacctctttaaagatcctatctccgaatacagtcacattcgaggtcaggggcagggacttgctaagagcaagaggctgacccatgggattggggaggtaacagagaaagcacccccaaaagcaggctgcagagaaatgtttgaccccagagtggccttggatctgctgggatcacccaaggatctattttccagcccaaccttagttctatcctaaagttcagaaaattcttcctgaatactctttctcacctctacatatttacttgtgcattaaacccacccaagatgcatgctcctctttaatcttttaagctactcttcttcat

SEQ ID NO: 729318 - DNA, 1480 bp, Homo sapiens
cagcaaacttcaaactttttaatggaacaaggacacacagacattaatccccagtgtccatcaaagttgcaatgcagccctaacgcctggcatccttgaaagggacgggcatttagtaatgagatatgcacagcagcatagtcagctgtgtggtgcattctcagctgtgcctcagcagccctgatgcagacatccagaaggagcacagccactttatccagagcaatcagccatgactgcctttgcactgtccatgctctcagcccaccacctcctccccctgccattgcagtggctaacactggagacgaagaccaagacaccaccgcctttctccagtacctctcaaatcagcacaggcaaggacaaaggcctcaatccacaactgctgaagatggaccctggccacatgggatggtcagacacgcctgcccagctatctgcaggcgaagaggctcagaagaggtttaggggcctgaaggacatcttgcttccatgtccatatgagcaggctatttctgctccatgagtcaattttgccatataaaatacttaatttcagccattccagggtgctgtaggatgcacagcttcccatcagcccacctgaactccagccatgccattttaataccaggaataaggtcacctgctttcctgccccttaggaggccagagccgtggaagcaaaatggcacttctgtttacctgttatattatttttttgtcatccttatatgcttggaaaatgcaattatatgaaaaaagtttagtaattacagacataacagcagaaagtcctcggaaccaagcttactctcatggccgattctgctccacctgggactctgctgtgctgcgggcatcctgtggtcagaatcgcagaggggccatcagggagggccttcccagaggatggacctcacgtgactgctgcgtgggcaagtggcactggccactctgcctggagagaggagtaaatgcagggctggccaggcgacctgcacactctgctactggccttgtccatctttagcctctaatttgaaaatgaggctcacacagaccaagagtatctttgagggttagtacagaccacagaaatgccctgggcctttcactctctccttttgcaaattcccatgtgtggaaatgccgtttggataatgagggagcctgaaggaggtggacacatgagcagccccgacaggcctggctccatcctctgaaaatggggccccgtgcccggcgtgtggccttactggttcagtcttctttacagtggtaggttttgagtgcccagatgcccagtgcctcctacctggaacagcacaggatctggcagacccctggaagaatcacatgcacacttaaatattcagggagttcccacccagcagagctcgcctctgtggctaccttggtcttgctgctgatatctgccagaaaaggcctggacttggagacaagcctgggattt

SEQ ID NO: 729319 - DNA, 2522 bp, Homo sapiens
aacatgcacccccaacccgtagaggatctgcagttgctggcatctccaggttttcaggagccaccacattcccttcatccagatgctggcaactgcaggagaagccgcttgtagtatgcctgctccagccgcagccttgcatggagccagtgcctatgccggtgcctggagccgtccgccctgctgcggcagttggcgtgcctggctgtgtgcaggggccacactccgcacttgctcactcacacacccttcgcctttctgcatctggcttgccctcggcaggcatgggatctgggctggtagtgcaagctgggcacagcctgccaggctgaatgggtggaatgaacccagtgggcgtgagcaatattcaagtagaggcgctgccggccatgaggtttctagctggtgaagcgacacccagaggatcctgtgacaataggatttctgaaatctgcattggcttgcagactgacagaaaagtcttcaaagggagacaaaaacaggcttttcctactgatgaaatgggacctactgtcgatgactgctacagagttactctagaagaattcagaggaagatgtgaggagttcactctggagccacagtggccggaatcaacccctgggcgtcttctgaagcacatgtctacaccggggaagaaaacctcctccataacactaaatgctgaagtggccatcagcaccagtgatcatcagcaccagtggccatcagcaccagtgatcatcagcaccagtggccatcagcaccatggccatcagcaccagtgggtcatcagtaccatggccatcagcaccagtggcccgcatgggaggggttctcacatggggcttctgcctggctacctgaaagatgaatacgctttcaggaactcagtggtctctatggagcccatctgtgggtctcacatcaagaaacttccagagacagatctgactctgaagactgcagggcactgcaagaactcgatggaggtggaatccattaaactgacaaagccccagtcccggggtcctaatagtcgggactattaggtcatcctgggtactcaggcctctagactctagactgagctgccttggtcactcggggacagttggcagagtattcgtggtcagggaggtgacccgtggtcagcaggatcaggccacccagggacaaagggtgcttctgcgccaggccctggagaaggacagagcggtggggactcggggtcggccgcagataggggagtcaccacctgccggcaatcagccatgactgcctttgcactgtccatgctctcagcccaccacctcctccccctgccattgcagtggctaacactggagacgaagaccaagacaccaccgcctttctccagtacctctcaaatcagcacaggcaaggacaaaggcctcaatccacaactgctgaagatggaccctggccacatgggatggtcagacacgcctgcccagctatctgcaggcgaagaggctcagaagaggtttaggggcctgaaggacatcttgcttccatgtccatatgagcaggctatttctgctccatgagtcaattttgccatataaaatacttaatttcagccattccagggtgctgtaggatgcacagcttcccatcagcccacctgaactccagccatgccattttaataccaggaataaggtcacctgctttcctgccccttaggaggccagagccgtggaagcaaaatggcacttctgtttacctgttatattatttttttgtcatccttatatgcttggaaaatgcaattatatgaaaaaagtttagtaattacagacataacagcagaaagtcctcggaaccaagcttactctcatggccgattctgctccacctgggactctgctgtgctgcgggcatcctgtggtcagaatcgcagaggggccatcagggagggccttcccagaggatggacctcacgtgactgctgcgtgggcaagtggcactggccactctgcctggagagaggagtaaatgcagggctggccaggcgacctgcacactctgctactggccttgtccatctttagcctctaatttgaaaatgaggctcacacagaccaagagtatctttgagggttagtacagaccacagaaatgccctgggcctttcactctctccttttgcaaattcccatgtgtggaaatgccgtttggataatgagggagcctgaaggaggtggacacatgagcagccccgacaggcctggctccatcctctgaaaatggggccccgtgcccggcgtgtggccttactggttcagtcttctttacagtggtaggttttgagtgcccagatgcccagtgcctcctacctggaacagcacaggatctggcagacccctggaagaatcacatgcacacttaaatattcagggagttcccacccagcagagctcgcctctgtggctaccttggtcttgctgctgatatctgccagaaaaggcctggacttggagacaagcctgggattt

SEQ ID NO: 729320 - DNA, 782 bp, Homo sapiens
caacaactgaagccccatgaccaagtgtcctgctttgtgcggaagagtgcagggaggccgcatgaccccggtgttcgagtgccgcagcccaaatgaggaccacatctaccaggaggagatgctggagatggctcggaagggggttgctgcctgcggtgcccacagcctattcctgcctgcctggcaagcccaagagccagaagcacttccatgacgatatctttggtgctgtatttccctacgaggcaaagaaggacagggcggcggtgcagcccagcagcctggagatgtcagcgctctgagggcccacaggaggggttaaagctgccagcacagaacttaacgatggagccagctctgcattatccgaggtcacagggcctggggagatggaggaaagtgatatcccccagcctcacgtcttatttctcacctcgttccccatcaagccctttacttgacctcctaccaagtagcaccctggattgatcggagcctcctctctcaagctggggcctccctggtcccttggagacgaaatcttcaatgccaggcctggcaagtgggtgaaagatggaacccgctgctgagtgcaccacttcaagtgaccaccaggaagtgccgtcacaccactgtgtatttaactgccatgggtacaattatttatgcctctgtttaaaaaacgaacaccctagtctgttcctaatggccccttgggtcttctctgtatgattccctgatggagatatttacatgagttgaattttactttaaaaacactg

SEQ ID NO: 729321 - DNA, 684 bp, Homo sapiens
ctggatctcactggatccttcactgctaaaggacccccaccgcggattctaagatccttagcacccacctggaggactgggggttttaggtgtccaagaagaaagctcagacctgccgaccgcaggtaccttacctgggatttactatccgacaggggtccgaacgcagctcgggatcagaaaaaaagcaggggtccgaacgcagcccgggatcagaaagaaagcaggtcgtttgcaatctaccggagcctaagggcagaaggcaggaccgtgggaacaatatgccagggggatttccactttctgccatatatgtagtcacatcacccactctgccttggaatattattaaggaccatctaacacgagggtgtatacgtcctgcaatactacgagtaatatcaacttcttggcctctgaatatgaggaagaatatcacagggatattaataacaatttcacaggctgggtgaacacagccggcaatgctgaaattattatcaacctctccccatcttcccctcctggctcttaggacccccatcgcagggggctgaggcacccccgcgaggcggggactgagtgccagcccctcttccctagccccttcgtcagggctgagagaattttgagcgctagccgtctctcgatcgctggctaataaagaactcctgaattagtaaa

SEQ ID NO: 729322 - DNA, 662 bp, Homo sapiens
ctggatctcactggatccttcactgctaaaggacccccaccgcggattctaagatccttagcacccacctggaggactgggggttttaggtgtccaagaagaaagctcagacctgccgaccgcaggtaccttacctgggatttactatccgacaggggtccgaacgcagctcgggatcagaaaaaaagcaggggtccgaacgcagcccgggatcagaaagaaagcaggtcgtttgcaatctaccggagcctaagggcagaaggcaggaccgtgggaacaatatgccagggggatttccactttctgccatatatgtagtcacatcacccactctgccttggaatattattaaggaccatctaacacgagggtgtatacgtcctgcaatactacgagtaatatcaacttcttggcctctgaatatgaggaagaatatcacagggctgggtgaacacagccggcaatgctgaaattattatcaacctctccccatcttcccctcctggctcttaggacccccatcgcagggggctgaggcacccccgcgaggcggggactgagtgccagcccctcttccctagccccttcgtcagggctgagagaattttgagcgctagccgtctctcgatcgctggctaataaagaactcctgaattagtaaa

SEQ ID NO: 729323 - DNA, 763 bp, Homo sapiens
ctggatctcactggatccttcactgctaaaggacccccaccgcggattctaagatccttagcacccacctggaggactgggggttttaggtgtccaagaagaaagctcagacctgccgaccgcaggtaccttacctgggatttactatccgacaggggtccgaacgcagctcgggatcagaaaaaaagcaggggtccgaacgcagcccgggatcagaaagaaagcaggtcgtttgcaatctaccggagcctaagggcagaaggcaggaccgtgggaacaatatgccagggggatttccactttctgccatatatgtagtcacatcacccactctgccttggaatattattaaggaccatctaacacgagggtgtatacgtcctgcaatactacgagtaatatcaacttcttggcctctgaatatgaggaagaatatcacagggtgggtgtacacctcgtgctctattatgcggagtcatatctgtctattatggggagtaatatcattctctccctttcaggatattaataacaatttcacaggctgggtgaacacagccggcaatgctgaaattattatcaacctctccccatcttcccctcctggctcttaggacccccatcgcagggggctgaggcacccccgcgaggcggggactgagtgccagcccctcttccctagccccttcgtcagggctgagagaattttgagcgctagccgtctctcgatcgctggctaataaagaactcctgaattagtaaa

SEQ ID NO: 729324 - DNA, 2184 bp, Homo sapiens
agcgtggggcgtctccgagcggcggggccaagggagggcacaacagctgctacctgaacagtttctgacccaacagttacccagcgccggactcgctgcgccccggcggctctagggacccccggcgccaacacttagctccgcgcccgagagaatgttggaccgacgacacaagacctcagacttgtgttattctagcagctgaacacaccccaggctcttctgaccggcagtggctctggaagcagtctggtgtatagagttatggattcactaccagattctactgtatgctcttgacaactatgaccacaatggtccacccacaaatgaattatcaggagtgaacccagaggcacgtatgaatgaaagtcctgatccgactgacctggcgggagtcatcattgagctcggccccaatgacagtccacagacaagtgaatttaaaggagcaaccgaggaggcacctgcgaaagaaagcccacacacaagtgaatttaaaggagcagcccgggtgtcacctatcagtgaaagtgtgttagcacgactttccaagtttgaagttgaagatgctgaaaatgttgcttcatatgacagcaagattaagaaaattgtgcattcaattgtatcatcctttgcatttggactatttggagttttcctggtcttactggatgtcactctcatccttgccgacctaattttcactgacagcaaactttatattcctttggagtatcgttctatttctctagctattgccttattttttctcatggatgttcttcttcgagtatttgtagaaaggagacagcagtatttttctgacttatttaacattttagatactgccattattgtgattcttctgctggttgatgtcgtttacattttttttgacattaagttgcttaggaatattcccagatggacacatttacttcgacttctacgacttattattctgttaagaatttttcatctgtttcatcaaaaaagacaacttgaaaagctgataagaaggcgggtttcagaaaacaaaaggcgatacacaagggatggatttgacctagacctcacttacgttacagaacgtattattgctatgtcatttccatcttctggaaggcagtctttctatagaaatccaatcaaggaagttgtgcggtttctagataagaaacaccgaaaccactatcgagtctacaatctatgcagtgaaagagcttacgatcctaagcacttccataatagggtcgttagaatcatgattgatgatcataatgtccccactctacatcagatggtggttttcaccaaggaagtaaatgagtggatggctcaagatcttgaaaacatcgtagcgattcactgtaaaggaggcacagatagaacaggaactatggtttgtgccttccttattgcctctgaaatatgttcaactgcaaaggaaagcctgtattattttggagaaaggcgaacagataaaacccacagcgaaaaatttcagggagtagaaactccttctcagaagagatatgttgcatattttgcacaagtgaaacatctctacaactggaatctccctccaagacggatactctttataaaacacttcattatttattcgattcctcgttatgtacgtgatctaaaaatccaaatagaaatggagaaaaaggttgtcttttccactatttcattaggaaaatgttcggtacttgataacattacaacagacaaaatattaattgatgtattcgacggtccacctctgtatgatgatgtgaaagtgcagtttttctcttcgaatcttcctacatactatgacaattgctcattttacttctggttgcacacatcttttattgaaaataacaggctttatctaccaaaaaatgaattggataatctacataaacaaaaagcacggagaatttatccatcagattttgccgtggagatactttttggcgagaaaatgacttccagtgatgttgtagctggatccgattaagtatagctcccccttccccttctgggaaagaattatgttctttccaaccctgccacatgttcatatatcctaaatctatcctaaatgttccttgaagtatttatttatgtttatatatgtttatatatgttcttcataaatctattacatatatatagataaaatgt

SEQ ID NO: 729325 - DNA, 207 bp, Homo sapiens
  misc_feature (175)..(175): n is a, c, g, or t
gttatgtacgtgatctaaaaatccaaatagaaatggagaaaaaggttgtcttttccactatttcattaggaaaatgttcggtacttgataacattacaacagacaaaatattaattgatgtattcgacggtccacctctgtatgatgatgtgaaagtgcagtttttctcttcgantcttcctacataacgtaacgggagatcctcta

SEQ ID NO: 729326 - DNA, 753 bp, Homo sapiens
agcgtggggcgtctccgagcggcggggccaagggagggcacaacagctgctacctgaacagtttctgacccaacagttacccagcgccggactcgctgcgccccggcggctctagggacccccggcgccaacacttagctccgcgcccgagagaatgttggaccgacgacacaagacctcagacttgtgttattctagcagctgaacacaccccaggctcttctgaccggcagtggctctggaagcagtctggtgtatagagttatggattcactaccagattctactgtatgctcttgacaactatgaccacaatggtccacccacaaatgaattatcaggagtgaacccagaggcacgtatgaatgaaagtcctgatccgactgacctggcgggagtcatcattgagctcggccccaatgacagtccacagacaagtgaatttaaaggagcaaccgaggaggcacctgcgaaagaaagtgtgttagcacgactttccaagtttgaagttgaagatgctgaaaatgttgcttcatatgacagcaagattaagaaaattgtgcattcaattgtatcatcctttgcatttggactatttggagttttcctggtcttactggatgtcactctcatccttgccgacctaattttcactgacagcaaactttatattcctttggagtatcgttctatttctctagctattgccttattttttctcatggatgttcttcttcgagtatttgtagaaag

SEQ ID NO: 729327 - DNA, 1273 bp, Homo sapiens; identical to SEQ ID NO: 76781

SEQ ID NO: 729328 - DNA, 440 bp, Homo sapiens; identical to SEQ ID NO: 76782

SEQ ID NO: 729329 - DNA, 536 bp, Homo sapiens
atagcacactcaacgcccagcatgccgaggaggaggagacgccgagggtctccggtgctggcggccggggcggacctgctctcgcaccgtccgagcggagctttcgttttcagtgagccaggtggagcgcagtctacgggagggccactacgctcagcgcctgagtcgcacggcgccggtctacctcgctgcggttattgagtacctgacggccaaggtcctggagctggcgggcaacgaggcccagaacagcggagagcggaacatcactcccctgctgctggacatggtggttcacaacgacaggctactgagcacccttttcaacacgaccaccatctctcaagtggcccctggcgaggactagcttctgacacccggcccctgggacctgacaggtccactcgtccacccacccggccccaaatcccccggcctgaacccccggccttaaacaccctccccccacaacccaggccccaaagtcttgggccttcattaattctgtcaataaaatgtttcaaggaagccaaaaa

SEQ ID NO: 729330 - DNA, 781 bp, Homo sapiens
  misc_feature (24)..(24): n is a, c, g, or t
  misc_feature (26)..(26): n is a, c, g, or t
cggccgaggcctcagctccactangngacttctgcacctcatctctgggatggtttcagtgggtcctagattgctttctgtgctccctgggacagttggtggcactctgtgagactactctcaggtacccttacaagctactcttaattttccccgctgttctgcttgttggacatggcatcatgctgcaatgttaacagtctttcaaagctaagcgcggaggatgtgattccatccctggcagttcttagattccctcatgactataggacagagaggagactgagaaacacaagaagcaccagagtggttgaaaggagctgaaggttcagacagcaacctggacactaagggtccaaagccaagcccaaggtcaagtagctggacagagaaacagctgcaagcacagacttggatcctgacctgattttctgcagaagcaagtccctgtttagccttctactgcctccttttagaatgaagccagaccagtcctttccatcatgggctcctgtggaaaatgaccccagctcagctcagtagttgatgggacatctgattcaggttggacccagcccagacatctgattcaaacaatattcttctccaggaattttgtaaccagcactggtagagggagggaagtgctccccagtggggagagctgcagaatgtgagacttggaaaccaaaggccgccatgttttctgtctcatgatggaatccaatcttctttggcggggaaaataaatgaagccaacaccagtaggtataagagagat

SEQ ID NO: 729331 - DNA, 503 bp, Homo sapiens
  misc_feature (24)..(24): n is a, c, g, or t
  misc_feature (26)..(26): n is a, c, g, or t
  misc_feature (318)..(321): n is a, c, g, or t
  misc_feature (358)..(358): n is a, c, g, or t
  misc_feature (363)..(363): n is a, c, g, or t
cggccgaggcctcagctccactangngacttctgcacctcatctctgggatggtttcagtgggtcctagattgctttctgtgctccctgggacagttggtggcactctgtgagactactctcagcagaccagtcctttccatcatgggctcctgtggaaaatgaccccagctcagctcagtagttgatgggacatctgattcaggttggacccagcccagacatctgattcaaacaatattcttctccaggaattttgtaaccagcactggtagagggagggaagtgctcccccccccccaaaaaaaaaaaggggggnnnnttttttttggggggggggggggggggggaaaaggganaaggnctttgcccaagaagtggggagagctgcagaatgtgagacttggaaaccaaaggccgccatgttttctgtctcatgatggaatccaatcttctttggcggggaaaataaatgaagccaacaccagtaggtataagagagat

SEQ ID NO: 729332 - DNA, 1048 bp, Homo sapiens
  misc_feature (24)..(24): n is a, c, g, or t
  misc_feature (26)..(26): n is a, c, g, or t
cggccgaggcctcagctccactangngacttctgcacctcatctctgggatggtttcagtgggtcctagattgctttctgtgctccctgggacagttggtggcactctgtgagactactctcaggtacccttacaagctactcttaattttccccgctgttctgcttgttggacatggcatcatgctgcaatgttaacagtctttcaaagctaagcgcggaggatgtgattccatccctggcagttcttagattccctttggattacagaagtgatttttaaagacactattaatagaggtattttatcttggtacaaaattatttaaaaaatagacttaaacagagacttccacttatgggtataatagactaagaccctgttggatgatttcttcaccctgcatacaacaactgtgagactgcacgtaatcatatgatagtactggagactgaagagaagatgacaggatctaatgggggagtccatgcttgcttgaaggaggagagatatggatctggacaacatgactataggacagagaggagactgagaaacacaagaagcaccagagtggttgaaaggagctgaaggttcagacagcaacctggacactaagggtccaaagccaagcccaaggtcaagtagctggacagagaaacagctgcaagcacagacttggatcctgacctgattttctgcagaagcaagtccctgtttagccttctactgcctccttttagaatgaagccagaccagtcctttccatcatgggctcctgtggaaaatgaccccagctcagctcagtagttgatgggacatctgattcaggttggacccagcccagacatctgattcaaacaatattcttctccaggaattttgtaaccagcactggtagagggagggaagtgctccccagtggggagagctgcagaatgtgagacttggaaaccaaaggccgccatgttttctgtctcatgatggaatccaatcttctttggcggggaaaataaatgaagccaacaccagtaggtataagagagat

SEQ ID NO: 729333 - DNA, 283 bp, Homo sapiens; identical to SEQ ID NO: 409522

SEQ ID NO: 729334 - DNA, 4397 bp, Homo sapiens
ggaggccagagcgaggagccagttgtagtgctagctccgcctttgtcgcagctgccactactgccaccgggaaaacatttttcttaaaaaatgtgttcttatggccgggctcttgctggatcacgagtgaagctgcagaccttcgcgggagtgaagctgcagaccttcgcggtgagtgttacagctcttaaggtggtgcgtctggagtcgtttgtttctgccagtgccttcatggtctcactggcttcagaagtgaagctgcagaccttcgtgactcatgagcccagctggcttcacccagtggatcccgcaacagggccacaggtggagctgcctgccagttccgtgccatgcgcctgcactcctcagcccttgggtggtcaatgggactgggcgccctggagcagcgggcggggctcctcaggaaggctggggctgggcaggagcccacggctggggcgggagcaagctcaggcatggtgggctgcgggtccccagccctgccccacagggaggcagctaaggccctcggagaagttgagcacagcagctgctggtccaggtgataagcccctcactgccccggccagcggggccagcttgctgctccgagtgcgggccggcgcccacgcccacccggaactggcattggcccgcaattgctgcgcgcagccccgattcccgcccacacctctccctccacacctccccgcaagctgagggagccagctctggccttggccagcccagaaaggggctcccacagtgcagtggcgggctgaagggctcctcaagcatggccagagtgggcgtcaaggccgaggaggtgccgagagtgagcgagggctgtgagggctgccagcacgctgtcacctctcattattacatctatttaactttgtgttgcttttgaaatccttgtgctgttaagttacagggctttgactccattgattcctgggtctgaaaaagacaccaaaccctgctaacttttaaacattgacagcagttaaagcctcatcttcagacccaggagaagatgacagtcaaaacaaagtgtgtttataataagacacagggacagaaattaaaactcttcaactccccaatcccagggactactgcagaagagagcttactgtttgggaaattaagtctcctgtctcaaagtataaagggtttggccatttatttttacatctttgagttatcattttggctaaatgaatgacttatttattttacaatgacctgtgatcctatttcgtgatatcctgtgttttaaacttttcatatttgacaaactttctaaaatcaaatactaaattcagtccttttgacctcactaatgttttgatattaggtcccctgaagtccaaaacagacatatttggcttattttctacagaaaaaaattatacaggaagcattgttaaatatgaaatggtgtttaacctactttgggttatatttacataaatgtgttattagtgtgtgtcctaaaatcatagaatattcctgtgattctgatatgtctcaatatatgttgtcagtagtaattacgattattatgtgtaaaattgtcatatgccacaaaagtaaccaaatttccttgtcagttgtgtctctaactatggctgctctacaacttttgtcatctacaattgttgattactttgatcctttcatagtgtggtttataatcagctatagaactttgtggaattcacatttagagaccgtgtaattgaaatggagagaaaatcttccaggactctcatggagagctgatgttttcatgaggattcctgatccaatattgaccagaagttaactgcatggactgaactaacagacaattgaaataatcttttatgactctttgtttaaaacatttgctgattttgtttttcagagtcaagaaaccttttttatcttttaagctatttacagcttttaacatttgagtaaagtatatatatatatatatatatatatatatatatatatatatatttatattttaattgaggcagaatagctgccatttcacatgcttactttattttatgtaacgtgcaggtttactgagcatgagaatagtgcttaagtaactttttcttatactaccttctttgcacatttaaaactgttgggagcaagccccccaaagtctggccataaactgaccccaaaactggccataaataaaatctctgcagcaatgtaacatgtccataatggccataacacccatgctggaaggttgtgggtttacgggaatgagggtaaggaacacctggcccacccaaggtggaaaactgcttaaaggcatttttaagccacaaacaaaagctgagcaatctgtgtcttaagggcttgttcctgctgcaattaatttggcccatcccttcttttcccttaaaggatacttttagttaatttaatatctatagaaataatgctaatgactggtttgctgttaataaatatgtgggtaaatctctgttcggggctctcagctctgaaggctgtgagacccctgatttcccacttcacacctctgtatttctgtgtgtatgtccttaattcctctagctccattgggttagagtctccccgagcgagctggtctcggcaagtggcgtccattcgtggaggctcgaatccaggtcaaagggttgctggagcgacggttggaatggaaaactagctggaagacacccaagtactcttaaagcaatccccgtgttctggaggctgggaagtccaaggtcaagatgctgacaaatgatgagagctttcttgctgcatcctcacatggaagaaggtggaagggcaagagagaagaaactaatgctaggaaatgcctcttttaaaagggacttagtcccattaacaaagaagcaggtcttatggcctaatcatctcataaaagcaccacctcttaatactatcacattggcaataccttgattttggaggggacacattcaaaccatagcagagaccactaagtatagggaagactaaacccgagaaccaagtggccagaagcctgcactagctcagctgattctgctattagacttagataaagtatgagccttttgctactgaatcaacagaaaggctgcccgaaagcagtgagtctcagatgcctcccatgaagttcacacatcacaccagggacttctactcatacgtgaaaagctagagaatcatgtttaggcttttgacttctggttttagactttctttagcttctgttgttagacaacattgtgcaagcttggtttttataagtttgcatggattaaactgaacttaatgaaattgtccctccccccaaattctcagcacaatttttaggcccacaaggagtcaagcacctcaaggagatcttcagtttgaacttggtgtagacacagggatactgatgaatcaatattcaaattagctgttacctacttaagaaagagaggagaccttggggatttcgaggaagggttcataagggagattttagctgagaaataccatttgcacagtcaatcacttctgaccaagttatcagaaaaaggagaaaagaatgtctccccactaaatgttctagggtggtgagaaatctagggtggttatctaaatcaacaatatttagatattccaatatctaaatattgttggaaatactctcctgaagtgttcattgaactctaagagagacagcttgtgtatcagtggcagggtttaaggttcattttttattcccatattaatcctttaatatttagacaaatttccttctgagtttaaggataaaatgggatgggttctgcctgggcctggccctcatggggacatcaaagggcaatgttgcaaaaaaaaaaaaaaaaaaaaaaaaaaatcagaccatcagattgcatggggggaaccacccccataattaaattacctccacccagtcccacccttgacacctggagattatggggattgcaattcaaggtgagatttgggtggagacatagagccaaagtatattattcaaataagaaatcaaaagagaaattggaaagttcattgagctgaaaatgaaaacacgatatatcagaatcagggagttgcagctaatgtatgcttggaggcaaatttaagcactaagatcctatattataacaaaaaagaaaggtctcaaatcagtgacctgagttttcaccttcagaaactggaaagagaagagcaaattaaacacaatgtaagcagataaagaaaataataaaaagaacagaaatcaatgaaagaaaaaaagggaaaattataagaaaaatccaagaaagtaaatgctaatcattttaaacaatcaattaaattgttagacttctagtcagctgatc

SEQ ID NO: 729335 - DNA, 1166 bp, Homo sapiens
ccacgcgtccgcggacgcgtgggcggacgggtgggctgttgttagacaacattgtgcaagcttggtttttataagtttgcatggattaaactgaacttaatgaaattgtccctccccccaaattctcagcacaatttttaggcccacaaggagtcaagcacctcaaggagatcttcagtttgaacttggtgtagacacagggatactgatgaatcaatattcaaattagctgttacctacttaagaaagagaggagaccttggggatttcgaggaagggttcataagggagattttagctgagaaataccatttgcacagtcaatcacttctgaccaagttatcagaaaaaggagaaaagaatgtctccccactaaatgttctagggtggtgagaaatctagggtggttatctaaatcaacaatatttagatattccaatatctaaatattgttggaaatactctcctgaagtgttcattgaactctaagagagacagcttgtgtatcagtggcagggtttaaggttcattttttattcccatattaatcctttaatatttagacaaatttccttctgagtttaaggataaaatgggatgggttctgcctgggcctggccctcatggggacatcaaagggcaatgttgcaaaaaaaaaaaaaaaaaaaaaaaaaaatcagaccatcagattgcatggggggaaccacccccataattaaattacctccacccagtcccacccttgacacctggagattatggggattgcaattcaaggtgagatttgggtggagacatagagccaaagtatattattcaaataagaaatcaaaagagaaattggaaagttcattgagctgaaaatgaaaacacgatatatcagaatcagggagttgcagctaatgtatgcttggaggcaaatttaagcactaagatcctatattataacaaaaaagaaaggtctcaaatcagtgacctgagttttcaccttcagaaactggaaagagaagagcaaattaaacacaatgtaagcagataaagaaaataataaaaagaacagaaatcaatgaaagaaaaaaagggaaaattataagaaaaatccaagaaagtaaatgctaatcattttaaacaatcaattaaattgttagacttctagtcagctgatc

SEQ ID NO: 729336 - DNA, 676 bp, Homo sapiens
aggggctaacatggagaatcataattctgccttagctgctgaagctagtgaagaaagtttattttcagcctctaaaaatttaaatatgcctctaacaagggaatcttctgtcagacagataattgcaaattcatctgtccccattagaagtggtttccctcctccttcaccttcaacctcagttggaccatcagaacaaattgcaacagatcaacatgctattttaaatcagttgaccactattcatatgcactctcatagtacctacatgcaagcaaggggccacattgtgaattttattacaaccacaacttctcaataccacatcatatctcccttacaaaatggttattttgggctgacagtggaaccatctgctgttcccacacgatatcctctggtatcagtcaatgaggctccatatcgtaacatgctaccagcaggcaacccgtggttgcaaatgcctacgatcgctgatagatcagctgcccctcattccaggctagctcttcaaccatcaccactggacaaatatcaccctaattacaactgatctgccattaaaagaggaccagattatgaatgacaacagagactaacatttacattgacaaaaaaccctaaaaatttctgcaattatcttattgaacaataaaattgcatgtttacttctaaa

SEQ ID NO: 729337 - DNA, 1109 bp, Homo sapiens
tgccaggcacagggttaccatggtgacagaggctggctgggaggggctggggcgccacgaacccagcctgctcctcaaccctctctcggccctccaggcatcacagtgcaccgctgcccttctgcggtgggcaggggtctcggaggaccagagaagctggggccgggagcctgcacctgagacgtcctgggagctggcctgcccgccacacgccccactcttcccaggccacgtggaagacacttgaagtgggctggtggaatgtcgccctgcctcggctcctttcccgtcaacaggaccctctcccttctcccgggtgccggcataggggtcaaaagccccccaggattctgaatcacagctgcacactctgggggcactgccatgtggctttctaggaagaaaaagcacctgcctgattcccaagtccctcagccccaagggaccacagcttcggaaagggatgtggggtgggcacagggcgggcaggggtccacaagagagctgcagggggttccgggacagcactgggctgggaagttgggggacttgaggctaagctgctgtgtgaccctggggttgtcaactcccttctctgggcctcagtttccccccctctctaaagtggaaggagacattgcccgatgtctaatgctaaatctgcaggtgacttgactcccagcttgggaagggaccctctccctgccctagaggggcttcagtccctctctactccagctttcttgacccccacacctgtttctagccccagaccccccagaccccacaccctctcttggcttccttcctccccccgccagccccccggccctgcacaccccagcagagtccctgggcagcacagtaaagacgactggtttcggtatcagtttgtaaactttaaggaaaatgtgtctctgttttcctgtccgttattgtcggatgttggtttgttcacagtcgggtggtggtcaggtgtgtgtgtgcgtgcgtgcgtgcgggtctgcatgtgcgtcctctcctgggccttggcccccgagtctgctccccgccctggccgcctggacccttcccccaaaaggcccccagccctctggctccgacctcac

SEQ ID NO: 729338 - DNA, 2035 bp, Homo sapiens; identical to SEQ ID NO: 728366

SEQ ID NO: 729339 - DNA, 634 bp, Homo sapiens
gacgaaaaccatgaagtgggaagcgaggaagaggaaataccattcaggtgtttcatatgtcgccaggccttccaaaacccagtcgtcaccaagtgcaggcattatttctgcgagagctgcgcgctggagcacttccgggccaccccgcgctgctacatctgtgaccagccaaccggcggcatctttaaccccgccaaagaactgatggcgaaactgcaaaagcttcaggctgcagaaggaaaaaagagataagaaagactcaagtctgtatgtacactggggagaagcagcctgttgagtaagatgagagagatgacagtcttcctgcaatcccatgcctgagtatgtaaccaaaagaattgaaatccggatctcaaagaggtatgtgcactcccatgttcactgcagaattatttgcaaaagccaagaggtgtaaacaacccaagtgtccatggatggatgaatggacaaacaaaatgcgatacacacacacaatggaatgctattaagccttaacgggaaggaaatccttttaaagatttaaactgatccttttaaggatcacatgctacaactagaatgaaccttgaagacgacactgctaagtgaaataaactagtcacaaaatgaaaaa

SEQ ID NO: 729340 - DNA, 335 bp, Homo sapiens
gaaaaaagagataagaaagactcaagtctgtatgtacactggggagaagcagcctgttgagtaagatgagagagatgacagtcttcctgcaatcccatgttcactgcagaattatttgcaaaagccaagaggtgtaaacaacccaagtgtccatggatggatgaatggacaaacaaaatgcgatacacacacacaatggaatgctattaagccttaacgggaaggaaatccttttaaagatttaaactgatccttttaaggatcacatgctacaactagaatgaaccttgaagacgacactgctaagtgaaataaactagtcacaaaatgaaaaa

SEQ ID NO: 729341 - DNA, 1401 bp, Homo sapiens
agcgggtgggtgggcgcgcggggctgtaggatccacccgcctcgggatccacggagctgggtccccgccgcgccccgcggaccccacggcccttccgctccgctcggcctccaccaccctggcctcgagctgcagccgttccaaggacaacggccatccctgtggctgggccgccggctacgcaatgctgtctctcttgctgatcctctcaggcctgggccggctgacctccgcgggcccacgccacttattccatcaaaattgaggggaaaccatacacttcctgcttgaaaaacagtcatttttacacccacatttcctggtgtatttatacaacaaatcaggaacattgtatgcagattcttcattttcaaagggtcattgcttttaccaaggatatgctgcagacattccaaaatcagttgtggcactacgcacctgttctggactcagaggattactgcagttagataatatcagttatggtattgaaccattggaatcttcacctacatataagcatgtagtttatcgaattaaaaatgatgctattggtcattcctcctttcaagaaaattatcctgtggctcaatatatagatcagtcctacaggattcttgtcaaatcagacataaattcaggtgccatgctatcgaaaagaactctgaaaatacaaatcattatggataaagccatgtatgcttatatgggctccacggtggcagttgcagttgagaaagttttccaaatctttggtcttatcaacactatgttttcccagcttaatatgacagttatgctgtcttccttggagatctggtcagatcacaataagatttcaacaagtggtcatgctgatgaaatactacagcgatttttgccttggaaagaaaaatttttgtttcaaaggtctcatgatatgacatacttattaatttataggaaccattctacttatgtgggagcaacatatcacggaatggcatgcgatccaaagtttgcaacaggaattgctctgtatccaaagaaaatcactgcagaggccttttcagttgttatggcacagttgcttggaattaatctgggattgacatatgatgatatctacaattgttactgtccaggaactacatgcataatgaatcctgatgcgatacgatcccatggtcttaaatggaataaaatgaagagattttggagcaaagtgggaacagtaagcagcagatctatctcagaagacagcagtagtaacagcagccagtcacagagttaaagtaaccaagtgataaaatcaaagccatcggatgaagaaaggatattaccaagaaactcacgattaacttaaaactttcaacttcacagaaaaaaataaatcatatgactaaaagcataaaaaaaaaa

SEQ ID NO: 729342 - DNA, 446 bp, Homo sapiens; identical to SEQ ID NO: 636679

SEQ ID NO: 729343 - DNA, 582 bp, Homo sapiens
cgccggacaccgtcgccaagtgcggcgggcggagctagagccgtagccaatcgaggaacggcagcctacaagcctcgtgttgattggctactgcagacgaggagggcggtgctagtaggagggcacaggcccagggtgtcctcgcaacgggcgtcccggggagctgctgaagtcctccccgctgcagaggaccgagaggcagggcccgggagagaacagcccggtcggagggggtgggccgtcagccgccccggaaagctgcgtttcccggtgattaagtgtagcacccgcccccggtaggtcctgagaggggcgagattagttgggtacttaccatgtgggcctggcacttgcccacatcactttgtgtcttcccaccggccctgcgagggtgggggttgccgtcctcagtttccaggcgggggaaacgggctggaagcgtcactcagctaatagtagtggacctgggactggaactcagatttgctaaggaaccaggcaggttctttcctgttttctgcacgggagcattttaaccagcaattaaagaaaccttatttctaggtaatttttaaaagaaaa

SEQ ID NO: 729344 - DNA, 748 bp, Homo sapiens
agcgattaagtcactcgcctaaggagaatgagtcaacgtcaagagtcatagttgacccggcctaaagactccagaccatcagtccagggcttagtcagcggggcccggagtggcttccctggctggcatctggacttaggctatttccgtgcacgtaaaagcggaatattggaacggttgcacagaacttccaaataatttttaccgccacgcaagatttagccctgaggtcttaatctcaggatttgggacagtaaaagctgtcgtccctccccctcgtccagccggtggcaagcgggtactgcgggcggttccgtccgtcccctttcgcagaaatggcaacgaatgaccaccagcattagctgagccaggggacgtgggagggttgattgcctaaacgactctgcatcgccgcctctttttgaaactaagagaaaatggtgggagatcaaaagaaaactaaataaacacacaggcaacttgtcctgggacctcaactaagcaaatgaagccttattgtgtgtgctgagcctgcagttcccaaccttccggggaagatgggaggacagggcgacaaagggcacagtaggcttgcctggcagtaagtgtgaccgcagctatccaggcggaagagcagaggactgaaaccaccctccagcaagcgagtgtccgccgcgttgagaaccgcgcaccctacccatcggccacgtgaccagtcctttttaaaaaaaatttctttaccttaaaa

SEQ ID NO: 729345 - DNA, 2556 bp, Homo sapiens
gagcgaagcgcagcatgctgggtcgagtgggtggaatagtccagtgggtgggaagcaagcacgtccttcttcacaagatggcagaagaaagaagtgccgagcaaagggggaaaaagccccttataaaaccatcagattttgtgagaactcactcactatcaggagaacatgagggtaactgctcccatgattcagttacctcctaccgggaccctcccatgacatgtggggattgtgggaactacaagacgagatttgggtggggacacagcaaaaccacatcagaaaataaatttataataggtcggcggtacagtcagcaggtggcaaagtgggacagacttgtgtcctttccttcagggcggcaagttcccccagaccccgggtggtcagcaggtgatgggtcctgccaaaactggttccttcccttcaaggcagcaagtttccttctggcccagggtgtgcctagaaatgtcatttgggagctagggcctggaaagggggccttaccactgtgccctctcctacggtggctgagctagtattctagatgcaagacaaagtcctctttattctcccctctcttcgcctcccctccccaaaaagaaggagtctctttcagagctgtgttaaatttggtgttcctgttagggggatgattggtgcaggattctattatgccatcttgttttttcccccagtctttggtcttttcatgttttcttttttgtacttgctttagaataaattgactatttatattcattgcctaattttctattgacttgtatatttttcttgtgaaagaactagatagagatagtggttgtaccatattgtgaatgactaattgtaaatgtcactttattgttcactttaaatgattacttttacattgtgtaaatttcaactcaattttaaaaatttaaaaatggaacaagggagaggatttagaaggttctaaatgctaaaagaagttaatgatagaattcaggtgaggtcataaaagatagtactgcttctgcctagctcactcaagaacccagcccccatagtgtgaggaggcctaggacagttacagaagccatgtgtaggtgttctggctccagcaaaagtcttatctgacaacatcaactacatgttagtggcctttccttgaaattgctggagcttgtgcatcatcaaaataatggcataaaccaaggaagaagaaaacaaaattgaggaaatgggatccaacacaaaagagagacaacaggattaattgagtgttggtgaaaagccacagcctgtaaataatgcagttcgaactgaaatagaccaggaggctcaaggagagacttcttcaagaagataaaattgatagaatgcctaaggagtttgagtgcattgagaatagattcatatcagttctggagaactgggtggatacattaatgttaagtacatagaaaagttaaaaatgaaaaaaattctcaattctagggaaaataatcatagtaaactacatgttttagttaccaatagtgtttacgtagtcaatataaacaatgggcattgatataaataatgtatgttgatctgctataacaaggtaaaatgctattggggaaacaagataacctgtgtgtgtgtgtgtgtatgtttgttgaaattattgcttttatatggaaaagatttaaattattagcttctgcaataaataatatagataataatgcctataactaaagttagtaacagtataagactataacaatgttatttaggaatttggggcaaataccaaaaaccagcaaaaagagttgaaagcaattcagggagtgagaaatttgaagtgtggggggatctaattttttcatatctaaccttgtagaagttttaaatgatgcacatgtgtaactctgctaaaaatagccccctaaattataaataaaaggaaatcatgggataagacagaccaagaggtgtaatattaggagttctaggaggttaaaaaaaaaagaaaatgtgagagaaaatagtatgattatattagaagaaacctacatctgcaacttgaagagtgccccagtctctctaatccaagctttatttaggatggatgaggaaaaaaaggtaataggcatattcctataaaattttcagactccaaagataatgataaaatcttacagggtccagatagaaaaaaaacgttagttggaaaggacaaataatcagacatacattacatttcctgtgtgcacttcttgagactggaatgtggtggtttaatggtagtagaccagaagattacacccatgaatcttaggctaggctaagctaagctatcagttacctcttagggagaaagatgtttgcagatgtgtgagaattcagagattagagaagtcttgagaaaatataccagtcaacaaaagggcttgaacagtgactctaggatatgagaagataatgaagggaaatagtggtaagcaataatcttggcagtatacacgattttctttttttttttttcattatactttaagttctagggtacatgtgcacaac

SEQ ID NO: 729346 - DNA, 564 bp, Homo sapiens
gctaaggtcctgcacataaccacaaccacccccactgctcggctctacttcttccacaacatgaattctggcatctttccatgtttctataattttctttccagttagcgttgtcaccctggtgcattgcttcctgagattattccgggagaatgctttaatttcctggttaagggagtacattacatgagcagtggctgggaacaaatacaaacaaatccagcaggcatagaaaacggctgaactgctagtcccttattgcccaggtaacaaagccagcctcagaggtgctcgcccatccaggtaaccgcagcagccacagaccaagagactgagtcgtccagctccgtttatcccagcgatgcaatgtaaggcgaaatttgattggtcattgagacacaagtgccgattggatgctgtttcttcttcctgtcagccagaaacctgcattttcccgaaaggctcgagggatccactggggaagatttcttattgttgctgtttaaatttagctttctaatacacgcagaatggtaaaatataagacttcgttggagagaggaa

SEQ ID NO: 729347 - DNA, 923 bp, Homo sapiens; identical to SEQ ID NO: 74035

SEQ ID NO: 729348 - DNA, 765 bp, Homo sapiens; identical to SEQ ID NO: 74036

SEQ ID NO: 729349 - DNA, 445 bp, Homo sapiens
gcacagtaggaggaacccagaagatgctgcctctcctgatcatctgtctcctgcctgccattgaagggaagaactgcctccgctgctggccagaactgtctgccttgatagactatgacctgcagatcctctgggtgaccccagggccacccacagaactttctcaaagtattcactccttgttcctagaggataataattttctcaaaccctggtaccttgatcgtgaccatttggaagaagaaacagccaaattcttcactcaagtacaccaagccattaaaacgttacgagatggtgaggaagccaagagccccagggccttggggcttgggttgacaaaggcccaccctccaaggcattctcagaggcccatgtggccatgggtgggaggtcttgtgaaggtgggagatgaatgcagtctgtctccgtgtgctctttggaa

SEQ ID NO: 729350 - DNA, 524 bp, Homo sapiens
ataaaacagtacttctggaagagatctacacgcacaagaatctctttactgagaggctgaataagatatctgatgggctgaaggagaaggacatacagtccacactgaaggtcaccagctgtgctgactgcaggactcacttcctctcctgcaatgaccccactttctgcccagccaggaaccggcggacctccctgtgggctgtgagtctcagcagtgctctactcctggccatagctggaggtgatgtttcttttactggcaaaggaagaaggaggcagtaaagcaggaacagggcagcccgcatgtcttccagaagtgaacagaggccgcagctaccaccgtcacaaagttcactcatctctgggtcccggtgaccccatccccccataccctccatcctgggtcctggggccccaaagctctgaggcctaggagactgcgctgtctcgtggtttgcctactcctacacctttgtaaagagtctcttcattaaaacccctcttcatagcctaaaaaactgt

SEQ ID NO: 729351 - DNA, 495 bp, Homo sapiens
ataaaacagtacttctggaagagatctacacgcacaagaatctctttactgagaggctgaataagatatctgatgggctgaaggagaaggcacctcagtttctctaccttctcaccctccctggcagcctgcaatgagtcctgtgccaggaaccggcggacctccctgtgggctgtgagtctcagcagtgctctactcctggccatagctggaggtgatgtttcttttactggcaaaggaagaaggaggcagtaaagcaggaacagggcagcccgcatgtcttccagaagtgaacagaggccgcagctaccaccgtcacaaagttcactcatctctgggtcccggtgaccccatccccccataccctccatcctgggtcctggggccccaaagctctgaggcctaggagactgcgctgtctcgtggtttgcctactcctacacctttgtaaagagtctcttcattaaaacccctcttcatagcctaaaaaactgt

SEQ ID NO: 729352 - DNA, 697 bp, Homo sapiens
gcacagtaggaggaacccagaagatgctgcctctcctgatcatctgtctcctgcctgccattgaagggaagaactgcctccgctgctggccagaactgtctgccttgatagactatgacctgcagatcctctgggtgaccccagggccacccacagaactttctcaaagtattcactccttgttcctagaggataataattttctcaaaccctggtaccttgatcgtgaccatttggaagaagaaacagccaaattcttcactcaagtacaccaagccattaaaacgttacgagatgataaaacagtacttctggaagagatctacacgcacaagaatctctttactgagaggctgaataagatatctgatgggctgaaggagaaggccaggaaccggcggacctccctgtgggctgtgagtctcagcagtgctctactcctggccatagctggaggtgcaggaacagggcagcccgcatgtcttccagaagtgaacagaggccgcagctaccaccgtcacaaagttcactcatctctgggtcccggtgaccccatccccccataccctccatcctgggtcctggggccccaaagctctgaggcctaggagactgcgctgtctcgtggtttgcctactcctacacctttgtaaagagtctcttcattaaaacccctcttcatagcctaaaaaactgt

SEQ ID NO: 729353 - DNA, 737 bp, Homo sapiens
gcacagtaggaggaacccagaagatgctgcctctcctgatcatctgtctcctgcctgccattgaagggaagaactgcctccgctgctggccagaactgtctgccttgatagactatgacctgcagatcctctgggtgaccccagggccacccacagaactttctcaaagtattcactccttgttcctagaggataataattttctcaaaccctggtaccttgatcgtgaccatttggaagaagaaacagccaaattcttcactcaagtacaccaagccattaaaacgttacgagatgataaaacagtacttctggaagagatctacacgcacaagaatctctttactgagaggctgaataagatatctgatgggctgaaggagaaggccaggaaccggcggacctccctgtgggctgtgagtctcagcagtgctctactcctggccatagctggaggtgatgtttcttttactggcaaaggaagaaggaggcagtaaagcaggaacagggcagcccgcatgtcttccagaagtgaacagaggccgcagctaccaccgtcacaaagttcactcatctctgggtcccggtgaccccatccccccataccctccatcctgggtcctggggccccaaagctctgaggcctaggagactgcgctgtctcgtggtttgcctactcctacacctttgtaaagagtctcttcattaaaacccctcttcatagcctaaaaaactgt

SEQ ID NO: 729354 - DNA, 373 bp, Homo sapiens
ggaccattagcatggctgccttgccctctgctctgggttgggtttggccaggggagactcccaggaggaagttagagagacagggaggaggccagagtagtgggaggtcagggtagaaatgcccagcttcttctccctcagcaggaacagggcagcccgcatgtcttccagaagtgaacagaggccgcagctaccaccgtcacaaagttcactcatctctgggtcccggtgaccccatccccccataccctccatcctgggtcctggggccccaaagctctgaggcctaggagactgcgctgtctcgtggtttgcctactcctacacctttgtaaagagtctcttcattaaaacccctcttcatagcctaaaa

SEQ ID NO: 729355 - DNA, 453 bp, Homo sapiens
ggtaaacagcacagatgctgggagagggctggcatctgaccgtgaccatcacgcccatgtgacaaaggatgtcaccacagtgaacagttctgaccacagtggcttttcacctgcttcgttaaatttaactcacaccggctcagaggacaatttgattcattctgtatctcagcagaaaccagagcacctcagaagatcaaggcttccaaattctcctgggggaacagacgtcagccattcagcacaaaggaaacttccttctctgtatgtcagaggaagacataattgtgccatttccttcttgaagaagtttacaaacatttgcaagttgtcaaaaataattagtctaaaattgtttcataaaccgtggaatgaaacaggacgtgccttgttgagatcaaagggcttctgttaccttcttgtaaactcaaatgaaattcttttgaaagtaaa

SEQ ID NO: 729356 - DNA, 2720 bp, Homo sapiens
aactcagccctcctctgtcccccaggtcagggagtgggtgatggtgagaagggagcaaacaagcctcttgggagagagtgcagggaagtgcactgatgttttggagtaccttccattaccatcattgtgcttaacgtgttcgttacgaagcagcctggtgatgcttgcttctcctcctatgggtgactcctcctctgtccaacaggggagcctcacggtgggtgcctttgctcaaagaggacccatcctcagggagtttgcagccagccgaagggcagccaggagtgaagagtgaatggaagggtgccaaggtcggagctgatattggttatctcatcgggccttgcagcagcgccgcagatattctgcctcccattttgcccgcggggacgccgaggcccggcgccgcatcctgccgcccgttttgcccgcggggaagccgaggcccgatgccgtaccctgccgcccgttttgcccgcggggaagccgaggcccggcgccgcatcctgccgcccgttttgcccgcggggaagccgaggcccggcgccgtatcctgccgcccgttttacccgcgaggaagccgaggcccggcgccgtatcgtgccgcccgttttgcccgcggggaagccgaggcccggcgccgtatcctgtggccgttttacccgcgggaaagtcgaggcccggcgccgtatcctgccgcccgttttacccgcgaggaagccgaggcccggcgccgtatcctgccgcccgttttacccgcggagacgccgaggcccgatgccgtatcctgccgcccgttttacccgcgggaaagccgaggcccggtgctgtattctgccgcccattttacccgcggggaagctgaggcccagtgctgtttaatatcttactcatgttcacttgatgagaaagtgacagatctgagacaaacccagttctagaggttatgacaccagccatggaagagcagagaggccaatgaggtggggaggttggaaacaaaaggccttctccaccccagcttgaccaacccaaaagctggaaggcaaggaagacctagatcgacagaaaagaaatgagtcaacgatggtgcagaaagggaccagcttgacgaagcttctgcttttgtgactgtctcctaatgcagaaaccagagcacctcagaagatcaaggcttccaaattctcctgggggaacagacgtcagccattcagcacaaaggaaacttccttctctgtatgtcagaggaagacataattgtgccatttccttcttgaagaagtttacaaacatttgcaagttgtcaaaaataattagtctaaaattgtttcataaaccgtggaatgaaacaggacgtgccttgttgagatcaaagggcttctgttaccttcttgtaaactcaaatgaaattcttttgaaagtaaactcttggaattagcagtggtttttgtggcacatgtatggcagggggaggggagcagaatgattcagatagcagagtccaggggagagccgggaggagtaaagccctgtccacagagaatgggaatgggtcttgaacagccatggtgatctgtgccagtgggcacaggacttcttcaacgggaagctcaggcattcaggaaacactcatttcggtgatcttgaacttgcaagacaccgccggctcctacaagcaggccctggagaagccacttcacctccgcgtctcaggccactcacctccaaagacagatgcaaactccgcctccctcctcggtgagagggtcccctcttctctgcttgcagatttcgatgagttcttggctgacttcaaacctggaactgctgtggttttggagatccggggcacagtcaactacgtgacctggtgctcagcaggcaagaaggagcaggagaagcatggctactcactggaacaaggaggctgtgctgggggccaggtagcccaggccagaccgcagtgcagagaagaaagtattaaaggcagaagcagacacagtgaagacacaggtcggcctgacttcgaagtgtgagttatgtcactctgatagtgggtcctaaagtgcagatgtgtttgggtgatgcttttcagtagcctatggacatggcaccaagtgacaatgacttccgtgcctaaggagtgttctgaatgcagaacagggagcacctcctccgggttgggagagatgcctctgcccccacctgcccagtatcggcctctgtgcatagcagtactgggctttcctggaacccatgtttcatgacaaatgaggctggagatgaagtcagcaggaagttgcatgaaaccggttgattctctggtggagctgtgcatggcaaggaagcatcagcacagggaagtgtgcctgaccggatggcagatggggaaggatgctgagagaaattaatgcaagctgagaccatatgtgcactgataggctcctcaccactctactgggtcgaacagtgtcccccctataatccatgtccactcagaacctcagaatgtgaccttatttggaaatagagtctttgcagatataactggttaagatgaggttgtactagattagggtggatcttaattggccaatgtccttataagaagaggaaaatttggatgcagagatggactgagaagaaggccatgtgaagaaggccatgagaagaaggactggagaggaatagctgccagtcattgatataaaaatggagtc

SEQ ID NO: 729357 - DNA, 685 bp, Homo sapiens
ggtaaacagcacagatgctgggagagggctggcatctgaccgtgaccatcacgcccatgtgacaaaggatgtcaccacagtgaacagttctgaccacagtggcttttcacctgcttcgttaaatttaactcacaccggctcagaggacaatttgattcattctgtatctcagcagaaaccagagcacctcagaagatcaaggcttccaaattctcctgggggaacagacgtcagccattcagcacaaaggaaacttccttctctgtatgtcagaggaagacataattgtgccatttccttcttgaagaagtttacaaacatttgcaagttgtcaaaaataattagtctaaaattgtttcataaaccgtggaatgaaacaggacgtgccttgttgagatcaaagggcttctgttaccttcttgtaaactcaaatgaaattcttttgaaagtaaactcttggaattagcagtggtttttgtggcacatgtatggcagggggaggggagcagaatgattcagatagcagagtccaggggagagccgggaggagtaaagccctgtccacagagaatgggaatgggtcttgaacagccatggtgatctgtgccagtgggcacaggacttcttcaacgggaagctcaggcattcaggaaacactcatttcggtgatcttgaacttgcaaga

SEQ ID NO: 729358 - DNA, 1123 bp, Homo sapiens
ggtgccaaggtcggagctgatattggttatctcatcgggccttgcagcagcgccgcagatattctgcctcccattttgcccgcggggacgccgaggcccggcgccgcatcctgccgcccgttttgcccgcggggaagccgaggcccgatgccgtaccctgccgcccgttttgcccgcggggaagccgaggcccggcgccgcatcctgccgcccgttttgcccgcggggaagccgaggcccggcgccgtatcctgccgcccgttttacccgcgaggaagccgaggcccggcgccgtatcgtgccgcccgttttgcccgcggggaagccgaggcccggcgccgtatcctgtggccgttttacccgcgggaaagtcgaggcccggcgccgtatcctgccgcccgttttacccgcgaggaagccgaggcccggcgccgtatcctgccgcccgttttacccgcggagacgccgaggcccgatgccgtatcctgccgcccgttttacccgcgggaaagccgaggcccggtgctgtattctgccgcccattttacccgcggggaagctgaggcccagtgctgtttaatatcttactcatgttcacttgatgagaaagtgacagatctgagacaaacccagttctagaggttatgacaccagccatggaagagcagagaggccaatgaggtggggaggttggaaacaaaaggccttctccaccccagcttgaccaacccaaaagctggaaggcaaggaagacctagatcgacagaaaagaaatgagtcaacgatggtgcagaaagggaccagcttgacgaagcttctgcttttgtgactgtctcctaatgcagaaaccagagcacctcagaagatcaaggcttccaaattctcctgggggaacagacgtcagccattcagcacaaaggaaacttccttctctgtatgtcagaggaagacataattgtgccatttccttcttgaagaagtttacaaacatttgcaagttgtcaaaaataattagtctaaaattgtttcataaaccgtggaatgaaacaggacgtgccttgttgagatcaaagggcttctgttaccttcttgtaaactcaaatgaaattcttttgaaagtaaa

SEQ ID NO: 729359 - DNA, 681 bp, Homo sapiens
  misc_feature (16)..(16): n is a, c, g, or t
  misc_feature (76)..(76): n is a, c, g, or t
ttagctgctctccccnatttctcctttcctctccattcttcttcccttctcccatatatccccttcctaaccacancttcctcagcggccgcataacaaatgtttcaacgatggtgcagaaagggaccagcttgacgaagcttctgcttttgtgactgtctcctaatgcagaaaccagagcacctcagaagatcaaggcttccaaattctcctgggggaacagacgtcagccattcagcacaaaggaaacttccttctctgtatgtcagaggaagacataattgtgccatttccttcttgaagaagtttacaaacatttgcaagttgtcaaaaataattagtctaaaattgtttcataaaccgtggaatgaaacaggacgtgccttgttgagatcaaagggcttctgttaccttcttgtaaactcaaatgaaattcttttgaaagtaaactcttggaattagcagtggtttttgtggcacatgtatggcagggggaggggagcagaatgattcagatagcagagtccaggggagagccgggaggagtaaagccctgtccacagagaatgggaatgggtcttgaacagccatggtgatctgtgccagtgggcacaggacttcttcaacgggaagctcaggcattcaggaaacactcatttcggtgatcttgaacttgcaaga

SEQ ID NO: 729360 - DNA, 963 bp, Homo sapiens
ggtgccaaggtcggagctgatattggttatctcatcgggccttgcagcagcgccgcagatattctgcctcccattttgcccgcggggacgccgaggcccggcgccgcatcctgccgcccgttttgcccgcggggaagccgaggcccgatgccgtaccctgccgcccgttttgcccgcggggaagccgaggcccggcgccgcatcctgccgcccgttttgcccgcggggaagccgaggcccggcgccgtatcctgccgcccgttttacccgcgaggaagccgaggcccggcgccgtatcgtgccgcccgttttgcccgcggggaagccgaggcccggcgccgtatcctgtggccgttttacccgcgggaaagtcgaggcccggcgccgtatcctgccgcccgttttacccgcgaggaagccgaggcccggcgccgtatcctgccgcccgttttacccgcggagacgccgaggcccgatgccgtatcctgccgcccgttttacccgcgggaaagccgaggcccggtgctgtattctgccgcccattttacccgcggggaagctgaggcccagtgctgtttaatatcttactcatgttcacttgatgagaaagtgacagatctgagacaaacccagaaagggaccagcttgacgaagcttctgcttttgtgactgtctcctaatgcagaaaccagagcacctcagaagatcaaggcttccaaattctcctgggggaacagacgtcagccattcagcacaaaggaaacttccttctctgtatgtcagaggaagacataattgtgccatttccttcttgaagaagtttacaaacatttgcaagttgtcaaaaataattagtctaaaattgtttcataaaccgtggaatgaaacaggacgtgccttgttgagatcaaagggcttctgttaccttcttgtaaactcaaatgaaattcttttgaaagtaaa

SEQ ID NO: 729361 - DNA, 998 bp, Homo sapiens
ggtgccaaggtcggagctgatattggttatctcatcgggccttgcagcagcgccgcagatattctgcctcccattttgcccgcggggacgccgaggcccggcgccgcatcctgccgcccgttttgcccgcggggaagccgaggcccgatgccgtaccctgccgcccgttttgcccgcggggaagccgaggcccggcgccgcatcctgccgcccgttttgcccgcggggaagccgaggcccggcgccgtatcctgccgcccgttttacccgcgaggaagccgaggcccggcgccgtatcgtgccgcccgttttgcccgcggggaagccgaggcccggcgccgtatcctgtggccgttttacccgcgggaaagtcgaggcccggcgccgtatcctgccgcccgttttacccgcgaggaagccgaggcccggcgccgtatcctgccgcccgttttacccgcggagacgccgaggcccgatgccgtatcctgccgcccgttttacccgcgggaaagccgaggcccggtgctgtattctgccgcccattttacccgcggggaagctgaggcccagtgctgtttaatatcttactcatgttcacttgatgagaaagtgacagatctgagacaaacccagatcgacagaaaagaaatgagtcaacgatggtgcagaaagggaccagcttgacgaagcttctgcttttgtgactgtctcctaatgcagaaaccagagcacctcagaagatcaaggcttccaaattctcctgggggaacagacgtcagccattcagcacaaaggaaacttccttctctgtatgtcagaggaagacataattgtgccatttccttcttgaagaagtttacaaacatttgcaagttgtcaaaaataattagtctaaaattgtttcataaaccgtggaatgaaacaggacgtgccttgttgagatcaaagggcttctgttaccttcttgtaaactcaaatgaaattcttttgaaagtaaa

SEQ ID NO: 729362 - DNA, 458 bp, Homo sapiens
tcttcattctttccgccatcttgattctttctcactgaccaagactcagccgtgggaaatatgagtgagcttgtaagagcaagatcccaatcctcagaaagaggaaatgaccaagagtcttcccagccggttggatctgtgattgtccaggagcccactgaggaaaaacgtcaagaagaggaaccaccaactgataatcaggggcctgacatggaagcttttcaacaggaactggctctgcttaagatagaggatgagcctggagatggtcctgatgtcagggagggtattatgcccacttttgatctcactaaagtgctggaagcaggtgatgcgcaaccataggtttcaagcaagacaaatgaagactgaaaccaagaacgttattcttaatctggaaatttgactgataatattctcttaataaagttttaagttttctgcaaagaatccttaca

SEQ ID NO: 729363 - DNA, 457 bp, Homo sapiens
tgggaaatatgagtgagcttgtaagagcaagatcccaatcctcagaaagaggaaatgaccaagagtcttcccagccggttggatctgtgattgtccaggagcccactgaggaaaaacgtcaagaagaggaaccaccaactgataatcagggtattgcacctagtggggagattgaaaatcaagcagtgcctgcttttcaagggcctgacatggaagcttttcaacaggaactggctctgcttaagatagaggatgagcctggagatggtcctgatgtcagggagggtattatgcccacttttgatctcactaaagtgctggaagcaggtgatgcgcaaccataggtttcaagcaagacaaatgaagactgaaaccaagaacgttattcttaatctggaaatttgactgataatattctcttaataaagttttaagttttctgcaaagaatccttaca

SEQ ID NO: 729364 - DNA, 698 bp, Homo sapiens
cggggccgggctgctgggtccgagctctgggcacgatgtcctccctgacgccgccaggacagcgcctgggcccaggcctgggcctggtgaacgcgggtttcttcctctgaggttcaacactccgcacttgggttggctcctttcatcctgattggtttattcgccacgtgccaagcactgaagagggcgtgcaggatggatacttttggagcaaaaatagccctgcttctttcctggggagggatcgcactttctagaggggcggttctcaaagtatggtctcaggactagcagcgtcgaaaatgctgggaactcgttagaaaagcaagttttcaatcctcgccccagaatcagaaactcggggtggagcccagcaatgtgtgtcctgacaagtccacgcgcgaccccagtgctggctagggttgcaaagccactgctctacggagcgagcgagatccatcatagtgggacaagcgagaggatgaggccatacagaccagggcaagttttgagcgtgcagatccaccagctgcttgaagccaggggcaccaggatgtctggtcccccagctcagggatcctgtctccccacaaaaagcagcagcagaagacccctctttgagttctgaacatgttcctagattttcccagtatctatggggattgagagattgataaaggctgcttggagctgaaaaa

SEQ ID NO: 729365 - DNA, 586 bp, Homo sapiens
cggggccgggctgctgggtccgagctctgggcacgatgtcctccctgacgccgccaggacagcgcctgggcccaggcctgggcctggtgaacgcgggtttcttcctctgaggttcaacactccgcacttgggttggctcctttcatcctgattggtttattcgccacgtgccaagcactgaagagggcgtgcaggatggatacttttggagcaaaaatagccctgcttctttcctggggagggatcgcactttctagaggggcggttctcaaagtatggtctcaggactagcagcgtcgaaaatgctgggaactcgttagaaaagtactgttccacgcacttgacaccaatccacccatttcacctgcatgatcaccctgcctttgcatgagttgccggtgtggacagagcagggacacagtgagacagcggattccagctttgctcttacctagaacacactgcctctcaccaggaatcgtccttccattttatgcagttatcccagacaatgatgcacaagctttgggaaaaaaaccccacaagtccaaaggtgtacttcataataaaggcaagttatctgtca

SEQ ID NO: 729366 - DNA, 934 bp, Homo sapiens
cggggccgggctgctgggtccgagctctgggcacgatgtcctccctgacgccgccaggacagcgcctgggcccaggcctgggcctggtgaacgcgggtttcttcctctgaggttcaacactccgcacttgggttggctcctttcatcctgattggtttattcgccacgtgccaagcactgaagagggcgtgcaggatggatacttttggagcaaaaatagccctgcttctttcctggggagggatcgcactttctagaggggcggttctcaaagtatggtctcaggactagcagcgtcgaaaatgctgggaactcgttagaaaagcaagttttcaatcctcgccccagaatcagaaactcggggtggagcccagcaatgtgtgtcctgacaagtccacgcgcgaccccagtgctggctagggttgcaaagccactgctctacggagcgagcgagatccatcatagtgggacaagcgagaggatgaggccatacagaccagggagagaggctccttacactgacattcaaagtcctcaatgacccggccccagcctacctctgcagccttatctccctacaaaccatcaaagcagaacaaaaacctgtccctccgatttaggttttagcaaaccacaagaagcacttcataaactggtgactcaagtagaaaagtactgttccacgcacttgacaccaatccacccatttcacctgcatgatcaccctgcctttgcatgagttgccggtgtggacagagcagggacacagtgagacagcggattccagctttgctcttacctagaacacactgcctctcaccaggaatcgtccttccattttatgcagttatcccagacaatgatgcacaagctttgggaaaaaaaccccacaagtccaaaggtgtacttcataataaaggcaagttatctgtca

SEQ ID NO: 729367 - DNA, 491 bp, Homo sapiens
gcaagttttcaatcctcgccccagaatcagaaactcggggtggagcccagcaatgtgtgtcctgacaagtccacgcgcgaccccagtgctggctagggttgcaaagccactgctctacggagcgagcgagatccatcatagtgggacaagcgagaggatgaggccatacagaccagggttttagcaaaccacaagaagcacttcataaactggtgactcaagtagaaaagtactgttccacgcacttgacaccaatccacccatttcacctgcatgatcaccctgcctttgcatgagttgccggtgtggacagagcagggacacagtgagacagcggattccagctttgctcttacctagaacacactgcctctcaccaggaatcgtccttccattttatgcagttatcccagacaatgatgcacaagctttgggaaaaaaaccccacaagtccaaaggtgtacttcataataaaggcaagttatctgtca

SEQ ID NO: 729368 - DNA, 622 bp, Homo sapiens
ggctcagtaaacacttaaggaagttgccgtgcactgcagcctgccggagacatgaaggaatgtacgggaggataatcgcaacatcatcaacccaattctccaagtaatttgccatgggacaggcacaccccatgtgtttgggaagacaatgggaaggttctgttttctgctccaagactgattcaaccagttggatctggaaggggataaagggctgtgtggctgcttgattttcattgtctagtggcagccaaaattggaaaagagagaagtgcagactttaaagacaagcagcgacagctcatcagcagtctaacaacacgacagatgacaggcccagaggcacacccagggccgccagcccatcaccctgtgcaggatgtcaaagagcagctgcagcaaaggaagaagatcatccagacttaaatgtttgggccttgctaagaccatagagtctttgtgctttggaaacagtcctccatacaaagaccccttcctagaaaagagtggaaagaaaccaaggtggaatggatacaacagaaaggagaccatgctaatattcttgtgcaatgcttcctgggcagaaattatgtcataaaggatgttccattctgcaaaaaaa

SEQ ID NO: 729369 - DNA, 397 bp, Homo sapiens; identical to SEQ ID NO: 386988

SEQ ID NO: 729370 - DNA, 1499 bp, Homo sapiens
gcctactagatatttaatgtaatcaccatgataatggctaagatttattaagcatctgctatgtgctttatggtgctaagaacttctcatgtatttactcattgaatcttcacaaaaaccttatgaagacggctctctcaaatgttactgtctatatgaatccaccttgggatattagtaaaatgagtttctgatacagaagatctagaaagcgcctgaaatgctgatattctgtctcccaggtggaggagttcagctattaccttgactttgccgaagtcctaggcactcccatgccctcagagtctcattttgaatccaggcacttagggatgctatttttccacatcaaacagcttcctcccagccaaagaattctggtgacagtagtgaagataattttcactcctgcttacagaatgacaaagcaaaagcaaagaggagaagaatgaagtaaagacaaccaaaggaaaagactgatggctccttaagaatgatcttgataaaggaatggtggctgaggggtccatctcctaaaccacccaccttactgactccctagagcaatgccatacagaaagctgcaccttgaggggaagacacaagaatcctggagtggaaaaaaattgggtaatgatgacagccttcgaggtcttgagagtaaagcagaagcaaaaaaaaagtgttatttttatcttttgaagatggttccctcttaagacttttgcgaatgattaagatttcaattatgttccaggaaaaaaataagatttttgcttgacaaaaaaaatttttgtctagaacaggtgggaaggaagagatagtttagccacatccaagagacctgtaaattgggtacagtgaagtgaatggtgtaccagtcataaaagaatgttaactggagaagtctctgctgtcttcctgtaactgaggggggtgtaaccatccttgtggaagcgtccacttttattgaagattggctaaataaatctgtgcctactgaaactcaagccatttcaaattgaaaactctattccggggagacactaaaccatgggtccactgaaggatactcatctggagactagggattctggagacattgcagcacagagactagcacgcacagagcagaggcatgggaagcttggcgctgcagggaatgctggtacagccgtcctcatctatgagtttaccctcagtgatgtcagttacctggggtcaactgcggcatccactgggggtcttcgaacatatcctctccggccggagcttaaaccatcagttggcatcttggtagaaatcctgccaaagtacaaagagaatactcatgaaaccagtgaacagagaagtaggatgtttaaacccatgaggaaggaaaatggtttcagccaaacgtacggaagaacagtcctccaattagagcaaagtcaaatggatggaggcagtagactctccatccctgggtctatttaggtagctaatggctctcacttttc

SEQ ID NO: 729371 - DNA, 3057 bp, Homo sapiens
atgtcactctccagtcccagcaagggggaggtacatggaaggccacaggaagaaacaagatcttgagctgagcaagaacatcccagcatcttcattgactttaaaagtatattctggagtcttccgtggttcactattccagtactacagagattccttatattacatggcaggaggggggtaaactgagggatagtgaagacaacaataaattaatcaagagctttcctcatatctcagaacctatcctctgtaagaatgtcagaaaaggttgactggttacaaagccaaaatggagtatgcaaagttgatgtctattctcctggagacaaccaagcccaggactggaaaatggacacctccacggatcctgtcagagtgctcagctggctccgcagagacctggagaagagtacagcagagttccaagatgttcggttcaaacccggagaatcatttggtggggaaacgtccaactcaggagacccacacaaaggtttctctgtagactattacaacaccaccaccaagggcactccagaaagattgcattttgagatgactcacaaagagattccttgccagggccccagggcccaacttggcaacgagagttcagtagatgaagtttccttctatgctaaccgcctcacgaatctagtcatagccatggcccgcaaagagatcaatgagaagatcgatggctctgaaaacaaatgtgtctatcagtcattgtacatggggaatgaacccacacccaccaaaagcctcagtaagatagcatcagagcttgtgaatgagaccgtctctgcatgttccaggaatgctgccccagacaaggctcctggctctggagacagagtctcaggatcatcacaaagtcccccaaatttgaaatacaagtccactttgaagatcaaggagagcaccaaagaaagacagggtccagatgacaagcctccttctaagaagtctttcttctataaggaagtgtttgaatctcgtaacggagattatgccagagagggtggaaggttctttcctcgggagagaaagaggtttcgagggcaggaaaggcctgatgactttacggcttctgttagtgaagggatcatgacctatgctaacagtgtggtatctgatatgatggtctccatcatgaagacactgaagatccaagtgaaagacacaaccattgccaccatcctactgaagaaggttctgctcaagcatgcaaaagaggtggtctcggatctcatcgactccttcttgaggaatctccacagcgtcacagggaccctcatgactgacacacagtttgtctcggctgtgaaaagaactgtcttctctcatggaagccaaaaggccacagatatcatggatgccatgctaaggaagctgtacaatgtaatgtttgccaagaaagtccctgagcatgtcaggaaagcccaagacaaggctgagagttattccctcatctccatgaaaggaatgggtgatcctaaaaaccgaaatgtgaactttgccatgaaatctgaaactaaattgagagaaaaaatgtattctgaacccaaatcagaggaggagacttgtgcgaaaactctgggtgagcacattatcaaagaggggcttaccctgtggcataaaagtcagcagaaagaatgtaaatctctaggtttccagcatgcagcattcgaagctcccaacacacagcgtaagcctgcatcagacatttcctttgagtaccctgaagatattggcaacctcagccttcctccatatcctccagagaaacctgagaattttatgtatgattcagactcctgggccaaggacctgatcgtgtctgccctgcttctgattcaatatcacctggcccagggaggaagaagggatgcacggagcttcgttgaagctgctggcaccaccaactttcctgccaatgaacctcctgtagctcccgatgaatcttgccttaagtctgctcccattgtaggtgaccaagaacaagcagaaaagaaggacctaaggagtgttttctttaatttcatccggaacttacttagtgagaccattttcaagcgtgaccagagccctgaacccaaggtgccggaacagccagttaaggaagataggaagttgtgtgaaagaccgttggcgtcttctccccccaggctatatgaggatgatgagacccctggtgccctttctgggctgaccaagatggctgtcagccagatagatggccacatgagtgggcagatggtagaacatctgatgaactcagtgatgaagctgtgtgtcatcattgctaagtcctgtgatgcttcgttggcagagctgggagatgacaagtctggagatgccagtaggctaacttcggccttcccagatagtttatatgagtgcttaccagccaagggcacagggtcagcagaagctgtcctgcagaatgcctatcaagctatccataatgaaatgagaggcacatcaggacagccccctgaagggtgtgcagcacccacggtgattgtcagcaatcacaacctaacggacacagttcagaacaagcaactccaagccgtccttcaatgggtagctgcctctgagctcaatgtccctattttgtattttgctggtgatgatgaagggatccaggagaagctacttcagctctcagctgctgctgtggacaaaggatgcagtgtgggcgaggttctgcagtcggtgctgcgctatgagaaggagcgccagctgaatgaggcggtggggaatgtcacaccgctgcagctgctggactggctgatggtgaacctgtaatcggcaaccccactgctttcccctcttctggcagtggggccggcccttatccccgcccttctttctcacttccacatctccccctctatatcctcacagagccctaacattatcttcacaccactctcatcaaagacatgtcatcttgtgctagccactggattttgcagattttcctgtccatgcaagcaaggacgtaaaattaaaaaattacaattaaagggcatccaaaaaaaa

SEQ ID NO: 729372 - DNA, 459 bp, Homo sapiens
agcattctatgatcccatggctctcacatcgacagaccacaacactaagccaacaatgatacggcgtccaccagcagttgtttgctacatttgtggtcgtgaatatggaacaaaatctattagcattcatgagccacaatgtctgaaaaaatggcataatgaaaacaacttgttgcctaaagagttaaggagaccagtacctaaaaaaccagaagtcaggaccattactgacaaataagaaaaacagttctgaaatgcctgtccaaagaattatcttctgatgctgagacataaagacactatgtcctggcaacactgtgcatgagagggacctatgggaatttgctgtattctccaaaagtttctttcatacatcatcaaaccctttgaatgtaaaataaataataaaatacttaaaaaataaaaatgaataaaacttaaaaaaatatgaaacttaaa

SEQ ID NO: 729373 - DNA, 406 bp, Homo sapiens
agcattctatgatcccatggctctcacatcgacagaccacaacactaagccaacaatgatacggcgtccaccagcagttgtttgctacatttgtggtcgtgaatatggaacaaaatctattagcattcatgagccacaatgtctgaaaaaatggcataatgaaaacaacttgttgcctaaagagttaaggagaccagtacctaaaaaaccagaagtcaggaccattactgccaaaggcttctatgatcttgatgctttaaatgaagctgcttggacaagtgcccacagccagttggttccctgtaatgtttgtgggcgtaccttcctgccagacagactgattgttcaccaacgatcttgtaaacccaaagccgccaagtaaagcccttttctctctactgaagtg

SEQ ID NO: 729374 - DNA, 168 bp, Homo sapiens
acaaacttttcaccattctaaagaacccactttccttatcaaccaagctgggcttctctctagtgactcctattctagcctttccccagaaacagagagtgttaatcctggtgaaaatataaagacagacactcagaaaaagagacctgggactgtgatactatcaaa

SEQ ID NO: 729375 - DNA, 743 bp, Homo sapiens; identical to SEQ ID NO: 75160

SEQ ID NO: 729376 - DNA, 690 bp, Homo sapiens
cagctccttccctgaaaactcagaggtgctcagcatgccatgctaaaaggcaaaataaaaagatcttggagacatctcagctttaatgaggactttccaacattccagactgccgtcctgcaatgaagctctgagtcacggtctgtgaggctaagctttaggccctttcaagctaattggaacagaagagagctaattaactataaaccagaatgaagcttttgtctaataagtttttattaggcaaaactcacagtgggaagagcataatcagaaaaacacatgagggcaggatattctcatcttttcaaattctgcatgtgtatctattagccaacaatgatacggcgtccaccagcagttgtttgctacatttgtggtcgtgaatatggaacaaaatctattagcattcatgagccacaatgtctgaaaaaatggcataatgaaaacaacttgttgcctaaagagttaaggagaccagtacctaaaaaaccagaagtcaggaccattactgccaaaggcttctatgatcttgatgctttaaatgaagctgcttggacaagtgcccacagccagttggttccctgtaatgtttgtgggcgtaccttcctgccagacagactgattgttcaccaacgatcttgtaaacccaaagccgccaagtaaagcccttttctctctactgaagtg

SEQ ID NO: 729377 - DNA, 796 bp, Homo sapiens; identical to SEQ ID NO: 75162

SEQ ID NO: 729378 - DNA, 1350 bp, Homo sapiens
agtttctctctgcttctggtcagctgggttgtcctgcatggtgacgggtgtcatcccgaacaaatcagatggcatcagaggcactccatcaagtgggagatggggaggaggctgtactgaagaaagaaaacttcaacatgatgaatgcccttgaccaactgccaaaacccttttcaaaccccaagtctatgaaccggaccgtcactaccaaaggactcccactagcctcaaagggcaatttggtcaacttcttggaggatgataccatcaacctactgaagccgctgccagtagaggattcagactgcagctctgatgagaccagcatctctgccttctcatccaccttgctgaaccccatcaaattagctgtgacccagcccaacagcagcttctttgcagggatgctggagggggagctgaacaaactcagcttctccccaatggccaagaatgcagaaaatgaggacctggcgctcggcccctgcccatgcccatcgaagtcccagatggccacaaggggcctgctggaccttgacaaccctgagctggagacagaaacctcctcaacgcactcagaatcttctgtggttgtggacctgccggacacccccttcatctttgagcacaccgtcaacaattccacagctgtgatttcctggacctacgccttgggcaagcagccggtcagtttctaccagctcctgttacaggaggtggccaagacacaggagaatgagttgcccgaggcaaagaatcgtccatggatcttcaacaagattttgggcactactgtcaagctgatggagctaaagcctaacacgtgttactgcctcagtgtccgtgcagccaacacagctggggtggggaagtggtgcaagccctacaaatttgcaaccctggccactgacttcagcagctttcctgagaactaccccatccagatcaccgtgcggcgcaaggaaccccggcaaaagatcgtgtccatcgggccggaggagatgcggaggctggaggatctggaatacctatttccctgttaagggggagggccccaggacacccctcacctactttcagcttcaaccccaggccctcagaaaccagagccatgagacctaccataccaccagcaccctgcgggcccggggtctggcagagtggtatgggcaccccacccctgggctggggccaaggctacataggggccccattcacctggaggcatctcaggccaggccatgccaggctcagccactgcccacagctgctagactccctcctcctccaaatctgggctgggtctaggtccctcattaaagaactgcaggtcatccagcaaaaaaaaaa

SEQ ID NO: 729379 - DNA, 1427 bp, Homo sapiens; identical to SEQ ID NO: 286162

SEQ ID NO: 729380 - DNA, 1292 bp, Homo sapiens; identical to SEQ ID NO: 286161

SEQ ID NO: 729381 - DNA, 743 bp, Homo sapiens; identical to SEQ ID NO: 728369

SEQ ID NO: 729382 - DNA, 455 bp, Homo sapiens; identical to SEQ ID NO: 728370

SEQ ID NO: 729383 - DNA, 1254 bp, Homo sapiens
acgacctaagggcctccacagcaggaacaaaaggaattttgtctgagattttagcagaaaagtaatttttgaaatctattcttggatttagacgtttattggatttcaaagcttcttgctgcccaggagcttgtgaatacggtcaaaggtccatgaaatttccaaagtggtaccacagcagatgaacctgaatgcaaactggagggaccaacagagtccagcctatagacataaatccttaactacacctagatctcactgtcttttccaatggtcaaaagaggggctcttgaaatggctccattgttttatagaaacaaggtcttcctaagaagtctttttctcctatctttttcttacccaaaataaaggaatggcccaaaacctcaagccaagcttaccagctataaacaacttggtggtcagcagccaaaagaagagtggacatgccatggtcatgtggcacgtaccctatacaagcttcacagagaagaatggaagcacttgattgtaagacagagggtgagatgtgagaggaatattaaccttcactttccacaggcatttttttctgcaaatggcaccagcttttggacttaaaattttattccgaatactatttagatgcatcagggccctcaaaatatggatttcaagttggagacatcaaagtgcattatttactaaaaccactgcagcttttttcccctctcctttcacaagatgctattgtaaattcaggctgctttaatctctgtgattaaaaaaaaaaaggaagaaagaaaaaaaaagtgctgcttgaagaggaactgaactcacaatctgggagctagaaatgctctctcgtgctctctctgtctccagtgataagctgaccagatgtcttgaattaagtacagggtcaccaacatctctaatagaatccaactgtggaatagaaaaactatttcgtctaagaagtggatcctagctgtcaaataaaaaatcgctgttgaatgctgtaaagtacatttttacacccatgtacaatttagagcttaggaactcatggaaaaaaatagagttaacacggataaagggattttaaaaggcgagagagggaagagtttcttaaggagtctccaatgacaaaaatgtgttcattttctgagacctccagaatgaattactaaggtatcctcaaacaaaagtggttttgctattcagaaattcatatgttctaaatagagaaaattaaaaattaaaaagacatga

SEQ ID NO: 729384 - DNA, 2306 bp, Homo sapiens
  misc_feature (972)..(972): n is a, c, g, or t
  misc_feature (1368)..(1368): n is a, c, g, or t
agctagactgagcaagggaagtgacaggaaatggagctggggagacaaaaatgtggataacaacaaaagaatttcaacaggtaaaaaaatgagtcaaacatctctcaaacagaaaaagaatgagcctggaatgaggtcctcaaaagagagtctagaagcagaaaaaagaaaggaatctgacaaaacaggagttcgtctgagcaatcagggatcacaagaatcatcactgcggaagacagactctcgagggtaccttgtgcgcagtcaatggtctagaatatcccggagcccatccaccaaggctccatccatagatgagcctagaagcaggaacaccagtgctaagctccccagcagctccacgagctcccggactccatccacctccccaagcctgcatgactcctcaccgccgccgctgtccgggcagccctcgctccagccacccgcgtcgccccagctgccccggtcgctggactcgcggcctcccacgcccccagagcccgatcctggctcccggcgcagcaccaaaatgcaagagaatccggaggcctgggcccaaggcatcgtgcgggaaatccgccagacccgggactcgcagccgctggaatattcgcgcacgtcccccaccgagtggaagtcctccagccagcgcagggggatctaccccgcctccacccagctggaccgcaactctctgtccgagcagcagcagcagcagcgggaggacgaggacgactacgaaggctgcctactgggcatccatgaggtcgttctacgagaaagaacccgagctgctcgcgcccctggccgcccaaacccaagaacgccatcaccattgctctctcatcctgcgcgctcttcaacatggtggacggcaggaaaatctacgagcaagagggtctggaaaagtacatggagtatcagctcaccaatgagaacgtcatcctgaccccgggcccggcgttccgnttcgtcaaggcactacagtatgtcaatgctagactccgtgatctatatcctgatgaacaggacttatttgatattgtactgatgactaataaccatgcccaagtgggagtgcggcttataaacagcgtcaatcactacggcttactgattgaccgcttctgtctgaccgggggaaaagaccccattggctatttgaaggcatatcttaccaacttgtatattgctgcagattctgaaaaagtgcaagaggcaatacaagaaggtattgcctctgcgacaatgtttgatggagccaaagacatggcttactgtgacactcagctccgtgtagcctttgatggggatgctgtcctcttctctgatgagtctgaacattttaccaaggagcatgggctngacaaattcttccagtatgatacattatgtgaaagtaagcctcttgctcagggtcccctaaaaggctttctggaagatttaggcagactgcaaaagaagttctatgccaaaaatgaacggttactttgtcctatcaggacctacctggttacagctaggagtgcagccagttcaggcgcccgtgtgctgaagacccttcgacgctggggtctagagatagacgaagctcttttccttgctggagcccccaaaagtcccatcttggtgaagatccggccccacatcttctttgatgaccacatgttccacattgaaggggcacagaggttaggttccatcgcagcttatggctttaataaaaaattcagtagttaggggcagggaggagaaataaagtggtgatagtctggtgttacagaagccacttcttttggctctctaggataattagataggtatttcagaaaattggaccttaaaactttgcttctttggaaaggttttctcctgattttttggaaaaccttttgaaccctcaagttaccatcaaactacttctctttgaactaccaatactgttgaatgccattacacctatctctgtgtaagtcataatgatgactctttaggataagtttagaacttgaatatttgcatgcttaaggcactgttttagaagcttacttagttttataaacactgctcatttttggatgtttgtagataacaatgaattgttacccatcagcattgtagaatagtgtcttcaaaggtagaaggagtatggttaagcacactcttgaaaactggagctttgtattctgtgactgctatggctagctttgtaaccaaagcaaaatgagaatttcactctacctgcatgagtataacaattttgatactgctcatttagaaataaatcatctggttgttcctcc

SEQ ID NO: 729385 - DNA, 1252 bp, Homo sapiens
ggtcccctaaaaggctttctggaagatttaggcagactgcaaaagaagttctatgccaaaaatgaacggttactttgtcctatcaggacctacctggttacagctaggagtgcagccagttcaggcgcccgtgtgctgaagacccttcgacgctggggtctagagatagacgaagctcttttccttgctggagcccccaaaagtcccatcttggtgaagatccggccccacatcttctttgatgaccacatgttccacattgaaggggcacagaggttaggttccatcgcagcttatggctttaataaaaaattcagtagttaggggcagggaggagaaataaagtggtgatagtctggtgttacagaagccacttcttttggctctctaggataattagataggtatttcagaaaattggaccttaaaactttgcttctttggaaaggttttctcctgattttttggaaaaccttttgaaccctcaagttaccatcaaactacttctctttgaactaccaatactgttgaatgccattacacctatctctgtgtaagtcataatgatgactctttaggataagtttagaacttgaatatttgcatgcttaaggcactgttttagaagcttacttagttttataaacactgctcatttttggatgtttgtagataacaatgaattgttacccatcagcattgtagaatagtgtcttcaaaggtagaaggagtatggttaagcacactcttgaaaactggagctttgtattctgtgactgctatggctagctttgtaaccaaagcaaaatgagaatttcactctacctgcatgagtataacaattttgatactgctcatttagaaataaatcatctggttgttcctccagggtactttctaagataagccttaaacagaaacccctaagaaaggttctctgaaaattatttggtgggttaaatgcctctgatccacagagtttcatatttgaagtctccggctttgggcctggcaggctggcacatccatatttgtatggaaaaaaaaaaaaaagaccctacgctaccacttcaaaaagtgacatgaagtgtagtatcctggcccttcattgtcattctctcatgatttttgttttgttttcaacaaaaattggttggtcattaaatatatcatatgttaggcacagtgacctggttattttcacatgttacttcattttcttatcaaattaaatgtttgtgacatagtatta

SEQ ID NO: 729386 - DNA, 536 bp, Homo sapiens
  misc_feature (134)..(134): n is a, c, g, or t
cacagccccagccagcagatcccatgctgcccctagtcctgggcatggtggcaaacatggaggcggagaccagggcattcagactggactcctgtacctcgctggagagaggcttctctcattcgccggaaccncagcacgctgctgcagggcctgtttattgtgctaattctggtggggtatatctctgtgaaggtgatgctcaagagcattaaaacaaggctgggaagaagagttccagcagctcctcctgctctcagacgcaatcttctcctccaggcatggaagtgtgtctgcaactgggcatccaggctgtttgcccctaatgtgctgccccgaacgggctcttaacaggtgggcaggggttgaggggaccaggaggtggctccaaagggtacagcaaggaaagcttttaaagacagctgttgtgctccaggctctccatgccaccacctgccctagcatttattaatagtgttagaattacaagtttatgaaatgaaatataaataaagtttgatttctgaaacttcaaa

SEQ ID NO: 729387 - DNA, 1116 bp, Homo sapiens
ctaggtggaaagcgacgtagactcccagccagtgccaaacatagatcatttactcaccaacattggaaggacaggagtctccccaggagatgtatcagattcagctactagtgactcaacaaaatctaagggttcttggggatctggaaaggatcagtatagcagggaactgcttgtgtcctccatctttgcagctgctagtcgcaagaggaagaagccgaaagaaaaagcacagcctagcagctcagaagatgaactggacaatgtattttttaagaaagaaaatgtggaacagtgtcacaatgatactaaagaggagtccaaaaaagaaagtgagacactgggcagaaaacagaagatcatcattgccaaagaaaacagcactaggaaagaccccagcacgacaaaagatgaaaagatatcactaggaaaagagagcacgccttctgaagaaccctcaccaccacacaactcaaaacacaacaagtcaccaactctcagctgtcgctttgccatcctgaaagagagccccaggtcacttctggcacagaagtcctcccaccttgaagagacaggctctgactctggcactttgctcagcacgtcttcccaggcctccctggcaaggttttccatgaagaaatcaaccagtccagaaacgaaacatagcgagtttttggccaacgtcagcaccatcacctcagattattccaccacatcgtctgctgcatacttgactagcctggactccagtcgactgagccctgaggtgcaatccgcggcagagagcaagggggacgaggcagatgacgagagaagcgaactcatcagcaaagggcggcctgtggaaaccgacagcgagagtgagtttcccgtgttccccacagccttgacttcagagaggcttttccgaggaaaactgcaagaagtgactaagagcagccggagaaattctgaaggaagtgaattaagttgcaccgagggaagtttaacatcaagtttagatagccggagacagctcttcagttcccataaactcatcgaatgtgatactctttccaggaaaaaatcagctagattcaagtcagatagtggaagtctaggagatgccaagaa

SEQ ID NO: 729388 - DNA, 822 bp, Homo sapiens
ccagactataaattgggacagctgagcttgcagaatccagacaaccaaactccatcaatcaagaggaacttaatccagggttcttctgctcactgggtcagaagcatccgatttcctgtcatcggttgcggttcagccatgttaatactgaaagtataagaatatcataatcccagagtgatataaagacctttccaaggaagatgagatacccggaggctgtgaaggagaagtctgaaggatttgaacgcgttcaaatgaaaacctttggttcagcaaaacaccagaaacaaattcaaaagataaaatacactccggagaagcccattctctcaacgcatctgacagttcacaaagagcaactgcagtccaacttaaaaaataaagaaaatggtaggaaaatgggcaacatgcactgaggcaatatataagaagaaggaatgcgcaattaatcaacaaaagcctgctctttcctaacgagtgaagatacaagcttagtaaatattaaaatttattgaagataaaaatggacacttccggccatatataaaagcattgttggtaagagagtggggtaattgacatgctcctgggaaataatacgcattcagacaacctctaatgagtgaatccactgggggtatccactaggaatagaaaacgaccaccaatgcccaagtttgtggtccagaatttgagcagcgatctaacaaagtagagtctccccctgtgtcatgggccccacttcttaagcaaagaagaatgcctcattttggtaactcacccaaataaacagaaattttttttgataatcttatcgca

SEQ ID NO: 729389 - DNA, 667 bp, Homo sapiens
aacaccaacgtgtacccgtggtggggtgaggccatgggctgggccttcgtgctgtcctccatgctgtgcatgccactgcacctcctgggctgcctcctcagggccaagggcaccatggctgagtgctggaagcacctgacccagaccatctggggcctccaccacttggagtaccgagctcaggatgcagatgtcaggggcctgaccaccctgaccccagtgtccgagagcagcaaggtcgtcgtggtggagagtgtcatgggacagctcagctcacatcaccagctcacctctggtctgtggggcaagaggctgcaatattccatcctgggtgtctgggctgctaacctggcctgctcaggcttcccaccctgtgccctgggctgggcacacccccgggaagggaccccggacacggctcccacatccaggctcaaggcggatgcacttcctgcacctccagtcttctgtgtagcggctttaacccacgtatgtctgtcacgtccagtcccgagacggctgagtgaccccaagaaaggcttccctgacacccggacagaggctggagggctggggctgggtgagggtggtgggcctgcggggacattcttactgtgctaaaaagccactgcaaacatagcaataaaaacctgtcattttccaaagc

SEQ ID NO: 729390 - DNA, 778 bp, Homo sapiens
cgtggtcttcttgcgcgggatagggcacctgaggaagcgggctgcgcctgtggcacagtggtacggggccggaagataacttacctgaagaggcgatcaatccctgagaatcgcgggcgacccgttttttgtgtgcccgggtgcggggtgccgggacacggcgttgaaggcgctgagcggagggatctcagggcgagctcgagcggcgacggcgcgctctgtgattgcaccgcgagcgcctgaggtgatctcggcctacatcgcgtcagcggggccttgggcgtgagcaccgccccctgtccggacgcagggtactggggcacctcgaactgtggcacctcacccttctccggggccacgtcttggggactccgacagccccaaataagccctcggggactggggttgtgaaaagcgaggtcgtgaagacgccggcctcataccgaagggtaggacggtgaggtcagccccgtcccactccaactaaaatcaacctgacaggtattaatatgccaccatgaagttaacaaatgttggtgattaagtatgctaggttttacgaaaacagattttccaaaataaatgtacatgttttaggacgtcgcgagccgtttgaggcagcattccccaaggacgccacttagtctgtaggtttagcggctagaaagattcagaagctgagttcagtcctgccgccacaatcaatcttcgctcctatggcttcacagaagcgtctcccatgactaccaaatttaactccttccagatcacccacggg

SEQ ID NO: 729391 - DNA, 250 bp, Homo sapiens; identical to SEQ ID NO: 409597

SEQ ID NO: 729392 - DNA, 2893 bp, Homo sapiens
cgtggtcttcttgcgcgggatagggcacctgaggaagcgggctgcgcctgtggcacagtggtacggggccggaagataacttacctgaagaggcgatcaatccctgagaatcgcgggcgacccgttttttgtgtgcccgggtgcggggtgccgggacacggcgttgaaggcgctgagcggagggatctcagggcgagctcgagcggcgacggcgcgctctgtgattgcaccgcgagcgcctgaggtgatctcggcctacatcgcgtcagcggggccttgggcgtgagcaccgccccctgtccggacgcagggtactggggcacctcgaactgtggcacctcacccttctccggggccacgtcttggggactccgacagccccaaataagccctcggggactggggttgtgaaaagcgaggtcgtgaagacgccggcctcataccgaagggtaggacggtgaggtcagccccgtcccactccaactaaaatcaacctgacaggaggtggttcaggaaaacggtcccatttggcacctcaagtctaggtccctcaagtctctacaacagtatgcaaagaaaatgttcatcttcattcttcttatagttttctggtaacttactgaaccaagcgcacacacactctccaaggacaaacatttttcagtgctgggacaatgcaaattcagctctcggcagactactacacactgtgcatgatataccaagactaaaagactcataacctacccgcagaaagagtgcatcttccatagtagctctgcaaaaagatccaaaagaaactgttaatggcctggcttaagtcaaattgtgtccggaattggtgggttcttcgtctcactgacttcaagtatgaagccgaccctcacggtcagtgttacagctcttaagatggcgcctctggagtttgttccttctgatgttcggatgtgttcggagtttcttccttctggtgggatcgtggtctcgctggctcaggagtgaagctgcagaccttcgcaacttccttccagaggaagatgttgactctaatgtattctgtctaggatgtgtttcataaatctggttagaagatttcccttccagcatcaacaaattgttttctaaatgtggaaaaagagacattcagtacaggctaacgtaacgtgggacagcatgcaaagccatgagaagtgggaaaatgagagagaatctgggcgtggcttacagggctgctgaagtaagacacacccttcgcttcacctgtggcctcccgcggcggctgcggctccttcgcaggaccggtagggggcgcgcgcggttgagtccagcaattgcgaggacctccgcaggcgcagcccagcactgacgcctctccgggccgtggctcctctttcccaggccgaaagcggccgggccctctgctccgctgcgccctggcgcggccgcacccactgcgcgtttgtgagctggccatcggtcacactgggatactcgaggaggaggcctggggcctgcattcaattccctaagagggacccgcgctggccgctgcaggcgggtggagaacgggcgtctgagtctttggctttcgtaccggaatctccccgggagattttacaagcccctccgaatgttctgattgaattggtctgggggggtcggtccgggcatctaacgagcagccgggatggagaattactagtctggattctggtcctcagaggttcactcacgttaatcaacccgagtccatcttggtgggattgtcttgctccgaggccctcccactgagctttattttcctgcctgatttcggggtccgctaacaggatgaacagcggaccatacaggcacggtgaaaatgacacttggtgacgtggaagacccagcttgccacagttgaggcagagctcctcagggtcttttgtcttagttatccccgagctatttttcaggaaccgacaggctcccccaccccaacaccggatgaaggccagcaactggaggccaggaataatcaagcacgctctcatttcaaagaggtgacgattgtgcccgtgtttaaaagggatgcctgagaccatgaggatttggagttttggaggcggatctgcctttggggagtgagcgtagggccctaagatgtggttgtgctttgagacagttcccaaaatacggtatttgtcagaaaacatgtagtatttgtataatttgagaatgtaattgaagaacccgatatagagcttttagaaaggggaaatagaaaacttaaaaagaatcttgcttggtatattaataccaacatctaaaatataataaaattgaataaaccagtgagttttatactatgattgaaataaaatgccactatgttcttaagagtgctagtttaacaggaaatctccaatgcattattatctagactcatctcaaaggctcacttttcatttgcatgggcccttgctatttgtagggtaggaggcagcacctcgttctggtggctgccaccttcatgaggagacactccttgttaacaggatggttagcccacggctcttcccagcccccttttccacacccagtaaattgttttagtttatggccctcagctgcagttgcaatcatcatcaaattccagttttgaatttaaaggtgaataatgaatgcaatgaactttctagaatttatgaagggcagtgatgttcctttttatctaataattctacatgtgtagcctttcagtatgctattctgtggactgaatttacaaattgtcatttgtttaatgaactgttaatataacatgatgactaactgaaaacacatacaatttgctggtattccagaagtctatggatttcgttgttttgtttaaataaaaggcattaaaagc

SEQ ID NO: 729393 - DNA, 601 bp, Homo sapiens
ttatggacagtaccctaacagtggtcgcttctcccccctactcccgcgaatgacgtcatcgcctcgcggccccgtttcgccattgtatcctcaatgtgtaaacttactgagctgccactcatgtcgcacagtgggtgcaaaccttctgctgctaggcattgtgccatcgctggacctgcaaacatgcaaatatttagaccatcaacgacagatgtgtagtcgggttctgaaactcctatatcctattcaccaacaccctcaactcaatttcctccctgatccttcgcccacctgcaaaactgttagtctgcaacagttcaaccaaccttgctcactcctgcatcggtgcagaaaatcacacaaccctgagaattggcaccactgcgaacgaaaagtgtccaacttcagtcgggacttccacgtgcgactacgcaatattgctgagcctaagacagtcacatttacacattgctactcagattatctcctattcccctcccctgctgttcccagccctcacgctcttctaacctcttactgaactctactcactcacccgctttggtaaaaataaaaataaaaaattttgtctcttaaatct

SEQ ID NO: 729394 - DNA, 520 bp, Homo sapiens; identical to SEQ ID NO: 283977

SEQ ID NO: 729395 - DNA, 662 bp, Homo sapiens; identical to SEQ ID NO: 45661

SEQ ID NO: 729396 - DNA, 474 bp, Homo sapiens
cctctgctttgcttggccagttgcttcttgcacaactgcatcacagaaaaagggtgaaggcagctgggcagatccaggcctggtggcgtggggtcctggtgcgcaggaccctgctggttgctgccctcagggcctggatgattcagtgctggtggaggacgttggtgcagagacggatccgtcagcggcggcaggccctgttgagggtctacgtcatccaggagcaggcgacggtcaagctccagtcctgcatccgcatgtggcagtgccggcaatgttaccgccaaatgtgcaatgctctctgcttgttccaggtcccagagagcagccttgccttccagactgatggctttttacaggtccaatatgcaatcccttcaaagcagccagagttccacattgaaatcctatcaatctgaaaggcctggggcatggagaacaggctgcactaccctaataaatgtctgaccaggt

SEQ ID NO: 729397 - DNA, 573 bp, Homo sapiens
atcaggaaacagcaaccagagggagatgatcacctgaaccactgctccaaaccatgggcagtaaatgctgtaaaggtggtccagatgaagatgcagtagaaagacagaggcggcagaagttgcttcttgcacaactgcatcacagaaaaagggtgaaggcagctgggcagatccaggcctggtggcgtggggtcctggtgcgcaggaccctgctggttgctgccctcagggcctggatgattcagtgctggtggaggacgttggtgcagagacggatccgtcagcggcggcaggccctgttgagggtctacgtcatccaggagcaggcgacggtcaagctccagtcctgcatccgcatgtggcagtgccggcaatgttaccgccaaatgtgcaatgctctctgcttgttccaggtcccagagagcagccttgccttccagactgatggctttttacaggtccaatatgcaatcccttcaaagcagccagagttccacattgaaatcctatcaatctgaaaggcctggggcatggagaacaggctgcactaccctaataaatgtctgaccaggt

SEQ ID NO: 729398 - DNA, 751 bp, Homo sapiens
atgaactgctggattcagtttgcaagtactttgttaaggatttttgcataaatgtttgtcaaggatattgacctaaagttttgttgttgccaggttttggtatcaggatgatgctggcctcatagaatgagctggggaggggcctttcctcctcaattttttggaatagtttcagtaggaatgggaccagctcttctttgttcatctgatagaattcagctgtggatccttcttgtcctgcgctttattttgttgagagttgcccaaggaagtcaacaggagagccagatcaggaaacagcaaccagagggagatgatcacctgaaccactgctccaaaccatgggcagtaaatgctgtaaaggtggtccagatgaagatgcagtagaaagacagaggcggcagaagggcctggatgattcagtgctggtggaggacgttggtgcagagacggatccgtcagcggcggcaggccctgttgagggtctacgtcatccaggagcaggcgacggtcaagctccagtcctgcatccgcatgtggcagtgccggcaatgttaccgccaaatgtgcaatgctctctgcttgttccaggtcccagagagcagccttgccttccagactgatggctttttacaggtccaatatgcaatcccttcaaagcagccagagttccacattgaaatcctatcaatctgaaaggcctggggcatggagaacaggctgcactaccctaataaatgtctgaccaggt

SEQ ID NO: 729399 - DNA, 3131 bp, Homo sapiens; identical to SEQ ID NO: 43928

SEQ ID NO: 729400 - DNA, 609 bp, Homo sapiens
aatttgattaaactccaatattatctttaataaaaaacttgacatttcccttcatatctgagaagacacactttaccttgttgataaaattgaaagaaaaaaaacccattctccatggtcactaacagaaacgtcttgctaaatcctcttgcttatttgagggctgtggtccatcagtgactgaccagacaatcgactttctcgtgcctcagttttcctcataagaacttgggttggagccaattgagaggtaatattcccagtaaaaattaaatgcattctgaaagtgaattgactgccaagagttttgagtaatccagcacttcttctaataatcaccactcataatggaatttgtgtccttaaagttatgttattcttttcaaggtgtcactggttgaaaaccatttggccggactggaaggaagggcactagcagacatgtttgacttcctgtccaaagagctggtgagactgcaggaggagaggaggatccatgcctttgtcatgctggctgagcgccagcggcgggtacgagaggctgaagagagtggtcggcgccaggtggaaaaacagcgcctgcgggaggaggacgagatatttaaggag

SEQ ID NO: 729401 - DNA, 395 bp, Homo sapiens
gattagtggaacttgagtcatgtctcccagattttgtgacacaaccccaaatcagagctccaaaacctaaagtcattaccaccaaagctggttttctgaagagggcagcaaggttggactatgagttggcagaggttcataaggcactgttggataagaagaataaagttcttgaagtaaagaaaccccctcgcttccttcaaagaaacccaatacctcaacctcggcttccaactccaaccttggaaatgacgtccaatgaagaagaagaaatggaaatggctgtgatctaccttcaaaagttactccggggcagagtcgttcagaacatggtgtgtaggtccaaccgctggccctgcatttctcttttgagaataaattttttagaatgcata

SEQ ID NO: 729402 - DNA, 446 bp, Homo sapiens
atgtttgaagggaaagaaaagcgactggagttgatccaggagttgcgcacctgccacgcactacaagaagatgaaaagctggtgaaaaaagccgagaagcaagtgaccctggccttacagcggcagaggaacttgcatgagcacaaggtgtcactggttgaaaaccatttggccggactggaaggaagggcactagcagacatgtttgacttcctgtccaaagagctggtgagactgcaggaggagaggaggatccatgcctttgtcatgctggctgagcgccagcggcgggtacgagaggctgaagagagtggtcggcgccaggtggaaaaacagcgcctgcgggaggaggacgagatatttaaggaggtggttaaagttcaccatagtactataagctcctacctagaagacataatactgaataccgaagcgaatactgcaga

SEQ ID NO: 729403 - DNA, 1492 bp, Homo sapiens
ccccaccttaggagccctttgtgagggggaggccccagctctgtgatgtggacctgggccccaataacttgtcccagaggggatgcccagggctcagttgcctgaggacagcagtgcagttgacatggatattctctttcctctggacagtgttatcggtacagagctgtgccccagccccattccccagatcatccatttcgtcctctttgttgtgttcagcctggtgatcctgattatcttatgcccctacattcccagggagccgtcctcagtgcctcccagagaggacagcgagaatagaaggaaaccagaaaaaggttattacgcactttagaaaccagtgaaagagaagcacacaggctccatgagctgggcggagaaagtgtgtcattcacgagcactgggtctgcagctgtggggacaggagactgagacccggcctgcaccctctttcttgtctctcaggatcaagctgaagtgggggaatggctcaggatcggaaataaatatatcactttgaaagactgcagaattctcttgaaagaattggagaaccttgaggtctacactttcctgctggaaaagcgcctgaagaagctctctagggagggcagctcccatcaccttccacgcccagtccgcccaggggcagtgtacaaaccagcacctgctaggaaccaccggccacgtggggggcgtgggaaagcttctcccaccagcttccatgtgtccccacgggctcccccggctcctctggcctccatgccgtcatcagtcccgaagacctccatagagtcccttgggtctccatcatccctgagctcctcccaggcatcagagcctctgtgtcccctgaagcacccttcacaccggccacctgcaagcaccctatcaccaaacccgaccagctccacagaatccttggggtatctgtcatccctcagctcctcccagccaccagagcctttgcgtcccctgaagcacccttcacacaagccacatgggcgttcccctccccgacgacggaatcctggctgggtgtcctggtccgactccatgcaggctgattccgaaactgacgccataatatgcccaatgtgcaaggcccctgagcgctcctgtccacacacctggtgggtgccttctagccctcgagtgatccgaggcgttggtcgctgcagtgatcccaacctgggcctctcctggaggcaggaggctgctagagcctggtgccactgcacctcctcacagtacccattcgagcaccctaatcttcccacccacctaccaaaggcttccttctagggagaccccacatgcaggcagatggaggcagggctcacactggcctccagggctgtgcaactggcatattattttgcacataacttggctcaggtttgtgaggtctgatttttaaaatgaagcaacaatcacataaagattttcaaacaaataagtcaaatgtatggcagtatttctattttat

SEQ ID NO: 729404 - DNA, 909 bp, Homo sapiens
atcagaaagaagcaggcgaagaaagctgcagcgatcagagcaaaaaagagctctaaagtcagagcaagccaagaacttgagatgtctctgaagcctgaggaaccaggaaaacccgtagtcgccacattttctgagagccggatattggaaaagcaagataaacgagccagctaagcctgtggaacatgcctcatacctggagtcgccattatccctggaattacaaagatctgcaaaatttatagcgctcacagaaaccctggaggctgtaataaacctggagccccctggactctcctcagctcacaaaaccctctcaattcctacacatcccttaacactcattctccattgaataggtggttactcttagacctagtcttagaacctctgaagacacactttgtaatttgttgtttggctaaatgagaagaaatctgtgccaccctgggaaggtgtcaaaagaaggaaaaatacatgtgacaatatgaatcaagtccatcagcaagttacttttgagcgcctactgtgtgtcagtgcctgagatacacctacaagagcgccaggctttcaagccttcatatctggatagaatcccaacttcagtgcttggtggctgtctatctttggacaagatctttcattccccatcctttgaacatcacatgacccatatctgggtggagaatgggtgaaaagtactgttcagagatgcaggtgagaaaaaacatgacgatgggccctgaatgccaagattcattggagctttggagctttatcttgtaggaccttatcctgactcccttagaatgtaagttccaagagaacagggactttgtctgccttgttttctacttttatcaccagcacccagaatgatgcctaaaatacaataagatctcaagaatg

SEQ ID NO: 729405 - DNA, 779 bp, Homo sapiens
gatgaagcactaaaagataagctagagccaaccctctatagaaaacttcaggatattaaggaaaaggaaacagacaaaattgcaatagtgcaaaaggttatttcggtcatcctgggagaagctacatctgcagccagtgcagtcgctgttaaacttgtgggctcaaatgtcacaactggcataattaacaagttggtcactgtgttagctcaaattggtgcttctctccttggtagtattggagttgctgttcttggccttggcatagatatgattgtccgtgccatcctgggagcagtggaaaaaacacagcttcaagcagccatcaaaagttatgagaagcatctggtggagttcaaatcagcctcagaaaaatataatcatgccattactgaggtcatcaatacagtgaaacaccaaatgaaatgaacagccgttttatttgccactgaagtgtttttctgcttccttttcagtaacagtgtttgcttctttgattaggttcattttctataggcttccaatatggacttaaataagataaacaatttggagagggaaactggagatgccaagactagatgactagatgagttttgagtcaacaatgcctggatcagctgatgctagaccctgtgaggtaaaaaaattttctccctggatgttttcacaccctgctctaccagatcaacattggggtaaatgctatcgtagagtagcaagtataggggttacttttctcttttctaatttcagtaaaattcttaaatttcacattg

SEQ ID NO: 729406 - DNA, 580 bp, Homo sapiens
ggccgaataggaacagctccggtctacagctcccagcgtgagcgacgcaaagacgggtgatttctgcatttccatctgaggtgaagacaccatgttcctctactgttgtggatgcagccctcaccagacgaccgaacctgccagtgccttgttcttggacttcctagccttcagaactactgtttgacctctggtaactaaaactgcagaaggcaaaactggataaggagactactgtaatgattatgctattacaagacgctcgattgctaacatcagacatttttataaaaggccagaatcctgctaggacatctctgcctgtggaaggagggctggatggcatactgggaatggctttctaggatgacttcctgttgctacagactacaagaagcatttctggccttgatgttgtctgaatgaagaagacataggagtttcaccaaaggtaggatcctgattgttacacgaactgtccacctccatccagagccgtgtggcttgtagtgccttctcgtggagatgcgaaaagggcacctgttcccaaaggtgaaatcataacatgctgaaaaaaagc

SEQ ID NO: 729407 - DNA, 478 bp, Homo sapiens
gtgggagctgactgtcccctgggagtaattctgtgaccataattagccacacagctcctctggaggcccctctaaaggacccccaagcttgggcacatgacccaaggtcagccagcaagatgccctgtcccggaaatttacatctgtgtatgagccacatgagaacagggaagcttgcagtgagagcacagcagttttcctggaactgccccacaaggctgtctctgagccccttttgctgggtccccagagctgctgtggctcccattcttcctgaggtctgagattccatcttccttcagttctgtaggatcctgattgttacacgaactgtccacctccatccagagccgtgtggcttgtagtgccttctcgtggcaggtatattttcctgcctgttcacgtgacttgtgttggccagtggaatatagtttgatctgcagtagtttgaatctgaggatgctgaacctgtggataa

SEQ ID NO: 729408 - DNA, 509 bp, Homo sapiens; identical to SEQ ID NO: 90848

SEQ ID NO: 729409 - DNA, 844 bp, Homo sapiens
ggcggcgcggagggatctccgcgggagccgttggggctgttggcctcgggctgaggtgcaaggaccaggactagggcgagggcagcggtccaagaaatagaaaacaatgactgggagagcccgagccagagccagaggaagggcccgcggtcaggagacagcgcagctggtgggctccactgccagtcagcaacctggttatattcagcctaggcctcagccgccaccagcagagggggaattatttggccgtggacggcagagaggaacagcaggaggaacagccaagtcacaaggactccagatatctgctggatttcaggagttatcgttagcagagagaggaggtcgtcgtagagattttcatgatcttggtgtgaatacaaggcagaacctagaccatgttaaagaatcaaaaacaggttcttcaggcattatagtaaggttaagcactaaccatttccggctgacatcccgtccccagtgggccttatatcagtatcacattgactataacccactgatggaagccagaagactccgttcagctcttctttttcaacacgaagatctaattggaaagtgtcatgcttttgatggaacgatattatttttacctaaaagactacagcaaaaggttactgaagtttttagtaagacccggaatggagaggatgtgaggataacgatcactttaacaaatgaacttccacctacatcaccaacttgtttgcagttctataatattattttcaggaggcttttgaaaatcatgaatttgcaacaaaattggacgaaattattataacccaaatgacccaattgatattccaagtcacaggtt

SEQ ID NO: 729410 - DNA, 478 bp, Homo sapiens; identical to SEQ ID NO: 90851

SEQ ID NO: 729411 - DNA, 522 bp, Homo sapiens; identical to SEQ ID NO: 90852

SEQ ID NO: 729412 - DNA, 1134 bp, Homo sapiens; identical to SEQ ID NO: 62601

SEQ ID NO: 729413 - DNA, 484 bp, Homo sapiens; identical to SEQ ID NO: 287398

SEQ ID NO: 729414 - DNA, 308 bp, Homo sapiens
ccacaattctccattcttcttcaaacctactctaaacaacactaaggttaactatttattcgggtcttcatttctttatgaagtttccatgttatgtaaaactaacattaatatttatgcttttctcttgttaatttgtcttttgttacaggatccccagccagtgagcctaaaatgggtagaaggaaaagatatttcttaccctacgcacccaggtccaagtcatcattattttgtctgaaatttatcttcctaactgatttctctgcttccccattgtgccttaagagttagttttccacagagca

SEQ ID NO: 729415 - DNA, 332 bp, Homo sapiens
gggctggagatcaagacctacccattgtgatgaataaatccaggctctcagcaatgcagggagaaaaagttttgtctatcaacactgcagcaaccagttagcacaggcaccagccctggagttcatgtcctcatcaaaggatggaaagaagcaaagctcaaatcagcttgggaaggaccttacctagtgctcctgaccactgtaaccatcatccagacagcagagaaaggatggactcattatacccgagtcaaagtgttgccacctccacagtcatgggccattgttccaggggaaagccctaccaaattaaagctaagaaaaacttatca

SEQ ID NO: 729416 - DNA, 354 bp, Homo sapiens
gggctggagatcaagacctacccattgtgatgaataaatccaggctctcagcaatgcagggagaaaaagttttgtctatcaacactgcagcaaccaggtaattctgtgcacagaccaagttagcacaggcaccagccctggagttcatgtcctcatcaaaggatggaaagaagcaaagctcaaatcagcttgggaaggaccttacctagtgctcctgaccactgtaaccatcatccagacagcagagaaaggatggactcattatacccgagtcaaagtgttgccacctccacagtcatgggccattgttccaggggaaagccctaccaaattaaagctaagaaaaacttatca

SEQ ID NO: 729417 - DNA, 661 bp, Homo sapiens
cctgaaaactcatgtatttaatgaaatgcatgaagaatacagttggcagtctgagatgataactttagtatatttttcccagatttcctatagttggtaaattatttcttggttattgaattcagttttacttttttggtactatgttggttaaggaaattgctgtggttttccttgctgttccatttgactgcttggggcagtctggtcttggcttttttgggagttggtagagatctttttttttttttttcctagatcttatgggaaatacattatgccaaaatcatcctaacatgaaatctggaagcaagacactaaattgtggctactaccagatacataagcttgagttagctgttagattttacagttagtacatgtgaaagtcttagtcaacataaagattatgcatttatttttgctcttatttacagttgactcataagtgtaaggacaatgtaaaagtggttaaatagggatgttaggtatcgtgtggagaacggatgctgcatttaatggtctttaggtttcctgtggtcagcttttttcaaaaaaattaggaaaatttggcaattagctggttttttttctgccatagtattttgcacttcaattatttaattgcacttcaatttttagttttcgggttcgtaaaacc

SEQ ID NO: 729418 - DNA, 499 bp, Homo sapiens; identical to SEQ ID NO: 66407

SEQ ID NO: 729419 - DNA, 4734 bp, Homo sapiens; identical to SEQ ID NO: 66406

SEQ ID NO: 729420 - DNA, 3052 bp, Homo sapiens
ctgggattacaggtatgagccaccgcacctggcccttgggcataaattgtaacataagtgtatgttcttcgacacatttaagagtggagtgatggtgtcataaaattaaataatgggatgttctaagtcccttaagctggacctttccaatctgtgcatcaaagctaattctgcattaaagtgcaaggacggctcacaaaccccatagttgcctgatatagattggcaggtgcattctcttggtttcgtttttattcctgctgaaatgtttaatgatcttgtgtggcgtcattctgttgccgattgtgtaagagagaagctggacctgggtggagacaggcttcttaggtggcctcagtgggctgttgggcatttatggttctgctggttgcagctgagatcttcagacagaatactcttctccttgaccagcgcttatctttcagattgtgaactaggcccagacaccattaccattcaccatctctaacattctcttattctttgactacataaggcactgtcgttctaggggaaacatgatagaggaaggaagttggttgcagaaaccattctttgaaagacttttttttttttttaacttagtcaattaaaatagtcctttaaggtgaacttagttctgagtttctggtccttttcccagatggaaaaggattttcaagaaaaaatcctgtcacttactgagcatgtgtgccggctcctttttggcacttccatcctcaccacaaccctataaaggagggagctcgtggcgaggcagcccaggtttctagataaggagagtctcgaggaggttccttaaccttcctgtggtggtttttctccattttttaaaatgaagaaacagaggccaagagaggttagggaatttgctcaaggtcgtgcagccagtggcagctgttctcactcggagttctgagagaggtaagcctcagaagccgggcatccattgtgtgtaacgtagtaacgtcttgcctgtgcatctagaaaggtacctgttatgttccgttcataggagaattgagaaaatattaatagtcacttcattttaagaactccagttgaaaaaggctagacagtcaatgtttgttcattgtttttctccattcttccccagcatgcgcgctctctcatgcacacgcacgcatgcgcacgtggctgagccaaagcctaagctgcgaattgagtttcgttaattcatgtggaggcagctgagagtgccacctggtcctgaagaaattgggatacttgtgggcacaaaggtggacctgagatcactggagccaagctggtggaagtgttgaccactgccgttggcagagagctgtcattactggtgcttcaggccacagctcagcaggctgtccttgttctgttttgttaagagcctagcagcatggctagcttgcaggcataatcccagagcctcttgctatctgcctgcaggaagtctctatgtgctccagcacactgaaggaatttggtgctcactttctcctgcttttgagctttggtcctgtgttattactaatccttagaggaagattttgactgtaaccactttcctgagtgctcttaaggcaggtccagaggattctcacagcgtgaaatgagaaaacgctcagcctcagaaaaatggaagttattcttttagtgccaaagtgtcattggaccacagtgcagcttggttaattcaggttaagacttagcccctggaacagtgtcaagccaaggcctgtgtggtttcatcatagatttgtaaaacaaaaaacacgtgtgttctggtaaattccaagcgcacattagtgcatacgtgtatgtgcaggagcactccctgtaagactcttgttctcatttcacactggcgcgtccccggggctggggaaatcattttcatttttgagagtaaccttaactaattaaatggatcaagggactctttgtgttttgttttcattttgttttgttttttactttaatgtacagataaattaagggaaataataattaccttgaataattttgattctcgtaactaattttccacctatgtgtgtttagctcaattttgaaatggttcactgaaagatttccaaatttcttatcactgaaactgagttatttcacttttatgactgttagtgactcctctgttttatgtatttctggtgcagtataattcttctatgtctgtgtgtctgtgatagatctcagttcaagttagcgtttcccgagcacccatcttgtgtcaggcactctgctaatgattgcgcaggttacaaggtttagagtggccacatcccctgttcacttgcagtttagagtccagtcggaggaaagggaggaggggaatcatgttatagacataacttgatatcctgcaggactcagtgatgtatgagcctcaaaaaggtcacagctgagtgagagagttggtaatcatggaaacaggcgcatcggaaactcgcttcctatgggtcagtaaagtgtgtatgaggtggtgtggatgacagcacatagagctggaggggtgggccagcagcaaccaggagaaggcgttccaggtgtctgcacccaaggagatcctggggtcagaggcaggacatgtgggaaaaaccattggtcccttttacccagggaaggactcaagaagccgaacgtggtaggagatggaggctcccaagccctggcagacgttacagcagcgctgagcactttcaggaccaggactccaaggtccagctctggaacgcccctctctgccctgactttggttccttcatcagcagaggggctcctgggctatgggctcaagtctgaagtcaccttaaagagaaatctctacctttctgttctccttcattgctgaggcaggataatggtgtgaacccaggaggtggagcttgcggtgagacatgattgctcactgcaagcttgggtccaggtgtgttttgtgcagtgagctgagaccatgccactgcactccagcctgggcaacagagcaaggctctgttttgtttcgtttaaaaaa

SEQ ID NO: 729421 - DNA, 455 bp, Homo sapiens; identical to SEQ ID NO: 304308

SEQ ID NO: 729422 - DNA, 439 bp, Homo sapiens
  misc_feature (25)..(26): n is a, c, g, or t
  misc_feature (28)..(30): n is a, c, g, or t
aagaattcggcacgaggctctcagnnannncctgctcttactccaaaaagatggacccaggtccgaaggggcactgccactgtggggggcatggccatcctccaggtcactgcgggccaccccctggccatggcccagggccctgcgggccacccccccaccatggtccagggccctgcgggccaccccctggccatggcccagggccctgcgggccacccccccaccatggtccagggccctgcgggcctccccctggccatggcccaggtcacccaccccctggtccacatcactgaggaagtagaagaaaacaggacacaagatggcaagcctgagagaattgcccagctgacctggaatgaggcctaaaccacaatcttctcttcctaataaacagcctcctagaggccacattctattctttaaaaaaaaaaac

SEQ ID NO: 729423 - DNA, 373 bp, Homo sapiens
  misc_feature (25)..(26): n is a, c, g, or t
  misc_feature (28)..(30): n is a, c, g, or t
aagaattcggcacgaggctctcagnnannncctgctcttactccaaaaagatggacccaggtccgaaggggcactgccactgtggggggcatggccatcctccagggccctgcgggccaccccctggccatggcccagggccctgcgggccacccccccaccatggtccagggccctgcgggcctccccctggccatggcccaggtcacccaccccctggtccacatcactgaggaagtagaagaaaacaggacacaagatggcaagcctgagagaattgcccagctgacctggaatgaggcctaaaccacaatcttctcttcctaataaacagcctcctagaggccacattctattctttaaaaaaaaaaac

SEQ ID NO: 729424 - DNA, 585 bp, Homo sapiens
tacgaaaagtggtttgtttttttacaaatgtgtggttcatactcctgggtggccttattagcttttttggttgggagacaagggaaggaactttcttggatcagtgtgtgctggtgattttattgccttttcctcttaattcaatcccactctttcccttcctcaagtcttgttcacccagcctcctgccccaggaatcacggggaagaagtctgggagaccacagaaaaaacaccaatgacactgagctattagagatcaaaactgggtcaggaagagttcatgttaagctttcacatgtgctaagaacgctgaaagatacacactgatttccatcttaatagtgccggataattgacaaatttgggacaagatgagggagaggtcaaaatccccctaacttcccaaagcaaaaaaacaggagtataatgatcagaaacgtaatagtagtgtcagaagcacacaatcagctgtggacggtgaaacatataatggttctatctgttctgagattgtaaaagcacaattattttcatcaggataaaaaataaaaatgaaaaactatgctgttgaatggaaatgcta

SEQ ID NO: 729425 - DNA, 807 bp, Homo sapiens
gtttcataatttaacaacaattatcaatgaagtaggtaatgatcttgatattgcacatctgcgaaaagttatcagtgaacatcttacaaatttgttagaatgttttgaattttattttccatcaaaagaagatccacgcataggaaatttgtggatccaaaatccatttctttcatcaaaagataacttaaatttaactgtaactctacaggataagttgttgaagctggctaccgacgaaggattgaaaatcagttttgaaaatacagcatcacttccttcattttggataaaagctaaaaatgactatcctgagcttgctgagattgctttaaaattgctgcttcttttcccctcaacatacctctgtgagaccggattctctactttaagtgttattaaaacaaaacatagaaacagtttaaatatacattatcccctgagggtagcattgtcatcaatccaacctagattagacaaattaacaagcaagaagcaagctcacttatcacattaaaagctttaaatattgatatgtaaggtattggttcaaagtatgcatataagcattgagtgtgaggaatttgctatttcactttaaactttctgtctagttacagttatggaagtatgagaagttatgagtgaaacagcaattttctatataaattgcctatatgtatattttcaattaagaatgtgtacagtttttataattctatttttcctcatatttgtcgtatttattaaaatataattttaaatctgttgattctaatattaaaacatttgatcttatattttgtg

SEQ ID NO: 729426 - DNA, 989 bp, Homo sapiens
gagtttcctcatgcgccagccagcgtcaccatcggccgcaactcgtcgcagggctcggtggacttgagcatgggcctgtccagcttcatctcgcggcgccacctgcagctcagcttccaggagccgcacttctacctgcgctgcctcggcaagaacggcgtcttctggacggggccttccagagacgcggcgcccgcctgcagctgcccaagcagtgtaccttccggtttcccagcacggccatcaagatccagttcacttcgctctatcacaaagaagaggccccagctccccgctgcggccactgtacccccagatctcccctctgaagatccacatcccggagccggacctccggagcatggtcagccccgtcccctccccgacgggcaccatcagtgtccccaactcctgcccagccagtccacgcggtgccggctcctccagttaccgctttgtgcagaacgtgacctcggacctgcagctggcagcagagtttgcagcaaaggccgcgtcggagcagcaggcagacacgtctggaggagacagccccaaggtctgagcccacctggcgccgtggtgcacctggtgacccaggatcgggccatagtgacccggcgcgggcggcacagacagcccagggcctgcgggcgtgtgctcgaggtggtctcagcccacagggaatggagccgcagctggcggtagagccgtcggccctttctcgttttcgtgcccaaatcatccccgttggtcatttgctggtgacaggggtggcgccgtcaccgagggtaccctcccgccacgctccttgttcatctgccgctggcagcccggcgtcaaagccttcatacagcccttgagcaggatggcgttctccttataactttgtcttagttcatttttgtccaatagctgttttcaaattgatttctggaagaggtgagaaatttcagaattaaattataataaaaccgaagttttccttccca

SEQ ID NO: 729427 - DNA, 606 bp, Homo sapiens
aattcgcggccgcgtcgacgaagacgacagaagggggggggagaggtagagatgagacaagaggtagaggggagaggtagaggtagccacgagctgataattacagacaagagatgcggagtatgtgggggctcattatcctgcatagtctatctttgtatatctttgaacttttcaagaataaaaaagcttagtatacatggcctggtcctaccagagactcacccaatgccagcctccagccagggagagccaagtttgcattttcacacgcatctcacactcctctgcactctcaacttggagagctccaaacagggaaaccccaagccttgctggcttctgccaaccccctgagcagaagcatgggtccccctgatcaccacctcaccaccctcatcctgatctcactgtacactccctttcctggtctgctaagtagcgggtgtttttccttgacactaacgctacagctagaccacggtgggcttggcaacaggtgtcttcccagatgctggcgttaacgctagaccaaggagccctctggtggccccgtccgggcatcaggctcgcactcttgtcttctggtcatcctcatgttccctc

SEQ ID NO: 729428 - DNA, 206 bp, Homo sapiens
acagcaaccaattgcaacaaaacaaaatgttaagaaatgatctttttatgaggcaattggaaatttgaacactgatcaactataggatgattggaattattaattttgtaaaggtgtgataagatactgcacttggctgggcacagtggcacatgcctgtaatcccagctacttggcaggctgaggtgggagaatcgcttgagctc

SEQ ID NO: 729429 - DNA, 422 bp, Homo sapiens
gtggcacatgcctgtaatcccagctacttggcaggctgaggtgggagaatcgcttgagctcaggagttcgagaccagcctgggcaatgtggcgaaatccccgtctttacaaaaacaaacaaacaaacaaaaaagatattgcagttgtgttgtaagcgtccttatctttcagagctacatagtggaatgtttatggaatatttaggataaatgatatacgcatttgggatttgctgcaaaatgacccagagtcaggggtcagggggagaggtagagatgagacaagaggtagaggggagaggtagaggtagccacgagctgataattacagacaagagatgcggagtatgtgggggctcattatcctgcatagtctatctttgtatatctttgaacttttcaagaataaaaaagcttagtata

SEQ ID NO: 729430 - DNA, 485 bp, Homo sapiens
  misc_feature (113)..(113): n is a, c, g, or t
  misc_feature (116)..(116): n is a, c, g, or t
ccgagtctttgccggacttagataccgggtccctggagtattcccccccgggggttatgtcctctccagtgtgttttttttttttgaaaaagtaaagagataataacaaaaanaanagttgagtaggaaggacgtattgaaaaatggaggaatctgataacaagtagtatgaagtcagatttgtaagagtctgagaagaaataagtagagaaaacagaaaatggtgtgaggtttacagtgttaaccacaaagtgaaagcaggcaagaacgtggtgggtacctggctgggtaaaggtcactggcaaagctttggtgtccatagtgactcaaaacaaacaaacaaacaaacaaaaaacaaacaaaaaaacaggtacgataatctaccttaggctaaaaaaaaaaggccaaatttcagcctgaaagggcccacagtatgcccaataaagagaaaatgctgacatctattaatacatctactatggtga

SEQ ID NO: 729431 - DNA, 431 bp, Homo sapiens
  misc_feature (59)..(59): n is a, c, g, or t
  misc_feature (62)..(62): n is a, c, g, or t
attcgcgggcgcgtcgacaactcttgtttttgttattatctctttactttttcaaaaanaanagttgagtaggaaggacgtattgaaaaatggaggaatctgataacaagtagtatgaagtcagatttgtaagagtctgagaagaaataagtagagaaaacagaaaatggtgtgaggtttacagtgttaaccacaaagtgaaagcaggcaagaacgtggtgggtacctggctgggtaaaggtcactggcaaagctttggtgtccatagtgactcaaaacaaacaaacaaacaaacaaaaaacaaacaaaaaaacaggtacgataatctaccttaggctaaaaaaaaaaggccaaatttcagcctgaaagggcccacagtatgcccaataaagagaaaatgctgacatctattaatacatctactatggtga

SEQ ID NO: 729432 - DNA, 1583 bp, Homo sapiens
acagctgctgctggctcttcctcttgcggccttttcctgaaacggattcttctttcggggaacagaaagcgccagccatgcagccttggcacggaaaggccatgcagagagcttccgaggccggagccactgcccccaaggcttccgcacggaatgccaggggcgccccgatggatcccaccgagtctccggctgcccccgaggccgccctgcctaaggcgggaaagttcggccccgccaggaagtcgggatcccggcagaaaaagagcgccccggacacccaggagaggccgcccgtccgcgcaactggggcccgcgccaaaaaggcccctcagcgcgcccaggacacgcagccgtctgacgccaccagcgcccctggggcagaggggctggagcctcctgcggctcgggagccggctctttccagggctggttcttgccgccagaggggcgcgcgctgctccacgaagccaagacctccgcccgggccctgggacgtgcccagccccggcctgccggtctcggcccccattctcgtacggagggatgcggcgcctggggcctcgaagctccgggcggttttggagaagttgaagctcagccgcgatgatatctccacggcggcggggatggtgaaaggggttgtggaccacctgctgctcagactgaagtgcgactccgcgttcagaggcgtcgggctgctgaacaccgggagctactatgagcacgtgaagatttctgcacctaatgaatttgatgtcatgtttaaactggaagtccccagaattcaactagaagaatattccaacactcgtgcatattactttgtgaaatttaaaagaaatccgaaagaaaatcctctgagtcagtttttagaaggtgaaatattatcagcttctaagatgctgtcaaagtttaggaaaatcattaaggaagaaattaacgacattaaagatacagatgtcatcatgaagaggaaaagaggagggagccctgctgtaacacttcttattagtgaaaaaatatctgtggatataaccctggctttggaatcaaaaagtagctggcctgctagcacccaagaaggcctgcgcattcaaaactggctttcagcaaaagttaggaagcaactacgactaaagccattttaccttgtacccaagcatgcaaaggaaggaaatggtttccaaggtattttaaatattaaagttaacttaaagaagtaaaagagttgttaatgttatatgttcaggcagtaaaagatcaacagccaaccaatgctgttgtcatttcaagagccatcaggcaaaataggttataagatgggagtctggtgacagacagaattgaaaagggcaaagttgtagtattaatatcaaatactcagctttaaaatgtctagcaatccatatttgaattttattttatttttttcggtaaagaaaagcagtattggccttggagtcagactgccctggttctgaatcctgaggctccttctactagttgtgtgaattcgagctagttatgatgctttctaaacccatttgctcatccgtacactgtgttaaccaaaagtactt

SEQ ID NO: 729433 - DNA, 894 bp, Homo sapiens
gcagggagggttaggaaaaccacaaacggagcccctgaaagcctcacgtatttcacagagcacgcctgccatcttctccccgaggctgccccaggccggagcccagatacgggggctgtgactctgggcagggacccggggtctcctggaccttgacagagcagctaactccgagagcagtgggcaggtggccgcccctgaggcttcacgccgggagaagccaccttcccaccccttcataccgcctcgtgccagcagcctcgcacaggccctagctttacgctcatcacctaaacttgtactttatttttctgatagaaatggtttcctctggatcgttttatgcggttcttacagcacatcacctctttgcccccgacggctgtgacgcagccggagggaggcactagtcaccgacagcggccttgaagacagagcaaagcgcccacccaggtcccccgactgcctgtctccatgaggtactggtcccttccttttgttaacgtgatgtgccactatattttacacgtatctcttggtatgcatcttttatagacgctcttttctaagtggcgtgtgcatagcgtcctgccctgccccctcgggggcctgtggtggctccccctctgcttctcggggtccagtgcattttgtttctgtatatgattctctgtggttttttttgaatccaaatctgtcctctgtagtattttttaaataaatcagtgtttacattagaaacaacaacacaaagaagcccgagggcccaaaagccgggcgcgcgacaagagggcaacgaacggccctggccaagcgggtccctgacccaaggctggcacaagggagaccgcggcccctaaaggacgcgatattcgaaagccggtaaccgtaggg

SEQ ID NO: 729434 - DNA, 920 bp, Homo sapiens
gcagggagggttaggaaaaccacaaacggagcccctgaaagcctcacgtatttcacagagcacgcctgccatcttctccccgaggctgccccaggccggagcccagatacgggggctgtgactctgggcagggacccggggtctcctggaccttgacagagcagctaactccgagagcagtgggcaggtggccgcccctgaggcttcacgccgggagaagccaccttcccaccccttcataccgcctcgtgccagcagcctcgcacaggccctagctttacgctcatcacctaaacttgtactttatttttctgatagaaatggtgtgtggcgcgtttgaccctttaggggaaggggaaaaatcgtagtagcggttcttacagcacatcacctctttgcccccgacggctgtgacgcagccggagggaggcactagtcaccgacagcggccttgaagacagagcaaagcgcccacccaggtcccccgactgcctgtctccatgaggtactggtcccttccttttgttaacgtgatgtgccactatattttacacgtatctcttggtatgcatcttttatagacgctcttttctaagtggcgtgtgcatagcgtcctgccctgccccctcgggggcctgtggtggctccccctctgcttctcggggtccagtgcattttgtttctgtatatgattctctgtggttttttttgaatccaaatctgtcctctgtagtattttttaaataaatcagtgtttacattagaaacaacaacacaaagaagcccgagggcccaaaagccgggcgcgcgacaagagggcaacgaacggccctggccaagcgggtccctgacccaaggctggcacaagggagaccgcggcccctaaaggacgcgatattcgaaagccggtaaccgtaggg

SEQ ID NO: 729435 - DNA, 386 bp, Homo sapiens
tgtgcgataccccaagattttcctccacccgccaaaggccttctcatccgcatcagcagttgctggaacccgcctgccggtgagggcgggccggggcggagagtcgggttgtccgagttacttgctgggtcttgaccatccctttaactttatcacatttctttaaagaaaatctgtcttgccctctctttattgctactccatccttctttcaagatcaaaagatttagatcaaagccaagatcaaactcactactttaaatagcagcaactttgccatggagtattttacacagaggagcttaatggagacatcaggaatttatcccttcattccatattcataactcggacaactcgtcgggatcctctagatgaccgcagca

SEQ ID NO: 729436 - DNA, 841 bp, Homo sapiens
ctgatgaacatagatgcaaaaatcctcaagaaaatactaatgaaccaaattcaacaacatatcaaaaagaaaatccaccatgatcaagtgggtttcatgccattaatgcagggatgatttaatatacacaagtaataaatgtgatagagcacatacacagatttaaaacaaaaatcacatgatcatctcaatagatgcagaaaaaagcatttgacaaaatccagcatccctttatgattaaaaccctcagcaaaatcggcataaaggggacataccttagagtaataaaagccatctacaacacaaacaaagggaaacgcatcccatgctcatggatgggtacatatggaaccaaaaaagagcccaaatagccaaagcaagacaaaaaaaaaaaaaaaataggcgcatagaccaatggaacagaatagagaacccaaaaataaagccaaatacagccaactgatctttaacaaagcaaacaaaaacatgaagtggagaaaggacaccctattcaacaaatggtgctgggataattggcaagccacatgtagaagaatgaaactggatcctcatctctcaccttatacaaaaatcaactcaagatggatcaaagacttaaatctaacacccataaagattctagaagataatattagaaaaacccttctagacattggcttaggcaaagacttcatgaccaagaacccaaaagcaaatgcaacaaaaacaagaataaatagatgggacttaattaaactacaaagcttctgcacagcaaaagaaataatcagcagagttaacagacaacctacagagtgggagaaaatcttcacaatctata

SEQ ID NO: 729437 - DNA, 238 bp, Homo sapiens
cagtttaagggctacccatttctgaagctattctctctgttaccttagggcttctgttttggttttcagactctgaaacctatgtgaccatttctctttccttatttaaggcccctttcctttaccctctctataccttgagtttttacagtctcccagaaagcttgagattgacagttcatgcaatattccagaagaaatagtctgaaacaggtagcccttaacctacgcagtcaca

SEQ ID NO: 729438 - DNA, 368 bp, Homo sapiens
cttgaatattttccattcccatttggttgaatctgcagatatggaacctgcaggtatggggagggctgatgtacattaatctctggaaattctttacaaccctggtcagattcatggtcataaactgaagcctttggcctctagcctgttagcttgttgctgggattggagcagcgaaggtggtaaggtgcagggcatggttaccagggttgtgaatctgggtggtatttgggtgaatacacatgactgtatacagtcccagccatttctctttccttatttaaggcccctttcctttaccctctctataccttgagtttttacagtctcccagaaagcttgagattgacagttcatgcaatattcca

SEQ ID NO: 729439 - DNA, 421 bp, Homo sapiens
cgaccaggacgctctgcatccccagtagcaggctgagccgagggaggctgcgtatgcccgcccctctggctgtcggagccgcacctcttcctcttccggcccccgtagcaattaggtttctttgcaggagatgaagccagactgctcatcattccagacatcttcagctgctacacccagaacaagcattcgaaatatgaacaggatggtgagccagatctttccaatcatggtggagtggatgtgaacttcctccagagtatctccaaggagattccagtcccccatgtttatttagtcagccatcttagctctgatccacatcaaataagaggcagataaattcttccattctgaagggagcactatttcttaaagcaaacctatggtgaaaatataacaatatgtcacttctaaaagc

SEQ ID NO: 729440 - DNA, 448 bp, Homo sapiens
attgattgtcctcatcctgcaactgtacttgcccaaccgatatttattgatgcctgcagtgtcctgggtgcctaccaaggggcacagaactggatccgacgcagaccctgcctgccttcaggttgcttgaagatgaacagagagatcggacctctgcatgaagccagactgctcatcattccagacatcttcagctgctacacccagaacaagcattcgaaatatgaacaggatggtgagccagatctttccaatcatggtggagtggatgtgaacttcctccagagtatctccaaggagattccagtcccccatgtttatttagtcagccatcttagctctgatccacatcaaataagaggcagataaattcttccattctgaagggagcactatttcttaaagcaaacctatggtgaaaatataacaatatgtcacttctaaaagc

SEQ ID NO: 729441 - DNA, 365 bp, Homo sapiens; identical to SEQ ID NO: 120683

SEQ ID NO: 729442 - DNA, 457 bp, Homo sapiens; identical to SEQ ID NO: 120682

SEQ ID NO: 729443 - DNA, 334 bp, Homo sapiens
attaatgtagtataaagaaataggtagattaagccagagtttttgttattggtttttatatttattatatatttatttattttttgagacagggtcttgctctgttgtccaggctggggcacagcagcacagtcacagctcatagtgacctcgatctcctggtctcaaggcaatcctcccacctcagcctcctcagtgctgggattacaggcatgagccaccacgcccagcccgtaccctgtatttcttgaagtgaagaatataaagtctgtatgggtgcagttcctgagtgttctgctcttccctaaagtttatatatttttttagcttaagt

SEQ ID NO: 729444 - DNA, 791 bp, Homo sapiens
tgcctcagcgtcgacgatctggtagcaaagaagaagaaacaaacactgatctctttctgccacccctctgaccctttggaactcctctgaccctttaggacaagcctacctaatatctgctagagaaaagaccaacaacggcctcaaaggatctcttaccatgaaggtctcagctaattcttggctaagatgtgggttccacattaggttctgaatatggggggaagggtcaatttgctcattttgtgtgtggataaagtcaggatgcccaggggccagagcagggggctgctgctttgggaacaatggctgagcatataaccataggtatgggaacaaaaaacatcaaagtcactgtatcaattgccatgaagacttgagggacctgaatctaccgattcatcttaaggcagcaggaccagtttgagtggcaacaatgcagcagcagaatcaatggaaacaacagaatgattgcaatcattctgttgtttccagtcgtccttctgacttgataaaagggaccgtcttccttggatttagtgaacccctttggttcctgaaaaattcaaggagtatctaggacatagtccccagaagacagtacaagactttctgataaactggacatttcaagacccaaataactaatcagaaaaatcaaagatgtgatactattttttatcccatgcataggtgctacacttggatcaaatgaacaatgttgggatctctatggataaaggtcttaaaagtcctgagataaagaatcctgcacccactggtacttctaa

SEQ ID NO: 729445 - DNA, 801 bp, Homo sapiens
  misc_feature (477)..(477): n is a, c, g, or t
  misc_feature (678)..(678): n is a, c, g, or t
gggctgttgcaatctccacgtgcgatggatccttggacccactttgttaactcttaaacttgtgtcttgtctttatttcttttctcattccctcgtctccaccgggaaggggagagcctgcgggtggtgtatcaggcaggttcccctacatctttggcacccaacacggtctccttgaacccaggtgaagttacacctgagcgtggtcgtgtgaagaacggtctgtccaggaactcccgagaacgtgtggtcggccttgcggtaagcttgtgcactcggagcattccaggacaccatgggacaatccaaaagtaaacattctgcatatttacattttattaagctcctcttaaagagggcaggaattaaggctagcacagaaaatttgattactctgtttccaacagtagagcaatatcgtccttggtttcctgaacatggtaccatggacttcaaagattggaacaggtgggaatngccttaaaacaagttgtaaggaaggaaaatttatccccctaacagcctggtcaaactgggctatagttaaagcagcctcggaaccgtttcaatcgggaaaatgagggcttatcctccagcagaaagaatttctgcagaggaaggtgggatgctgctgaaggaggagaggtagtgaagacgattggggaaatacagaccacntgggatgagtaattctttgggggcacgtggcctcaagtgttcttaaatagaagagcttttgccagaggttaacaaaagagggtcggagggaggggggcccatgggaaaaggggggggcacaaa

SEQ ID NO: 729446 - DNA, 483 bp, Homo sapiens
gggctgttgcaatctccacgtgcgatggatccttggacccactttgttaactcttaaacttgtgtcttgtctttatttcttttctcattccctcgtctccaccgggaaggggagagcctgcgggtggtgtatcaggcaggttcccctacatctttggcacccaacacggtctccttgaacccaggtgaagttacacctgagcgtggtcgtgtgaagaacggtctgtccaggaactcccgagaacgtgtggtcggccttgcgacaaggctcaaaggaaccatatcctgatttcattgctcgccttcaagacgcagcacagaaggctctcactgatgaaagtgccaggaaggccgggtgcggtgctcatgcctgtaatcccagcactttgggaggccgaggtgggcggatcacctgaggtcgggagttggagaccagcctgaccaacatggagaaaccccgtctctactaaaaatataaaactta

SEQ ID NO: 729447 - DNA, 489 bp, Homo sapiens
ggccgagaaggcgacgcccctggcgcccaaaggggccgctccgggagctgtccagcctgtggctggtgctgaagcggcccccgccgcgaccctggccgctttgggcggcaggaggcccggaccgcccgaggagccgcctcgggagctagagtccgtgccctcgaaactcggggaaccccctccgctcggagaagggggaggagggggcggggaaggaggaggagccggcggcggctccggggaaagggaggggggcgctccgcagccgccgccgcccaggggctggcgagggaaaggcgtacgcgctcagcagaggggcggcagcggcggggagggggcctccccttctccatcctcctcttctgcgggcaaaaccccaggaaccggcagcagaaactccggaagcggcgttgcggggggcggcagcggtggtggagggagctactggaaagaaggatgtctgcagtctgagctcatccagttccatct

SEQ ID NO: 729448 - DNA, 317 bp, Homo sapiens
gttttattttttttttttactacaatcatacattgtctgacataatatgtcacagtcatagtgtctgacaaaaatatgtatgtcataacacatacacaagatgaagaagctcagaaacaaaggatccagaataacaatttcagtcctacaaagcaaaatattctaaagattttccaaggaatttgaaaaagcatggtaatataaacattctttttttaatgtttagaatcaatctacagccaaaacatggaagattttacaatttactatagttacaaaaaaaaatgtaaatgttgtaaaccttcacaaggtcgacg

SEQ ID NO: 729449 - DNA, 1872 bp, Homo sapiens
  misc_feature (1091)..(1092): n is a, c, g, or t
caggccagagtcccagctgtccaggatcccctgtgacaaggctgatgcaggtgtggagtcaatgtgggtgcctcctgcagccgggtgccaggaggggtggaggggccaccctgggctttgtccgggagcctggtcttcccgtccttgggctgacaggtgctgctgcctctgagccctccctgctaagagctgtgtgctgggtaaggctggtggccctttgggctccctgtccaggatttgcgctctggagggtagggcttgctgggctggggactggaggggaacgtggagctccttctgcctcctttcctgccccatgacagcaggcagatcccaggagagaagagctcaggagatgggaagaggatctgtccaggggttagacctcaagggtgacttggagttctttacggcacccatgctttctttgaggagttttgtgtttgtgggtgtggggtcggggctcacctcctcccacatccctgcccagaggtgggcagagtgggggcagtgccttgctccccctgctcgctctctgctgacctccggctccctgtgctgccccaggaccatgaatggcacctacaacacctgtggctccagcgacctcacctggcccccagcgatcaagctgggcttctacgcctacttgggcgtcctgctggtgctaggcctgctgctcaacagcctggcgctctgggtgttctgctgccgcatgcagcagtggacggagacccgcatctacatgaccaacctggcggtggccgacctctgcctgctgtgcaccttgcccttcgtgctgcactccctgcgagacacctcagacacgccgctgtgccagctctcccagggcatctacctgaccaacaggtacatgagcatcagcctggtcacggccatcgccgtggaccgctatgtggccgtgcggcacccgctgcgtgcccgcgggctgcggtcccccaggcaggctgcggccgtgtgcgcggtcctctgggtgctggtcatcggctccctggtggctcgctggctcctggggattcaggagggcggcttctgcttcaggagcacccggcacaatttcaactccatgnngttcccgctgctgggattctacctgcccctggccgtggtggtcttctgctccctgaaggtggtgactgccctggcccagaggccacccaccgacgtggggcaggcagaggccacccgcaaggctgcccgcatggtctgggccaacctcctggtgttcgtggtctgcttcctgcccctgcacgtggggctgacagtgcgcctcgcagtgggctggaacgcctgtgccctcctggagacgatccgtcgcgccctgtacataaccagcaagctctcagatgccaactgctgcctggacgccatctgctactactacatggccaaggagttccaggaggcgtctgcactggccgtggctccccgtgctaaggcccacaaaagccaggactctctgtgcgtgaccctcgcctaagaggcgtgctgtgggcgctgtgggccaggtctcgggggctccgggaggtgctgcctgccaggggaagctggaaccagtagcaaggagcccgggatcagccctgaactcactgtgtattctcttggagccttgggtgggcagggacggcccaggtacctgctctcttgggaagagagagggacagggacaagggcaagaggactgaggccagagcaaggccaatgtcagagacccccgggatggggcctcacacttgccacccccagaaccagctcacctggccagagtgggttcctgctggccagggtgcagccttgatgacacctgccgctgcccctcggggctggaataaaactccccacccagagtca

SEQ ID NO: 729450 - DNA, 1708 bp, Homo sapiens
  misc_feature (927)..(928): n is a, c, g, or t
tccgatcaggctgatgcaggtgctgatgagtaggagaggtatcaaagatatattggccaaacccattacagtactacttggttcccggtagggcttgctgggctggggactggaggggaacgtggagctccttctgcctcctttcctgccccatgacagcaggcagatcccaggagagaagagctcaggagatgggaagaggatctgtccaggggttagacctcaagggtgacttggagttctttacggcacccatgctttctttgaggagttttgtgtttgtgggtgtggggtcggggctcacctcctcccacatccctgcccagaggtgggcagagtgggggcagtgccttgctccccctgctcgctctctgctgacctccggctccctgtgctgccccaggaccatgaatggcacctacaacacctgtggctccagcgacctcacctggcccccagcgatcaagctgggcttctacgcctacttgggcgtcctgctggtgctaggcctgctgctcaacagcctggcgctctgggtgttctgctgccgcatgcagcagtggacggagacccgcatctacatgaccaacctggcggtggccgacctctgcctgctgtgcaccttgcccttcgtgctgcactccctgcgagacacctcagacacgccgctgtgccagctctcccagggcatctacctgaccaacaggtacatgagcatcagcctggtcacggccatcgccgtggaccgctatgtggccgtgcggcacccgctgcgtgcccgcgggctgcggtcccccaggcaggctgcggccgtgtgcgcggtcctctgggtgctggtcatcggctccctggtggctcgctggctcctggggattcaggagggcggcttctgcttcaggagcacccggcacaatttcaactccatgnngttcccgctgctgggattctacctgcccctggccgtggtggtcttctgctccctgaaggtggtgactgccctggcccagaggccacccaccgacgtggggcaggcagaggccacccgcaaggctgcccgcatggtctgggccaacctcctggtgttcgtggtctgcttcctgcccctgcacgtggggctgacagtgcgcctcgcagtgggctggaacgcctgtgccctcctggagacgatccgtcgcgccctgtacataaccagcaagctctcagatgccaactgctgcctggacgccatctgctactactacatggccaaggagttccaggaggcgtctgcactggccgtggctccccgtgctaaggcccacaaaagccaggactctctgtgcgtgaccctcgcctaagaggcgtgctgtgggcgctgtgggccaggtctcgggggctccgggaggtgctgcctgccaggggaagctggaaccagtagcaaggagcccgggatcagccctgaactcactgtgtattctcttggagccttgggtgggcagggacggcccaggtacctgctctcttgggaagagagagggacagggacaagggcaagaggactgaggccagagcaaggccaatgtcagagacccccgggatggggcctcacacttgccacccccagaaccagctcacctggccagagtgggttcctgctggccagggtgcagccttgatgacacctgccgctgcccctcggggctggaataaaactccccacccagagtca

SEQ ID NO: 729451 - DNA, 886 bp, Homo sapiens
ggcacagtggcggctgcagaatgagatctgcttgcctggatgccaaggctggagggcagtaagcttcggtatcctcagaggcagggggctgccacctttgcactaagaaggaattactgatttctaccatttgagaaaaggagtgttgaccacatggaactccgaataggttcatgcacatggaacaaagccctttaggagaaaagcccgttttttgctgtctgcctgatactggatggttgagaaacaatcgtggtgggcagtcacgccacacttgtgcgggcctaggacacaggaaggtttagccctggcctacagggagggtgggcaagcacagcaatcttgtcccccaaaagaacatcagtggccgctggtgccaagacccacgggaaggttagagctctgggttacatttgtggagagagacacagacagcggcagagacagagacgtagtaatccaggctgtgtggcataagaagataaagcggccccccagcccggggcccctcccatggacctcatggtaccgagcctccattttctcatctgttcagtgaggatgaagcctcatctcccagggtttttgcaaagacagggagactggccgggcgccgtggcttacgcctataatcccagcaccttgggaggccgaggcaggcggatcacaaggtcaggagtttgagaccagcctaaccaacatggtgaaaccccgtctctactaaaaatacaaaaattaggcaggcgtggtggcacgcgcctgtaatcccagctactcaggaggctgaggcaggagaatcacttgaacccaggaggcagaggttgcagtgagccgagattgcgccactgcactccagcctgggtgacagagcaagactctcaaaaaa

SEQ ID NO: 729452 - DNA, 1037 bp, Homo sapiens
ttatgggaacatttgggaaatgttttccagatgttttattttttcccttttatagtttgttgacatttaattttacttaaagatgacaattttaatcggaaatgttagaggtacaacatagtgaggttctagctagctttatacttttgaaaaatatttttgtttctactgctttttacaagtactagtcctctcagtgatactggtggtgttcagtatgaatccatagaaagaaaacaaaatttgttttttaaaaaaagcagagtaatgaatgaatttcagttttgaaaacaacataatttgaaaacactgttatactaacatggcaaggtgttaattaaatataagagtaaggtagtaagttcttttagagcacctgtttaaatttactccagtaatcatcttaaggattgatagtcaccatcacttattggcttaaaagttatatttcatggaatattatcagtgttaaatccaagctttgtggagctttaagtgatggtggtgaaaaagttggtgtttatgagagagtggtggggtgtctagtcattagtgaagttaaacatcaacctgttttagaaagaattttttagtcttgcctaaagtaaaccagaagtgtctagtgtttaaatctttatttagaatgcttctcttaaaagtattttttgttttgggtagtattaaataatcagtaaataatctatttcagtagtaaataatgaattaagatgatgatgaatgaggattaacacactggtctggagactggggttttatttcagtgggttagctgtgtgtgacatgttgggcaattactcagctgttttaacagcttccagatatgcagtatggtgcctgtactactcaaaagttgattttggtttaattcatctttaaggtacctcccagctctaaaactatgattctaggctgtgtaatggggttattcctactttattctctttccttttttaagggttcattttatacttaataagcatccatttcttgggtcacctacagtctttggtcgatcc

SEQ ID NO: 729453 - DNA, 568 bp, Homo sapiens; identical to SEQ ID NO: 728376

SEQ ID NO: 729454 - DNA, 505 bp, Homo sapiens; identical to SEQ ID NO: 6877

SEQ ID NO: 729455 - DNA, 144 bp, Homo sapiens
tttttttccagagacaggggtcttggtatcttgtccaggctggtctcaaatgcctgtagtcaaatgatcttcccaccttggcctcccaaagtactgggaataccaggtccaccatgagccaccatgctcacctctaggtcgacg

SEQ ID NO: 729456 - DNA, 550 bp, Homo sapiens
aatctgcagcttccaaatggatatgagaagtgagagggaaggggatggcggggcgggttagaccaccactaagagatggggaatgggaggggtgtgtggaagagagaccaagtcttcaaagaatgccttagagtgaggacccacgggactgtctgctgaaaagggctggagaggcctttgggatcagcttcgtcgtattcccgataaggaacagcgcctaaagtgaagggacgcgtccagtcttttagctagttaatattaaaaaacatcgtctcatttattgaccgtcatcctatgagtattacctcaacatcagtgcttgcaacagtcccattttaccaaaaaggaaactgagtcacagatgttctgtgatctgcacacagcaagtggcagagctgtttgggggcccaggtctgtcggctccaccaccccagggttgacccaaaatgacgcatgaaaggctggcattataagatgctgtttcttgtttagacgaagtgatactgttacactggaagcactaataaaacccaggtataaataaaagggt

SEQ ID NO: 729457 - DNA, 977 bp, Homo sapiens
ggaatatggtgcccaggtcagctagccatgccacgccagtccagctgccaacccacccgtcactggccatctcatcacctgctggagggagtggggtggtgcagatgaaaccagcgatcagcttggctgcccttgcttcctagtgccacagtagaggctaggggagcaactggctttcctccccaaaaggcgggcagggttatccacactttgcccaggtccctgaagcctgcggctgagctcggggataacaggggccaagtcaccggtcccagacacctaggaactattagagacaggaaccagcatatgagacaggggcttttaagtaggaggttggagaacacacgtttttggtctaaaccgggggcccctctctttgcccactgaacccgcggcctgcgtggtgctgagactgcctctggccgcgtccgcttgggacagggcctgagcggtggctgatcccacctggatgtcctgggccggctcccacccgacgcccgccatcccgggacgtggtggggagaggctggcgctgctccttgccatgcttggcggccgctgctgcccggctgggggtcccgagtcgcacacgccccgcaagccctggccaccgacccggagggaacgccctgggctacggtccccaaagccaagagaagaagcaggtcccagggccgactccaaagccgcatctccagctttgttcatgggtccgggaagcagaggccgccgccggccaccgtcgtgggcgagaagaagggcacgaggcggccggggctcctgcccggaaccacatgtgcgcgccgggcccgcttcttcatcgcacttgcggccccggctgcccggggcctgcgagtttccagccagggcccgggactctggcgcggtccggccgcgaggaaggaaggcgcggcccgggtgggggtagcggcaggcctgcggctccggccacggggcgggggcagaaaaacgac

SEQ ID NO: 729458 - DNA, 4358 bp, Homo sapiens
gttgatcctacaacaacacactttcctaaggatgatgacaactcgcatcacccctagaacggctggtatgaaccgagtttccacacagtctggctggcattgcagtcaggagatgtttggctacttcacatgttttgaacactagtaaatcttaagcttcctgagtcgagaagggagagaaatgcatgcacgtgatccactggcctgtgtgggattccttgtggcatctgaaggccgtgattcaaaggtcccctgacaaccttcccataaatgaaccaactgatcctcacaactggagagagaattaacaccttccatgggacaaagaaaaagcacattctggcctgctggcaagtcacctgtcgtttccagctcatcttcatcgctctgtattcctactctttagtaaatatgaactattaaaagcttctatgagatgcgctatgcgtgcttctgggatcagtcttttgcctgacatagcgaaagctcattttagttcagtgtggaaaaccagacctcaccagctcatcacaactaaacccataaggacggagcagcggatcactcctcgtctgactcctcccacagggagacctgattctccatcagaggctgatgccagaacccagacaatcagcctcagagagatccttccaggacatgctgtcattagccctgcggttcactactgcacatgtccatgattcaggactggaactcttctcatcgactttaaagatcctggttgagagaaaaggccaatctgagtgctgggtgcatctactgaattggaaatgatccaatggctctttagttagggtgttatgtcctgaaaataggtgacaactgcaaaccatcctctggtgtccagagactttaacaaggtttgtttcacagagactgagggcagaaaaaaggaaatggcctaaaaaggtgggtttgctgtgttgcctcacactacttgattcatggttctgattctaaaaatctcacttgatacttgatttcatatgaaagacgtgtaaaatgcctgggtagaggcggcggcggcggcggcggcgggctcggaggcagcggttgggctcgcggcgagcggacggggtcgagtcagtgccgtttgcgccagttggaatcgaagcctcttaaaatggcagatgatttggacttcgagacaggagatgcaggggcctcagccaccttcccaatgcagtgctcagcattacgtaagaatggctttgtggtgctcaaaggctggccatgtaagatcgtggagatgtctgcttcgaagactggcaagcacggccacgccaaggtccatctggttggtattgacatctttactgggaagaaatatgaagatatctgcccgtcaactcataatatggatgtccccaacatcagaaggaatgacttccagctgattggcatccaggatgggtacctatcactgctccaggacagcggggaggtaccagaggaccttcgtctccctgagggagaccttggcaaggagactgagcagaagtacgactgtggagaagagatcctgatcacggtgctgtctgccatgacagaggaggcagctgttgcaatcaaggccatggcaaaataactggctcccaaggtggcagtggtggcagcagtgatcctccgaacctgcagaggccccctcccccagcctggcctggctctggcctggtcctaggctggactcctcctacacaatttatttgacgttttattttggttttccccaccccctcaatctgtcagggagcccctgcccttcacctagctcccttggccaggagcgagcaaagccgtggccttggtgaagctgccctcctcttctcccctcacactacagccctggtgggggagaagggggtgggtgctgcttgtggtttagtttttttttttttttttttttaattcaatctggaatcagaaagcagtggattctggcaaatggtccttgtgccctccccactcatccttggtctggtcccctgttgcccatagccctttaccctgagcaccacccaacagactggggaccagccccctcgcctgcctgtgtctctccccaaacccctttagatggggagggaagaggaggagaggggaggggacctgccccctcctcaggcatctgggaaggccctgcccccatgggctttacccttccctgagggctctctccccgacacatttgttaaaatcaaacctgaataaaactacaagtttaatatgaaaaaaaaagaaagaaagaaagacgtgtaaaatgccaagaactctaggaaacagggacaaaaacacttcaaagagaaagttcatgcacttgtttctgaccacccagggcacccttcagcacacggtgtctggagtggcctgaagcaaggagtgtcttgtgaggtgcagaggatgcaatgggagcagggtcctgtccccaccctaaaggagttcacagtttaacgcaaatgagaagccagtgaggacatcactactcctgctgtgaacttgggaactagaaacacaaaacctgagcctggagggaagctaaggaagcattctgctctggagtagacatgagtgcatgtgaagcttctgatctcccatgagagcaatggggacatggggcagaatctaaaacccatgactgaaagcaccaaattgctaaaatggcaataaagagacatgaggccaagatggagaagaaggaacccaggacgaaggtcagcctcacatttggggctcatttccctcagtttcatcactgaatttcagaagggactaactgagatgtaaagaagcagagcagcttttgcaccatgtggaggactagatggaaaacaagtagactgagggtctgctagtgacggtgacccctactgaagtccactggctttggttgggacccagaagagtcacacgccaggaatagaggtggacaggaaacaccctgacttttgtagggactgaacctcactgataacctcaattgcggatggtatggagggtgtctaggtgtgctaggacccctgcccattccccagaaatagactcccatcttttctgcagcaagataacatgctagtcggcctcaattcattgctaaatatttttaacgagtgtcttacatttagccaaaaagactagtcatgtggcaggaaaaatacaatgtcatatgaccaaaagctaaaagactgtgaaaatgaatcccgaggtgacccaagcattgaatttaacaatgccagtacctggacctccgcttgcccctaaaacattacaatcaagaatgtaggaagggaaaggaaacacgaagattaatcaagcaggaaggacaagctcagttttgcacccactgaatttgccacaaatattgtggaaaatattctcggggacattgcagttgtctactttggttggcacatggttcatacaacagtgtttgtgtcagtgaacatcttactcttcctcggcagtctttctttgcccagagatttcgcaatgactgttgaccttcatcatcaccttttggactttggcttgcactttagcttctgtagatctccataatgtaaagaggtattttgggtccattttaattcctgcaaaggataaaatccttctattcgtgtgcatataagtggacctgagcccttggttagggtgtagagaggagacggggagaaacctgagggccagaagctgttctttcccttaaaagggcaaactcatttccacactatggggactctgacagatagcataccttcctggctacggctattggacctgcaggctttcccctgtaaatccgtgttctgtcattgacattttgtgactgtaagacagacttgagataagacatctagaaaacaataattgaacaatgatgtgaatatatttcacacaactgaactgtacatttcaacaaggttaagatggtaattatcacgttatacatattttaccgcaggttaaaatgtttcacaggttgaaaggaaagcaactaccttcagttctctgagttcaagaatttgtaacatttcaccccctgctccttcctgatcttctgtggagcatcttttttccatccatgctctactcagagcccactttcccttccctgacaccagcttcactgaggctggttggaacctaacacaaaacattctcagtaatgactgaattcccacaaagaattccatatagaccgcatatgagttgaatcttctaagacatgaaatatttgttctcttcttggctaatatgcaatgcaaatcctgttgcaaatgtacgtcatatacctctgaaattcctgacgtattcaatgaaataacatctttaaagtt

SEQ ID NO: 729459 - DNA, 403 bp, Homo sapiens
gcctgagaactgggaggaagctggagaaaagatgccctctgaatctttgtgtttggctgcccaggctcgccttgacaccgaatggttgaaaacagatatacagatgatagtgtcgaaccaagtggaacaaagaaagaagatctgaatgacaaagagaaaaaagatgaagacgaaactcctgcacctgtatatagggccaagtcaattctggagacctgggtgtgggtcaagcaaccaggtaatcttctgagttttggcattttggaaagcttgatctgacgctccttttctaaataacttggatggattattcgtattttttggtaacaatttaaaaaaatgtaattaaaaaaatttaaatattgtggtaaaatatacataccttaaaacttgcaaaaaaaat

SEQ ID NO: 729460 - DNA, 507 bp, Homo sapiens
atgatagtgtcgaaccaagtggaacaaagaaagaagatctgaatgacaaagagaaaaaagatgaagacgaaactcctgcacctgtatatagggccaagtcaattctggagacctgggtgtgggtcaagcaaccaggaaacggaagcccaaagaggaggggagcttacagcaggccctggactagggattaacacaaaaacaacagcaacaaatctgatttaagcttcacacatctactcaggagactgaggcaggagaatcggttgaacctgggatgcggaggttgcagtgagctgagatcgcaccattgcactccagcctgggcaacagaatgaaactgtctcataaaacaaatataacatgaaatggtaacgtctttctttaaaaccaaagaaaatatgcaaggcggatgtcttcctgtcacttcgcacagtctactcccatagcgcctgagccccagaccccaaactcactgtcctgctcggggacccccagaccacagtgaac

SEQ ID NO: 729461 - DNA, 534 bp, Homo sapiens
  misc_feature (285)..(285): n is a, c, g, or t
aaacagcttccccttatagaaatttgccccttgggacaaaaaatccgccaagtggggttcctcagttacgtgccagttccccgcaattcgatacctgagctacatgtcaccaagccaggtgggctggttttctgaccaccaggaccaactggtccaaccttcaatacaaggaggctctggaggccaccctggacaggctggagcaggctgggatgtgggaaagcctggtggcctggcctgtggaccgcctgtggaccgctgggagctggctacctccgagctggnggtggtatccggcatctctgccaaggatggcttcatctccggcattgtctacctgtaccgaaagtggaaggcgacccaggttgaggaagtgagatccagcccccagcccccagctggcccctgactccatgtggccttagctgggcccatctgctgggcctcctctgcctcccctgtaaaatgggacctccgaaccaaccctgcccctcagaaatgccctgcctattaaatgagctcccagaaaaaaaa

SEQ ID NO: 729462 - DNA, 535 bp, Homo sapiens
cagtcagattttatttttgcttaactaagacaaagtgaataattcactgtgagccaaattctttcttgattcctctttttggagcagtccatctttatgggaaaaccagcctagaatggtgatttcagtttcaggtgatttcgatagaattgtatttggctcagaaatgataagactggggccaagaaaaattttaaactttttttttttgtaatcatattactagtttgatttcatatgaacttcctttgttgactttctttgccattaatttaaaagttccagtatcctcaatatttgatgtcttatatgtacagaatcctttccagctgtaagtcatcagcaagtaaaaaatttagtatggcaatagttttcataagaggttttttaaaacagaaaaatgttgacattgccagcctctgggttgcattttgggatatgctacatttcaaaggtatcttttaaatctgaaggcaaagactttttcaacatctgaatattctgatttacagaaattaaaaaaaaaaaaccccgg

SEQ ID NO: 729463 - DNA, 641 bp, Homo sapiens
gaggaagcccccctggggatttggtttggtcttgtgatcaggtggtctatggggctatccctacaaagaagaatccagaaataggggcacattgaggaatgatactgagcccaaagagcattcaatcattgttttatttgccttattttcacaccattggtgagggagggattaccaccctggggttatgaagatggttgaacaccccacacatagcaccggagatatgagatcaacagtttcttagccatagagattcacagcccagagcaggaggacgctgcacaccatgcaggatgacatgggggatgcgctcgggattggtgtgaagaagcaaggactgttagaggcaggctttatagtaacaagacggtggggcaaactctgatttccgtgggggaatgtcatggtcttgctttactaagttttgagactggcaggtagtgaaactcattaggctgagaaccttgtggaatgcagctgacccagctgatagaggaagtagccaggtgggagcctttcccagtgggtgtgggacatatctggcaagattttgtggcactcctggttacagatactggggcagcaaataaaactgaatcttgttttcagaccttatactgtgtaattgtaagtggaca

SEQ ID NO: 729464 - DNA, 1231 bp, Homo sapiens
gtccttttccgtgctacctgcagaggggtccatacggcgttgttctggattcccgtcgtaacttaaagggaaactttcacaatgtccggagcccttgatgtcctgcaaatgaaggaggaggatgtccttaagttccttgcagcaggaacccacttaggtggcaccaatcttgacttccagatggaacagtacatctataaaaggaaaagtgatggcatctatatcataaatctcaagaggacctgggagaagcttctgctggcagctcgtgcaattgttgccattgaaaaccctgctgatgtcagtgttatatcctccaggaatactggccagagggctgtgctgaagtttgctgctgccactggagccactccaattgctggccgcttcactcctggaaccttcactaaccagatccaggcagccttccgggagccacggcttcttgtggttactgaccccagggctgaccaccagcctctcacggaggcatcttatgttaacctacctaccattgcgctgtgtaacacagattctcctctgcgctatgtggacattgccatcccatgcaacaacaagggagctcactcagtgggtttgatgtggtggatgctggctcgggaagttctgcgcatgcgtggcaccatttccccgtgaacacccatgggaggtcatgcctgatctgtacttctacagaggatcctgaagagattgaaaaagaagagcaggctgctgctgagaaggcagtgaccaaggaggaatttcagggtgaatgggactgctcccgctcctgagttcactgctactcagcctgaggttgcagactggtctgaaggtgtacaggtgccctctgtgcctattcagcaattccctactgaagactggagcgctcagcctgccacggaagactggtctgcagctcccactgctcaggccactgaatgggtaggagcaaccactgactggtcttaagctgttcttgcataggctcttaagcagcatggaaaaatggttgatggaaaataaacatcagtttctaaaaaaaaaaaaaataaaaaataaaaataaaacctccgggggttttttgtgggggggggaaaaaggggttttgaaaggcgctgggtcatggggtttcttggacccaatttttttgtacaaaggggggaaaatcggcgggccccctaaaagggagcgaataaatcgaaaagcggttaactgttaggatgggaac

SEQ ID NO: 729465 - DNA, 213 bp, Homo sapiens; identical to SEQ ID NO: 405627

SEQ ID NO: 729466 - DNA, 1895 bp, Homo sapiens; identical to SEQ ID NO: 405633

SEQ ID NO: 729467 - DNA, 465 bp, Homo sapiens; identical to SEQ ID NO: 405629

SEQ ID NO: 729468 - DNA, 2059 bp, Homo sapiens; identical to SEQ ID NO: 405632
  misc_feature (1908)..(1908): n is a, c, g, or t
  misc_feature (1911)..(1911): n is a, c, g, or t

SEQ ID NO: 729469 - DNA, 1404 bp, Homo sapiens
gtctgacttcctcccagcacattcctgcactctgccgtgtccacactgccccacagacccagtcctccaagcctgctgccagctccctgcaagcccctcaggttgggccttgccacggtgccagcaggcagccctgggctgggggtaggggactccctacaggcacgcagccctgagacctcagagggccaccccttgagggtggccaggcccccagtggccaacctgagtgctgcctctgccaccagccctgctggcccctggttccgctggccccccagatgcctggctgagacacgccagtggcctcagctgcccacacctcttcccggcccctgaagttggcactgcagcagacagctccctgggcaccaggcagctaacagacacagccgccagcccaaacagcagcggcatgggcagcgccagcccgggtctgagcagcgtatcccccagccacctcctgctgccccccgacacggtgtcgcggacaggcttggagaaggcggcagcgggggcagtgggtctcgagagacgggactggagtcccagtccacccgccacgcccgagcagggcctgtccgccttctacctctcctactttgacatgctgtaccctgaggacagcagctgggcagccaaggcccctggggccagcagtcgggaggagccacctgaggagcctgagcagtgcccggtcattgacagccaagccccagcgggcagcctggacttggtgcccggcgggctgaccttggaggagcactcgctggagcaggtgcagtccatggtggtgggcgaagtgctcaaggacatcgagacggcctgcaagctgctcaacatcaccgcaggtgagccctctccatgtgcctgcttccgtaagatgggtcacaggcaaggctgaggtcgctggggtgggtcggggcactgctggatggactctggccacctctggcccagcctcgggcagctttggggatgctggcacttctacacacagtcagctgtgagcctgggccaggaaggtttctgtccacctctagtgtcccaaccatgccagcctagggtccccactggtaggtgctggatgatatgaattcaagctctgtgtcccccacctcctcttggacttcgctctcccctcattcactctgctcccgccacactggcctgtttgctgttcccacaacatttgctacgctgctgcttcttcagcctagagcgctcttcccccaaatatctgtgtgactcacttccttcaggtcttggctcagatggcaccatccgcatgaggccttccctgacccctccattaaaattgctgcccatgagcacaggacatggtaaagaaaacaaacaaaaaaatgaaaaataaaagaaagaagaaaaatttctgctcacatc

SEQ ID NO: 729470 - DNA, 511 bp, Homo sapiens; identical to SEQ ID NO: 405631
  misc_feature (41)..(41): n is a, c, g, or t

SEQ ID NO: 729471 - DNA, 675 bp, Homo sapiens
  misc_feature (41)..(41): n is a, c, g, or t
  misc_feature (524)..(524): n is a, c, g, or t
  misc_feature (527)..(527): n is a, c, g, or t
ctactactactactaaattcgcggccctcgacttttttttntcagttctctagtatctttattatccattccgggcctctctcctgcctgccctgcctcagccaggccctgagatgggggaaaacgggcagtctgctctgctgctctgaccttccagagcccaaggtcagggaggggcaaccaactgccccagggggatatgggtcctctggggccttcgggaccctggggcaggggtgcttcctcctcaggcccagctgctcccctggaggacagagggagacagggctgctccccaacacctgcctctgaccccagcatttccagagcagagcctacagaagggcagtgactcgacaaaggccacaggcagtccaggcctctctctgctccatccccctgcctcccattctgcaccacacctggcatggtgcagggagacatctgcacccctgagttgggcagccaggagtgcccccgggaatggataataaagatactagagaactgaaaaaaaaaaaaanaanaaaacaaatacacaacaagggggggcgcaaaaaaactcccgagggggcccagattaacggacacagctttttcacaagggcccaagagggggatatacagagaagcgccgcggtaaaacggcgggggaaacgggcgggcttgtgaaga

SEQ ID NO: 729472 - DNA, 1824 bp, Homo sapiens
  misc_feature (41)..(41): n is a, c, g, or t
  misc_feature (1673)..(1673): n is a, c, g, or t
  misc_feature (1676)..(1676): n is a, c, g, or t
ctactactactactaaattcgcggccctcgacttttttttntcagttctctagtatctttattatccattccctcagctgcccacacctcttcccggcccctgaagttggcactgcagcagacagctccctgggcaccaggcagctaacagacacagccgccagcccaaacagcagcggcatgggcagcgccagcccgggtctgagcagcgtatcccccagccacctcctgctgccccccgacacggtgtcgcggacaggcttggagaaggcggcagcgggggcagtgggtctcgagagacgggactggagtcccagtccacccgccacgcccgagcagggcctgtccgccttctacctctcctactttgacatgctgtaccctgaggacagcagctgggcagccaaggcccctggggccagcagtcgggaggagccacctgaggagcctgagcagtgcccggtcattgacagccaagccccagcgggcagcctggacttggtgcccggcgggctgaccttggaggagcactcgctggagcaggtgcagtccatggtggtgggcgaagtgctcaaggacatcgagacggcctgcaagctgctcaacatcaccgcagatcccatggactggagccccagcaatgtgcagaagtggctcctgtggacagagcaccaataccggctgccccccatgggcaaggccttccaggagctggcgggcaaggagctgtgcgccatgtcggaggagcagttccgccagcgctcgcccctgggtggggatgtgctgcacgcccacctggacatctggaagtcagcggcctggatgaaagagcggacttcacctggggcgattcactactgtgcctcgaccagtgaggagagctggaccgacagcgaggtggactcatcatgctccgggcagcccatccacctgtggcagttcctcaaggagttgctactcaagccccacagctatggccgcttcattaggtggctcaacaaggagaagggcatcttcaaaattgaggactcagcccaggtggcccggctgtggggcatccgcaagaaccgtcccgccatgaactacgacaagctgagccgctccatccgccagtattacaagaagggcatcatccggaagccagacatctcccagcgcctcgtctaccagttcgtgcaccccatctgagtgcctggcccagggcctgaaacccgccctcaggggcctctctcctgcctgccctgcctcagccaggccctgagatgggggaaaacgggcagtctgctctgctgctctgaccttccagagcccaaggtcagggaggggcaaccaactgccccagggggatatgggtcctctggggccttcgggaccctggggcaggggtgcttcctcctcaggcccagctgctcccctggaggacagagggagacagggctgctccccaacacctgcctctgaccccagcatttccagagcagagcctacagaagggcagtgactcgacaaaggccacaggcagtccaggcctctctctgctccatccccctgcctcccattctgcaccacacctggcatggtgcagggagacatctgcacccctgagttgggcagccaggagtgcccccgggaatggataataaagatactagagaactgaaaaaaaaaaaaanaanaaaacaaatacacaacaagggggggcgcaaaaaaactcccgagggggcccagattaacggacacagctttttcacaagggcccaagagggggatatacagagaagcgccgcggtaaaacggcgggggaaacgggcgggcttgtgaaga

SEQ ID NO: 729473 - DNA, 1660 bp, Homo sapiens; identical to SEQ ID NO: 405630
  misc_feature (41)..(41): n is a, c, g, or t

SEQ ID NO: 729474 - DNA, 1169 bp, Homo sapiens
  misc_feature (41)..(41): n is a, c, g, or t
ctactactactactaaattcgcggccctcgacttttttttntcagttctctagtatctttattatccattccctcagctgcccacacctcttcccggcccctgaagttggcactgcagcagacagctccctgggcaccaggcagctaacagacacagccgccagcccaaacagcagcggcatgggcagcgccagcccgggtctgagcagcgtatcccccagccacctcctgctgccccccgacacggtgtcgcggacaggcttggagaaggcggcagcgggggcagtgggtctcgagagacgggactggagtcccagtccacccgccacgcccgagcagggcctgtccgccttctacctctcctactttgacatgctgtaccctgaggacagcagctgggcagccaaggcccctggggccagcagtcgggaggagccacctgaggagcctgagcagtgcccggtcattgacagccaagccccagcgggcagcctggacttggtgcccggcgggctgaccttggaggagcactcgctggagcaggtgcagtccatggtggtgggcgaagtgctcaaggacatcgagacggcctgcaagctgctcaacatcaccgcaggtgagccctctccatgtgcctgcttccgtaagatgggtcacaggcaaggctgaggtcgctggggtgggtcggggcactgctggatggactctggccacctctggcccagcctcgggcagctttggggatgctggcacttctacacacagtcagctgtgagcctgggccaggaaggtttctgtccacctctagtgtcccaaccatgccagcctagggtccccactggtaggtgctggatgatatgaattcaagctctgtgtcccccacctcctcttggacttcgctctcccctcattcactctgctcccgccacactggcctgtttgctgttcccacaacatttgctacgctgctgcttcttcagcctagagcgctcttcccccaaatatctgtgtgactcacttccttcaggtcttggctcagatggcaccatccgcatgaggccttccctgacccctccattaaaattgctgcccatgagcacaggacatggtaaagaaaacaaacaaaaaaatgaaaaataaaagaaagaagaaaaatttctgctcacatc

SEQ ID NO: 729475 - DNA, 469 bp, Homo sapiens
actaatctctagcctgaactccactgttacctctcagctacttcatttattcattctttcaacaaatagctatccagcctctcccctccctttccaagttcaggacaccagcctcaacactgaagatacagcagtgaacaagcaaagccccttctctcatttactctgcatccttttcagaagaggtagacaataaagagatacagaaataatatgtcatgtggtggcaaatgctaggaagaaataacaaaacaagaaaagggaaagagaatggttggctaaggaggcagcatctctggtaaagtaacatttaagcaaagaatcaaatgaaacaaaggggccagtcgggggaaattggtgttagactggtaaactcagagatggaaacaggtgttgtcctgcagcatcactgaggcagtgtggcaggagtggaacaggattggaaactcgagagacagaagaaatttga

SEQ ID NO: 729476 - DNA, 1441 bp, Homo sapiens; identical to SEQ ID NO: 542585

SEQ ID NO: 729477 - DNA, 780 bp, Homo sapiens
ctactcatgctgctgttgctcccatgggcccccattgagagcagcctcttgtccttacagaccttggaaactggaagaaggggcatagaggttccccatgagtttacgttatctgttaggatgaacactggcactggaagcgtgatgccatgtggtttaacagaaatgccatctctctaatggtgaatttagttacaggtggtcctctagttgcagagtattaactgtgttcctacagttttttaaaaaaaatcttgaacagatccaaattggcacttttgctctttttagcgattttaactgtggagaaaatgggttaattttgtgattctgttgcagagcttcagccacaagtgtgctccatggaggatgatgaatatttcattttctgtatatacccaagtccccactgtatgcttagggatccccccagttattacttaacatcttttattttcttcattcaaacatagcttctaaccaaaccatcataaattcattttcgtttcttgatctctgcgtgtgttttttcaagagttcccaaaagtcctcactagcaggttgttaaggatctttctctgtgtcagtgttatgttaactgatgactgtaggaataaatgtgtgcgccgggattttattagctgctatttgcagcatcttttttatatcagctctgtgggagcgtatgtgtgtatatgtgtgtgtgtttgctctccatggttgttgcttcaactaggcaatttgacatttcaagaaaacaagaggcccatcctagtatga

SEQ ID NO: 729478 - DNA, 621 bp, Homo sapiens; identical to SEQ ID NO: 596769

SEQ ID NO: 729479 - DNA, 521 bp, Homo sapiens
ggtacctgtctataaggagtcctgcttatcacaatgaatgttctcctgggcagcgttgtgatcttggccaccttcgtgactttatgcaatgcttcatgctatttcatacctaatgagggagttccaggagattcaaccaggaaatgcatggatctcaaaggaaacaaacacccaataaactcggagtggcagactgacaactgtgagacatgcacttgctacgaaacagaaatttcatgttgcacccttgtttctacacctgtgggttatgacaaagacaactgccaaagaatcttcaagaaggaggactgcaagtatatcgtggtggagaagaaggacccaaaaaagacctgttctgtcagtgaatggataatctaatgtgcttctagtaggcacagggctcccaggccaggcctcattctccttctggcctctaatagtcaatgattgtgtagccatgcctatcagtaaaaagatttttgagcaaacactagaacctaaagcaagagcaaaggcgagat

SEQ ID NO: 729480 - DNA, 879 bp, Homo sapiens
ggtacctgtctataaggagtcctgcttatcacaatgaatgttctcctgggcagcgttgtgatcttggccaccttcgtgactttatgcaatgcttcatgctatttcatacctaatgagggagttccaggagattcaaccaggaaatgcatggatctcaaaggaaacaaacacccaataaactcggagtggcagactgacaactgtgagacatgcacttgctacgaaacagaaatttcatgttgcaccctgtaagtctcaagccagtgctggccaagagggggacatagctgtcctctgaggaacagctactccctctgtgcaaaattccaatcttcaggggttaagtacggttcagttttcatagactttataatagagtagtttcagattcacagcaaaaactgagcagaggtaccagaaatttcccatgtgcctcctgccctcaaacatgcagactccctgttatcaacatcgtcccaccacaggggggtattctgtatgactgatgaactacctgtgcacatcattatcacctgggtccatagttcatgtagggcttcctcttggtgtgtggaatgggggtaagttcaggacctatttctttcttttaacacatgtgggcagtcacaatggtcagctgtaattccagcattgggggcgaggggggaccaggaggcgggacgaagcctcctaggaaagtggaaccggttctctaaaacaaaagaaaaaaaatgtggggcccgccgagaagttaaacctgggggggcgccaagaaaagaaagagcagagcaagaccggcagacaggggtcccaaaagccgggggtgacagcagctggttgtcgagaacacgcgcgacgcgaaacacacacgagccagcg

SEQ ID NO: 729481 - DNA, 518 bp, Homo sapiens
atggcggcccagccgtgttccagagctccctgtcgggtgccctcgcccgctttatataaattcgtctgattcactttgcattagaaagtaacagtgtttgtttgtacaaaagagggagttccaggagattcaaccaggaaatgcatggatctcaaaggaaacaaacacccaataaactcggagtggcagactgacaactgtgagacatgcacttgctacgaaacagaaatttcatgttgcacccttgtttctacacctgtgggttatgacaaagacaactgccaaagaatcttcaagaaggaggactgcaagtatatcgtggtggagaagaaggacccaaaaaagacctgttctgtcagtgaatggataatctaatgtgcttctagtaggcacagggctcccaggccaggcctcattctccttctggcctctaatagtcaatgattgtgtagccatgcctatcagtaaaaagatttttgagcaaacactagaacctaaagcaagagcaaaggcgagat

SEQ ID NO: 729482 - DNA, 827 bp, Homo sapiens; identical to SEQ ID NO: 541266

SEQ ID NO: 729483 - DNA, 1861 bp, Homo sapiens
gatctcggctcactgcaagctccgcctcccgggttcatgccattctcctgcctcagcctcccgagtagctggtactacaggcgcctgccaccacgcctggctaatttttttgtattttcagtagagatggagtttcactgtgttagccaggacggtctcgatctcctgacctcgtgatcctcctgtctcggcctcccaaagtgctgggattacaggtgtgagccaccgtgcccggcctcttaagactaccttagaaagtagattgcaaaaaaactttaaacatgtatgtatttaaaaatttaataacaaaaccccccaaattctgtcatgatcttgatcattagaaagatttatgtaattggagaatttcagaaatatcttggtggcagaactagatgccttttgaggttcaatttaattctaacatcccgttaaaatttaatgtacaatatgtagagaaggacagcaactacacactgtacaccctaagactgatttttaaaaaagcaacatcaacttcaacatccaagtatcctatactttacacagtgcctggtatgtaatagttgcttaatgtttgctgaatgacagtgtgatcaaaggagtgttgttacatctgtcactctgaggtccttctggtgatgttgccatatcttataacatcaacaaatgttttcttaaaaatgaaattttcaggtgcattggctcacacctgtaatcccaacattttgggaggctgaagtgggagaattgcttgaggccaagagttcgacaccagcctgggcaacacagtgagacaccatctctaccaaaaaaattaaaaaattagctagtcatggtggtgtgtgcctttagtcctagctattcccaggagtttgaggttgcagggagtatgattgtgccactgcactccagcctgggtggcagagcaagactcggtctctatttttaaaaaaagaaagaaagaaaaatttgccttcactgccagttctacattgtggaggatactttgttttggcccctagagggagcgctagcctcctctataaatctcatcctcagcactctcctccagggttttcttacgctacattaaaagagaattgagaagaaactgttaaggtcaaaaacgtttcatgggcatgtttgtaggagcgtggatcaatccagtgagtgtggatcactgaaatcaatatgttgaatggatatctgtgctctcacgttcattacaacattcttcagaatcccaaatatacaatcaacctgtgttcatcaacagagatggatgaagaaaatgtggtatatatgaacaatagaatactattccacctaaacagggagaaattctgtcatttgtgataacgtggataaatctggaggacattatgctaagtgaaataagccaggtacagaaagacaaatacctcatgacctcacttatatgtggaatctaaaaaagtcaaactcacaaaagtagaaactagaatgctgattaccagaggctagggaggtggagaaggaggaaattgggagatgttgatcacaaaatacaaagtttgaacaaaaaaaaaaaaaaagaaaaaatacaaaatttcgacagacaggaggaataggttttgagatctattgcactattgattatagtcaataataatgtattctatatttcaaaataactgagtaaatttcaaatgtatcaccataaaaatgataggtaagtgaggtgatggatatgttatttggcatgatttatcattccacaaaatgtacatatattgaaacatcgcattgtatcccataactgtatgtaattatgatatgtcaatgaaaaataatattactaataaaaattttaattttc

SEQ ID NO: 729484 - DNA, 539 bp, Homo sapiens
gctaattttgtatttttagtagagatggggtttctctgttttgatcagggtgtctcgaactcccgacctcaggtgatccactcgcctcggcctcccaaagtgctgggattacaggcgtgagccaccgtgcctggcctgcttgttgttttcatctcatcctgatttccaaatacaggagagaagctgaattggtgttcactaacaagcacaggagctttgttatatttacagtgtcattcttggcaaaacctgaagggtgtgttcgtggggtgatgaggttcagtcacctgtgatctgtgcatctggccagcactgtggtgacatccttaggaatccatggggagagagaaagcattcaggagttagtgggtcacgtttgacaagggccaataaagaaatatgcaaagacaaaaaacaagaagaacattgtcatattttctaccttttgtttatataaatttatatcaatgattttagcttatgttaatatgcaatgtatataatatgctaacatttacaatatatgtttatagtttaaa

SEQ ID NO: 729485 - DNA, 1749 bp, Homo sapiens; identical to SEQ ID NO: 28218

SEQ ID NO: 729486 - DNA, 704 bp, Homo sapiens
tcattggcgtcatctcacaaggccctgagctggcaggaaattgaggtctcaaggggaaaagccacctgcccccagtgacaaccaggaagtgcaagactctgacccaacgcccatgcctgccatccccaaacatgggctcaaaacccccttcccagggacggctgtgtccacccctcagcaggaggaggagaccccacagcaccgggtgagaggtcagtgctgaagccagggaggcagctctcagcagggcacctgtgtggagccagggaagccagggccacacttgcagggtgaagtggggaactcggaaggctgggcagtggagcaaaatgcttggtgccctgcgggaaccggtggccaaggctacactgggatgaagggagccgtggagctgcagaatctgcgggtggccctcagtggcaggcagccaggccaacaggggctttgggctgcaggtcagcccctcccctgctctggaacttttggagggccattacaaaggacatcagccccaagatactcctctgaaattctgcctgaaaggcccttcacattccctaattggcacttacaacattccagaacattctatggtaccttaagtttctcctccccctccaaagggcccttgaaccttaaggatagggcagaaggggctcctcaccctggcctcgagggcttaagatccagctgaggactcctag

SEQ ID NO: 729487 - DNA, 390 bp, Homo sapiens
ccctctgcacccccgtttcctcccctgtaaggtgggaataatagcgtatgtctctaggattaagtgagccagtcatgcatgggccgagaaccaggtttggcatattgtagctgctcagtggacgttagctgttatgattggaccacaacgtgcttccgtttcaattctgtgggccttttggaggtcctgctggatgctaagcaccgaaacctcaacccggaacaagaccagaacaacctgagcaacaacaggaccagcgatggctctccctgctggaggattctggaagtcacctggctggaccaagccctctccgtgttctctgtcagcccactccccagagccgctaggcctgatgtgcacaagcagactaataaaggcttgaggaca

SEQ ID NO: 729488 - DNA, 472 bp, Homo sapiens
tcattggcgtcatctcacaaggccctgagctggcaggaaattgaggtctcaaggggaaaagccacctgcccccagtgacaaccaggaagtgcaagactctgacccaacgcccatgcctgccatccccaaacatgggctcaaaacccccttcccagggacggctgtgtccacccctcagcaggaggaggagaccccacagcaccgggtgagaggtcagtgctgaagccagggaggcagctctcagcagggcacctgtgtggagccagggaagccagggccacacttgcagggtgaagtggggaactcggaaggctgggcagtggacaacaacaggaccagcgatggctctccctgctggaggattctggaagtcacctggctggaccaagccctctccgtgttctctgtcagcccactccccagagccgctaggcctgatgtgcacaagcagactaataaaggcttgaggaca

SEQ ID NO: 729489 - DNA, 387 bp, Homo sapiens
cccgtccttcctctcctagcctaaggcgtgcaaacagagcgccactgggaggctgaaacctttaggccgatgcttgcttgcaaggtcaggcaagctggattctggtccccacctttgcagagagaacagcgatgttgtgcgcccatttctcagatcaaggaccggcccatcttactacctccaagagtgcttttctctctaataagaaaacatctactttgaaacatctactgggcgagaccaggagtgatggctcagcctgtaattctggaatttcgggaggccgaggcaggaagattccttgagcacaggagttccagaccagcctgggcaatgtagcaagacgctgtctctatttatacaataaaatttttttaaaaaaggaaa

SEQ ID NO: 729490 - DNA, 1076 bp, Homo sapiens; identical to SEQ ID NO: 728382

SEQ ID NO: 729491 - DNA, 608 bp, Homo sapiens
aggatgtcgccactcagaaggccgagacccagcggtcttcaatagaagtccgggaggccgggacgcagcgttcggtggaggtccgggaggccgggacccagcgttcggtggaagtccaggaggtcgggacacagggttctccggtggaggtgcaggaggccgggacccagcagtctctccaggctgccaacaagtcggggacccagcgatcccccgaagctgccagcaaggcagtgacccagcggtttcgcgaggatgcccgggacccagttactagattatgaaggcatctcaggccctggagccagagccagtcaggggttaaagtgaaagcccgtatttccgcccagaagctggggttggggagaggatgtggattttttgttttaccctttctgttgcatggttgcaaacacaaacttgagttctaataaagaattgcaaagtggaagcccgccccccgcctcccccccgcctcacttaagtccaggaagctggggtggcgaggaaggatgatgtggattgtttttgttttacaccttctgttgaatggttgccaacacaaacttgagttctaataaataattgcatttccctaaaaaaagtat

SEQ ID NO: 729492 - DNA, 659 bp, Homo sapiens
cttgagtgaattatataactatttaatagaaataataaaacatcgatacaaatataaaagacataatcagtataaaaggcttatatttataaaaatactttaggtaacagttttcccctgagggttgaccatgcgtgttgcatccataaatattgctcggctctgtagctcactctccaaagttcagagttcatctttaaaggaagtggtgctggccccggtcgtgtgacctggccgaagtggctgcctcaggctggcacctgggcttgatagaatgaagaagagaacagcatcagtggggcctccgaaaaatctggagaagatttttttcttccaaatatggaagatacaaagaccaaggatgacaggctagtgatcaggtcatgtgactggtgtggcagctcactggtttttctggacccagtcccaactgtcttcattctctttccggttcttctcagcttcgataatttctttgtaccttcggcgaaagaagcccatctgaaaggcagaaagaaagagaagctgagttagaagtgctgaagaatcagccattgtgaccccaaggcagtctgtccctgggtaggtgtgacctgcactcacagggctggggaggcttggaggacccctcggattagagaaaacactggcaagaaaaa

SEQ ID NO: 729493 - DNA, 285 bp, Homo sapiens
gaagagaagcatgaggttacatctgtaatctccctgcagcagagtcaactgcataagaaaccaaaagacacacctgctccatgccagcttcgataatttctttgtaccttcggcgaaagaagcccatctgaaaggcagaaagaaagagaagctgagttagaagtgctgaagaatcagccattgtgaccccaaggcagtctgtccctgggtaggtgtgacctgcactcacagggctggggaggcttggaggacccctcggattagagaaaacactggcaagaaaaa

SEQ ID NO: 729494 - DNA, 1475 bp, Homo sapiens
ggcacgaggcctcgtgccgcccagcagcccgtgggcaggcgcggcggagcgagcggggccggcggcgggcgccgagggacgccgagggacgccgaggcctcgggcgggggctggcccggggttccagatgttggatgtgatccttaaacaaagcaaagatgtctgccgtcgttgaaagttgtttctaaaaggtctccagtgggggctgcagactaagcaaaatgaggcggttcctgaggccagggcatgaccctgtgcgggagaggctcaagcgggacctgttccagtttaacaagacggtggagcatggcttcccgcaccagcccagcgccctcggctacagcccgtccctgcgcatcctggccatcggcacccgttctggagccatcaagctctacggagccccaggcgtggagttcatggggctgcaccaggagaacaacgctgtgacgcagatccacctcctgcccggccagtgccagctggtcaccctgctggatgacaacagcctgcacctttggagcctgaaggtcaagggcggggcatcggagctgcaggaggatgagagcttcacactgcgtggacccccaggggctgcccccagtgccacacagatcaccgtggtcctgccacattcctcctgcgagctgctctacctgggcaccgagagtggcaacgtgtttgtggtgcagctgccagcttttcgtgcgctggaggaccggaccatcagctcggacgcggtgctgcagcggttgccagaggaggcccgccaccggcgtgtgttcgagatggtggaggcactgcaggagcaccctcgagaccccaaccagatcctgatcggctacagccgaggcctcgttgtcatctgggacctacagggcagccgcgtgcttctaccacttcttcagcagccagcaactggagaacatctggtggcagcgggacggccgcctgctcgtcagctgtcactctgacggcagctactgccagtggcccgtgtccagcgaagcccagcaaccagagcccctccgcagcctcgtgccttacggtccctttccttgcaaagcgattaccagaatcctctggctgaccactaggcaggggttgcccttcaccatcttccagggtggcatgccacgggccagctacggggaccgccactgcatctcagtgatccacgatggccagcagacggccttcgacttcacctcccgtgtcatcggcttcactgtcctcacagaggcagaccctgcagccagtaggagagcttcgggagtgggtgcccagggttaggtgtgggaggcatggggcaggaccatcagtaaagacagggccaggtgcagtggctcctgcctgtaaccccagtgctgtgggaggccaaggtggtaggatcgcttgaacccaggagttcaagtccagcctggacaacgtagggagacccttgtctctacaaaaaataaaaaaattagccaggt

SEQ ID NO: 729495 - DNA, 1411 bp, Homo sapiens
ggcacgaggcctcgtgccgcccagcagcccgtgggcaggcgcggcggagcgagcggggccggcggcgggcgccgagggacgccgagggacgccgaggcctcgggcgggggctggcccggggttccaggtctccagtgggggctgcagactaagcaaaatgaggcggttcctgaggccagggcatgaccctgtgcgggagaggctcaagcgggacctgttccagtttaacaagacggtggagcatggcttcccgcaccagcccagcgccctcggctacagcccgtccctgcgcatcctggccatcggcacccgttctggagccatcaagctctacggagccccaggcgtggagttcatggggctgcaccaggagaacaacgctgtgacgcagatccacctcctgcccggccagtgccagctggtcaccctgctggatgacaacagcctgcacctttggagcctgaaggtcaagggcggggcatcggagctgcaggaggatgagagcttcacactgcgtggacccccaggggctgcccccagtgccacacagatcaccgtggtcctgccacattcctcctgcgagctgctctacctgggcaccgagagtggcaacgtgtttgtggtgcagctgccagcttttcgtgcgctggaggaccggaccatcagctcggacgcggtgctgcagcggttgccagaggaggcccgccaccggcgtgtgttcgagatggtggaggcactgcaggagcaccctcgagaccccaaccagatcctgatcggctacagccgaggcctcgttgtcatctgggacctacagggcagccgcgtgcttctaccacttcttcagcagccagcaactggagaacatctggtggcagcgggacggccgcctgctcgtcagctgtcactctgacggcagctactgccagtggcccgtgtccagcgaagcccagcaaccagagcccctccgcagcctcgtgccttacggtccctttccttgcaaagcgattaccagaatcctctggctgaccactaggcaggggttgcccttcaccatcttccagggtggcatgccacgggccagctacggggaccgccactgcatctcagtgatccacgatggccagcagacggccttcgacttcacctcccgtgtcatcggcttcactgtcctcacagaggcagaccctgcagccagtaggagagcttcgggagtgggtgcccagggttaggtgtgggaggcatggggcaggaccatcagtaaagacagggccaggtgcagtggctcctgcctgtaaccccagtgctgtgggaggccaaggtggtaggatcgcttgaacccaggagttcaagtccagcctggacaacgtagggagacccttgtctctacaaaaaataaaaaaattagccaggt

SEQ ID NO: 729496 - DNA, 616 bp, Homo sapiens
caactggagaacatctggtggcagcgggacggccgcctgctcgtcagctgtcactctgacggcagctactgccagtggcccgtgtccagcgaagcccagcaaccagagcccctccgcagcctcgtgccttacggtccctttccttgcaaagcgattaccagaatcctctggctgaccactaggcaggggttgcccttcaccatcttccagggtggcatgccacgggccagctacggggaccgccactgcatctcagtgatccacgatggccagcagacggccttcgacttcacctcccgtgtcatcggcttcactgtcctcacagaggcagaccctgcagccacctttgacgacccctatgccctggtggtgctggctgaggaggagctggtggtgattgacctgcagacagcaggctggccaccggtccagctgccctacctggcttctctgcactgttccgccatcacctgctctcaccacgtctccaacatcccgctgaagctgtgggagcggatcattgccgccggcagccggcagaacgcacacttctccaccatggagtggccaattgatggtggcaccagcctgaccccagccccaccccagagggacc

SEQ ID NO: 729497 - DNA, 1245 bp, Homo sapiens
ggcacgaggcctcgtgccgcccagcagcccgtgggcaggcgcggcggagcgagcggggccggcggcgggcgccgagggacgccgagggacgccgaggcctcgggcgggggctggcccggggttccaggtctccagtgggggctgcagactaagcaaaatgaggcggttcctgaggccagggcatgaccctgtgcgggagaggctcaagcgggacctgttccagtttaacaagacggtggagcatggcttcccgcaccagcccagcgccctcggctacagcccgtccctgcgcatcctggccatcggcacccgttctggagccatcaagctctacggagccccaggcgtggagttcatggggctgcaccaggagaacaacgctgtgacgcagatccacctcctgcccggccagtgccagctggtcaccctgctggatgacaacagcctgcacctttggagcctgaaggtcaagggcggggcatcggagctgcaggaggatgagagcttcacactgcgtggacccccaggggctgcccccagtgccacacagatcaccgtggtcctgccacattcctcctgcgagctgctctacctgggcaccgagagtggcaacgtgtttgtggtgcagctgccagcttttcgtgcgctggaggaccggaccatcagctcggacgcggtgctgcagcggttgccagaggaggcccgccaccggcgtgtgttcgagatggtggaggcactgcaggagcaccctcgagaccccaaccagatcctgatcggctacagccgaggcctcgttgtcatctgggacctacagggcagccgcgtgcttctaccacttcttcagcagccagcaactggagaacatctggtggcagcgggacggccgcctgctcgtcagctgtcactctgacggcagctaggggaccgccactgcatctcagtgatccacgatggccagcagacggccttcgacttcacctcccgtgtcatcggcttcactgtcctcacagaggcagaccctgcagccagtaggagagcttcgggagtgggtgcccagggttaggtgtgggaggcatggggcaggaccatcagtaaagacagggccaggtgcagtggctcctgcctgtaaccccagtgctgtgggaggccaaggtggtaggatcgcttgaacccaggagttcaagtccagcctggacaacgtagggagacccttgtctctacaaaaaataaaaaaattagccaggt

SEQ ID NO: 729498 - DNA, 685 bp, Homo sapiens
cgggggtctcagcctggttcttccttgttcctcgtcctctgaggtagcaactgcctcatcttttccatctatggagtgtggaatatgtgccctacttcattcaggaatgttggacaaaccagctatttagagagtgaaggagaggaacttccgagagcaaccggcccccaagagaaacccagggactcctgcccttcggcagctttgtccatgtgctgctcacaccaaaaagcactcgagggtgacctgcaccaaaaatgcattgccgtagtctgggcacagtggatcacgcctgtaatcccagctctttgggaggccaagagaagttagaacacttgaaattagctaagcgagaatgccatcagcagtgcatcgatctcagctgcatccaggtgtatcagttgaatggcagagggactagaaattacatttcacgaagaaaatttacagaactaaagatatttaggctgcaaaagaaaagactaaggcactgtgctaagttggacttacagagatgaataagatttggccacatcttcaaggagctcagaccttcatggacataccaaatatatacagaactaactctactgcttatcataatgagagctgtgctatggatatttgaaagttagagagatttattttcaacagaataataaagtcaactttcacaaactggtga

SEQ ID NO: 729499 - DNA, 870 bp, Homo sapiens
gccaggacttctgcacctgaaccttttcctcccccttaaaaaatgagtcagtccagtacataaaccaatcgacttaaaatttacatagttactaaaaagatctgagaatgtttagacttgtattagtttttaagtgaagttggtttctcatttcttaaaacagtccagagacttgaggcaataaatgactctcagcttctcctattcatgagtccatcttgtcacacttatctcatgagaaaaaaactagaaagaggcagaaatgagaaaaaatgacttcctcgggcaattcgaaggcagaaaagttgtttgagaattatcctcattatcttcctgaccacctcacataccctgtaggtggaaagatttaattcttcactacttcttagactgatgggactgaagtgtaatgtttcttgttcaaagtcatagttcactggatgtttttcaaacaggaatgttggacaaaccagctatttagagagtgaaggagaggaacttccgagagcaaccggcccccaagagaaacccagggactcctgcccttcggcagctttgtccatgtgctgctcacaccaaaaagcactcgagggtgacctgcaccaaaaatgcattgccgtagtctgggcacagtggatcacgcctgtaatcccagctctttgggaggccaaggcactgtgctaagttggacttacagagatgaataagatttggccacatcttcaaggagctcagaccttcatggacataccaaatatatacagaactaactctactgcttatcataatgagagctgtgctatggatatttgaaagttagagagatttattttcaacagaataataaagtcaactttcacaaactggtga

SEQ ID NO: 729500 - DNA, 1036 bp, Homo sapiens
gccaggacttctgcacctgaaccttttcctcccccttaaaaaatgagtcagtccagtacataaaccaatcgacttaaaatttacatagttactaaaaagatctgagaatgtttagacttgtattagtttttaagtgaagttggtttctcatttcttaaaacagtccagagacttgaggcaataaatgactctcagcttctcctattcatgagtccatcttgtcacacttatctcatgagaaaaaaactagaaagaggcagaaatgagaaaaaatgacttcctcgggcaattcgaaggcagaaaagttgtttgagaattatcctcattatcttcctgaccacctcacataccctgtaggtggaaagatttaattcttcactacttcttagactgatgggactgaagtgtaatgtttcttgttcaaagtcatagttcactggatgtttttcaaacaggaatgttggacaaaccagctatttagagagtgaaggagaggaacttccgagagcaaccggcccccaagagaaacccagggactcctgcccttcggcagctttgtccatgtgctgctcacaccaaaaagcactcgagggtgacctgcaccaaaaatgcattgccgtagtctgggcacagtggatcacgcctgtaatcccagctctttgggaggccaagagaagttagaacacttgaaattagctaagcgagaatgccatcagcagtgcatcgatctcagctgcatccaggtgtatcagttgaatggcagagggactagaaattacatttcacgaagaaaatttacagaactaaagatatttaggctgcaaaagaaaagactaaggcactgtgctaagttggacttacagagatgaataagatttggccacatcttcaaggagctcagaccttcatggacataccaaatatatacagaactaactctactgcttatcataatgagagctgtgctatggatatttgaaagttagagagatttattttcaacagaataataaagtcaactttcacaaactggtga

SEQ ID NO: 729501 - DNA, 734 bp, Homo sapiens; identical to SEQ ID NO: 4385

SEQ ID NO: 729502 - DNA, 429 bp, Homo sapiens
gagcaggtgtacagagagggactactatcatataggctgtcaatatttaactcccgggacagtacctcaataaaagtccttaaattaataactcttgggggcagaagaaagatcctgagatctgctttattctccttgtgttcttccgcagagctttaatcacatactaaaggatcacttaatacttaagtaaatacttgaatcaatgacacctggaggcacattcccaactctacactcttttccaagtccaattccaacttttcagtcagcatgcttaaatgagtctgccagagtatcccactactatctaaacttctgagtatctagaacttccctgatacttttccgctgtcaatattcttcttgccttttccatttacgtttagaccctcattctcccagtaacccaaatttgaaacctcaggg

SEQ ID NO: 729503 - DNA, 522 bp, Homo sapiens
cacctgtaatcctagcactttgggaggctgaggtggaaggatcacctgaagtcaggagttcgagaccagcctgaccaacatgacgaaaccccgtctctactgaaaataccaaaattagccgggcatggcagcgcacacctatagttccagctattcaggagactgaggcaagagaattgcttgaacccaggaggcggaggttgcaatgagccgagatctcaccactgcactccagcctgggcgacagagcaagacctcatctcaaaaaattaatttatcaatttaattaaataaaaaaaaaaaactttatcccttccttacctccccagagtcataggaaaagagatcacagggcatgtgtgctccagtcagacactgggaatgggaagggaatggaggccactctgagaccaagctcacaacagggtagagctgaaaggggaagcactctaggccttcttgaatagaagtgcttcccagttgagagcacaccagtcccattggcaaggctccctaaataga

SEQ ID NO: 729504 - DNA, 991 bp, Homo sapiens
gcctctacaactgctggcacccgaataatcctaacaaaggaatttaagtagctgacactgtgataagagcatcctgtgaactacccaaataaggaggaaaacgaacgcagctgagcatgggatgccatataaaaatcacttaaaccagtcgccactccttgtttcctgagttgtcctgtgctggaggtctgctcagacgaaggtctccatggcgttagaagtcttgatgctcctcgctgtcttgatttggaccggtgctgagaacctccatgtgaaaataagttgctctctggactggttgatggtctcagttatcccagttgcagaaagcagaaatctgtatatatttgcggatgaattacatctgggaatgggctgccctgcaaatcggatacatacatatgtatatgagtttatatatcttgttcgtgattgtggcatcaggacaagggtagtttctgaggaaactctcctttttcaaaccgagctgtactttaccccaaggaatatagatcatgaccctcaggaaatccatttggagtgttccacctctaggaaatcagtgtggcttacaccagtttctactgagaatgaaataaaattggatcctagtccttttattgctgactttcagacaacagcagaagagttaggattattatcttctagtccaaacttgctctgagctaaaggagaaatggaaacttgaagctggtgttatgtattttgcaggaaaacagtttcattttttcatagcaaaaatatagttggtgtatatctctccttaagtctctggtttctaaaaaccctacttcagtaaaggtcctgattagttgattagtgaatgtgtatttctaaatatttgtattcagtaggggtatggctgattaatttaacattaactattaggtaattcatattatacatttaagttctttctgttctgtgtagaagattcagaaatatgtcttcaaagacaatgacttgatct

SEQ ID NO: 729505 - DNA, 492 bp, Homo sapiens
gtagctgacactgtgataagagcatcctgtgaactacccaaataaggaggaaaacgaacgcagctgagcatgggatgccatataaaaatcacttaaaccagtcgccactccttgtttcctgagttgtcctgtgctggaggtctgctcagacgaaggtctccatggcgttagaagtcttgatgctcctcgctgtcttgatttggaccggtgctgagaacctccatgtgaaaataagttgctctctggactggttgatggtctcagttatcccagttgcagaaagcagaaatctgtatatatttgcggatgaattacatctgggaatgggctgccctgcaaatcggatacatacatatgtatatgagtttatatatcttgttcgtgattgtggcatcaggacaagggtaagaacagtgattgtttgtaaaaaatactgcatgttttgtcagacttttatgcctagtattaaaattgtcttttaaaaaaataatg

SEQ ID NO: 729506 - DNA, 686 bp, Homo sapiens
gtagctgacactgtgataagagcatcctgtgaactacccaaataaggaggaaaacgaacgcagctgagcatgggatgccatataaaaatcacttaaaccagtcgccactccttgtttcctgagttgtcctgtgctggaggtctgctcagacgaaggtctccatggcgttagaagtcttgatgctcctcgctgtcttgatttggaccggtgctgagaacctccatgtgaaaataagttgctctctggactggttgatggtctcagttatcccagttgcagaaagcagaaatctgtatatatttgcggatgaattacatctgggaatgggctgccctgcaaatcggatacatacatatgtatatgagtttatatatcttgttcgtgattgtggcatcaggacaagggtagtttctgaggaaactctcctttttcaaaccgagctgtactttaccccaaggaatatagatcatgaccctcaggaaatccatttggagtgttccacctctagtgtttgatgcagaaatcatggggagactatctggaattagttcttctgtaagcctatctgctcaaatcctgtaccaagagtccacgaggatctagaaggcgtagtatgctggctctatgccatactcctgaatgactattctgtatatgatcatgatattaaacagtggtaaaactga

SEQ ID NO: 729507 - DNA, 472 bp, Homo sapiens
agaagttatgatatttgctgttttttgaataaaagaatttgactctctttaaaccctaaagcttgaaatttagcatttatctcacatgagacaaatgtttaggaactcatgtttaggaactcatgttcctgcctgaggcaggaactgaaacaccagatcacttgcatcgagaccgtgagactccctatgtttcatccatcatgattgcgtccttatccctccctgatttcctgttttctcgcccttctcgctacataagccccccaattttggtcggggagacggatttgtgatttcatctcctccctcatgaatactcatagaatttttccaaacctactgaatctgtatgtaaggttgactctgtaaggcatatatatattccagctccccttcactgccacagagcgctcattccatcctgggattacttctccctctgaaaataaagtctttgttacttcctgaaaaa

SEQ ID NO: 729508 - DNA, 612 bp, Homo sapiens
  misc_feature (555)..(555): n is a, c, g, or t
actccctttctgggggcaactcctataaacagatttagcctaagactcgcgtgttgaaattgacttgccccattcctgccagttaagaggattagcgatacaggtggtgaaaaagaaacgatgacacccctaagacctgagccccttctgggccccacactccacctgtagaactctgatggggccttgtgcggccgaaccacaatccaagagaggtgttcacatcatgtgtcgctagccacagccatctcaaggggaaatgccccaaatgtagaagtatctgacaccaggactgggggttggagcactggatgaacagcgtgtgtgccactctttcactgtgcaccgtcctaagaaagaagcctgtttccctttgaagagcctagtgctgactgcccaattcaatcggaccacgcagggcagtctgaggattaaaagatgctacctttaattccttcggctaattcagaagtatgtgaaacacaacatactcattaacatggaagaactggatgtgtgtgcatgtgggtgtgtattatttatttttcagagacnagtttcaccatgtgcccagctggtctgactcctgggctcaaccgtgatcctcccacc

SEQ ID NO: 729509 - DNA, 931 bp, Homo sapiens
  misc_feature (874)..(874): n is a, c, g, or t
ggtggtgtgcctcggtgagtgactatggtagggccgtaggaacatgtgcgggcggtgggctggcagcgttaagccgggcggattctaggcgtggcgggtatgcagaccggtggtacggtcgttgaggaagagccggctgtgttgttgttcacggcggaattcggccggttggcgattacggtttggatccatggtgctgggcccatgtaaggctttcttagacaagtgaggcggcatgtgggtgttcggacggagtatcgttagaattaagatgaaccaagttaagcaaagtgcagcttctgactcagtttttggaagacagatcactggttacccatggaagggaacagaagaaatgctttagaagagctgaggcagaaattggccatgcagagggctcctagaactggtgtcccatcaccatctctggttttgtcagatgacacccctaagacctgagccccttctgggccccacactccacctgtagaactctgatggggccttgtgcggccgaaccacaatccaagagaggtgttcacatcatgtgtcgctagccacagccatctcaaggggaaatgccccaaatgtagaagtatctgacaccaggactgggggttggagcactggatgaacagcgtgtgtgccactctttcactgtgcaccgtcctaagaaagaagcctgtttccctttgaagagcctagtgctgactgcccaattcaatcggaccacgcagggcagtctgaggattaaaagatgctacctttaattccttcggctaattcagaagtatgtgaaacacaacatactcattaacatggaagaactggatgtgtgtgcatgtgggtgtgtattatttatttttcagagacnagtttcaccatgtgcccagctggtctgactcctgggctcaaccgtgatcctcccacc

SEQ ID NO: 729510 - DNA, 476 bp, Homo sapiens
ccaaggaatatctggtgaacatcacagaatacagggcttctcattccactccaattgagtggtatccggattatgaagtggaggcctatcgccgcagacaccacaacagcagccttaacttcttcaactggttctctgaccacaacttcgcaggatctaacaagattgctgagatcctatgtaaggacctgtggcgcaatcccctgcaatactacaagaggatgaagccacctgaagagggaacagagacgtcaggggactcccagttgttgagttgaatatgatggagcatcagattttacctaatacagcagaactcctaaaaagttacagccatatgcaggacggcagtactcagcatggtcttatgcacaggaactaaaggaaaaagagatcgagtcacaaaaattcaggaagagggggtaaatgtggattgtatggaatgaaaaataaacattctcaaggaaatatgaaac

SEQ ID NO: 729511 - DNA, 376 bp, Homo sapiens
ggattgcgcagaacagtttgtaacacgtggtaggaggaagtttaagggatcacaaatggggaagggatatccttttctcagcgggccccacaattgaaacatttcaaagtatggctcagagaaaatgcgttttaacatgagtttgtgtttctctaggggactcccagttgttgagttgaatatgatggagcatcagattttacctaatacagcagaactcctaaaaagttacagccatatgcaggacggcagtactcagcatggtcttatgcacaggaactaaaggaaaaagagatcgagtcacaaaaattcaggaagagggggtaaatgtggattgtatggaatgaaaaataaacattctcaaggaaatatgaaa

SEQ ID NO: 729512 - DNA, 526 bp, Homo sapiens
tgaatgaccacaaggagatttgattatacatgtgaacacctcagaaggcacagcccacccagaaggcagacaggtcaggctgctttttcttcattgcttggattcaatcctccgggcggctcaggctcaaacataacttaagcatgattaaactttagaagaagctgccaggaagactgtgaaatcttcatgcccaaggatccctaaaattaggagcaacaaccacttggctcagacggtttatggaggcaaaggtttggatgggattagagatttctaaatgtgagttcgtgtcctctgccagaccaccttacttccaccattcctcagcaaatcaagaaaaacaggagaaaagacatgcctttccataagttaaatctattctgttttaattctatattatatctgctgtacaacttcttttgtttgtaacaccatattgttgctagtaactggaaattaattttcacatgcctcagcttagaaaaataaaaagcagccctgcatcaatcccaaaaaaaaaaaa

SEQ ID NO: 729513 - DNA, 667 bp, Homo sapiens
cggaaatctgggcagatttgggatctagagcagggaggtctcagggttgaggcctgaagtctagcacggcacacagcagggctgagagcagaatccagggtcatgtctgattcccaggccggttaccgcctctctgaccccagatgtctcacctgtcgaatgggtacatttgggaacagcacccactctacgaagccaccatgaggacgaaagagaagggtcactgagcaggtttttttcagctctgagcagctctcctttttcagctcttgccgcatctcggactgtcccaatgacagccgtagcaagaagagataagaaacaagacaagttcatgttgtccagttttgaggtcttgaaagaagttgcaccagtatgagaatagtggatcagttttctctaggatccagaaagcatatcaggcagccttggggtgaggaaaggagcccggcctctccagcagccacacaggcctgcagtaggatggggttggggctggccatgtggatcacttgggcctcatgaggggaaaggaaataccagggggcagaggaggagcatgggggcagctggttgcctaaggagaaggcacctcagggaaggggactgtattcgtttgttttcacactgctataaagaaatacctgagattgggtaatttaaaaag

SEQ ID NO: 729514 - DNA, 719 bp, Homo sapiens
atgctcccttgcaaataattatgtctcccacccccagaggatttaaatgacttggggctcacgctgcttgtgataatagacaaaactccagcgttcccacaagattaataatgttcccttttcttcttttctatgcctttccatcgttacaggagatgttgctgagatgggtgcattaaagtttaggctttccagagtttatattgctaacaacttgaaaggaaaaaagctaactagagaactgactggtcttatttgttttagattctgggctttactaagacttcctactctcagaatctctggactataaacgctgggtggggtgggagctgggaatgttattctggaaaattaatcacaaatgaaaagaaaatcaactctaagactccagttagaagatttttgaaaatggcagaacatgactggccttcattcaagtcagaatatttaaagcaatccttgctaagaagaacttgattttgtataagcagtcccttaaatacagttgcttctcaagaaaaccacacacaattgatgtttgaatggctttatttacaaacatctcactccgtaagcctctgcaggtatttctagcctcccaggggccactgtcccgtttcacctgtaatttggatcacaattctgtttgttgtcacacacatcatatgaactgcttttcatgctgcttttatccacaaagctttacaagctttaat

SEQ ID NO: 729515 - DNA, 673 bp, Homo sapiens
tctgctccctggacacagtagttctcaaactggacagtgtcaatcagcatcctccgggaggtctggggtggccccggaaatacatgtgtcccacctatcccagcaggagatgttgctgagatgggtgcattaaagtttaggctttccagagtttatattgctaacaacttgaaaggaaaaaagctaactagagaactgactggtcttatttgttttagattctgggctttactaagacttcctactctcagaatctctggactataaacgctgggtggggtgggagctgggaatgttattctggaaaattaatcacaaatgaaaagaaaatcaactctaagactccagttagaagatttttgaaaatggcagaacatgactggccttcattcaagtcagaatatttaaagcaatccttgctaagaagaacttgattttgtataagcagtcccttaaatacagttgcttctcaagaaaaccacacacaattgatgtttgaatggctttatttacaaacatctcactccgtaagcctctgcaggtatttctagcctcccaggggccactgtcccgtttcacctgtaatttggatcacaattctgtttgttgtcacacacatcatatgaactgcttttcatgctgcttttatccacaaagctttacaagctttaat

SEQ ID NO: 729516 - DNA, 628 bp, Homo sapiens
tagggagccctctgatggaagagctctccgcttaagaaggtcaccactcccttacactcaggagatgttgctgagatgggtgcattaaagtttaggctttccagagtttatattgctaacaacttgaaaggaaaaaagctaactagagaactgactggtcttatttgttttagattctgggctttactaagacttcctactctcagaatctctggactataaacgctgggtggggtgggagctgggaatgttattctggaaaattaatcacaaatgaaaagaaaatcaactctaagactccagttagaagatttttgaaaatggcagaacatgactggccttcattcaagtcagaatatttaaagcaatccttgctaagaagaacttgattttgtataagcagtcccttaaatacagttgcttctcaagaaaaccacacacaattgatgtttgaatggctttatttacaaacatctcactccgtaagcctctgcaggtatttctagcctcccaggggccactgtcccgtttcacctgtaatttggatcacaattctgtttgttgtcacacacatcatatgaactgcttttcatgctgcttttatccacaaagctttacaagctttaat

SEQ ID NO: 729517 - DNA, 291 bp, Homo sapiens; identical to SEQ ID NO: 9175

SEQ ID NO: 729518 - DNA, 331 bp, Homo sapiens; identical to SEQ ID NO: 9174

SEQ ID NO: 729519 - DNA, 579 bp, Homo sapiens
cagcaggccaagttaaccaatcaggttccatatcttcattagtgttatatgatccatatgacctccccttcctttcacatgggctggtctgacaatatttattggcacatgaacaagcctcagcatcacagtgacttgctgttcctggagaattgtgaagtacgctttgcttatcttcaaatacttccttctcactactcaaagtgtctgtgttctcactttccgagtcattttcagtatcttgagacccctccgacatttcctcttcagactggactccaagacatttaaatcgccacattgagactatacgtaacatggacctggaaaagcttaaaaatatgaagaggattgaactggctgccatctgtgcatcttcatttatgaaaacactcctcatagacttaaaacaaatgacagagaacaaattagtcagcttcttctaaaatacagtggtctccccttaccctcagtttcactttctgcagtcaactgcagtccgaaaatactacatacaattagatattcggagagagagacaccacatttacataaatgttatttcagtatactgttaaa

SEQ ID NO: 729520 - DNA, 524 bp, Homo sapiens
ttattttaccaaggagcaaaactgagtaagtttcctgacgaaaataatgagtgtctactgttctagggcctttaacaacaacaacaacaaatttacattaacgcacattatgtgccaggaattgcaagatgcataagattagtttttaaaatgtgcctgctagagctgaacaggtaacgagagttcgaagccgggtccagagctatcttctgtaacattcttctgggtcgagtccctgccccgctacgagactatacgtaacatggacctggaaaagcttaaaaatatgaagaggattgaactggctgccatctgtgcatcttcatttatgaaaacactcctcatagacttaaaacaaatgacagagaacaaattagtcagcttcttctaaaatacagtggtctccccttaccctcagtttcactttctgcagtcaactgcagtccgaaaatactacatacaattagatattcggagagagagacaccacatttacataaatgttatttcagtatactgttaaa

SEQ ID NO: 729521 - DNA, 3420 bp, Homo sapiens
atcgggccgcctccagagccagagtaggctcagagactgcagcgcagctgcgtggtggaagaggatttatggacagaaaaaataaagtgacatacacaaaacagaagatcccaaagaagcaggccctgggacaaggatttggaattggcttggagttaattgaagggagcaacagtacagaagtagcaaatttagataggaaagtgagagggacaataaagggtgcattgacagttaagtcagtgcttgtgagtgctgaggttcgaaacattaattccccagaacttctggctgcctgccctgaacacaggcagaacaggctccaccggccagagaaagccctcagcaaagaattacaggtgctggaagttggaagtgttttaaataggcaccaaaatggcaatctcttcccatgttgtggaaaagacgtcaggccagtagcagacagtgctaggttcaggcttccaatattcttacaccaactttcccagtgaaaagaaaaaaaagaagccactttttcaaccactcaaatgaaattccagggaggattctgttgccttggtatccctacacctcttataccaacatggccagagagatggggttctctgatagctagagactggctcatctaactaccctgagttgaatttctcacaaggaagaactgttcagttagcagaaggaaagtgaaagaaagtgtaaagggaagccagaaattttatcttgcttagaagttaaagagtatgcacatgaaggtaaatatttgaaataggaattttgggctaatatggaaggacgtgtcttcattagagtttaatattagcaaacaaataacatacccaattgtttcagcagaaaatcactctgtacactgagtttggaggtcctcattcttgtaggttttgcatataatcacactctgtttatttcccctgaagttcatggaaacagaaatgtacatcatcattatgacacctgcaggatgcactcctaagagaagactacctgaaaggcgtgtacactggtctagcagttgagatcagctagtgttccatctatcttctgtcatgtcagggaagactctctgatcctctcataatttacctattgttgatttcctgaatctttttaaatcctttgcaactgaagatggtctctccatcagagaagcaattaaccaaatgcctgactacagcgtatatagcatctgttataaaagcatgaaaggttaacttaaatcctggcacacaaaggagatgtcagaccagaacaaatcagcatggaaatacctggaggagatacaaggttaaggtggagcatatgtacagtcaagaggatgttcatgactagtggaatgtgtttttcagattgcaaagactggaaggtgcaggtgacaaggagattaaacaaggtcacttgttttctttccttctctgaaataaagaagaagtggccgtatcacacaatttcgacccatgggatataaatggaagtcgactgtgatttttcccagtcattgctttctgttaatgagatctgttttatttctcttttcttttttcgtcctactaaaaatgcatgtgattgtcatagctgaaacagccttgttacttcgaagagaaaactagcaaacatagtagctaggccatgtgatactgctgaactagtcatgaaaatggactaaaacactctggcttagggtaataacctgcaagttactcattccaattgaaaaatgagataagcatgaattatataaagtcatgtctaccattaatatttgataagaccattaagcatttttgcatcatatcatgcttagatttctcttaccaaagtctttgatccatttttcaatcacttccattttcttactaactaaagacaccaaactagaatgtctcttagtgcagggagtttgctttctccataggggatatggccattgggaagtacatctgttcttgctgtttgaggtttctttgttagcttattcctcccgcacaaccagtatcaattgtcccctgtgcatatactcacttcatttctgccaaattttgccagatgttagttgcgttactgagacaagaagatggccaatatccaaagtcccagatcaggtatctcctgccaatgctcaccttaatttctaggggatacaggtatacagaaaatccccctatatagcaactcacagtgacaatttcagtgtcaagccagttttatcctagtatgctgttatatttgcatataataaaggtgcctagcataatatctttgctgtctccaaacccaggattataatatttaagtctttttagtttattttccaatttttttcacatctatgcatctaagtgaaaataaatgtgatgggattgatgtaaatagcaaatgccattacatctagaccatgaatttctaattaaaaaagtcagaatgccaagaagagaaagttgtgtagatctcattgttttgagaagactagtaaaggacacagccagacagagatgagctttcagggggaagccaggagaataaatttgctttaattgctcccctttcttccccagatctcttctaagatgtcttgatcgactgaccccaaagccagagggtaccaggtcaaaaagcaaggtactaagggggttgggggtaaatttggaatacctgatagaagacatctcttattacttccctttcaaaattcagtcaatgaaaactcacccatgtttatgtgcctgttattgcactaaaactggatatacttcagtaaatgaagctgactcatagtctagtccatgggtcacctggtgggcagtgtagcattataaaatgaaaaagtgaaatcaataagtgctagtactagagggcaagaacatatgcagaataaataaacagaaatcacaaatgaagtattattctgttttgtttgtattttcacaacagatggttgaatgaaaaactccaataaccacagaagactgatttaataatggaatactatcagtaaagctcatttagaatctgtaattagatttcatccttgattatatgtgcaaatacctcctaagaaaataaccgtttaatagcttaattttggtttagaagccatttccagactttgaatctaatgttctaaatggtttctaaatttttgtgtagtatgatattctatgaaaacaatatgcattattaagttaaaacttattatttcttacattatttctaagaaaacaaacaatactgacattagagagaagcaaagtttctatagaaaacctattacactgtggtataaatcaagatgaacctgcagacatctattttaggtatgtattaaagttaatgtaataagactggcaccccaaatgctactattaaaagttttatatcaatgacaatgctattactact

SEQ ID NO: 729522 - DNA, 940 bp, Homo sapiens
agattagactcctcagaagctaattgactagggaaggatcaggaagacaagacacatcaaaaaggggagggaatctacaatggaaggacacaagaaagatcagctggattaagtagtcatgattatgcaaagccatatccagagaccaaggtgtaaagcaggtcggagaaaatggaaatctcaagattggctcagtcaaaaagaaacattatcagtttgaacatggaccttgaaagggatacgcagagaatagatgaagcaaatcagaaacttcttctcaaaatccaagagagggaagataagattcagaggctggaaagtgagatcattcagacgcggggcctggtggaagatgaagagtgggagaaggagaaccgcaccacgatggaaagggaaagagccttgcaggagctggaggaagaaacagccagacttgaaaggaagaataagacgttggtccacagtataacagaacttcaacaaaagcttacaaggaaatcacaaaagataaccaattgtgaacaaagcagtccagatggagccctagaagagacaaaggttaagttacaacagctggaagcttcctatgcatgccaagagaaggagctgctcaaggtaatgaaggagtatgcatttgtgacccagctctgtgaagatcaagccctctacataaagaagtaccaggaaacgttgaagaaaatagaagaagaactagaggctctgttccttgagagagaagtatcaaaactcgtgagcatgaaccctgtggaaaaagagcataccagccaaaataatgagggtactcctacccaaaagacagcaagattattcagtaaaaaatgggcctcctccttttagtggcaagatggctgccaacaatccagatctcgtactaccagattggcaacctttgcagaataaaagtcttttccaacaggtt

SEQ ID NO: 729523 - DNA, 503 bp, Homo sapiens
  misc_feature (36)..(36): n is a, c, g, or t
ggtcgacgtggtttgaaaagtagagggcttgttaangcacgggatgctgattcagtaggccttgagtggggataatttacatatccaacaggccaggtgatgccctggcttggggatcacattttgtgactgatgcagagtactgatggtcatccagtccccttccttcggtgtttgagaccacttcatctggaccgagctaaagtctaggaagaaataaagtttcaaacccagtagagttacctcaaagatacacttgagacccttttcagaagatggcaccgaaagtgaagaaggaagctcctggcccgcctaaagctgaagccaaagcaaaggctttaaaggccaagaaggtagtgttgaaaggtgtccacggccacaaaaaaaagaagatccgcatgtcacccaccttccagcggcccaagacactgagactctggatgccgcccagatatcctcggaagaccacccccaggagaaacaagcttgaccactatgctatc

SEQ ID NO: 729524 - DNA, 843 bp, Homo sapiens
aatcacttgaacccaggaggtggaggttgcagtgagccgagatcatgccactacacttcagcctggccaatagagtgagactctgtctcaaaaacaaacaaacaaacagaaaaaaaacaaaaaacaaagaaccagtttgggttttggcagaaatcacatcaggaatattacacgaccccagtaggtaaccctgagtgctcaggtctgagctgaggtctcagtcttttatggcttcatgaaaggactgtgccctcagggaggggaccatggcttggcttgtggggtcttggtgatgactgccatctttcttcatcaccacacccagcttcttgctggcatttgcgaggagacagcagcagataagaggttcaccctttatctcccagtgagcaagatgcttccctgttcagagaggaagtaacactgcttatgcttgactgctgtttttttttttttgtcttttgtttgcttttcttttgattggaattctgtatttaagatgttaagttgtgtcagcttacatatggaacattccaggagaggtgactggccccccaccctgcttggcagtggatttctgcatcaccagcttcagaagtgtccctgttcgctagtctgttgtttgcttgctttgtaaatactttggtcccaagctgagacaattgctgtgtaaaacgggaagagtcaatcttgaagggtattatttttcagaagaatttgccgtgtgccttcaccgaaggcagtcaagtctgcagttggatttttctcactagggaatgacaggaaacggggataattttgcactgtggatatattacaggagttgtctatacgattatagta

SEQ ID NO: 729525 - DNA, 699 bp, Homo sapiens
ctctaaacaggatccaaataacattgttgcctcctaaccagcaggtgggagctcaagagaaagactagacttgttccacattaaataagtaatagtattttttgccttgaacatcttgatcataatatcaattaaatgtgtggccctgattcaatagctaccatttattgagcatctattttgtgccagacttgctgctggtatttgatagtgcagtgcctgacaagtagacacactggcttaaatgtcattgttactggtattattgttacaatgatgttttaatcctcccaatgtaattaagcctttatcataaagatcataagatgttcactttacttatttccttgtccttttcttcctccgtgcatgcttgcttgcacgagggaagtcactagtaattgattaacttcctaccctaacccccagggctgcctgcaagattgatgaactgtttttctttcaaagaacaatgatccttaggtcatgcagacctccttgatagcatctaggagtttgtttgggccgaggaactcaaacagttttgagtattgggggaatccatctcctgcatacctgctttgctcataaaagcccccagttatgttaaaaggcagattggatttgagaggctgcttctcctgccttcttgctttagccgagtcaaataaaccttcctctgcttctaagtgctgatgt

SEQ ID NO: 729526 - DNA, 531 bp, Homo sapiens
gcctgtcttttctgtgggatacacaggacagtgccatgattctagtagatggtagatgtgagccagcccgaaggaacatcaaggagagttccaggaatgaaccgtgaaatccctaaggatccaaaaggatatgcagaaagaagagcagcacgtcatacccaagaccaacatctctcagtgtttcacgctaacccaaggagagacactagcagtcttctctgcaggaccccttgaatttacattgaattccatccccagccgagcaggtgcttaaagtcaacaggggacactccattttcttggaatttcattctggcaaagagggtgtgagcagcaataaggtgggtcttcctgaagaaccaaccaaactcaggagctaccaggctgcttgtttctgtgaaaatgttgtgagtgttggatgtctgcatgtgtgtgtgccattgtgtgcttaggggtgtgtgtgtgtgtgtgtgtgagtgtgtgtgtgtttgcctttaactggagtctgcttaaaggactgtggataatgca

SEQ ID NO: 729527 - DNA, 516 bp, Homo sapiens; identical to SEQ ID NO: 17692
  misc_feature (510)..(510): n is a, c, g, or t

SEQ ID NO: 729528 - DNA, 1228 bp, Homo sapiens
actggcagttgggagcctgatggaggacaagtagggcctcgaggacaggtgcgtgacagaagcacaggaaaaaaaagaaaaatgaagaaataaaaacacgagttcatcagtaaagaggtaccctggcagcataaatattatgataagctaaaagctggaatcatctggaaaaataaataagactcctcatgtccttttcggtccataaccagaagggcagcaaaaggcctttgccactggaacctcttctttttctccaagtcccacgtagcaattacctgcactttcaagaagagaaacaacgactacacctaaagaaattccttcttgataggatgtttctagtggccaagatacaagcaaatgtagaaagaaaagatgttgctgactactatgaacaaatgtttcagtcagttttgaaacatcacctaggagaagcagtgacaggattgctgctcatctatcccacttccattctgcatatcctcgagtcctccagcgacactctctacaaagttcttttagattatattggccatgtcaaagatgaaacagtattttttattcaacaaatgaaaattatagtcatttctcataacattccaatgaggctttttatgcaatggcatgtttcagtgataaaagttccagttatgtatctcgacgatgtgacacagtcacagtccctaaaggaggtcatcacagattttctcacacaaactcataaactgtcactctacctttgccagactatgaaagtaggcactaaaggaccaggcgataacttacaccaagttgcacctgacctactcctcccagaacaaatcataaagtacttgtgcaaatccgaagaattcatggacccggcaacatttataaacatgtataatagacccatacacatcactctggattctgaggtggtatggcctgctccttcacgtttctaggattgagagggataatgtgcccatgtctcttaaggagtttgtgctacttaaataaaaaaaacatttttaaagttactggtgtcttttaaaagaaacagaacattgcaatatacacagaggtaatatattaatctttatagagtatgttgagctaaactttaaaatgtatctatttgttgtggtattaagttcaatacattattttactaggtagatgggtttaataagtttatcataagctctcaaatattaacatcattttcatgaattgacacttt

SEQ ID NO: 729529 - DNA, 1025 bp, Homo sapiens
actggcagttgggagcctgatggaggacaagtagggcctcgaggacaggtgcgtgacagaagcacaggaaaaaaaagaaaaatgaagaaataaaaacacgagttcatcagtaaagaggtaccctggcagcataaatattatgataagctaaaagctggaatcatctggaaaaataaataagactcctcatgtccttttcggtccataaccagaagggcagcaaaaggcctttgccactggaacctcttctttttctccaagtcccacgtagcaattacctgcactttcaagaagagaaacaacgactacacctaaagaaattccttcttgataggatgtttctagtggccaagatacaagcaaatgtagaaagaaaagatgttgctgactactatgaacaaatgtttcagtcagttttgaaacatcacctaggagaagcagtgacaggattgctgctcatctatcccacttccattctgcatatcctcgagtcctccagcgacactctctacaaagttcttttagattatattggccatgtcaaagatgaaacagtattttttattcaacaaatgaaaattatagtcatttctcataacattccaatgaggctttttatgcaatggcatgtttcagtgataaaagttccagttatgtatctcgacgatgtgacacagtcacagtccctaaaggaggtcatcacagattttctcacacaaactcataaactgtcactctacctttgccagactatgaaagtaggcactaaaggaccaggcgataacttacaccaagttgcacctgacctactcctcccagaacaaatcataaagtacttgtgcaaatccgaagaattcatggacccggcaacatttataaacatgtataatagacccatacacatcactctggattctgaggtggtatggcctgctccttcacgtttctaggattgagagggataatgtgcccatgtctcttaaggagtttgtgctacttaaataaaaaaaacatttttaaagtta

SEQ ID NO: 729530 - DNA, 457 bp, Homo sapiens
gcggagagggggcgcgctgacgtctcgccggcttaacctgttgctctcgagactgcgtcggagcccgcaggcagggccgcgggaagccggccgggccgccgccgccatgctcggccgtgtgcgcgccgccgccagccacgggcttgcagccggacgcccggactcggagacacgatccgctgaacgcccgcaataagaaagaaaacccaccccacgctgctctccacctcaacgaggtccggaatgggaggcggggtgcggttctcgtccaagttctaccccatttgctttgtggctgcatccgaaacggacgtgccccgggaaggcgtccacgctccaagacaaggttgcctcagtgcagtttctacagcccgagtttaaactagtcctttgcattctacccagccctctgcaatgcggatgtattttaattcttaaattctttatggaacaaatt

SEQ ID NO: 729531 - DNA, 1349 bp, Homo sapiens
agcggctcttccgcggccgcggtgggaatggaaacatctgccccacgtgcaggaagccgggtggtggccacgacagcgcgccactccgcagcgtaacctcgcagatcccctgcgtgtgtcctcgcaagactagctcaccgaaatggccgcgtccagtcaaggaaactttgagggagatattgagtcagtggaccttgcagaatttgctaagcagcagccgtggtggcgtaagctgtttgggccagaatctggactctcagccgaaaagtatagcgtggcaacccacctgttcattggaggtgtcactggatggtgcacgggttttatattccagaaggttggaaagttggctgcaacagctgtgggaggtggattttttctccttcagcttgcaaaccattctgggtacatcaaagttgattggcaacgagtggagaaggacatgaagaaagccaaagagcagctgaagatccctaagagcactcagatacctaaccaggtcaggagcaaagctgaggaggtggtgtcatttgtgaagaaaaatgttctagtgactgggggatttttcggaggctttctgcttggcatggcatcctaaagaagatacctcattttcattgttcctggttttttccagccagcagctctacactccatcacaggacattgagtccctcctcctcttctcccatgccttcctccctgctgtggcaaatccgagtggcttctataagcatccgttggtacaagttaatgtggcaccatgagcctgactggcttctataagcatctgttggcacaagttaatgtggcaccatgagcttgatggcggcagaagagacaatagtccttagctcttcttccagtacgccccctacttagtcagtctgtaggtcatcaagaaggtccctctacccctatgcaagacacttacaagaacacattgcaagatagctgaccgtggaggatgagtggatcctgaaatgttgtcccgaactgttgatttggaaaagaaataagcacatagataaccttattgtgtgctgcatggaaaggaactgaatacaattgcctttaagcattaaaaaaaaaaggatgaaaaattggggtgtcacatttgcaaaatggatggacaaatgtggtcagggcagatcaaggatcatttcactgattacaagccaggtgcacgccctgtcccaggcatttagaagaacaggggccagacttacatgtggtcacagttttggaagagaagatctaattggctgaacttatgtcatatgctgcttgctggaggttgtgggaacttccatttatacccttttgattagaagtacaggtgacaacct

SEQ ID NO: 729532 - DNA, 468 bp, Homo sapiens; identical to SEQ ID NO: 286164

SEQ ID NO: 729533 - DNA, 338 bp, Homo sapiens
ctcgtgtaggacgcccaacatctggacgcacacagcatgactactagtgctgagcagccacccacaatgaattacctcacaggattgctggtcaaagacactcggagagactccaggcatgtgacaagtctctcatctgcagaccccattttcagctcatgaatgaattcctgagattcaccatccaacggcaggaaatgaattgtgtaagttcaaaagaagatcaggtgaagtggtacgaaattcggtgtttttcatgttttttgtttttattaatttactataatgttattcaaaacaacattcccaataaagcaaaacaaattagcactgtaaaa

SEQ ID NO: 729534 - DNA, 509 bp, Homo sapiens
gagggcatatgcacaaagacattaaatgtaaaagaaatggcctgtgctgagcaacagagaaagctgtatcagagataaaaccaaacagtaagcttcctatgacacagctccagtggaagaagagaaagcaccacctcattactgcaaggtggaaacagaagtccaagagagattctttgttaccacttgacatggatgggaatctaggcactccctgatggagagaagaaggactgcctcattatgctcaccatgtaacctacaatagcaccatggaagggggatgtggacgtctgttatcactgggtggttgtgaaagccctgactctattggcttctttggacataatgccagtggggagggggaagaatgcctcattaatgccatctgtgggtagaaatccaggctacccactttgctttttgatagtgtggtgggggatggggccacatatttttttctgcgatatttagcagaaatacaaagcagttattgccaacaaaaactg

SEQ ID NO: 729535 - DNA, 1766 bp, Homo sapiens; identical to SEQ ID NO: 465413

SEQ ID NO: 729536 - DNA, 1253 bp, Homo sapiens; identical to SEQ ID NO: 465415

SEQ ID NO: 729537 - DNA, 1703 bp, Homo sapiens; identical to SEQ ID NO: 465414

SEQ ID NO: 729538 - DNA, 587 bp, Homo sapiens
gttatcaccgcaataataaaaatcgaaatgcggagaatgcatcctatatccacgttcaaagagatgctgtcaggactgtcgcgttgaatgcaccttcccgcagcaggcccacgcatgggtcctacaataaagtccatgctaacagggaacccaaacccaacctcagtccagacaaatatacgtcaacatcatataatgattcagcctggcgaaaacgaattcctttttcaaaaacatattcaaaaagtgaaaagatatatccagagccaagaagaaatgggagcaagtaaacctggaggttgagagagagaaaaatgagaaaaaattgccagacatcatctgatttacaatcaaaaatgaaaattcaaagaatgagatactcaagtactccatgttatgtagtggatagccaaagatgataaaaatgcaaattctgaaaataagatgcaggaagtacattgtgctctttcaaaactgataaaaatgcaaattaccaacagctgccagtgtatttatgtaggtctggaattcattccgtgcattactccaaacattttaataaaatttaaaagtttgacaattaaaaa

SEQ ID NO: 729539 - DNA, 859 bp, Homo sapiens; identical to SEQ ID NO: 18003

SEQ ID NO: 729540 - DNA, 1700 bp, Homo sapiens
aggcacatgctgccaggggggaactgaactcagggaatggggcccccagctcccattggggtcggcgaacctggtgccaccccttagacaaagtcccagtctcccagaggcttttaccagctggccccattccttctgctgctgggtataataaggtcctctcaacgctgaagtgcctgtgaaacacagcccagaggagttctcattggtcctatgggctttgtcttcctctctgccccacccagataatcgctgctgcccctccactcccaagatgcagctgtgattctccatccccacacatccctcatcaatggttgactgcaaagaagtgagaagccaagcttagattcatgctcatgcctgaacaccctgagagcctggtgctggagggctgggtatccccttggcctgccaccagcacctgcacccacaccaggctggagccacgctctgcgcacagaaggtggccttgatttctcaggcacagctgacctcagagatactggtcctgactctgccaggtctcttatccctagtcttgttgccccagttccttctggattcaaggcgatgttgcctcaaaacaaggaccaggtgctgccacagacctcagtgctccctgggcgccccacttggggcttctcacaacttgtggactcctctcctcacaacctacagcctctctctccccatcagggcctccctccctctcaaccaccgttctcttccactcagctccactctaacaggcagacatggcgctggcatcagtacagggacactgggtccgggtcccctggagtggtggagagatgcgtgccaagcgagaaggatcctgcacagttcagggacccaggggccctggcccaggccctggtggtccagctggggcaccgccgcatcgcacacgacctgcggctactgcttttgcagcacctgtggctaggcagaaccggccaggccccagtcgtggagtatcctatatgcctggtgtgcctccggccccgcagcccctcctgccccctccccaggtacaggactggaccccggctgcttgctttccctcaactactgccctgtgtgcagggccaggaatctgggccactccggataggcatcggcttcggcctccgcctgcctcagggccaggccagggccttgcatctgctgcccgagaaaaggccgaaggaagcagggcctcagggcaaggctactcaggcctaccaggagcttcaggtctgcaggccttcaatcaccaaactccccacgatgtttctccgggcctccacctcgggcaccaaaacaggtcactacctccctgaagcccaggccttgccctggcccaaagaggccagtttctctggagctcattctccaaaagtcatcagtctagttccagagccacggaggccccctggaacaccccctccaaacccaaccctcccaaccaggccccagatctcggggagtccccgagacaccctgaagggctggctggccggaggagtgcacaaaggtcctcatcagatcagaaacccgagggagaatggagtgtcaggcgcagaagatacctgcccgggagccaaactgccccctctgaggccagcaaagcagctggccacccaccaagccaccagcccaggagtgtgaagccttgagaaagggaatggcagacaccacccctgccaaaagtgggc

SEQ ID NO: 729541 - DNA, 781 bp, Homo sapiens
ttcgcgcagtttggggtgggccagatgggccggaggtgtagccaggaacggacagatgtccgtctcttaagtcttaggttttaatcgtgaagctgatccctggttcattgtgatccttctcacgctgtccatttgacataagaaacccgagaaaggaatgtacttgtctgaagtcccacagtctgttagtggcacagtcaggactagagaatttagctcctgaagccgagatcaatgctctttctgccacatcagcctgagaactttgagttttgcagtgttttggggaagatgctcccgtgaaacaatgaacaggaaaaacctgaagaagcctcacattttctgctagcgagaaaagccaaaatgtcttccacagattatctatttgcaatgaataaaaaaggatttaattttagtgatggagattaactgcccgtgaatcaccaccttacacaaaactgaaacctttgacaatacaaagggtaacttccttagtgtttctatacctttgcttactatcaccgaggctagttggcttttcacagccatttcttcatctcttcatgatccttgcgacccagctactctacccaatggagacacagggctactctcacaaaccacttgataacgtctagcacaccagccttaaaacctaagcatcaaactgtgtcctagcaaaattacaaattgttacatgtcgtggagtttgggaattggtcctgaatagctggaaccacaaatgttaaatctgtgattgcttcaagccttctgcataact

SEQ ID NO: 729542 - DNA, 858 bp, Homo sapiens; identical to SEQ ID NO: 18247

SEQ ID NO: 729543 - DNA, 984 bp, Homo sapiens; identical to SEQ ID NO: 18248

SEQ ID NO: 729544 - DNA, 655 bp, Homo sapiens
atcaccatgtacagcttcatgggtggtggcctgttctgtgcctgggtggggaccatcctcctggtggtggccatggcaacagaccactggatgcagtaccggctgtcagggtccttcgcccaccagggcctgtggcggtactgcctgggcaacaagtgctacctgcagacagacagcatcgcatactggaatgccacccgggccttcatgatcctgtctgccctatgcgccatctccggcatcatcatgggcatcatggccttcgtgggtggcagtgctcatgacgttcttcgcagggattttctacatgtgcgcctaccgggtgcatgaatgccggcgcctgtctacaccccgctgagcccaaatgtgtcccccaacttcatctggaagttaaagtgaggccactgaagaggaggaggagggtctagaggcctgaaatcctggttcctaggggaatgagggggctcagttctggactgtgggtttgtggggggaggctgactcctggtcctaggctggaaggaggaagaatagggcccatgggagggagctgagaagactcaagtccccgtctgcctggcaggttgttagaaaaatggactatccattagagcaactttctggggcctaataaaactgatgtgaaactactaaa

SEQ ID NO: 729545 - DNA, 575 bp, Homo sapiens
aaggagaatttcctaagaaatgcacatgtgcaacaagtatagatttaacagctatataaccttccttgggtagcagtaattagcaaggcaaccatcacctaaaatttgtagtcaacacaagctgaagcatgctcattaatcaatagtaagggagagtcccacaaacctgggatgggaactatgtggagaaaggcagaaatggaaaaaactagacaaaagaagcccagaccgaggtgttgataacaaaacactgcctactgatctgcatgagacactccatctcagagtctacttcctgaagaactcaacaagtaacaactcgtactaggaacaattcaaagcagcaggagattcataggaatttggaaaatatgcttatttaccatcaagctagcaataggatcctaatatttaatttgatgggtacagatagactctggtacaaaatggtagtctagttgttaaaagttccactagtgtgtattggaatggtgcatagtagtggaaaagaatgcactggctggtgcgttatgtcaatggtttgataaccatgaaaaaaacagttaattataaaa

SEQ ID NO: 729546 - DNA, 689 bp, Homo sapiens
ccagcataggggagctagaagccactttccagccacctgccgttgggttttttcatatctgtacataatgccgagtgcaacgtttttgcacactcattgactatcaactggttgtctatgactcaaattacataatgaatccagcacataaattatttactcagatttaatgccagcaactgttatctttgtatttttttcccctctgccagctaatctggctcatttcattggaattttggtcatgcccattctccttcggcactaaattaactccataacgtagtataaacagaacaagcttgtgtgtgatatgcttaactgttaatttacctaattaaactaattcaattaaatcatttacatctttttggtaacatgccagttgataccacagcagaagtggaatgtttcagaagatgattgttcagcaaatgaatggaaaaaaaataaaaggaaaacaaaatgagacaaccgtccaaatctcttggcttgaaaattaaatgatactgaaaaaatgcagctttcacggggcactgtgattagatatttttctgaaatcaattttctctacaaattggtattttaacagagtgatcacaatctattgtacaaaatattttaaacactatttgtacattcacatatttggtatgtttaagtaaagtgtgcttgttcccacaaaaagg

SEQ ID NO: 729547 - DNA, 441 bp, Homo sapiens
acacataaaattaaccatcacaagttcaccccttctcagttgggctcccatacacatcttcaaccatactgaatctccaaatactgacaataacatggccatagttccacctaacatgatgctgctatcctgcatacaccaaaaatgctctgtttctttccccagaagaggatgcaaagtctttgggtgacatttacttttcttgatatcctgtaccttaaatatatgatgtaaagctaacaatacctaaatactataagtcaatatatcttatgttatatgataaagggatgagagggaagaaagcaaagatatttgagatagaaacacacacacacacacacatttcatgtagcttcaggtttctctgataaacattctgaaattgctccttgaattttcagtacctaattaaaggtatggtagtttctctttacaaaa

SEQ ID NO: 729548 - DNA, 519 bp, Homo sapiens
tggctgctatgaccgcacacccaggatattacatacatcaggtatcaggacctcccctgtcagatgattcaggggctgatttgcctcaaatggaacaccagcactgagaaccattttggttctgaactggatgatgctcttgcacttgagatgacatcttcttgcagcaagagtgctgatatcccaagaggagagattcatggttttgatcatttccttctgaactgcctgcattttctgaggaaggccttctagaagaaggaaagacaaagacttccaaatgtttcaaaggaagattgaacaaatggccctccccaactgttatcccattacctttcacgtccaccgatgctatttcaagacatatccagtggaataacagtgatatggttcttgttacatgaatgtgtatttactgttaggagattgtatattttaagttaccatgattaaaagtgtgtaaaaaagggggacagagagaaatactataaaaggccatgttactcatgcattgaactt

SEQ ID NO: 729549 - DNA, 513 bp, Homo sapiens; identical to SEQ ID NO: 15556

SEQ ID NO: 729550 - DNA, 386 bp, Homo sapiens
gtctacaactaatggatctcctccttagttcctgttggatatcttgggatggggtcatgagggtagaagcgtcaccacgaggactgcttttactctcagggtcacctgcctagtaaattgtccagcagggaggagaataaatttcttttattcccatccatatgactatgtcatctacagcacagcttcagttggggaagatattagcagacatcatcactgaacccagaagagagggtggtgcccatgagtggagatgccagggtctatggctgaaactgggaacttggaaatcaagtgagacccaagcaaggaaaccaactgccaaagcaaggaaaccagcttggtttggcaaacagctgatgaaataaatgtgacgtagaaga

SEQ ID NO: 729551 - DNA, 506 bp, Homo sapiens
tgtgggaccaggtgctgacagtttttaaggatatacaaaaggagctgcaggaagatgctcggattcgagggatgagcaactgctccatgacacccatgacatcagcacccaggactggaagcataaggcctccagattccttgatgaccccaaagttgagaagattgcagttcagctctggagagcagccatcaggaggccgtatccacaacctgaagacacagctcttcagtcaatcagcttactaccctggaccctaactctacaatcaaggaagaaggacatctctgcttccgccagcacagcttcagttggggaagatattagcagacatcatcactgaacccagaagagagggtggtgcccatgagtggagatgccagggtctatggctgaaactgggaacttggaaatcaagtgagacccaagcaaggaaaccaactgccaaagcaaggaaaccagcttggtttggcaaacagctgatgaaataaatgtgacgtagaaga

SEQ ID NO: 729552 - DNA, 550 bp, Homo sapiens
tgtgggaccaggtgctgacagtttttaaggatatacaaaaggagctgcaggaagatgctcggattcgagggatgagcaactgctccatgacacccatgacatcagcacccaggactggaagcataaggcctccagattccttgatgaccccaaagttgagaagattgcagttcagctctggagagcagccatcaggaggccgtatccacaacctgaagacacagctcttcagtcaatcagcttactaccctggaccctaactctacaatcaaggaagaaggacatctctgcttccgccaggctcatctgacacctaacccacctggagaagaagactgtctcagcacagcttcagttggggaagatattagcagacatcatcactgaacccagaagagagggtggtgcccatgagtggagatgccagggtctatggctgaaactgggaacttggaaatcaagtgagacccaagcaaggaaaccaactgccaaagcaaggaaaccagcttggtttggcaaacagctgatgaaataaatgtgacgtagaaga

SEQ ID NO: 729553 - DNA, 383 bp, Homo sapiens
ggataccagctctggtcaccatggaccccactggatgagagtttccaatggctgcggcacacgacacctacaccttcctccaagcacccattcaaggcctccccctgcttcccacacacaccgtccgaccttgaagtgcagctgtgctttcaagaggtcactctagtcctagacagcccattcctggaatctggaagatggagtttcaccacattgcccaagctggtcttgaactcctggactcaagcaatgccttgcctcggcctcccaaagtgttgggattacagcggtgacccacaatatctggcctttgtagcgttcttgtaactaggttaggtataactcagaaaatggaaataaacattacatatacaaagttaaca

SEQ ID NO: 729554 - DNA, 835 bp, Homo sapiens
ggataccagctctggtcaccatggaccccactggatgagagtttccaatggctgcggcacacgacacctacaccttcctccaagcacccattcaaggcctccccctgcttcccacacacaccgtccgaccttgaagtgcagctgtgctttcaagaggtcactctagtcctagacagcccattcctggaatctggagtgagtcccaagttaccctgccacacatcagagttgcgcacgatgaacaacaaaggactggtcaggaagccccagcccatccgcctcagtggagtagattctgtctttggcagggttatcacagctcagccaccaaagtggaccgggactttcagagtttcagacaagtcagccttttgcaaaatcattagcagggagcaccagtggcccattggactgaaggagcctcagattcagatgacagtcactatgtgcaaacagatgctgcgctctatcctcttgctgtatgcaacttacaaaaagtgcacctttgccttgcagcactccaagtaaagggtcctcatttgatccccatttactcacaccatgccctttggtatgtacctaaagcttacagaaacctgtccatgtaaatgaaactgtgacattgtcccagccatcttgcttttgtttcaagcagtgatgattcaggagcccctttcatcccttcccctccaaaaaaggaccaatgatagagaacaaggaagaacattcccattgtaaggttgaaccatttagagtcaaactagcattgacatgtccatgtgataaccgttaaacaaatgatataaaccaatgagcctagtgtgaactcacataa

SEQ ID NO: 729555 - DNA, 472 bp, Homo sapiens
cagccagcctccagcgctgctaggctactccgagcaggggagaaaagacgccggtccgccggggaccaggagggagacgtgaaaccagaggcccgggggccccctctccgcctgtgcgacttgtagtctcgtaccagacgcgtccgcttcactgctgaatctgaaaacgtgggctcttgagagctgcccttggaaggagctgtgctttctgcctcatctttaacttttcgtttattcagcaaatatgtatcaagttccgacttcgtggaagagattgtgttagacactgggagtaatagaaacataattaagaagcaggggtcccggacctgaagggcctgagcgtcgggtaaggaggcaacgcttacaccgaacctgtgctgagataaataacgaacagttctggctcttagagttggcctgggggaacaaaaattcaaaaagaataaaaccccaaacaaacaggagaaaa

SEQ ID NO: 729556 - DNA, 778 bp, Homo sapiens
cagccagcctccagcgctgctaggctactccgagcaggggagaaaagacgccggtccgccggggaccaggagggagacgtgaaaccagaggcccgggggccccctctccgcctgtgcgacttgtagtctcgtaccagacgcgtccgcttcactgctgaatctgaaaacgtgggctcttgagagctgcccttggaaggagctgtgctttctgcctcatctttaacttttcgtttattcagcaaatatgtatcaagttccgacttcgtggaagagattgtgttagacactgggagtaatagaaacataattaagaagcaggggtcccggacctgaagggcctgagcgtcgggtaaggaggcaacgcttacaccgaacctgtgctgagataaataacgaacagttctggctcttagagttggccaaaaaaaaaaaaaaaaaaaaaaaaaaaaaaattggggggggggttggagctgagaaaaagggttttaaaacacaattgcgggggggcgcgcgggggcccaaggtgtggaacacgggacacacggggcgcaaaagggggtcccaagggaaacccggggccaaggcaacaagggaggggaggttcttacacacaattaaaaaagggcgggggggggaacaacggaggggtttttggagaaaaattccagaagggggaggttataaggagaggagaataaaagggggagtttattcacagggggggtaaaaggaagagatctcaaaatattcaaatttaagccaggagtggggggtgatg

SEQ ID NO: 729557 - DNA, 312 bp, Homo sapiens
  misc_feature (3)..(3): n is a, c, g, or t
  misc_feature (5)..(5): n is a, c, g, or t
ggngngtgtgtgtgtgtgtgtgtgtggggaagggtgtgggtgctgggatgggggtgaatttcaagttgaaacacgatgatgtggtctgcttgctctctgcttagacaggctttaagaccaattggattttcatggaggccaggacagagagtggtaattgatggcttgtgtacagacaagcatttatccaggttgcgttatccaaactgatttgttaaagctccaggtcacgttcttacactaagaaaatcattcagtaaacatgagacaagtttaggaaaaactaataaaataaacctgtcttaaacttga

SEQ ID NO: 729558 - DNA, 808 bp, Homo sapiens
aaatcaatgagcgttggccaggcacggtggctcacacctgtaatcccagctgtttgggaggctgaggcaggtggatcacctgaggtcaggagttcaagaccagcctggccaacatggagaaaccccatctctactaaaaatacaaaaattagcagggcatggtggtgcatgcctgtatcccagctacttgggaggctgaagcatgagaatcacttgaatcctggaggcagaggttgcagtgagctgagatcatgtcactgtactccagcctgggcaacagagtgagactgtctcaaaaagaagaagaagaaaaaaaatgcagtgagtttatgttgttacattgtaacatctcagcgtagctgtatgcattactctatagcatacctacttaagttttatgtcattcttgaactgtgatttttttttctatttgctttcatagtttggtgggccattgttatggactgaatgtttgtgtcccatcctcacccctaaattcccatgttgaagccccaaccttcactgtggagctggggctgctaaggaagtaattaaggttacacgaagtcacagtggagaatctgatctgctaagactggtgtccttatagggagagaccccagagagcttgttcccttcctccctgtgcacacaaacaagagggcatgggagcacacagagagatggcagccacctacaagccaagaggagaagcctcacaatgaacccccccccccaccctgctggcacctatgtcttcgacttccagcccccagactgtgagaaataaatttctgttggttcagcc

SEQ ID NO: 729559 - DNA, 1077 bp, Homo sapiens; identical to SEQ ID NO: 122701
  misc_feature (3)..(3): n is a, c, g, or t
  misc_feature (7)..(9): n is a, c, g, or t

SEQ ID NO: 729560 - DNA, 283 bp, Homo sapiens
cccgctgccccggggcaagcggagggccatggaggcgcagatgcagtcggaggcgctgtcacttctcagcaacctggccgacctggccaacgccgtgcactggctgccccggggcgtgctgtgggccggccgcttcccgccgtggctagtgggcctcatgggcaccatctcctgcctgccagctggcgtcttgtatccaaatcaagatgaggaagagggggcctgtcgtgccttgagaaagctggaacgggaatcaattaaacattgtggtgctggcacctgg

SEQ ID NO: 729561 - DNA, 444 bp, Homo sapiens
gatgagcaggtgagaccaggtaattaccgaagaaagagagtgatgtgttcattgaagtctactcatggaggaaagaagctgtcccttagcgaagaataaaactgtggactgacccccacccatttgcgaagaaagtactgggtcttcagctttcattgttcagccggtggtctttgtggacaacaccaggggcccctcctgctgaagactgtctggacttcctgattttcactcctgtataaaccccctcccccattactacctttgtctccttggggaaaaaaaatgtttttcacttaagcaaaataataactacccagtatttgtttctggagtgaaattgtaaacttcattgtacattcttcctggctttgatgcttatcgtgaagagttcagtgaaaataaattgtttttatgaaagcagagaaaccatttgataaacac

SEQ ID NO: 729562 - DNA, 482 bp, Homo sapiens
aaccagagttcgtaattctaatgacctctccagatttatggctgcagcattcccaagaaggggtagggaggggcatataatgagctaccctcaggggatcagaaagaaaagggaagctgtcccttagcgaagaataaaactgtggactgacccccacccatttgcgaagaaagtactgggtcttcagctttcattgttcagccggtggtctttgtggacaacaccaggggcccctcctgctgaagactgtctggacttcctgattttcactcctgtataaaccccctcccccattactacctttgtctccttggggaaaaaaaatgtttttcacttaagcaaaataataactacccagtatttgtttctggagtgaaattgtaaacttcattgtacattcttcctggctttgatgcttatcgtgaagagttcagtgaaaataaattgtttttatgaaagcagagaaaccatttgataaacac

SEQ ID NO: 729563 - DNA, 443 bp, Homo sapiens
aatcccaggccagagatcttggatgcaggctatttcaacatgggaaactgaaatcgggcatatccctgcggaagaagctgtcccttagcgaagaataaaactgtggactgacccccacccatttgcgaagaaagtactgggtcttcagctttcattgttcagccggtggtctttgtggacaacaccaggggcccctcctgctgaagactgtctggacttcctgattttcactcctgtataaaccccctcccccattactacctttgtctccttggggaaaaaaaatgtttttcacttaagcaaaataataactacccagtatttgtttctggagtgaaattgtaaacttcattgtacattcttcctggctttgatgcttatcgtgaagagttcagtgaaaataaattgtttttatgaaagcagagaaaccatttgataaacac

SEQ ID NO: 729564 - DNA, 677 bp, Homo sapiens
gacacactctcctgccttatggaagactttgcatcagcatgacgagaagtggtggctgatgactccaaggcaccctaggctgtgatcctggaactgaacatctgatgagtcaatacagggcacggagtaggactttgaagtcctccattggatcttctcggaagatgagggaaatgagagagtgtggagagagattttgtaagtccggtctggaagtggtcattgttcagaatccagccacgtgggtacatggaactgtaaggctatttcaacatgggaaactgaaatcgggcatatccctgcggaagaagctgtcccttagcgaagaataaaactgtggactgacccccacccatttgcgaagaaagtactgggtcttcagctttcattgttcagccggtggtctttgtggacaacaccaggggcccctcctgctgaagactgtctggacttcctgattttcactcctgtataaaccccctcccccattactacctttgtctccttggggaaaaaaaatgtttttcacttaagcaaaataataactacccagtatttgtttctggagtgaaattgtaaacttcattgtacattcttcctggctttgatgcttatcgtgaagagttcagtgaaaataaattgtttttatgaaagcagagaaaccatttgataaacac

SEQ ID NO: 729565 - DNA, 426 bp, Homo sapiens
ggttagtggtagggtgaaaattccaaccatgttaccatttattgtggtcctactgtgtgccaggcactgtgccagctcctttacaaaccctcatctcatctgatcttcacaaaacactctgtggctccacccaatatctctcaggcatctacaaaggctctctcttcctccgtcagagtctggactgggttcactggtccttgttttattgactgagcagatgtgattgacaacagctgtgcctaggggttaacctagtgccccctgctagatcaagtacctgactcccagcccagaattgcccatctcagcaaaggagggtggcattgtgacttttgtggatcataggcactttcatcttcatgagtcccttcgtccattaaaataaatagatttttatgtctgtgttggtgtaaaaatgaaaat

SEQ ID NO: 729566 - DNA, 674 bp, Homo sapiens
acagtgtccagggagcacaaggcctgggggcccacaaacctgggtctgtatgcccactcttcattagcagctccaggaccaagtgcggtcagttttctggaactcgtttccatatctccactgtgatgtaaggatgtgcatggatcctaaatgtgagaagctggcaatcaccaggtccctggcaagtgctcagagtctgagctaccatcaaaatcaagggcacagggggaggctaactgcttctctgaatactctaagggaggcagatctaggccaggtgaccagggtttacaagtcccaggacagcaggttgggcttggtgcacggaagaactgatgagcagcttcactcatgcagcaggacagatcaggacaaagccatgctggagttggggccacacatctgctgaaaacccccaacactctttttcccagcagcagcttccaagcaattcctgaggccctcccaccggctaaccagaaaggaacccaccattggtctccttagtaacgacttccaaggccccttgcacatctgaaaagcgcacagtgtgatttccagacccaagttagacagcgatttcttcaaagtgcaacgccctcaattaatgaaccctctgggaatgaagtaccttctaacaaaaacattgttcaaaataaagctggaaaaaaacc

SEQ ID NO: 729567 - DNA, 3862 bp, Homo sapiens
gggggtgggcggagtcctctcgcaacatccgccaggtagcttcttagttgctgcccctagctctaggagctcctgagtgcacacgccgtacccgtcccttgtcgggaatcctgtcgcaggtttttaagcaacagtcctcaggagggccaagggagtctgacggtgatgtcttcccccaggctcattcccctgtggaaagatttaaaactcctcctaaatgacaccataaataaaagcaagcaaccttcggaagacccaaagaactgcctgattgtgctgagtgaccggtcccaggcactgttcaaagagtctcgctatcctcaaaatatgccgtgtgtatgctattacttcagtgatgcccacttcttcgcctccctctcttgggtgacatcaaacacaaaagaaatacaagctgtagcatggatgaagagcaaaactgaggacatggttgagaaaagaacattctccatgactgaacgattgccacccatccagtccatggtccatgcaggctcctttcatatcctcgtggtctactgtggtgacctgatcctgcgactctttggggaccactttcgggcattcaaacccctgggtaaagtgccctgccgcttcaacatcagctgcctctgctatgacccggaaatgaagatgcttcttgtctggcatcctgggggcagtggtgtcctgggtcattgagctaggtggcacgggcctccaaatagcccacatggtctccatgccaggtgatgagcttgtccaggacatcgtgctgaatggtcccagtggctccctcctggccctgtgtgagacggtggtgagggtccttatgcaccagggcaagggccagctgggagaggtaaagaggttcacgtccaccagcagcggctcctccatcacctgctgcttcacctgttttgatcagggctttctctatgctggaaaccaagctggggaaacccaagtttggagcctccagcagggccatccactccacagtttccaggcccatcaatcaggagtgatctgtatccgcagccgaccagaggcccacaccctgctaacagctggtagtgacagcctaatcaaggagtggaacctgacttcagggagcctgcttcggcggctagagcttggtgaggagctataccggctccagtttattgacagcattactttcttctgccaaactgcccatagtttttccttgcaccgcctgccctgcttctacagcctcttcaatgtctgtggctctgctccccagcagttgcgtcgggtctgctgtggaaataactggttccggatcctgtgtaccactgaggatggcttgttgcgctttgtgtccccagtaacaggggaccttctggttatcacctggcccttctcaatcctggaccaggctgtggattgggcctacgacccaggtaaagaggagctctttgtagcaacaggcagctcagaggttctggtatttgacacaacccgctgcccttgcccagccaagtatctcttaggcacctcaccaaattctcaggactttgtacaatgcctggcttatgggcatttcaacttggggcggggtctagagggactgatattctctgggcaccagagtggtgtgataagagtgctctcccagcacagctgtgctcgattagaaaaattcatgcactttggcgctgtactggcactctccacgctgtctggagggatttttggtggccaaggaaactctctgctctgttcctatggaatggatgactatgtgcacctgtcagaagctgtgcttgatggggtcaaagtacaactgcggcctctcgccagcattctcagcagctgtcacctaacacatctgatactcttgccccagtctgtaggtgccatcacagagacaaactgcctgcgtctctggaagttccatgattttctgtcctctgggtcacagaatggcttgaaattcatagaaacactgcccctgcacctgtgtgccatcacatcctttgatgtctgcctctccttgagtctttttgtcacaggttctgccgatggctctgttcggatctgggacttccatggcagactcatagccattctggactcatcactgcactttggcccagtctgttttgcaaatgaccggggtgacctgcttgtgacttttaaccagagtctttacctagtgtcctgtttaaaattgcttcccccagccctgctgactcgcctttcctttatgagcatatcagatgaagtactggaagtccctaagcctttcataccaagcttcttcttctcctttgagaccatgtttgtgcccaagtacatctaccctggacaagcgcaacagaaattagtgggtctggagaaacttgtcaacaaccgggccattgcctttgaccattctgtgccacatgtgatagaagaagatgaggaagggagcccagtgttactgcgtttcctccatgcattattctttgcaggacatggaagattggatgcaggtgagcaaacgttaccaatgccattatgtgcttcctccccagctacaactgactagctgggatggactcaacccctatcagatattgcgatactactttggtcatgggcgggaatggctttttgcccctgactgctatatccccaattcagtgattcgtgcccgtctttggccagagggcaccccaatatacctacagtgcaacctgcatgcaccccagcgggagctggaatgggacaggtctcaagaattctttttctggcacagcaggtaagagctataagtaatacagaatatccaaagaataaggaggaggatgaacacttcctagaaatgagactttccaaggatgtaacctacagtgtccttacagatggagcaaaccgaagttggctgggaagaaagatgagtgaaataaccattaatagcatgattgagacaatgctcaatattatggtccatgcttccttgctgaagtaccagtgctgtgttggtgcactagggcaaatctttgcctcttaccaggtgtccccagccctacgctctgagacagcccgtcggctactgaatgatacaaccaattccaacccgctgatccgaggactagcttgggaagggctgaagcgtctaggaatgattactcatctttttgccatgcctctggctcaaggattaatggacaaggatgaaagagtgaggatcaagaccctaagcctcatggctgagattggaatccactctaggacctcactcttacagctgacccaaaaacaagagacttttcgggagatgcagcagcagatgatcggggaggaacccctggaccatctactggggatgcgggccacagatctccaaatcctttccactcaagtggagcagagattgaatgaaaacctgaccctgtcacatagagatgaaaagccggctttttctttagatgtctcaatgccttctgaacttaaatcctccctgaaacctcctacagtttctgaagaatctgaagtggccatcaagcccagcaaaggccaaagacgaggccaagcaggggtcaaaaagcatagccaaaaatggttgcggggtctcaagaagacgaaagagagagactctaaacagatgagcacagagccaggcctcttagaggatgaaagtgggactgaggccgcaccattgagatggaggaagcatccgtctattcccaagtggtcttcaagcaccagtgtaataaagctctcaaaagatgttgattctcaagagaaagatatctcgaaggatcacattgcattgaccctgaagaggctgcagaaaatacgtgacaaaagagacaagaaagcaacagctcagaaactcaaaaagaagcacaaa

SEQ ID NO: 729568 - DNA, 457 bp, Homo sapiens; identical to SEQ ID NO: 377522

SEQ ID NO: 729569 - DNA, 1174 bp, Homo sapiens; identical to SEQ ID NO: 377518
  misc_feature (239)..(239): n is a, c, g, or t
  misc_feature (779)..(779): n is a, c, g, or t

SEQ ID NO: 729570 - DNA, 523 bp, Homo sapiens
aggaaatgaactctattaacttgagtgagcttaaaactagatccttccccagtcaagcctccaggtgagaattcaatcctggctggcacctggattgcagcttacagaagacccagctaaggccatgtctggactttaaatccacaggaactgcaagatggtatcagaagtgggacctgcagtggggcatctagcaacccccaggagcattgagtgaccaggcttgggacccaccgggcgcagggtgtccattgttctctcgaagcaactgagaattgtggatattcttcattattccatcatcatctcaaacctcttgggtatagtgtttgactactactgtgaccataaattccaataaaacctaggaaaaatgaaaccactacattaactgaaaggatatcagagagacttctctactgcttgggatgcttgttcagagtataatttccatagcagcaagaaaaggaatttttgtttgtggatactttaaagtaaataaagctattatagaaggcaaaag

SEQ ID NO: 729571 - DNA, 535 bp, Homo sapiens
aggaaatgaactctattaacttgagtgagcttaaaactagatccttccccagtcaagcctccaggtgagaattcaatcctggctggcacctggattgcagcttacagaagacccagctaaggccatgtctggactttaaatccacaggaactgcaagatggtatcagaagtgggacctgcagtggggcatctagcaacccccaggagcattgagtgaccaggcttgggacccaccgggcgcagggtgtccattgttctctcgaagcaactgagaattgtggatattcttcattattccatcatcatctcaaacctcttgggtatagtgtttgactactactgtgaccataaattccaataaaacctaggaaaaatgaaaccactacattaactgaaagggtatcctcctctcaccttcagtgcccggatgcaggaggtaactccctggtgaggaagacctaagtatatggccatagattcataaggagaatggaagagaaaagtgcttttaaaagtgataaatttgagaaaaact

SEQ ID NO: 729572 - DNA, 597 bp, Homo sapiens
aggaaatgaactctattaacttgagtgagcttaaaactagatccttccccagtcaagcctccaggtgagaattcaatcctggctggcacctggattgcagcttacagaagacccagctaaggccatgtctggactttaaatccacaggaactgcaagatggtatcagaagtgggacctgcagtggggcatctagcaacccccaggagcattgagtgaccaggcttgggacccaccgggcgcagggtgtccattgttctctcgaagcaactgagaattgtggatattcttcattattccatcatcatctcaaacctcttgggtatagtgtttgactactactgtgaccataaattccaataaaacctaggaaaaatgaaaccactacattaactgaaaggaaggaagatgattccaagtcatgttatttccaaggaagcaacaataacttcactggacccctgctgatcttaaagtgcagcatgaaaaacagtcttggagacttctagagatgtccaaagtatgcctacggggagcaatagggataccaggagaatctgatggtagacgtatattaaaaaagctatttacatgttaaa

SEQ ID NO: 729573 - DNA, 916 bp, Homo sapiens
aggaaatgaactctattaacttgagtgagcttaaaactagatccttccccagtcaagcctccaggtgagaattcaatcctggctggcacctggattgcagcttacagaagacccagctaaggccatgtctggactttaaatccacaggaactgcaagatggtatcagaagtgggacctgcagtggggcatctagcaacccccaggagcattgagtgaccaggcttgggacccaccgggcgcagggtgtccattgttctctcgaagcaactgagaattgtgggacccatgaaggagcatcaagctcagcctcagatattcttcattattccatcatcatctcaaacctcttgggtatagtgtttgactactactgtgaccataaattccaataaaacctaggaaaaatgaaaccactacattaactgaaagggaaggatttgacagcttcttttgggcatatcagaatcgccagcatcactactcttgcactgtgcggccattattaagtgaaataaggattacttgaacacaagcactgcaatgccgctacagtcaatgtgataacccagctggtgactaagtgaccaaggacggggagtatctacagcggggagactctggaaaaagggaggattcacatccagtgccactggggcagggcagaatgagagttcatcatgctacaaagaatggcacagaatatacgacttgtgagtggattatctctggaattttctgttgactacatttgtactacagttgtatgtgggtaacaaactgtggaaagtgaaacttcgggtaagggggaggctaccgtagatagcccagtatttcttattttgtggatttgtttatctttctgctcacatccttttccttctgcattaccattttagtaaaaatagatagcatcca

SEQ ID NO: 729574 - DNA, 677 bp, Homo sapiens
aggaaatgaactctattaacttgagtgagcttaaaactagatccttccccagtcaagcctccaggtgagaattcaatcctggctggcacctggattgcagcttacagaagacccagctaaggccatgtctggactttaaatccacaggaactgcaagatggtatcagaagtgggacctgcagtggggcatctagcaacccccaggagcattgagtgaccaggcttgggacccaccgggcgcagggtgtccattgttctctcgaagcaactgagaattgtggatattcttcattattccatcatcatctcaaacctcttgggtatagtgtttgactactactgtgaccataaattccaataaaacctaggaaaaatgaaaccactacattaactgaaaggatgtgcctgtcacagtctccaccagaagctttatcttactacagagtccagatgcattaaggctgtgttcgagccatgatcttcctctgaagaagaaatgaagaagaaatttatcttatttttggatatagtgttcttagttggcagtttaattattatttttacttcatcactttgtatacgtcatcgcactttctcctggcctataagatctctcctgagaaattttacgttctactttactggaacttcattaaatattatttgcatcatttttc

SEQ ID NO: 729575 - DNA, 586 bp, Homo sapiens
tttcttccagccagatattgtattaagtgtctagatgtttcccccgtccctagtttggttgttcttccagattccatgccagcaaggccactggtgaccccaataggtacctttgtgcaaattagaaaaagatgctcctagccgggtgtggtcccagcactttgggaggcagaggcagaggcaggcagagcacttgagctcaggaattcaagaccagcctgggcaacacggcgaaaccccgtctttacaaaaaatacaaaaattaggcaggcttggtggtatgtgcctgtagttccacctacttagggggctaaggcaggaggattgcttgagctcaggaggtctaggctgtagtgagccgtgatcacaccactgcactccagcctgggcaacaaaaacttaccctgcctctaaaaaaaagaaagaaaagacaatcctgcctcaagacacttttttatatttagagacggagtcttgctctgttaccaaggctggagtgcagtggtgctctcaaggctcactgcagttttaacctgggctcgcagttttaacctgggttcaagtgattctcccgcctgagcctctc

SEQ ID NO: 729576 - DNA, 1793 bp, Homo sapiens; identical to SEQ ID NO: 23731

SEQ ID NO: 729577 - DNA, 836 bp, Homo sapiens; identical to SEQ ID NO: 23734

SEQ ID NO: 729578 - DNA, 1579 bp, Homo sapiens; identical to SEQ ID NO: 23733

SEQ ID NO: 729579 - DNA, 506 bp, Homo sapiens
ggcgcttgcttcaggtggagtctgttagtttttgagaaagagttagggcgagtttaaggggcactgtggcagctgtgagataaagtctggttcctccccagctggctcaggaaatgttcgcggatacaacggcggccccctctgggcatacctgcctgtggagcggagagtggacggtgtgagggggaccgggagaggcaccaaatctggcctgggggcccgagaagcttcctctcagtgaccacaatatgaatgggaacagcaagatggcaaaagcttgctgagtggtacagcgccagcctgggtagtggcctccccagcaagttgcatgtcactagcttcctgtggctgtcactcctgggcccaggcacctccgaagatcagcacctcctcatgggctcaagcgaggacaggagcccgtcacccatgagctctcaagggcagagccactgtcctgtctcgatggctccaccgtgactccagtggactttggacagtggggagca

SEQ ID NO: 729580 - DNA, 509 bp, Homo sapiens
ggcgcttgcttcaggtggagtctgttagtttttgagaaagagttagggcgagtttaaggggcactgtggcagctgtgagataaagtctggttcctccccagctggctcaggaaatgttcgcggatacaacggcggccccctctgggcatacctgcctgtggagcggagagtggacggtgtgagggggaccgggagaggcaccaaatctggcctgggggcccgagaagcttcctctcaggtggggtggcgtgagagtcgaggcctggaggtcggggagggttagctacgtgaagaggggattctgccgcgcttcaggtgcctggaggggatgcccgagctcttccgcagggctagggtgaagccagccagggcctgggggaaaggtagcagaggtttgccatggcttggtatttgagggactttacacatcgtattaagggtttgagcttcaacttggggtcgtcgggagccattgaaggttttttgttgtttgttttttgagacggggt

SEQ ID NO: 729581 - DNA, 800 bp, Homo sapiens
tggaaaatccctatgtcacctgaccaattcctcctgactgttagcgccctgcagcacgcccgtaattccggggaatttgcctatccctgtaggccccaaacagaaattactgatgtctggggaccttcaatttcatacccaaggaaggtcttgaatttcaaaggaaaatcaatccaacgtgcagttgatcggttgagattgagcaatcctcctatagatgtgaaacgaaccagtattccccttgaaatccagaaactgcagcccaacttgaagatctctttgcacagtcctagagcccagtccaccatacccgagcccatgattatccgctccaggttctctggcagcttaaagggtggagaccaagtgaccagttcaattgaaagggctgtgtgcagtacgggtcccctgaccagtatgcaggtcattaaaccaaaccgcatgctagctccacaagtgggcacagccaccctgtctcttaagaaagaacggcctcgcatctatacagcccttgatccttttagagtgaacgctgagttcgtgctgttgaccgtgaaggaggagaaggagcaccaggaagccaagatgaaggaatatcaggccagggagtccactggagtggttgatccaggaaaagccagcaaagctgcatggatcaggaagatcaaaggcctgcctattgataatttcacgaagcaagggaaaacagcggcccctgaacttggacaaaatgtatttatctaaaccagccttgggaaattacagtgttttacaataaacagaaagccaagcggaaaaaa

SEQ ID NO: 729582 - DNA, 542 bp, Homo sapiens
agagggcagggatcccggccctgtgcaggactctgtggctcctggtagaagacaaccacccttacagatggaagatgctggaatacgggttctcgctgcaagtgtgtttgagccttggagccaggcagtgtttgcgtgtccccctgggaccctggaccaccatgaggagagcttgcagtcctcacaagtgcagcctctcaaaggtcaagggtcaggagggtcagggacaccgcctgcaaggacacacatggctcctgtagccaagtggccctgtgtggcctacaaagatctgctgagtggagaccagccaggagcagcttcgcccagggctgctgaggaggaagccattgtggggaacagggtcagaacatgaccctggaccgaggtcgagggggcacatccagacgcacacgaaactgaaacctgtgaaacccaggaaaatggcacctccttcatgctttccagaagaaggggtgcatggagcagggatcccggttaggtcttaaaaatctcgccacaaagcgtattttctcagaaaaata

SEQ ID NO: 729583 - DNA, 801 bp, Homo sapiens
tttggacgcagaccaagattgacaagcaaacttaatacctcaccaacacaggtctctgtaaatgtagctaaaacattctcagaaaatgtacataaaacgatgactactgaaaatagagtatcttcaaggagtatcgaaagtaaagatatcttaacaaatctacagtctgacctattgtcatcttcctgcttaaaagaaagcacaggtgaagtgagcaaagatgcagtcattgtaaagcaggagaaaaataatgaatattgccttcaggatattgatgataaattgtcagaatcagcagaggatgatggtgaagatgataccaatgatgaagatgatgatgaagatagtaaccctaaaaagaatactcaggccccactagagttaatggcagaatttctgagagcagaaatggcccgagagtaccagctggcaaaaaaattatgtcagatgatcctaatctatgaaccagaaaatcctgaggccaaggagtttttcacacttattgaagaaatgttgctgatggagaaaactcagaatcatgagcaagacggtgaaaacagtgatgaagacagcagtggtgagagtaaaggagaaagcgatgaggagctgagtgacgagagctctgacgaaggtgaagatggatcatgagtgttgctgcaatacttgaagcttcatgtattttcattaatgtataccatgcaaatataaagacaagtgacattttagtctaattcttccttatttggtacagtttcttttaagttatctatattcttggcttaagactcttcctaatattta

SEQ ID NO: 729584 - DNA, 656 bp, Homo sapiens
gtgaagtgagcaaagatgcagtcattgtaaagcaggagaaaaataatgaatattgccttcaggatattgatgataaattgtcagaatcagcagaggatgatggtgaagatgataccaatgatgaagatgatgatgaagatagtaaccctaaaaagaatactcaggccccactagagttaatggcagaagtaagttttacttgtgcatataattgaagaaactttaaaatattgaaataactaaagactgaagatttaaaatcactactgtgagaactaaaaaagtagatctcatggaggcagaacatagaatggtggttaccagaagctggacgggaagaagggagataaagagaagtccattaaggggcacaaaaatacagttagatggaaggaataaattctagtattcagtagtacagtagggaaattatagttaacagtagtttattgtatactttagccagaagagaaaaattgtaatattcccagcacaaagaaaagataagtgtttaagatgatggataatccaattgccttgatttgatcatcacacattgtatacaagtatcaaacatgtacccccaaaatgtatacaatattatatatcaataaaaaataaacatttttaaaaattaataaaaagatccttgtcca

SEQ ID NO: 729585 - DNA, 373 bp, Homo sapiens
gtacccgtggagatccaaactcctctcacccaagccccaaagcacttctcccaatgctgctgccgtgcctgaatcccgcccacgcgtgagaatcaccccattattacagaagacccctgtcaaatgcacacgcgttaaccacgtgttacccaaggacgactcagtcatcctttaggactcggtgatacattagcacagatgaacctggcactgaggtgggatgaggtggggagatcttttggccgcaggtcatttaggatattgttattactgcaaagaccacagaacagccatggtttagtcacttattccttgccaggagcttcgtctcattgtctcttttaataaacaatattttgagatcaaaaaaaaa

SEQ ID NO: 729586 - DNA, 388 bp, Homo sapiens; identical to SEQ ID NO: 719969
  misc_feature (74)..(75): n is a, c, g, or t

SEQ ID NO: 729587 - DNA, 531 bp, Homo sapiens
tccaatttcagagaccacaaggtcgggagcgcctgcggaggcttctgaactgggaggagtttgacgaacagagagactcccggaggagcatcctgctggacaccctctacgagagcatcatctttgcagtgggcaaaggcttcccatgggtggaggtggcccaggtggtcaagttcacagaagagctgctaagggaaaccaaagtgacaaagagaaaggaatactcttacagggaagaagctgacagctgcctccttagtcaaatgatccaagtggacattgtcagtaaaaggccacacacagaatcccgtgtgcctggtcagacgcagtgagcagccagcattctcctgtgatggttccaacaaagactcatggcccgaatctaatcaagagaaaacagcaaagtaggaccatggctcaaagtagccctcctgccagcttcaaatactcgaaggccataagagcccagcaaagactgataaacctttccaaactgaaagaggcgaagggatgtcttcacacgtgaaaaaa

SEQ ID NO: 729588 - DNA, 624 bp, Homo sapiens
tccaatttcagagaccacaaggtcgggagcgcctgcggaggcttctgaactgggaggagtttgacgaacagagagactcccggaggagcatcctgctggacaccctctacgagagcatcatctttgcagtgggcaaaggcttcccatgggtggaggtggcccaggtggtcaagttcacagaagagctgctaagggaaaccaaaggctgctccattactgaggctgtgacgatcctggggaacaagcttagagattaccggggccatttcaacaccacccacctgctggccctctgtgactacttccaccacaccttcatccgccactacaaactctaccagtatgtcctgggccaggaccagcaggtcgacctgaccgttgcccacctggaggtgtgcatgccacccctatcccgccccccatcaccagccacgcaggccaggaggaagccctgaagccccaaagagcgagcaaaggaaagaaagcgaaggcaaggaagtagaaggtcccgactgccacacgagactgactggggaccagccacccataaccatgacttgcggcacggtgagctcagcacccacagagagacttcttgtgattaaaagaaacaaacccataaaa

SEQ ID NO: 729589 - DNA, 1550 bp, Homo sapiens
cggcggagggggtgatatgactacatacatggcagaaagtggaaacctcccagggatattgttcccacgatcctggagggaagaagatgatgttactttcaatatgacagaagacacagagacaaagtgtaaagatacaacagtgggtccaggggaccggcgctcagcacaccaaggacctgcaccggcaccagcctctgagttccttcagtttttattgattatgattttcattattttagcagaaaggaatgtagtaggagagcagggtgatgataaggagagtctgcagaagacatctgcaagaggctttcctcttttactaatccacctcagcacagaccctttacgggtgtcgggctgggggacagtcaggtctttctcatcccatgaggctatatttcagactatcacatggggagaaagcttggacgataccctgctttcaagggcagaggtccctgcggctttccacagtgcattgtgcccctggtttattgagactagagaatggcgatgacttttaccaagtatactgctgatggacacgcccccactgatattgtttttaatgcagcgtgggaggggaggatatgacacgcgatatcgcaagtagtagaaacacccctttgatagtgttcttaatattcagggaggaagaagatgatgttactcccaatacagacggatgtacaccctctgtacaccgagggtgtacacccgtctgtgaaggagttcgtaatctccagaggtggagatgatattactcacaatatggtaaacaggctgtgagtccatcgcggatcctcagagccaggtggggaagaggggctggctgtcagtcccctcctcgcggggggtgcctcccccactgctatggggatcccaagagccagtgggggaagaggaccatggcctaaaccaggactatcccaggaagcctgggacatatttgtaccccatctctatttaatgcctttatacaattctttacttaattctaccagcctttattgagcctgctttctttgtctagctgagtgccacgtgctgacgtcactaagatcaatacagcaaactctgaaagatggacagagagacaggagatggtcctttataatgcagtgtgatctgtgctgcaatagagatggaagagtgttctgatcggctggaaaacaacgcacatgggaagctgtacagaaatgagtggggaaagttttggaagctagaagttcaaaacgaggtgttggcagcaccatgctctctccgaagatgctaggaagaatctgctccatgcctttccattcgcttctggggtttcctgcaagccctgacattccttggcttgtagatgcatcaccccagtttccgcccccatcatcacatggcctcctctctgtgtgtgcctctgcgttccctctattcttcttctaaggacaccgacaccagtcatagtggattaagtgtccactcctaaccaattacatctgcaacaaccctatttccaaataaagtcacattctaagattcctagggagaacatgaatttt

SEQ ID NO: 729590 - DNA, 574 bp, Homo sapiens
gaccatggcctaaaccaggactatcccaggaagcctgggacatatttgtaccccatctctatttaatgcctttatacaattctttacttaattctaccagcctttattgagcctgctttctttgtctagctgagtgccacgtgctgacgtcactaagatcaatacagcaaactctgaaagatggacagagagacaggagatggtcctttataatgcagtgtgatctgtgctgcaatagagttttggaagctagaagttcaaaacgaggtgttggcagcaccatgctctctccgaagatgctaggaagaatctgctccatgcctttccattcgcttctggggtttcctgcaagccctgacattccttggcttgtagatgcatcaccccagtttccgcccccatcatcacatggcctcctctctgtgtgtgcctctgcgttccctctattcttcttctaaggacaccgacaccagtcatagtggattaagtgtccactcctaaccaattacatctgcaacaaccctatttccaaataaagtcacattctaagattcctagggagaacatgaatttt

SEQ ID NO: 729591 - DNA, 435 bp, Homo sapiens
gacttttttttttgagacagagtctcactctgtcgcctaggctggagtgcagtggcatgataaacactcattccagcctcaaccttctgggctcgagtgatcctcctgcctcagcctccaaaatagctgagactacagatgtgtgccaccatgcccagttaatttttgtattttttgtacagacagggtttcgccatattgcccaggctggtctcgaactcctgggctcaagtgatccttccaccttggcctccccaagtgctgggattacaggcatgagccaccacgtgcagccaggtttttaaaactttttatttctaaataactagaaatgtacagaaaactagaaagcatagtacagacactcccacatactttttacagagattcaactttttaacaattacatttgctttatgattctctgtgtgtgta

SEQ ID NO: 729592 - DNA, 620 bp, Homo sapiens
acaataatctgagttatatgttaatttctaaaagaataaatgaacccattacttcccagatttcacagaagccacttgcttggagcagactaccatgacaagccagtctcaggggatccaccagcttcttcaggcagaaaaacgggccaaggacaagctagaggaagccaagaagagaaaaggaaagcgattgaagcaagccaaggaggaagcaatggtagaaattgaccagtacagaatgcagagagataaagagtttcgactaaaacaatctaagataatgggctctcagaataatctctcagatgaaatagaagaacaaacactagggaagatacaagaacttaatggacactacaataagtatatggaaagtgtgatgaaccagctcttgagcatggtctgtgacatgaaaccagaaatccatgtgaactacagagccaccaactaaatgtacatcacagttttcaagaaaaaaaaaggtgtgtgagtgccacctggttgcttatggcttcgtatttttatgttgagaaatttgaaatgagaaccttaaatttacatttacaggaaatgtgacataactcatacatcggcactgaattaaacaaaacaaaatacaa

SEQ ID NO: 729593 - DNA, 687 bp, Homo sapiens
tattcattatttataagtagatgcaacacctcatttatacctccttatctcatacagaagagctaagattggcagaaatgatttcacagaagccacttgcttggagcagactaccatgacaagccagtctcaggggatccaccagcttcttcaggcagaaaaacgggccaaggacaagctagaggaagccaagaagattctgcatctacttttcctaaaacgaagagactgggactgcttctggaaaaggaaagcgattgaagcaagccaaggaggaagcaatggtagaaattgaccagtacagaatgcagagagataaagagtttcgactaaaacaatctaagataatgggctctcagaataatctctcagatgaaatagaagaacaaacactagggaagatacaagaacttaatggacactacaataagtatatggaaagtgtgatgaaccagctcttgagcatggtctgtgacatgaaaccagaaatccatgtgaactacagagccaccaactaaatgtacatcacagttttcaagaaaaaaaaaggtgtgtgagtgccacctggttgcttatggcttcgtatttttatgttgagaaatttgaaatgagaaccttaaatttacatttacaggaaatgtgacataactcatacatcggcactgaattaaacaaaacaaaatacaa

SEQ ID NO: 729594 - DNA, 676 bp, Homo sapiens
atttcacagaagccacttgcttggagcagactaccatgacaagccagtctcaggggatccaccagcttcttcaggcagaaaaacgggccaaggacaagctagaggaagccaagaagagaaaaggaaagcgattgaagcaagccaaggaggaagcaatggtagaaattgaccagtacagaatgcagagagataaagagtttcgactaaaacaatctaagataatgggctctcagaataatctctcagatgaaatagaagaacaaacactagggaagatacaagaacttaatggacactacaataagtatatggaaagtgtgatgaaccagctcttgagcatggtctgtgacatgaaaccagaaatccatgtgaactacagagccaccaactaaatgtacatcacagttttcaagaaaaaaaaaggtgtgtgagtgccacctggttgcttatggcttcgtatttttatgttgagaaatttgaaatgagaaccttaaatttacatttacaggaaatgtgacataactcatacatcggcactgaattaaacaaaacaaaatacaactgttgctatatcttttctagtaataattatgaccttgtcacttaacttggagtaagtcaagaatgcaaaatagtaacatgttttttaacacttgaaagaaaaacatggtcatga

SEQ ID NO: 729595 - DNA, 722 bp, Homo sapiens
atttcacagaagccacttgcttggagcagactaccatgacaagccagtctcaggggatccaccagcttcttcaggcagaaaaacgggccaaggacaagctagaggaagccaagaagattctgcatctacttttcctaaaacgaagagactgggactgcttctggaaaaggaaagcgattgaagcaagccaaggaggaagcaatggtagaaattgaccagtacagaatgcagagagataaagagtttcgactaaaacaatctaagataatgggctctcagaataatctctcagatgaaatagaagaacaaacactagggaagatacaagaacttaatggacactacaataagtatatggaaagtgtgatgaaccagctcttgagcatggtctgtgacatgaaaccagaaatccatgtgaactacagagccaccaactaaatgtacatcacagttttcaagaaaaaaaaaggtgtgtgagtgccacctggttgcttatggcttcgtatttttatgttgagaaatttgaaatgagaaccttaaatttacatttacaggaaatgtgacataactcatacatcggcactgaattaaacaaaacaaaatacaactgttgctatatcttttctagtaataattatgaccttgtcacttaacttggagtaagtcaagaatgcaaaatagtaacatgttttttaacacttgaaagaaaaacatggtcatga

SEQ ID NO: 729596 - DNA, 707 bp, Homo sapiens
  misc_feature (688)..(688): n is a, c, g, or t
  misc_feature (706)..(706): n is a, c, g, or t
cgctaacggttaaaggatgagcctccattcactaacaatttcgattaaggaaataaccattggggatgggcgcggtggctcatgcctgtaattgcagcaccctgggagggtgaggtgggcagactgcctgagcccatcagttcatgtccagcctgggcaacaagagcaaaactccatctcaaaataaagtgaggggtgtttatccttacggtaaccatgaaaagaaacttccgacagacagaaaggcaaacagaacgggcagatgtgagactgcaagtatgactgtccatggtggtcagtttgcaaagcactgcttctcgtattttctctgaaagccacagtgcctcttagtgttctctagacaccaaatttcaggtaggccggatgcagtgattcctgcctgtgctcccagcactttgggaggcagaggcgggcaaatcgcctgagctcaggagttcaagaccaactggggcaacgtggtgagaccctgtctctacaaaaaatacaaaaattagccgggtgtggtggtgcacgcctgtactcctggctactcaagaggctgaggtgggaggatcacttgaccccaagagtttgaagctgcagtgaggcaagattgtgccactgcactccagcctcagtgacaaatgagattctgtcgacaaaaaaaaagaaaaaggcggccgctcgnattgtcggacgcggccgng

SEQ ID NO: 729597 - DNA, 5260 bp, Homo sapiens
  misc_feature (185)..(185): n is a, c, g, or t
  misc_feature (246)..(246): n is a, c, g, or t
  misc_feature (294)..(294): n is a, c, g, or t
ggtggacgaggacgctcagagcccagctctcgagagttcaagcaaccgacggttccccactgctcccaggagcggttacctgggcactctgtgcccctccttcctgttcgggcccaggccgaggacctgccagtagggctcagttgcctggagcccgttcagcccatcccccagttcactttgcntgtgggatctccccgttgctcctgcccgtggactgagtggcaggccatcctacaagcaccnggacacttgacatcagtggtgtcaagacaactctaagaaggttttccntgatcctgcaagccctgccttccttcctgggatcctgccttcaatttgattgcacaggtaccacagcaagccagtgctgtgtgctccgagttccagggcgtcctccagctcagccactgcactgagaacatggactctctgtggggcccaggagccgggagtcacccctttggggtccacaacacccggctgtccccagacttgtgtccagggaagatagtgttgagggccctcaaggagagcggggcagggatgcctgagcaggacaaggaccctagagtccaagagaatcctggtgatcagagaagggtccccgaggtcaccggggatgcacggcctgcatttcggcccctgcgggacaatggaggcctctctccctttgtgcccgggcccgggcctctgcagacagacctccatgcccagaggtcagaaatcagatataaccagacatcccagacctcctggacgagctcctgcaccaaccgaaatgccatctccagctcctacagctccacgggaggcttgccggggctaaagcggaggagggggccagcctcatcccactgccagctgaccctcagttcctcaaagacagtgagtgaggacaggcctcaggctgtctcttcaggtcacacccagtgtgaaaaggcagcagatatagcaccagggcagacactcaccctcaggaatgactcctccacatccgaggcctctaggcccagtacacacaagtttcccctgctgccacgcaggcgaggggagcctttgatgctgccacctcccttagagctggggtaccgggtcactgttgaagacctggaccgggagaaggaggcggccttccagcgcatcaacagtgcactgcaggttgaggacaaggccatctcggactgcagaccctcacggccttcccacactttgtcctcacttgcaacaggggcttctggtctgcctgccgtttctaaagcacccagtatggatgcacagcaggagacacacaagtcccaagactgcctgggcctactggaccccttagcatctgctgcaggggtcccctctacagctcccatgtctgggaagaagcacagaccaccaggccccctgttctcctcctcagatccccttcctgccacctcttctgattcccaggactcagcccaggtcacctcgctgattcctgcccccttcccagctgcaagcatggatgcgggcatgagaagaacaaggcatggcacttctgctcctgcagctgccgcagcagcccctccccgctccacattgaaccccacgttggggtcactactggagtggatggaggcccttcacatttctgggcctcagccacagctgcagcaggtgcccagaggtcagaaccagagatcccagacctcctggaccagctcgtgccccaaatgaaatgccatctcgagcccctacagctctacgggaggcctcccggaacaaaagcggaagaggggccagcctcatcccactgccagctgaccctcagttcctcaaacacagacccagggtgcatgcccatctccagcccagggcagctcccctgtaagctgggtgagctactgaagccaaggtgggaggcagctgacaacaccacccacggcccatgcagaggtggtagaaaggctggactcagcaggaacaccaaatcccggaccaggcagaaaccacccaagactgaggggctcgtgccagagcggtggccacagggctgaatggtcgctgagacagagatggaagccaggacaagggagcccaccgggcccagatagagacttcagaacccactcctgagaacagcggagccaggcgcttagaggaagaccaaatgctgccaggacacggattgtccagggattacattccagcatcttattagaggacggaagcagagggtgctgtttcaacgccaccaccaggagagaggcagaggggctgtgccgtgctagagtcctcagggagggagtgacctcgaccctggctgtgctgcaagctgactccagccttgggctcagcagcacccggtgaacagcagcaggaggagccgctagagcagctgctcatgggcagagcagcccttgggcaactcctgccaccaccccctccccagggagcccaaggcaggggaggctcagcatggaatgaaacaggggagtgagggacacaaggaggtgggaagtgggagggtcccagccccaccaagtacgcagagaccccctcgtcgtcctggacaccacaggggcacctgcaggctgggagaccaggtcctctgtgcatgggcccgggaggcagacctgccccaagggtgatgcagaggccacaggtgctgcacgctccagcgcccactctagacatcagcctccaggttgactaagggtcaggtcatgtttgaaaccatgcttggctggaccgggacccatggcaagagcacctgggcaccagtgtttagccctggtctgcaggaaggaggacagcagactttaggaccccacagcatggcagtgctgaccatttcacccacttggcctccttgaggaatagggatggggagccctctggggatgagcaaggccttccaggacaggctcggttctggtcccctgctttttgaggttgggttaaaatgccgaccatggcagaggggtcacagctcaggttcccacacctcacttttcacagcctccaagggcagcagtgcacatggaggagacgtctcccacgaggccaaggcctccaatgctcaccgatgccctctgcgaagctggggtagaactcgtcagtgaagaggggctcaggcagctcacggaagtacagcttcagcgtgcctgcgatggcgttcatgtccgtctcgctcatcatcaccgacatgtccttcttatctggaaagagcacggaaatgcagcggcctccttgaagatcctgataaatgaagaaaagacacagagaaggatgtgacatgcctgggccatggagcactctgagatctcatcgcggacaccactgcccacacctccatcccgtcctgcgcaggccaacactcactgacatcgaaggctgccttcagtgcctggatgtctgcggccacaccggccggacacgtggtagatgcccacctcctccatgcctcggcgctcgatctcctccacgcactggcgcacgatgtagggcaccttggacctctctctcctgtgggaggggggaatgttctcagtgtcctaacagccctgcttgggccataacacaggagacctgctccctatctgcgcacccggaggtggggtgaggacggtgacgaaggtacccaggtctggggctgcacacagagccttctgcatgcctgtcctccctctgcaagctctgtcttcacggcatgtgctttctcaggaacctttcaagcggccagaacccctgcgaatcacacatgacctttgcgggaaggtcaggaggcctgtctaagtcaagtcagcacgggaagggcatctgacagattccaggcctggggttagcagcctgtgcccccggctgggaggtcagacccggtgttggtcctgccacccacgtgctgtgtgagaggagaatccctgacccctgccctgggccttaacacacatccgacgaatgaatgaagggttgcctcagtaccggtgctccaagtcctgcgatgctaagtgcttttctcctctgagtcttagcaatggacaattccaatacctccacacaggacactagagtaagaaaccttcacagttagaacgcagtgctgtgcggaggccttaacttgagttctgttttgcacctggatttaccagcacatcaaagctgcttcgcaagccccctcattagcagggcttatctgggggagctgctgatggagtcctcgctgctcatgcccacagccctcccagagtgctatgcgagtggctgccgtgcagttgggggtggggcgtggtgtttagacacagataggagtccagggtatgactgatggaggccccggcccacgtgaccagcaaggtcagaggcccagccagattccatcctggggaagcaaatgaattctcagaggaagtggtctgtgtctgcatgaactgctctcaaaccaacaaacaggcttctcttggcaacagactcatgacaaaggattcaagattgtttgaaaaaaaaaaaaggggagcagggaggcagaaagtcctggaaaagtaaattgtttattttacaataagaaagtgattacatattttttttttttacaatggtggaaaattagaagtcattgtgaaaatgatgtctacctgccttgctgatgagtaggatgtgatttggctctttaggaaactgaatttgcagaacttaagaatattgatttataaagggcatggccattgacccagtccatcttatgcaaatctggatgccataaataatatttaaaaatgaaagtattggggtggaggttgcagtgagcagagattgcccccgctacactccagcctggtcgacagagtgaactctgtctcaaaaaaaaaaaaaaaagaaaagaaagaagaagccattcccaacgttgctcatcaaattatgaccataaatttccaggatcagactaacggctaaagagactgatgcatcaacaccaggcagagaataaagcagatttttttgttgttgttctggagagcttctaggaacttgaaaaatacatatgccacactcttaagacccggtggttcttaatcagggatgttcattaaaatgctggaaaactgtaaagacttccaggtcccatccaaggagattttgcttctgattgactggctagtggcctggccattggtattttgaaaaatccctccaagtgattcttttacatcccagatagaaaaccctaaattaaaggtgaaaaaaccagacaccaagtggcatttaaataaatgtcaactttaactcc

SEQ ID NO: 729598 - DNA, 1480 bp, Homo sapiens
tgtcgtgtgagccttgctctcctggggaggctcaggctgacggctgatgtgggcattgccgagggtaacctgtggcccagtgtatatggccgggtctcctcaagctgcattcattcaagtaggacccagggtgcatgcccatctccagcccagggcagctcccctgtaagctgggtgagctactgaagccaaggtgggaggcagctgacaacaccacccacggcccatgcagaggtggtagaaaggctggactcagcaggaacaccaaatcccggaccaggcagaaaccacccaagactgaggggctcgtgccagagcggtggccacagagacttcagaacccactcctgagaacagcggagccaggcgcttagaggaagaccaaatgctgccaggacacggattgtccagggattacattccagcatcttattagaggacggaagcagagggtgctgtttcaacgccaccaccaggagagaggcagaggggctgtgccgtgctagagtcctcagggagggagtgacctcgaccctggctgtgctgcaagctgactccagccttgggctcagcagcacccggtgaacagcagcaggaggagccgctagagcagctgctcatgggcagagcagcccttgggcaactcctgccaccaccccctccccagggagcccaaggcaggggaggctcagcatggaatgaaacaggggagtgagggacacaaggaggtgggaagtgggagggtcccagccccaccaagtacgcagagaccccctcgtcgtcctggacaccacaggggcacctgcaggctgggagaccaggtcctctgtgcatgggcccgggaggcagacctgccccaagggtgatgcagaggccacaggtgctgcacgctccagcgcccactctagacatcagcctccaggttgactaagggtcaggtcatgtttgaaaccatgcttggctggaccgggacccatggcaagagcacctgggcaccagtgtttagccctggtctgcaggaaggaggacagcagactttaggaccccacagcatggcagtgctgaccatttcacccacttggcctccttgaggaatagggatggggagccctctggggatgagcaaggccttccaggacaggctcggttctggtcccctgctttttgaggttgggttaaaatgccgaccatggcagaggggtcacagctcaggttcccacacctcacttttcacagcctccaagggcagcagtgcacatggaggagacgtctcccacgaggccaaggcctccaatgctcaccgatgccctctgcgaagctggggtagaactcgtcagtgaagaggggctcaggcagctcacggaagtacagcttcagcgtgcctgcgatggcgttcatgtccgtctcgctcatcatcaccgacatgtccttcttatctggaaagagcacggaaatgcagcggcctccttgaagatcctga

SEQ ID NO: 729599 - DNA, 2162 bp, Homo sapiens
taaatgaagaaaagacacagagaaggatgtgacatgcctgggccatggagcactctgagatctcatcgcggacaccactgcccacacctccatcccgtcctgcgcaggccaacactcactgacatcgaaggctgccttcagtgcctggatgtctgcggccacaccggccggacacgtggtagatgcccacctcctccatgcctcggcgctcgatctcctccacgcactggcgcacgatgtagggcaccttggacctctctctcctgtgggaggggggaatgttctcagtgtcctaacagccctgcttgggccataacacaggagacctgctccctatctgcgcacccggaggtggggtgaggacggtgacgaaggtacccaggtctggggctgcacacagagccttctgcatgcctgtcctccctctgcaagctctgtcttcacggcatgtgctttctcaggaacctttcaagcggccagaacccctgcgaatcacacatgacctttgcgggaaggtcaggaggcctgtctaagtcaagtcagcacgggaagggcatctgacagattccaggcctggggttagcagcctgtgcccccggctgggaggtcagacccggtgttggtcctgccacccacgtgctgtgtgagaggagaatccctgacccctgccctgggccttaacacacatccgacgaatgaatgaagggttgcctcagtaccggtgctccaagtcctgcgatgctaagtgcttttctcctctgagtcttagcaatggacaattccaatacctccacacaggacactagagtaagaaaccttcacagttagaacgcagtgctgtgcggaggccttaacttgagttctgttttgcacctggatttaccagcacatcaaagctgcttcgcaagccccctcattagcagggcttatctgggggagctgctgatggagtcctcgctgctcatgcccacagccctcccagagtgctatgcgagtggctgccgtgcagttgggggtggggcgtggtgtttagacacagataggagtccagggtatgactgatggaggccccggcccacgtgaccagcaaggtcagaggcccagccagattccatcctggggaagcaaatgaattctcagaggaagtggtctgtgtctgcatgaactgctctcaaaccaacaaacaggcttctcttggcaacagactcatgacaaaggattcaagattgtttgtacaataagaaagtgattacatattttttttttttacaatggtggaaaattagaagtcattgtgaaaatgatgtctacctgccttgctgatgagtaggatgtgatttggctctttaggaaactgaatttgcagaacttaagaatattgatttataaagggcatggccattgacccagtccatcttatgcaaatctggatgccataaataatatttaaaaatgaaagtattggggtggaggttgcagtgagcagagattgcccccgctacactccagcctggtcgacagagtgaactctgtctcaaaaaaaaaaaaaaaagaaaagaaagaagaagccattcccaacgttgctcatcaaattatgaccataaatttccaggatcagactaacggctaaagagactgatgcatcaacaccaggcagagaataaagcagatttttttgttgttgttctggagagcttctaggaacttgaaaaatacatatgccacactcttaagacccggtggttcttaatcagggatgttcattaaaatgctggaaaactgtaaagacttccaggtcccatccaaggagattttgcttctgattgactggctagtggcctggccattggtattttgaaaaatccctccaagtgattcttttacatcccagatagaaaaccctaaattaaaggtgaaaaaaccagacaccaagtggcatttaaataaatgtcaactttaactccacaaagcatctggttgcatgtggacagaaagagaaggaaagagggccctatatttggataacttagaaatgtgctccccctagcaagatatctaccaaaattaaaaccatatttgaggatgctggcactgcgagtaatatataaatgatgcatgtaacgtcatttaatatgatcttatttttaaaaatgaaaaaaaaa

SEQ ID NO: 729600 - DNA, 2205 bp, Homo sapiens
taaatgaagaaaagacacagagaaggatgtgacatgcctgggccatggagcactctgagatctcatcgcggacaccactgcccacacctccatcccgtcctgcgcaggccaacactcactgacatcgaaggctgccttcagtgcctggatgtctgcggccacaccggccggacacgtggtagatgcccacctcctccatgcctcggcgctcgatctcctccacgcactggcgcacgatgtagggcaccttggacctctctctcctgtgggaggggggaatgttctcagtgtcctaacagccctgcttgggccataacacaggagacctgctccctatctgcgcacccggaggtggggtgaggacggtgacgaaggtacccaggtctggggctgcacacagagccttctgcatgcctgtcctccctctgcaagctctgtcttcacggcatgtgctttctcaggaacctttcaagcggccagaacccctgcgaatcacacatgacctttgcgggaaggtcaggaggcctgtctaagtcaagtcagcacgggaagggcatctgacagattccaggcctggggttagcagcctgtgcccccggctgggaggtcagacccggtgttggtcctgccacccacgtgctgtgtgagaggagaatccctgacccctgccctgggccttaacacacatccgacgaatgaatgaagggttgcctcagtaccggtgctccaagtcctgcgatgctaagtgcttttctcctctgagtcttagcaatggacaattccaatacctccacacaggacactagagtaagaaaccttcacagttagaacgcagtgctgtgcggaggccttaacttgagttctgttttgcacctggatttaccagcacatcaaagctgcttcgcaagccccctcattagcagggcttatctgggggagctgctgatggagtcctcgctgctcatgcccacagccctcccagagtgctatgcgattgggggtggggcgtggtgtttagacacagataggagtccagggtatgactgatggaggccccggcccacgtgaccagcaaggtcagaggcccagccagattccatcctggggaagcaaatgaattctcagaggaagtggtctgtgtctgcatgaactgctctcaaaccaacaaacaggcttctcttggcaacagactcatgacaaaggattcaagattgtttgaaaaaaaaaaaaggggagcagggaggcagaaagtcctggaaaagtaaattgtttattttacaataagaaagtgattacatattttttttttttacaatggtggaaaattagaagtcattgtgaaaatgatgtctacctgccttgctgatgagtaggatgtgatttggctctttaggaaactgaatttgcagaacttaagaatattgatttataaagggcatggccattgacccagtccatcttatgcaaatctggatgccataaataatatttaaaaatgaaagtattggggtggaggttgcagtgagcagagattgcccccgctacactccagcctggtcgacagagtgaactctgtctcaaaaaaaaaaaaaaaagaaaagaaagaagaagccattcccaacgttgctcatcaaattatgaccataaatttccaggatcagactaacggctaaagagactgatgcatcaacaccaggcagagaataaagcagatttttttgttgttgttctggagagcttctaggaacttgaaaaatacatatgccacactcttaagacccggtggttcttaatcagggatgttcattaaaatgctggaaaactgtaaagacttccaggtcccatccaaggagattttgcttctgattgactggctagtggcctggccattggtattttgaaaaatccctccaagtgattcttttacatcccagatagaaaaccctaaattaaaggtgaaaaaaccagacaccaagtggcatttaaataaatgtcaactttaactccacaaagcatctggttgcatgtggacagaaagagaaggaaagagggccctatatttggataacttagaaatgtgctccccctagcaagatatctaccaaaattaaaaccatatttgaggatgctggcactgcgagtaatatataaatgatgcatgtaacgtcatttaatatgatcttatttttaaaaatgaaaaaaaaa

SEQ ID NO: 729601 - DNA, 3615 bp, Homo sapiens; identical to SEQ ID NO: 2119
  misc_feature (185)..(185): n is a, c, g, or t
  misc_feature (246)..(246): n is a, c, g, or t
  misc_feature (294)..(294): n is a, c, g, or t

SEQ ID NO: 729602 - DNA, 887 bp, Homo sapiens
aattttggcttcagtttcatgtaaacgttttatatatacaaaacagatatgaagcaaaacaaagtaatacaacacatttccaaaatgtaaaaatgaaaactgaacaattaaactagctgtataaatgttggcatgaacaaatagagaaaaattatatcaaatgattttgtggaaaaagtattctgattatgtacccaaaaaggaaagaaagagagagaaaagcaaggaaggaaggaggaaaacaaggaaggagaatggatggaaggaaacaagggaggaagggaggaaaggatggatggagggagggagttagggagggagagaaaaataaaaacaagcaaagaagtaagaaaaaagagagagagaataaaagggagggcagagggagaccatgttcaactgcatacctgggcctagtgttttagtggtcattatagtattgcttatgttgttatagacataaggaataagcaccactctcagctgtgatctctggaccatgactggatacatgattcagtataaatacccttcccatttgctgtccaaaatatctcgcttcacagctggaccctagttgtacctgtgtgtcataggaagcagagtgagtgggcctcccccatgtcctaggagagctgagagaaccttgctctcagccaggctgcttagctgaggcctggagatggcagcttgatcttcaggaaagttgtgggggaggggtggggaacagggtgcggctgctgccaggacagtgtgatattaggagggagatcaggagttaagctgtctttctcttgttcagaatacagtaaatttggtgacaggaaatgagagggggcggctctatcctgtgaaccagaggcagccacaaggcagattttcagtgt

SEQ ID NO: 729603 - DNA, 372 bp, Homo sapiens
aacaagcaaagaagtaagaaaaaagagagagagaataaaagggagggcagagggagaccatgttcaactgcatacctgggcctagtgttttagtggtcattatagtattgcttatgttgttatagacataaggaataagcaccactctcagctgtgatctctggaccatgactggatacatgattcagtataaatacccttcccatttgctgtccaaaatatctcctctgaaagctgagttctcgggtccttgtgaaggagggaagcttgcctgccttggagcgtgaaaaagtcttgctggacagaagtctcacggtttaaaaatgggaagggagaggattgagatcacactagaatgcacagaaaattctt

SEQ ID NO: 729604 - DNA, 1168 bp, Homo sapiens
cctggtccaaagtggacgagaatcccattgttaagacatgtctcattaagacttctctaagatggagccagcaaacagcccagtagcatcgaggctgctgcctgggaaagagtcccctcctctcccctgttcattaatgattatgggaggttttattccccccaacaaaagtgttaattagacatcatcggaacagggatattacacaaatgaattaaactcaaaccaatcaacaagctggctctgtgcttcaggtcccccgaacgaaaagggaattgaaggctgtaatgggaaacaaacggtaagatgtctttcctaatatcaaataataactaggaaggctgcctttgcttctagaacttgtcttcttattcttttctttctcccctccactacacacacacacgcgcgcgcacacacacacatgcacacacacgcactgccatgaggcttggagagttagggttccattcttgtgactgaaactgaaactggctgggactgcccagtggtacttctcaggtgccctctaggctcaggggccaagtgggatggaaggagtcagaagagcccagttccagtccctctctgtcactcaccaccttcctcatcagagaatagtgtgtgtaatgctcaggagttcacagggatgcagtaggtactcaatacttacctgctgtgtccaaatggctgggcgacttctggaagcattctgtgccctggcagcaaattcctgaggctgattgacccctgtggggagagtgggaagaactggagggaaaagagttttagtccttgtattttgagggatcccagttgcttggagggatagataaagaagattgaaaagtcttctaaaaatggacagatgaagccagtgcaatggctcatacctgtaatcccagcactttgggaggcagaggcaggaggagcacttgacccccaaaatttgagactagcctgggcaacagggttagaaaccatttctacaaaagaaaaacaattagcctggtgtggtggtgcatacccttggccccagctacttgagaggccaaggtggaaggattgcttgagcctaggtggctgagcctgcggctgtgatcacacaactgcactccagcctgggcaacagagccagatcctataaatgagaaaaagaaaagaaaag

SEQ ID NO: 729605 - DNA, 793 bp, Homo sapiens; identical to SEQ ID NO: 275972

SEQ ID NO: 729606 - DNA, 568 bp, Homo sapiens
tgtgtgagtgaacattgcagcccgagctctgcctcctgtcagatcagcagcggcattagattctcataggagcgcgaaccctattgtgaactgcgcatgcaagggatctaggttgtgcgttccttattccttatgagaatctaatgcctgatggtgggataatttttatcctgaaacgatcacctttccccttccctacctgctgtggaaaaattgtcttccatgagactggtccctggtgccaaaaaggttaggaaccactgctttatcagatcttcagaggggacagggaatcaaattcgtataagaatcacagttctttatgatgtatatgctattttttgctgctaatctccagattttgtggatataaaatatattgtcatctgattttatttttttccaataaaatgtgatttcagtgatctttattttttctatctttaagtaatatatccctatactactatctcatcacttgtttaatttttgctaataagaatttgtcagttttactctttttttcccccaagggagaggcagctgttgggcagattccttttttttt

SEQ ID NO: 729607 - DNA, 460 bp, Homo sapiens
gcgtgggtgtgagtgtgcctgtgtgtgtgctcgtacagcagttgttatcatgatgtacttactggctgtctaccgatggctttcctttcattctactattttttggttgacttctgtgagctgtgagtcatcggtggtaacattatgcattgaatggattagctggtacctaaaaatagccgaggccctcatgcaggcggcacatgagcctgtagagtcagtccctttgcagccaaggcagacccacttgccaacattgaacatgccgagcttggtggcgatgaatcctaatgtatcaaaaaatagatagttggtgactgccctgtgtgcagagcccagccctggatttgtgccgcagttgttggtaatacacacttcctgtctgttctggtgctggaaaggctccaacagagaaactatgtcaaaccacatttttgtttgtgggtctttgtacctctct

SEQ ID NO: 729608 - DNA, 447 bp, Homo sapiens
cctaatacgttaagctgcttctccccatcatcaagaaactgccgcatctgccatataaaggagatgtttctcattcgcccccactcatctcttcccccatgaaaacctcttccattttcaaaggatcttcggctctacttttcaagcaaattcaacaaatcagtgtatgcctgtgtaactggtaaatagtgaagggtaattatttcatgtgcttctaactcagaaacaatggaatattaacagcggttttctgaagatccagttggacaattttcattttcatcatataatggacatttatctcctacctgcattatccactgtcttccctcggagaccacaaatttcactgaaggcagcatctatgtcttattcatgcttgtgctctctacctcccctgacccagaaggacttattcttctttctgcacattttagtagatgtgtt

SEQ ID NO: 729609 - DNA, 443 bp, Homo sapiens
ctccccgcctaggtttgttcgcggggcggggcgaggcaggatatcacgtgaccctgcgagtggctcagatccgaactggcggcctttctccccttcccccaccccaggtaaagaatttgagacacaagagattgagtaacttgtccgagatcacggctgtgtggtgcagaagctggattctgatctgcggcgggttggctccagaacgtgagttgttgaacacaattctggtgaaagacaacccaagatgttcgttaccctccacgggggacctactgaagatgtgctgctttagttgaatcccacaccacattaagtctctggcgaggcttcagccaccaccccctccccagcctccgccaaaaaaattgttttgataatttagtggaagaatattaaattgattttccttcagaataaaggctacttttcagtttgcagtt

SEQ ID NO: 729610 - DNA, 458 bp, Homo sapiens
ttaatcgtctgttccctacattcgaattttagctccccttggtggtcctcaccgctgtaaatctatgtctagcccagtgcctggcagccaagtcttcagttctagttgtagatgttttataggtaaagaatttgagacacaagagattgagtaacttgtccgagatcacggctgtgtggtgcagaagctggattctgatctgcggcgggttggctccagaacgtgagttgttgaacacaattctggtgaaagacaacccaagatgttcgttaccctccacgggggacctactgaagatgtgctgctttagttgaatcccacaccacattaagtctctggcgaggcttcagccaccaccccctccccagcctccgccaaaaaaattgttttgataatttagtggaagaatattaaattgattttccttcagaataaaggctacttttcagtttgcagtt

SEQ ID NO: 729611 - DNA, 1656 bp, Homo sapiens
cacggcagagtcgcggccgcccacagaggagccatctcagggagctcaggccaccaaaaagaagaaggaagaccggcccccgacccaggagaaccccgagaaaatcgccttcatggtagcgctaggcctggttaccacggaacatttggaagaaatccagagcaagcgacaggagcggaagagaagaagcacagccaaccctgcctacagcggcctcctggagaccgagaggaaacggctggcctccaactatctcaacaaccccctgttcctcacagcgagagccaatgaggacccctgctggaagaacgagatcacccacgatgagcactgtgccgcctgcaagcgaggggccaacctgcagccctgcggcacctgcccgggggcctaccacctcagctgcctggagccgcccctcaagacggcgcccaagggcgtgtgggtgtgccccaggtgccagcagaaggccttaaagaaagacgagggtgtgccctggactgggatgctggccatcgtgcactcttattcatccctggaccgcctgcgggccctcctgagactgatacagggcgagcagctgctccaggtcaccatgacgaccactagccctgccccactgctggccgggccctggaccaagccctcagtggcagccacacaccccaccgtccagcacccccagggccacaactgaccccgagggaccagtcttcatacccacggaaagttattgggaccctgcttacacagcctgggggttctgtcggccttaattcataaacactatgaatttcagacaaaaattaaccagacagaggagaggagggaggaagagctgggcgagaggcctagagccaggaccaggtgggggtgcggccctgtgccctccaaattcacagggggtacctaggagccaggtggggtacgacaggctggggcacacagtctccccccggccacctcggggctgcctgggcctctggcttccaggccctgctctccacggcctccctctggcccgttggaggggcaggctgaggctgtggaggggacaagcacgccccccagaacgcagtctccactgagggcaccgcctattggtgtcctgtgggagggcgagctgagaacacatggactagctgagtggtagcggtagttgggacgagaagcggggtagtggatctaggtagttcctcaatgccccacgctcctaggaggtccccctggggtgggcgggcgggcctggggcactccgtcgcctttgcagaaccacctgggcccctttctgtcagtattattagggttacgaattgcagctgtttaacttgaaagacactgtcggaggtgagcatctgggcgccgggacgctgcagtgatccccgccagagcctgtgcccttcctgctccgtctttggggtcctcaaggctgcctccttccttttgccaatctcttggactcagtttgccgttgatgcgtttttctcatggagtttctgggcagagtggagctgcaaccctgttgtggggggcagcatttggcaggttttctccttggggttgaatcattcaacttaacgactgaagccctttcttgtctcctttggaagagccgataagtattccactcctcccttcttgccagtgcagacactatgc

SEQ ID NO: 729612 - DNA, 294 bp, Homo sapiens
gccaaaatgtacaagaccacactggatgtcatctttgtatttgcattcaaaactcattttggtggtggcaagacaactggctttggcatgatttatgattccctggattatgcaaagaaaaatgaacccaaacatagacttgcaagacatggcctgtatgagaagaaaaagacctcaagaaagcaacgaaaggaacgcaagaacagaatgaagaaagtcagggggactgcaaaggccaatgttggtgctggcaaaaagtgagctggagattggatcacagccgaaggagtaaag

SEQ ID NO: 729613 - DNA, 979 bp, Homo sapiens
gccaaaatgtacaagaccacactggatgtcatctttgtatttgcattcaaaactcattttggtggtggcaagacaactggctttggcatgatttatgattccctggattatgcaaagaaaaatgaacccaaacatagacttgcaagacatggcctgtatgagaagaaaaagacctcaagaaagcaacgaaaggaacgcaagaacagaatgaagaaagtcagggggactgcaaaggccaatgttggtgctggcaaaaagctgaaggagtaaaggtgctgcaatggtgtaatctgtggccattgtggatttttcacaagaatattaataaactaaacacttcaaaaaaaaaaaaaaaaaaaccccgagtttttttttttttttttaatttaaatccccccaaaaggggtttttttccccgggagagttttgtagtccaccagaggggggtatttcgggaagaggattctggaggtatgcgcgccgggcgggccacgggggccctccacaactttttgggggccttcgcaggcagccaagggtgtccatcatataccagccaggggggcccgggctaacagacgggggtagcagaggagcgtcgtttgagactcctcccttccgttgggagaagcccctcgtacccaaatattttctcttgggtaatattatgccccccccgggggtttgggcaaaagaggcccaggcggagaagataacaaaatgctgggggccgaggtgacaccaacaccgctttttaacggagaacccggggggtggcttctacacccaaaagaatatcgttctcgtgccaaaagcataaaatggcctcccaccgagtctgtactggtaagaggggggcgcggatccaaaaacattctcccgagaggagccgacgcttcacccctgtatgacgaaccattggccgcggcttgtgctaggcggcccaaaggtggcgagagtattcttggggtccgaaagc

SEQ ID NO: 729614 - DNA, 452 bp, Homo sapiens
accgacgacttcagaggaaacaaacagtcattgatatccttcaccctgggaaggcaacagtgcctaagacagaaatttgggaaaaactagccaaaatgtacaagaccacactggatgtcatctttgtatttgcattcaaaactcattttggtggtggcaagacaactggctttggcatgatttatgattccctggattatgcaaagaaaaatgaacccaaacatagacttgcaagacatggcctgtatgagaagaaaaagacctcaagaaagcaacgaaaggaacgcaagaacagaatgaagaaagtcagggggactgcaaaggccaatgttggtgctggcaaaaagctgaaggagtaaaggtgctgcaatggtgtaatctgtggccattgtggatttttcacaagaatattaataaactaaacactttcatgtgaaaacacaaaaacaaac

SEQ ID NO: 729615 - DNA, 1103 bp, Homo sapiens
  misc_feature (118)..(118): n is a, c, g, or t
  misc_feature (264)..(264): n is a, c, g, or t
atcagcgcatgtgtgtaaggaaccacctcaggccagagaaagagccatgtgagaagattagaaggcacagtggtgctgacacaggacctagggtagggcctgttcccaccaccctagntggaaaacctcatgatttatggggcactgggtagaaaacacaagtgagaaaccctagatgggcactgccacctgacacagctatacagcaggacctgaaaggatcacactgcatcctaggacaaagctcaaaagtacctctggganctacaaaaatattcaggtgcccaagaaggtaaaatgtacaatgtctagcattccagtagagaggcatgaaaagcaggaaaatacattgcaataatacagagaaaaattaatcacaactgacctggatctcagatgctagaaatagtagacaaagatgttatttcccagtgcaaataaagaaataaagatagcaaaaaaaaaaaaaaaaaaaaaaaaaaaaaaaaaaaaaaaaaaaaaaaaagaaaaaaaaaaaaaaaaaaaaaaaaaaaaaacaaaaagaacaaaaaaataaacacgaaacaaaaacaaaaaaaaaaaaaagaagggggggcgcacacaaaaaaacctacacctggaggagcacacaactaagctaccccgacaccacacttacgattgcgaaccggaggcctaccccacaaagaagggtatacaaaacaacaacgccgacccctcgcggatcataccaaaccagacgtgggaacacaacactacctcgatgcttgcagtctaggatgcagacagccacacacattttgtgggtgcacaaaaaattcaagatccgccaccaccaccgcaagatataggctacagccggcgggattaaaaaccaaccagatgtagtggatgagactaccaaccatcgtatagtcgcggtcagaagaaagagctcgccgacgtgattattaaaaattttaacggcgtcggtcttaaaattctgtcatctagatatagataaccaatcatacataaaagcaacgatgctacacactgctaccacaacattaacgtcgctagctacatgaccgctagacacagtagcgaccacagtagataaa

SEQ ID NO: 729616 - DNA, 2530 bp, Homo sapiens
ggcctggtccagctatcgtgctcggtattcagttttccggagcagcgctctttctctggcccgcggagcggtcccgcggccgagtaccggattcccgagtttgggaggctctgctttcctccttaggacccactttgccgtcctggggtggctgcagttatgtccgcgctgcgacctctcctgcttctgctgctgcctctgtgtcccggtcctggtcccggacccgggagcgaggcaaaggtcacccggagttgtgcagagacccggcaggtgctgggggcccggggatatagcttaaacctaatccctcccgccctgatctcaggtgagcacctccgggtctgtccccaggagtacacctgctgttccagtgagacagagcagaggctgatcagggagactgaggccaccttccgaggcctggtggaggacagcggctcctttctggttcacacactggctgccaggcacagaaaatttgatgagttttttctggagatgctctcagtagcccagcactctctgacccagctcttctcccactcctacggccgcctgtatgcccagcacgccctcatattcaatggcctgttctctcggctgcgagacttctatggggaatctggtgaggggttggatgacaccctggcggatttctgggcacagctcctggagagagtgttcccgctgctgcacccacagtacagcttcccccctgactacctgctctgcctctcacgcttggcctcatctaccgatggctctctgcagccctttggggactcaccccgccgcctccgcctgcagataacccggaccctggtggctgcccgagcctttgtgcagggcctggagactggaagaaatgtggtcagcgaagcgcttaaggtgccggtgtctgaaggctgcagccaggctctgatgcgtctcatcggctgtcccctgtgccggggggtcccctcacttatgccctgccagggcttctgcctcaacgtggttcgtggctgtctcagcagcaggggactggagcctgactggggcaactatctggatggtctcctgatcctggctgataagctccagggccccttttcctttgagctgacggccgagtccattggggtgaagatctcggagggtttgatgtacctgcaggaaaacagtgcgaaggtgtccgcccaggtgtttcaggagtgcggcccccccgacccggtgcctgcccgcaaccgtcgagccccgccgccccgggaagaggcgggccggctgtggtcgatggtgaccgaggaggagcggcccacgacggccgcaggcaccaacctgcaccggctggtgtgggagctccgcgagcgtctggcccggatgcggggcttctgggcccggctgtccctgacggtgtgcggagactctcgcatggcagcggacgcctcgctggaggcggcgccctgctggaccggagccgggcggggccggtactttgccgccagtggtcgggggctccccggccgagcaggtcaacaaccccgagctcaaggtggacgcctcgggccccgatgtcccgacacggcggcgtcggctacagctccgggcggccacggccagaatgaaaacggccgcactgggacacgacctggacgggcaggacgcggatgaggatgccagcggctctggagggggacagcagtatgcagatgactggatggctggggctgtggctccccccagcccggcctcctcggcctccataccctcctagaagggatggttctgggggcaaaggaggaggtggcagtgcccgctacaaccagggccggagcaggagtgggggggcatctattggttttcacacccaaaccatcctcattctctccctctcagccctggccctgcttggacctcgataacgggggaggggtgccctagcatcagaagggttcatggccctttcccctcctcccccctcagctgggcctggggaggagtcgaagggggctgcagagagggtagagaagggactttgcaggtgaatggctggggccccaaatccaggagattttcatcagaggtgggtgggtgttcacaatatttattttttcatttggtaatgggaggggggcctgggggtatttatttaggagggagtgtggtttccttagaaggtatagtctctagccctctaaggctggggctggtgatcagccccaacagagaaaatgaggagtttagagttgcagctggggaaggggtttgaaggaagttggaagtggggaggggtgggggcatctggtctcagaaatggaccagctggatgcagggcaggggactgagggtgcttgagtaggatgtgagacttcatgggcctgggttctgttgagttttttcagtatcaatttcttaaaccaaattttaaaaaaaacaaggtgggggggtgctcatctcgtgacctctgccacccacatccttcacaaactccatgtttcagtgtttgagtccatgtttattctgcaaataaatggtaatgtattggacccca

SEQ ID NO: 729617 - DNA, 1439 bp, Homo sapiens
ggcctggtccagctatcgtgctcggtattcagttttccggagcagcgctctttctctggcccgcggagcggtcccgcggccgagtaccggattcccgagtttgggaggctctgctttcctccttaggacccactttgccgtcctggggtggctgcagttatgtccgcgctgcgacctctcctgcttctgctgctgcctctgtgtcccggtcctggtcccggacccgggagcgaggcaaaggtcacccggagttgtgcagagacccggcaggtgctgggggcccggggatatagcttaaacctaatccctcccgccctgatctcaggtgagcacctccgggtctgtccccaggagtacacctgctgttccagtgagacagagcagaggctgatcagggagactgaggccaccttccgaggcctggtggaggacagcggctcctttctggttcacacactggctgccaggcacagaaaatttgatgagttttttctggagatgctctcagtagcccagcactctctgacccagctcttctcccactcctacggccgcctgtatgcccagcacgccctcatattcaatggcctgttctctcggctgcgagacttctatggggaatctggtgaggggttggatgacaccctggcggatttctgggcacagctcctggagagagtgttcccgctgctgcacccacagtacagcttcccccctgactacctgctctgcctctcacgcttggcctcatctaccgatggctctctgcagccctttggggactcaccccgccgcctccgcctgcagataacccggaccctggtggctgcccgagcctttgtgcagggcctggagactggaagaaatgtggtcagcgaagcgcttaaggtgccggtgtctgaaggctgcagccaggctctgatgcgtctcatcggctgtcccctgtgccggggggtcccctcacttatgccctgccagggcttctgcctcaacgtggttcgtggctgtctcagcagcaggggactggagcctgactggggcaactatctgggtgaggggattcaagaaagcctggagccaggcatggtggctcacacctgtaatcacagcactttgagaggctgaggcaggaggatcacttgaggccaggagttggagcccagctggggcaacatagctagacgtcatctcaagaaagaaagagagagagagaaagaaagagagagagagagacagagaaagaaagaaggaaagaaggaaggaaagaaagaaaaagaaagaaagaaagaaagaaaagaaagaaatcagccaggcatggtagcgcccgcgcctgtagtcccagttactcctgaggctgaggcaggaggatcacttgaggccaggagttggaggccagcctgggcaacgtagctagaccgcatctctaccaaaaaaaaaaa

SEQ ID NO: 729618 - DNA, 448 bp, Homo sapiens; identical to SEQ ID NO: 410858

SEQ ID NO: 729619 - DNA, 423 bp, Homo sapiens
gatatctcagtctctagtccagcgtggtttatggtgccaaataagtgccaggtgaactcactacatctgacaaaatctcaaggaaccaagtttaccagataatatttatgattatgtgaaaaagactgaggaaatcactcaagtgatccatcatacagcacctccagttccaaagaatactgacttacttcagctgtactggtctggagctgcacattcttttcagacaactcttgttccagtgactcttctcctgtaacagagcctccttcttagaaactatggcctcccgtttctttaagtctgcttccagctcctctaattcttggcgttggttcagaactttctctacttcttcatctaaccatttcttttgctcatccaatttctacattaaaattaaaaaaaaagttacttgttttt

SEQ ID NO: 729620 - DNA, 437 bp, Homo sapiens
ccatccctaggagtgagattactgggtcacatagtatccgtaagtttagccttttgaggaactacaaaatggttatccaaagcaattgcaccattttccaatttcaccagcagtgtatgaaggtcccaatttctccacctcctcccacacatttcttattatgtttttctgattatagccatcctagtggggagtagggagtggtttacaaccagaatcaagtagtgtattaaacagaatacctgactagatctcaatttcttattttccaggtgactcttctcctgtaacagagcctccttcttagaaactatggcctcccgtttctttaagtctgcttccagctcctctaattcttggcgttggttcagaactttctctacttcttcatctaaccatttcttttgctcatccaatttctacattaaaattaaaaa

SEQ ID NO: 729621 - DNA, 829 bp, Homo sapiens
agagaaagacaaaaagggcacagagaagcagagagaactgtatatatacacatacattctggacttcaggaggaagagatgtactgcctaactgttctctccctgacacattctctaaggcatccaggtatacacacagctgcatcgtgtcactgcaagcggctcccagagttgttcctgttcatccaggaagaaagaaaatcccgccaaagattgagagagatcaataaatgtatttccaaagaacctgaacagaagatgtttccatttggctgtcttaccctctatccaagctcagagggaaatgcattcaagaacgttaacggccagcacaaattccattccaagccatggagcgggaagggcacatgataccaagtgtcccaccagacggccatcttgctaactaatacacctcgggattacatttgcatttacacaaaatgtgagctttgggagccagacgtattattttggttaatagtttggcacgttctcagcttggaagcctgagcatatgtgatgggtcagtaacacaataaaagtaacggggaagcatttctttccccagtggtgaatttctaccctattcaggaaacagacttcccaactcagccattacagctgtctggatcgttcataccatttgctgttaaatatacccaagtaggaaaaacagtgtctctgtatttgctgtcacactgtactcagagacaatctttacgggtcatccggatcattactatcagcataatactgctttagagaacaatatcatcctatgtgtggcatgcatttgccgggaagccatgcgcaactcgccagagcc

SEQ ID NO: 729622 - DNA, 477 bp, Homo sapiens
  misc_feature (44)..(44): n is a, c, g, or t
  misc_feature (131)..(131): n is a, c, g, or t
  misc_feature (393)..(393): n is a, c, g, or t
  misc_feature (402)..(402): n is a, c, g, or t
  misc_feature (404)..(404): n is a, c, g, or t
ttttttgtttttccagggggcaaggagggacaaaaaagtaaccncttcttaagtggaatattctaataagctaccttttgtaagtgccatgtttattatctaatcattccaagttttgcattgatgtctgnctgccactcctttctttcaaggacagtgtgtttttgtacgtaaaatcactggtttatacaaagctttatttagggggtaaagttaagctgctaaaaccccatgttggctgctgctgttgagatactgtgctttgggagtaaaaaaagaaagttatttctttgtcttaaagaatttttaaaaaattagtcatgagacttattcatctttccagggaacatactgattggttttaaaagactagccagttaagtaaaagggggntggaacatntntttttttccaaaactggaaaaatgaacctggttttaaaagaatgtcccccaaaataaaacatgtgaagcagta

SEQ ID NO: 729623 - DNA, 399 bp, Homo sapiens
  misc_feature (44)..(44): n is a, c, g, or t
  misc_feature (131)..(131): n is a, c, g, or t
ttttttgtttttccagggggcaaggagggacaaaaaagtaaccncttcttaagtggaatattctaataagctaccttttgtaagtgccatgtttattatctaatcattccaagttttgcattgatgtctgnctgccactcctttctttcaaggacagtgtgtttttgtacgtaaaatcactggtttatacaaagctttatttagggggtaaagttaagctgctaaaaccccatgttggctgctgctgttgagatactgtgctttgggagtaaaaaaagaaagttatttctttgtcttaaagaatttttaaaaaattagtcatgagacttattcatctttccagccacctgttacttaactgtctagtcttttaagaccgatcagtatgttccctggaaa

SEQ ID NO: 729624 - DNA, 640 bp, Homo sapiens; identical to SEQ ID NO: 242809

SEQ ID NO: 729625 - DNA, 460 bp, Homo sapiens
caggtgatccgattgtttttctaaagagcaagggctaggacgtcctacgtgttcatatgcacaattttttgaactccatcaagaacacgaaccccatgcccacatcttcactgctcaattcacattgtctgatatgcaccttccagggagaaggaggttttcatggagaaagaggcaacgttgactatacgtgtttactcaaggcttttttataccggactatatgccatccaggtttaagagaagtccaggcaggctctagcattatgtttttcacagaaaaagccggtgcagtagcccggatgcccagatccactcatttcccaaaccggttcccacacccgctgcccaccacctggcgaggaaggagcgggcgaggttcgctcgaatcgtcgtcacgggtttccgtgggtacagttattactcgttacataatattaaacaattaagattaaaaatg

SEQ ID NO: 729626 - DNA, 1986 bp, Homo sapiens
catggcaacatgagcagtgctgagataattggttctacaaatcttataattctgctagaggatgaagtctttgccgattttttcaacacatttctttccctcccggtttttggtcagacaccattttatactgttgaaaattcacagtggagcttgtggccagaaataccttgtaacttgattgccaaatacaaagggttattgacctggttggaaaaatgccgattacctttcttctgtaaaacaaacttgtgtttccattacattctctgtcaggagttcatcagtttcattaagtccccagaaggagccaagatgatgagatggaaaaaggcagaccagtggctactccagaaatgcattggcggggtcagagggatgtggcgcttctattcctacctcacaggcagtgcaggtgaagaattggtggatttctggatccttgctgagaacatcctgagcatagatgagatggacctggaagtgagagactactacctgtccctcctcctcatgctgagggccactcatctgcaggagggctccagggtggtaaccctctgtaacatgaacatcaagtccctcctgaacctctccatctggcatcccaaccaatcaaccactaggagggagatcctgagccacatgcagaaagtggctctgttcaaactccagagctattggcttcccaacttttacacccacaccaagatgaccatggccaaggaggaagcatgccatggtctgatgcaagagtacgagactcgcttatacagcgtttgctacacccacataggagggctccctctgaacatgagcatcaagaagtgccaccactttcagaaacggtactcaagcaggaaagccaagaggaagatgtggcaattggtagatcctgactcttggtctctggaaatggatctcaagccagatgctattggtatgcccctacaggagacatgtcctcaagagaaggtggttatacaaatgccttccctgaaaatggcttcttcaaaggaaacaagaatcagttccctggaaaaggatatgcattatgcaaaaatatccagcatggagaataaagccaagagccacctccacatggaagccccctttgagacaaaggtctctacccacctgaggactgtcatccccattgtcaatcactcctccaagatgacaattcagaaggccatcaagcaaagcttctccttaggatacatccacttggccttgtgtgctgatgcctgtgcagggaaccctttccgggaccacctgaagaagctgaatttgaaagtggagatccaacttcttgacctctggcaggacttgcagcatttcctcagtgtccttctgaataacaaaaagaatgggaatgcaatctttcgtcacttgctgggtgacagaatctgcgagctctacctgaatgagcagattggtccgtgcttaccactcaaatcccaaaccattcagggcctgaaggaactattgccctctggggatgtgatcccctggattcccaaagcccagaaggagatttgcaagatgctcagtccctggtatgatgagtttctagatgaagaggactactggtttctcctttttacggtaggaaggactttgggttaggaaggaatcatgaggatgagggaagaagaaagagtaattactgttttaaaagggttatgtgttaaagtaaatgaaattgttatttttcctagagtcaaccaaagatcagcatggtccctgttgttctaaagctaaacctctcaaggaaaaggactcagtgcataagatgactttggtgaaaccccgtctctactaaaaatacaaaaaattagccgggcgtagtggcgggcgcctgtagtcccagctacttgggaggctgaggcaggagaatggtgtgaacccgggaggcggagcttgcagtgagccgagatcccgccactgcacgccagcctgggcgacagagcgagactccgtctc

SEQ ID NO: 729627 - DNA, 498 bp, Homo sapiens
agataattggttctacaaatcttataattctgctagaggatgaagtctttgccgattttttcaacacatttctttccctcccggtttttggtcagacaccattttatactgttgaaaattcacagtggagcttgtggccagaaataccttgtaacttgattgccaaatacaaagggttattgacctggttggaaaaatgccgattacctttcttctgtaaaacaaacttgtgtttccattacattctctgtcaggagttcatcagtttcattaagtccccagaaggaggtgaagaattggtggatttctggatccttgctgagaacatcctgagcatagatgagatggacctggaagtgagagactactacctgtccctcctcctcatgctgagggccactcatctgcaggagggctccagggtggtaaccctctgtaacatgaacatcagtaagaattataaagcatctttttggggggatgcaacaaaaaagtaaa

SEQ ID NO: 729628 - DNA, 409 bp, Homo sapiens; identical to SEQ ID NO: 246205

SEQ ID NO: 729629 - DNA, 352 bp, Homo sapiens
ttgagaggagatttcaggacgtttacccagccctttagtggggatctgtccgggactgtgcagtctgaacctgcaactgtaaaagattgcctctggatggatacctatggtctggcactatcaagatggtatcagtctgtggctccaggtggaccataactcaagatacacatgggagtaagacacagactccctgaatctgcacacctcctgcatgcctcccatgttatgcattatgcttccctttctttaaaaacctgccctcagtccaaccttgtgaactggtttatacaggtgtcatccagccatttccctactgctggatttgaaaaataaagtcactttcctttca

SEQ ID NO: 729630 - DNA, 1563 bp, Homo sapiens; identical to SEQ ID NO: 247640

SEQ ID NO: 729631 - DNA, 279 bp, Homo sapiens
atgccatagtctcttttgggcacacattatattcctatccatgacaagcagccagggcagaagagctctctacatatgtgccaccttgtctccaaaacctgctgtcccctttggacagactggcccatccctgaccactgttctcccctgtcttcaattcctgatggcaacaagagagattctctgactgtttccaaggatgtcattctcagcctcacctccaagtttgattttatagaacaaccaataaatgtggtttcaccttccttgagttcacaa

SEQ ID NO: 729632 - DNA, 1024 bp, Homo sapiens
cttcccttccctcggcttcccgctcttgcctcactctcagcggctgccttcgcccctgtctgcagacagcgccgctggatgctcccagctggacttcaaccccactcctctcagtccctctccccactgccttccagacgcgcctcttccccgccccgcgcccctctctcctctcccacccctgcccctctccgcggcgctcaccctcctcagtcccagtttctgaaaggactcagctgagaaaggacaactgggttccgctttccttaaccctacaccctttagctggatgctgtcagaggcgatggagaaacgcaaaggctactagacgcaacaatagaattaccatattgtttttcctggtttgaaaggaccagatggaaagaaactgggcaagccaatgaaagtctctggggatcatgggaattgagtgtctatgaaaaccatattccagacaagaatatagtctaaggacacagcaagaggcaacattttggaagcagagggcaactctcactggaaaccaaatctcctggcaccttgatcttggattttacagcctccagaactgatagctgggaggcattacatagtcatgtgcgaggtcaaaactgagtcaccaccacaaccaagttccagctggcaagaagaggaaaaataacacagaggagttatgaccagtgttgtaaggatctggcctagaaatggcatgcatctcttccactaatatcctattggtaaaaatgtagtcacatgggcacaccacctatctgcatggaaggctgggaaatgttgatcggtagggcagccatatgtgtaggaaggagaaaacagaatttggtggatacctagtagtctctgccatacccttgaccagaaatttttcttctaaagaatttaattctaaaagttatagacattcccaaagatatacctgcaagcatcacagctttgtgtataattgcaaaagttgaaatcaacatgaatgcccaaaatagtgaattatttaaacagattattaccc

SEQ ID NO: 729633 - DNA, 896 bp, Homo sapiens
cttcccttccctcggcttcccgctcttgcctcactctcagcggctgccttcgcccctgtctgcagacagcgccgctggatgctcccagctggacttcaaccccactcctctcagtccgctcaccctcctcagtcccagtttctgaaaggactcagctgagaaaggacaactgggttccgctttccttaaccctacaccctttagctggatgctgtcagaggcgatggagaaacgcaaaggctactagacgcaacaatagaattaccatattgtttttcctggtttgaaaggaccagatggaaagaaactgggcaagccaatgaaagtctctggggatcatgggaattgagtgtctatgaaaaccatattccagacaagaatatagtctaaggtttatgggactccccagtactctccatgtagagtctaatgtagaatccaggagtgcacagaaaagtcactggatgacacagcaagaggcaacattttggaagcagagggcaactctcactggaaaccaaatctcctggcaccttgatcttggattttacagcctccagaactttctcacacttccttttgaaagctattaaaaatctatggcagaaaaatggtcaaggaataggaactacaacttcataaatgaggaaccagaaaaggtaaaaaaaaaaaaaaaaactgaacagataatcaaatttcacagtaattcgttttcaaataaaaaatatacagattaaaatatgatttccccattgttgactagaatgcataaaaatggggccaagcatggtggctcatgcctgcaatcccagcacgttgggggtccaaggtgggagaatcacttgagcccaggagttcaagaccagcctgggcaatatgagcaagaaacataaatt

SEQ ID NO: 729634 - DNA, 779 bp, Homo sapiens
gctactagacgcaacaatagaattaccatattgtttttcctggtttgaaaggaccagatggaaagaaactgggcaagccaatgaaagtctctggggatcatgggaattgagtgtctatgaaaaccatattccagacaagaatatagtctaaggtttatgggactccccagtactctccatgtagagtctaatgtagaatccaggagtgcacagaaaagtcactggatgacacagcaagaggcaacattttggaagcagagggcaactctcactggaaaccaaatctcctggcaccttgatcttggattttacagcctccagaactgatagctgggaggcattacatagtcatgtgcgaggtcaaaactgagtcaccaccacaaccaagttccagctggcaagaagaggaaaaataacacagaggagttatgaccagtgttgtaaggatctggcctagaaatggcatgcatctcttccactaatatcctattggtaaaaatgtagtcacatgggcacaccacctatctgcatggaaggctgggaaatgttgatcggtagggcagccatatgtgtaggaaggagaaaacagaatttggtggatacctagtagtctctgccatacccttgaccagaaatttttcttctaaagaatttaattctaaaagttatagacattcccaaagatatacctgcaagcatcacagctttgtgtataattgcaaaagttgaaatcaacatgaatgcccaaaatagtgaattatttaaacagattattaccc

SEQ ID NO: 729635 - DNA, 498 bp, Homo sapiens
  misc_feature (487)..(487): n is a, c, g, or t
  misc_feature (495)..(495): n is a, c, g, or t
gcccatgtagcatccctggagggcctcatccctgaagataaggttgtgcttctggcaggttctcccttacagaatgaagccaccctgggtcagtgtggggtggaagccctgacaaccctggaagtggttggccgcaggctaggaggtgagtggggctacaggggccccaaactggtgtccaggggcaattcacgacacttagacttacttggtttgccctgcacggtgtgttacttttttttttcttttttctttagttcacaatgtctaaaagtcagctgattttgtgttaaaattcagtgtctggctttgcttcaaaaattgggaagatcggccggacgcggtggctcacgcctgtaatctcagcactttgggaggccgaggtgggtggatcacgaggtcaggagatcgagaccatcctggctaacatggtgaaaccctgtctctactaaaaatacaaaaaaaaaaaaaaaaaaaaaaatttacncgggcgtnggg

SEQ ID NO: 729636 - DNA, 461 bp, Homo sapiens
  misc_feature (450)..(450): n is a, c, g, or t
  misc_feature (458)..(458): n is a, c, g, or t
caagtcgcctacgtgcgcgcccgggagctgcacactcttgaagtgaccggcctggagacggttgcccagagcaaggcccatgtagcatccctggagggcctcatccctgaagataaggttgtgcttctggcaggttctcccttacagaatgaagccaccctgggtcagtgtggggtggaagccctgacaaccctggaagtggttggccgcaggctaggagttcacaatgtctaaaagtcagctgattttgtgttaaaattcagtgtctggctttgcttcaaaaattgggaagatcggccggacgcggtggctcacgcctgtaatctcagcactttgggaggccgaggtgggtggatcacgaggtcaggagatcgagaccatcctggctaacatggtgaaaccctgtctctactaaaaatacaaaaaaaaaaaaaaaaaaaaaaatttacncgggcgtnggg

SEQ ID NO: 729637 - DNA, 225 bp, Homo sapiens
gcctggagacggttgcccagagcaaggtaaagataatgatgtatccctgatcatccttaccccagccactacttgcctttcctcctgtggcttccccagacaacactcttgactctccctttcctttgaaggcccatgtagcatccctggagggcctcatccctgaagataaggttgtgcttctggcaggttctcccttacagaatgaagccaccctgggtcagt

SEQ ID NO: 729638 - DNA, 952 bp, Homo sapiens
ataggtttattgcccaagagaagtgaatgcacatactgtctctgtacgtaaatgttcacagaaaaaaaagagttactagcaaagaactggggtccagagctgaggggttccagcctggcagcaggagtgtggcatctcagcaggcaggtactatatatactgccatggggtccctggctctatttctgatagcccccaaaccacaaacaatctctatgtctgtcttttgcataaacaaattgtggtagtttgttaaaatagtacagtccaaagcaatactaacagctgatgtgtgcaaacaaatgaagaaactgtgagatatacagtaaggaatggtctgtgcccttctaacataggaacaaagacctgtactcacctatttagaattcaaatcaggttcgtgattgcgctcttaaaaaaaaagaaaaaaagagagaatacaaccaatatgctaatataatatcacttgagcctaggagtttgacgctgcagtgaaccacaatcaccccactgcaccccagcctgtgtaacagagcaagacctggtctcgaaaaataaataataaagtatgtgctaatattatgtaataattacatataacattagcaaaatttgttgagtatctctgtgacaggcctataaagctaggactacagtgccagttagagtttaggccaggctcactgatgtatgcctgtaatcccaacactttggtagtttgaggcaggaggatggcttgagcccaggagttcaagaccagcctgggcaaaatagcaagaccccatctctataaaaattttaaaaaattagctgagcatggtgatgtgcacctgtggtcccagctactcaggaggctgaggtgggaagattgagcctgggtgatcaaggctacagtgagccataatcatgccactgcattccagcctggacagtagagctagaccctgactca

SEQ ID NO: 729639 - DNA, 496 bp, Homo sapiens
cagaggagcacccccataatactgaaaccagcctgcattcattctaatttggagaacaatctgtgggatagtacgcacatcagggagcccagagagtgaactccagggctgtgggtaatctttcccagtgaaaatcagccatctcttctacaccatgtaccctgcctgctgcattctttactcttttattaaaattgaagtatgatattcctacagaaatacacacatatataactctacaactcaatgagatttcacaaactgaagacacctaggcaaccaatgcctagatcaagaggcaaaacattaccagcaccctagctgccctccttggactcccttttcatcacttccctgacaaaggtaactctcttccaacagcacaggttcctttttcctggttttgaactttacctaaacagaattatccagcatgtactttactgtgcctggtttccttcactcaacattacatttgtgaaattgtgaaaaaaca

SEQ ID NO: 729640 - DNA, 661 bp, Homo sapiens
gtcccctgatggaacctggtgcctctgttttctctcaggtcgctcccaggaaataaagtttccgtggatctctttaggcagctgttttggagggagaaagtgaaaggaaaggggactctctctctctctttttttcaaagaggagaagacgaggcaggtgctgtccaccgctgccgtgtaggtcatctcagggtggaaaaacctcacgagtgcagttttcgtgcgtcaggcatcttcacccttctttaaaaacaaaaacaaaaacgaaacaccaccacagtatgaacgagatctcatgatcgccccctttttctcttccggttttgtttgttatatatgtatacaaaacagtctgggtgtttattatgctttttattttttggcccctccttccttggactgcaaaaatgcctccttggtcagtttctcccgcgttttctcctccaagggcgggcatgcctgtctctgggtggaggggagggcggcggatgggcctgggctggagcccggagcggcccaggtgcagggtcggcgcggcggcggcagcggcggcggcggcggcggcggcggcggcaggggcggcggcggtgctgacggcggctgcggaggcgggcgacacttgcacgtgtaagtgtgctcacgatctgtgcgtgcacagctg

SEQ ID NO: 729641 - DNA, 1010 bp, Homo sapiens
aggcagagagcccgaaaggaccagacgcccaggtcgcccgcatcccgctgccgcagagagagagacagcgcgccccggccctgctccccaggcttcgcccgggcgccctcaactctgtccccagagactgagcacctgtcctccgcctcggcctctgctgagagccctctcctctggagcacacaccacccctgcagcccaagaagagtcccagccccacgccggctaccaccatggcggagaccaacaacgaatgtagcatcaaggtgctctgccgattccggcccctgaaccaggctgagattctgcggggagacaagttcatccccattttccaaggggacgacagcgtcgttattggggggaagccatatgtttttgaccgtgtattccccccaaacacgactcaagagcaagtttatcatgcatgtgccatgcagattgtcaaagatgtccttgctggctacaatggcaccatttttgcttatggacagacatcctcagggaaaacacataccatggagggaaagctgcacgaccctcagctgatgggaatcattcctcgaattgcccgagacatcttcaaccacatctactccatggatgagaaccttgagttccacatcaaggtttcttactttgaaatttacctggacaaaattcgtgaccttctggatgtgaccaagacaaatctgtccgtgcacgaggacaagaaccgggtgccatttgtcaagggttgtactgaacgctttgtgtccagcccggaggagattctggatgtgattgatgaagggaaatcaaatcgtcatgtggctgtcaccaacatgaatgaacacagctctcggagccacagcatcttcctcatcaacatcaagcaggagaacatggaaacggagcagaagctcagtgggaagctgtatctggtggacctggcagggagtgagaaggtcagcaagactggagcagagggagccgtgctggacgaggcaaagaatatcaacaagtcactt

SEQ ID NO: 729642 - DNA, 1873 bp, Homo sapiens
tccccaggctatctccagccgtggccgatggccgtgccgggggcagagcccgctcccctccgcgcgttgctacgtgcggggatgacatggatccagacgccgtcaactacgggaaggaggaggcgagagttggagcgcgtgggagcgcagaggccggaggagggagggggggacaccgagcgcggagagcgcggagagcgcggagggaggcgcgcgcgggagcgaacaccctcccggatccagagcccggcggcggcgaagcagcagctgcggccgcgcccttgccagagccggtgcgtccgcctagccccgctccgcctgaggccgtcagggctcccgaggatggaagattcccaggagacatcgccgtcctccaacaactcctcggaggagctcagctctgctctgcacctgtccaagggcatgtcgatcttcctcgacatactgaggagagcagacaaaaatgatgatggaaaattatcctttgaagaattcaaagcatattttgcagatggtgttctcagtggagaagaattacacgagcttttccataccattgatacacataatactaataatcttgacacagaagagctatgtgaatatttttctcagcacttgggcgagtatgagaatgtactagcagcacttgaagacctgaatctttccatcctgaaggcaatgggcaaaacaaagaaagactaccaagaagcctccaatttggaacaattcgtaactagatttttattgaaggaaaccctgaatcagctgcagtctctccagaattccctggaatgtgccatggaaactactgaggagcaaacccgtcaagaaaggcaagggccagccaagccagaagtcctgtcgattcaatggcctggaaaacgatcaagccgccgagtccagagacacaacagcttctccccaaacagccctcagtttaatgtcagcggtccaggcttattagaagaagacaaccagtggatgacccagataaatagactccagaaattaattgatagactggaaaagaaggatctcaaactcgaaccaccagaagaagaaattattgaagggaatactaaatctcacatcatgcttgtgcagcggcagatgtctgtgatagaagaggacctggaagaattccagctcgctctgaaacactacgtggagagtgcttcctcccaaagtggatgcttgcgtatttctatacagaagctttcaaatgaatctcgctacatgatctatgagttctgggagaatagtagtgtatggaatagccaccttcagacaaattatagcaagacattccaaagaagtaatgtggatttcttggaaactccagaactcacatctacaatgctagttcctgcttcgtggtggatcctgaacaactagatgttcctagacattttctttatggttccaagtgcaaaacaggtgttcttatctaaaacgtcaattagaaaattatctgcggttgttaatctactgtatatttttgtttggtatatttactaagtgcactctttcaaaacttattctataactttatcaattcatgtgaattttagctcaattttcaaagttcactaatattctcaatatttaatgctaaatgctttgctacattgtaactcacctaaaaccttttagtgacaaaatcctaatatgtggaaaaaagcatatgcataaaggaataatattgtgaaaatgaatctgttatgataaagaaaaaataaagtggaaacttttagagtattacttcatagggcagattttgtaaactgtcgtatactgtaaagggttaaatcagcgttttgtgatttttaagtaactgtgagtgaagtttattcttcaacaatctcgtgcc

SEQ ID NO: 729643 - DNA, 1828 bp, Homo sapiens; identical to SEQ ID NO: 256697

SEQ ID NO: 729644 - DNA, 1543 bp, Homo sapiens
actgctctcctgcctagagataccactgagtccagaagcaagacctgtgagagtgcacagtgccacttcgccccatggctgaagatggtttgcccaaaatttattctcatcctccaacagaaagcagtaaaacaccaactgcagcaaccattttctttggggctgacaatgctattcccaaatcagaaacaactattacttcagaaggagaccacgtcacttcagtaaatgaatatatgctagaaagcgatttttcaacaactacagacaacaaactgacagctaaaaaggaaaaactcaaatcagaagatgatatggggaccgactttattaagtcaacaactcacctacagaaagaaattacctctctgactggcactacaaactccataacaagagactctattaccgaacatttcatgccagtgaaaattgggaatatttcatcaccagttactactgtttctttaatagatttttccactgacatagcaaaagaagatatcctcttagctaccattgacacaggagatgcagagatctcaataacctctgaagtctctggcacactaaaggacagcagtgctggtgttgctgacgctcctgcctttccacgtaaaaaggatgaagctgatatgagcaattataattcctccatcaaatccaatgtccctgctgatgaggctgtccaggtcactgattccactattcctgaggctgaaatccctcctgctcctgaagaaagcttcactactattccagacataactgcccttgaagaagagaaaataaccgaaattgacctaagtgttttagaagatgacaccagtgctgtggctacattaactgactctgatgagaagtttatcactgtgtttgaactcactacctctgctgaaaaagacaaagataaacgggaagatactctgctaactgatgaagaaactaccgagggagccagtatttggatggagagagatactgcaaatgaagcagagacccattctgttttgcttactgctgttgaatccagatatgacttcgttgtccctgcatcaatagctacaaacctagtggaagaatcatctacagaagaagatttgtctgaaactgataatacagagactgtacctaagatcactgagccattttctggaactacctctgtattagataccccagactataaggaagacacctccacaactgaaacggatatctttgaactactgaaagaagaacccgatgagttcatgatttaaaagcaacaaaagggataccatgtagaattgtgcaatagtctagccagctagccttaacatctaagaaatttttccaacaagcaaaaacctttagaaatgaaagaatgtgggcatttaaggtcttaaacactgaatatcacactcttcttatgactcttgttagcgattcaaggacataaatcttcattcttttctggcacagactacttaaatgggtctgttttcactttgctcatttttcttcaataaatctttttggcaagcaactgaaaaaaagtgtg

SEQ ID NO: 729645 - DNA, 472 bp, Homo sapiens
tgctcagatagagcagctgaggaggaaccacaaccaggccatccagtacttgcagcaggctcattctgtctgtgtttctttgttcactgaagtcagccccaaaactgcagaaatgagtgcgttactggccaaagcttatgccatgtctggagaggcccagcacagggatgctgttgagatatatttcataagaagtatcaatgcatatcgagcaacattgggctcagaggattttgaaacactgagcaccactgaagaattttgcaaatggcttgtccaaaatggagaaaaacaggacaagtagcagttcatccagatggagaagagaagccattcctggaagaaggaactctacatacaaaggcacagaagcatgacagagggcagtgtatggaggaatggtcttctgttatcaaattgaaaacctctatacaggatagccaacaataaagacaaccttgttgatgataaa

SEQ ID NO: 729646 - DNA, 157 bp, Homo sapiens; identical to SEQ ID NO: 464577

SEQ ID NO: 729647 - DNA, 883 bp, Homo sapiens; identical to SEQ ID NO: 257286

SEQ ID NO: 729648 - DNA, 686 bp, Homo sapiens
atatccccacccctctcaaaaaggaacagcaagaattttcagtgctgccacaagaaaatgcattgccaaactggaaggtcatgaaggtgaaatttcaaagatttctttcaaccctcaagggaaccatcttctaactggcagctctgacaaaacggctagaatctgggatgctcagactggccagtgcctccaggttcttgaggggcacactgatgaaatcttttcatgtgctttcaactataaaggcaacatagtcattacaggcagcaaggataatacctgtaggatatggcgttgactgaaggaagctggtcagtgagcaaccttgctagcaatggtaatcaagaactggaacttcacagacagcagctctcttaatatttcttatactttctctttttctgcaagtcaactatttctacaactgtccttcatttcacagatatgaccattaaacatgacaaagttatgccactccaatattattatttgatggcgatggcaggacacagcataatgtttggctaatgccaccagttatttcagttgtgtttgttttttaaaagcattatgatactgaaaaaggagaccagaacaacttaacaacgtgtctcctggattttactttgaagcctattgttataatttctgttgaataaagtgtttggaggaaattccttgtacat

SEQ ID NO: 729649 - DNA, 524 bp, Homo sapiens; identical to SEQ ID NO: 673042

SEQ ID NO: 729650 - DNA, 618 bp, Homo sapiens
cacatttattttcatagtttatgacattgacatacctgtgcataactctgtctcagcattttaaggccctggtggtgcacaggaagccgtgactaaaatgataggtacactgttcctaatacgggatataaaagactcaacaccacacctgacaaaagaagctgttgtcttaaagatgcatcttcctttaaagtaaatgaataacaaaggtaggccataaggagcttcttatctactttaagctcttggctggcttttccaggaagtttgaggagataaatcatgactcattttctgcagggtcagtggggaaactggagaggtggctgtccctgttcctgccggtgcctgaagctttcagtgttgttccatcacactctggctccatacctttcctcctgtcctccctccctgttggctggagtctaatgtgacacttcttccaaaacacagaaccgcctacattgtgtaaactgattcatgagccattgcgcccagccctccatctcatatttttagcctatttataggttctgcttacttatggcttcatcttcctcataagttttgcttgcttatgaccctcttgacctcacctctgcgttgtgtaaactgatt

SEQ ID NO: 729651 - DNA, 413 bp, Homo sapiens
  misc_feature (109)..(112): n is a, c, g, or t
  misc_feature (114)..(114): n is a, c, g, or t
  misc_feature (116)..(116): n is a, c, g, or t
  misc_feature (119)..(119): n is a, c, g, or t
  misc_feature (122)..(122): n is a, c, g, or t
  misc_feature (124)..(125): n is a, c, g, or t
gaatatgatactgtttaagagaaaatgaaaaggattacaagttttttatagtatttgactttgtgatgctctattatagcaatatttaatttagaaatctgatgaaaannnntntnganatncnncatctcttcacatttcgatgtatcatggcatgttagattttaatgttggcgagtgaggcttcttgaatcaaaaattacactggataaagtcaaacagacaaggaagactgtattcaaggccgctgcaataggggaaggaggccagaactaagtgtgaactcaactcctctgaaacaaaaggcagaagggtttttaagggccaggatgagctagtggaaaaatactgaaagatattatgtggggcagttaatcgggtgtgttgggcacacattatggaggggtaccgag

SEQ ID NO: 729652 - DNA, 278 bp, Homo sapiens
  misc_feature (109)..(112): n is a, c, g, or t
  misc_feature (114)..(114): n is a, c, g, or t
  misc_feature (116)..(116): n is a, c, g, or t
  misc_feature (119)..(119): n is a, c, g, or t
  misc_feature (122)..(122): n is a, c, g, or t
  misc_feature (124)..(125): n is a, c, g, or t
gaatatgatactgtttaagagaaaatgaaaaggattacaagttttttatagtatttgactttgtgatgctctattatagcaatatttaatttagaaatctgatgaaaannnntntnganatncnncatctcttcacatttcgatgtatcatggcatgttagattttaatgttggcgagtgaggcaggagaatggcgtgaacccgggagcggagcctgcagtgagccgagatcgcgccactgcactccagcctgggcgacagagcgagactccggctca

SEQ ID NO: 729653 - DNA, 837 bp, Homo sapiens; identical to SEQ ID NO: 265677

SEQ ID NO: 729654 - DNA, 538 bp, Homo sapiens; identical to SEQ ID NO: 728392

SEQ ID NO: 729655 - DNA, 566 bp, Homo sapiens
agaggctggatcttgctgactcatctggggtaccaaggacagacaaaggacatggagtccaggcccaggaggcgacaccaggccagcagtttcactgatgctcctgtcatgacgatgactgcctccctcctccccttggtccctgactcagtgtctgcagtgaccaggcaccaggcagggagcaaggaaccaagcctttcacctgctcccaccaactcctatggtgctccctttccaaggctaggtctcctctccacccagttccttatcacgtaccatgagaagctgtcaccttggcaactgtcaccttctggtgagatttacaattgcactgctacaactgcttgtggcatggtaaagttgcaccaggacctctgctgtccatgagatcaaagttccaggccaaggtgagcacccgcctccatcctagagaggattctgtgagaatcattgagagggagctactctctccaggcaatcacgggggtgagaaagaaaaaaaaaaagagagggagttactcatgtactgacttattcaatgaatgcttatgttgtaatacctacta

SEQ ID NO: 729656 - DNA, 593 bp, Homo sapiens
agaggctggatcttgctgactcatctggggtaccaaggacagacaaaggacatggagtccaggcccaggaggcgacaccaggccagcagtttcactgatgctcctgtcatgacgatgactgcctccctcctccccttggtccctgactcagtgtctgcagtgaccaggcaccaggcagggagcaaggaaccaagcctttcacctgctcccaccaactcctatggtgctccctttccaaggctaggtctcctctccacccagttccttatcacgtaccatgagaagctgtcaccttggcaactgtcaccttctggtgagatttacaattgcactgctacaactgcttgtggcatggtaaagttgcaccaggacctctgctgtccatgagatcaaagttccaggccaaggcaccaggggcacgaacagtgttgcccgcatggaactcacacttaatgggagcggcagccaacaggatgatacccggcaaattcttcaaagcagtgttctccaacttgaatgtttgtgatgtgggcgattctgactgagggggtctgtagaccacatcttgataaacaatgctttttaaaaaattc

SEQ ID NO: 729657 - DNA, 514 bp, Homo sapiens
tgttttgttttttaagcttctcacttcagtatctaccagacaggcttgtgcaaggagtgaactagtattgtatctgttaatttctttgcaggcaaaaatcaagttaccaggaaaatattttttaaaaaccacgaacagtctaagagcactgaacattttgaatcatttgccttttctcaacactggattttaagcaaggaacaagactattccagttctaaatgctttaatgaacaaggggtattgggttttagcatcaacatgatctatcctcactctgaagctttaacttgagtagctgctgtgctttgtaaagcttcaatccaattcatttgataactacaattaccaaatctgggcattgctgactacacagttcaaaaaaacagcatggagggaagacctgctgagaaccttagaatctatcgataagctcttgaaatggtttaaagtaataaaccacttcaattgaaagggcaataaaatgtttttcgtgtatatatgtaaaaaaaat

SEQ ID NO: 729658 - DNA, 1658 bp, Homo sapiens; identical to SEQ ID NO: 277528

SEQ ID NO: 729659 - DNA, 482 bp, Homo sapiens
gagagagaaactgatagtcccaatttagttcaggtgtgtgtacctgatctaaacatttttggtgaaaggatcagattatagggcagaaacatggatatggggaggggctccaggggttggggtatgcaattcttgtagaagagcggggctaaataatccaagagtggtgttcccttgagagccttgggttcttcatcatattatgagaataattctacttacctttcaggatgttattagagtcaaagtagataaggaaagtgaaaacattttttaaaatgtcaaaacatgcaaatgaagagtgttgtatacattcaagttccaccagccagacagtccctgatccaagcagtcagattccccttctaactcttcttccatgtcatatgggctgaaaattcagaaagtcctgggaacaaaaagattcaaggtctcttacagtggtgttctggttaacaagctctacaagatttaaaaaaaaa

SEQ ID NO: 729660 - DNA, 1093 bp, Homo sapiens
gggcaggaagtaccatcctctcatggcctccaaatgatgagagctagaagtacttcacaaacattgttagtggcctgatagagtcttagaagccttcacaaagcagacgatctttgagctgtgtctggaagtaagactgtgtctttcaggctgacaagagggggaaagccgagggagaaagtgtttatctgcaccactcagggctcattcgcttgagtcttacacggcttttgtggtcggagatgttcttgcagattgaaatgaaaactgcttcataagcacaaataatgttttcaatgatgtcagctgttcttcatgctttgggggtgattgagagaggcaagtaggtttgaacgagaagctaggggtgcagatatgcaggaaaatatatcagagaaatataaacataagcgttaagggcatctgtttagactgtttctcaagtttcttagtcctggaacagccaattccatggagcatgccaccaggagttgcaacttatagcctaggtggctcttgggaggtgaacgtctttgtggctatgtgagcagcatggaattgtctacgccttttgattggaatgcactcccccttggtgaaagggaatctatgtcttttttctacatgcagttatataacacttagaatcaccattctttcccataaggcttgtacataagccctaccttttgtccctaaggaaggagttggtgaaagtcggcctgtgagtaacattggaattaggcagtagaatttgaagaaatggtagcaacagacagccctctgctcccttaagtctttctttgcctgattattgaatttgtagtagatcaagggggatgccatgcagagaaagaccatcaatcctgggttttaggttcagggtcagttaccagcctcaggatcccggtcagttccgtgctctgtaaaaccgatacctgctttacctaccttccaaggttattttgaaaaggaagtaagattatgcatgtaataaatatcttatgaaagtaccttgaagcgttcaattatttcacaaatgcatggtggtggtgttattagtatttattaaactgatattgtgaaaaattgt

SEQ ID NO: 729661 - DNA, 411 bp, Homo sapiens; identical to SEQ ID NO: 461101

SEQ ID NO: 729662 - DNA, 1636 bp, Homo sapiens
actatgtcatgtgaaaagtagcttgatttggggtcactgctattcagtggaaaatttaaccttgggatggataatgcagcccaaatttgaactctgaaagactattcactggattggaagaccaatagataccaataaattaaaagtaattgctgtttatccttcatcaaaattaccattattctacaaggtggccctccagagttagtgaactgtgacctccacatgggatttggacatgcgtgccctacatctggaatgcagaaacactcttcacagaactctgatagcccaggaatatttatgtaaatctctgtcctggtaaggcacatgttgatgtacttgggcttaagctcataaaccaagaggaacagtttcctacatcccccttctaatgactaaagccaacgggctgagccaaatgggacaatttagacaaagagagactggcgaaaagcaaatgaatagtccttcccatgctactttcctactatctctgtgtttcctagaaccaaggtacacccctccccatggcctctcccactgccatcacattctaagcatatgtccagccctagggagctataagaccttgagtgtattggtgaaactctccaagtctcattttcctcatctggtgtcagaatacaatgcatttggtgacaagctgactggactcaaagagaagttgctgtgggatttctgcaagaccagagtcttagaggagacggtgcccaagtctaacttgttcactcttggaatgccaggcaccaaacatggtgcctggtccattgctggcaataaaagcagctttgagatcagcatggaggaagaaggaataggaagaagctgctctgaactccctccagaaacacctacatttacatccaaggcaccagctgttgagtttccctgacttgagaaatggcatcgctcttggccaacatctcccaaggagactaaatagaatattaatgtattagtagaatattaatattaatatattagtagaatattactaacagattagaatattaatattaatatattagtagaatattactaagtaatagattagtagaatattaatatatattagtagaaataatatattagtagcatattcatatattagtagaattaagcaaattgactggttttaaattctaatatatttgttaaagtttaatcatttaattgatagttatatctgataataagaaactcatctcttcattttatttaataacagaataaacagatcattaagcatatgaatttagaatagaggtgaatctaactgaaatattattggcatatgagtatttatggagtcttcatgttcttcactacctacctgcaaagttaaagtgtttatttgaggatgtagacatggagatccacacaaatacgtgaagagctatatattgaagacaacagccttcaatctttaaaccaagtacaaagctcttatatatttatagtataatatagctcctactatttcaatgtttatgtcgtatctcttccgtaagcgattggtgggtctgaaatccactttcactgagatacttggttgacgtcaatacaaatgagaacagtgcggaccgttctgcccttcccctgaaaacacaaa

SEQ ID NO: 729663 - DNA, 1143 bp, Homo sapiens
ataaaagcagctttgagatcagcatggaggaagaaggaataggaagaagctgctctgaactccctccagaaacacctacatttacatccaaggcaccagctgttgagtttccctgacttgagaaatggcatcgctcttggccaacatctcccaaggagactaaatagaatattaatgtattagtagaatattaatattaatatattagtagaatattactaacagattagaatattaatattaatatattagtagaatattactaagtaatagattagtagaatattaatatatattagtagaaataatatattagtagcatattcatatattagtagaattaagcaaattgactggttttaaattctaatatatttgttaaagtttaatcatttaattgatagttatatctgataataagaaactcatctcttcattttatttaataacagaataaacagatcattaagcatatgaatttagaatagaggtgaatctaactgaaatattattggcatatgagtatttatggagtcttcatgttcttcactacctacctgcaaagttaaagtgtttatttgaggatgtagacatggagatccacacaaatacgtgaagagctatatattgaagacaacagccttcaatctttaaaccaagtacaaagctcttatatatttatagtataatatagctcctactatttcaatgtttatgtcgtatctcttccgtaagcgattggtgggtctgaaatccactttcactgagatacttggttgacgtcaatacaaatgagaacagtgcggaccgttctgcccttcccctgaaaacacaaagtggagctttaaaacaggctctcacactggattttaggtggatttggattttaactccagttgtctatgagcaattaaaaaaaaacccacagcaggacgatttccaaggatattagaggatttaatgaacaaggatcgcatttaagggaagaggggtaacgaggagtaaaacgaaattttcctgctttttcctgtgagaagtatcattgtaattacccatgtatctaaattaaaattgcatattcatgttttgcattttcaattggccttgtataattaaaactgcatcacatttgatgaatttaaa

SEQ ID NO: 729664 - DNA, 661 bp, Homo sapiens
ggggcacttgtgaatttcaaagaataatgacaataaccaaaagaagctacatttgtggcattggctaaatgttttataaattttatctcttaaaattcaaaccaaaaaaccccctgtattcacacctgtaatcccagcactttgggaggtcaaggcgggaggattgcttgagcccaggagttagtgaccagcctgggcaacatagtgagaaccccatctctacaaaaaaatttaaaaattagtcgggtgcggtggtgcatgcctgtagtcccagctgcctgggaggctgagtgggaggatcgcttaggcctgggagtttgaggctacagtgagctgtgattgcgccactgcactctagtgtgggtgacagagaaagaccctatcttaagaaaaaaaaaagaaaagaaaaagaaaaaacaaacaaaaaaaacacccaaccctatataggtattattattacttctataggacacatagaggtttggaaagattaaatcacttgaccaaggtcacaaaataagttctgaggctgggatctgggattcagtcttattatatgcccttcctctaccactccctaaaacttctcattccctcaatccccatatatcatcttaaaatctgcaataaatagccccatacattcgttggcacttaggaa

SEQ ID NO: 729665 - DNA, 3796 bp, Homo sapiens; identical to SEQ ID NO: 248621
  misc_feature (18)..(18): n is a, c, g, or t

SEQ ID NO: 729666 - DNA, 829 bp, Homo sapiens; identical to SEQ ID NO: 248622
  misc_feature (18)..(18): n is a, c, g, or t

SEQ ID NO: 729667 - DNA, 529 bp, Homo sapiens
aaagtgttaatggacatgaaataaatgagaggaaagagaaaacaaaaccagttccaggatacaataatgatacagggaaaatttcaagcaaggtggagttggaaaagaactcaggcatgagaaccaaatatcgaacaaagaagggccacgtgacacgtaaacttacgtgtttgtgcattgcctactcttctaccattggtggactgacaacaatcactggtacctccaccaacttgatctttgcagagtatttcaatacattccatccacacagaagaggagatcgtacaaggcatgtacaccaggaggcagaaatttgaggcatatcttggaactctgtctaccacatcctgaacatcacacagtttccactcttgttgccttcaatcctgagaatgcatccaggagccattctgttttatgtcaattactaattagatcatgtcacgttactaacttactacgttccaattagtccttattgcatttgtaataaaatccgcatactttcggactggctacaaggtta

SEQ ID NO: 729668 - DNA, 679 bp, Homo sapiens
gctgacgctggggttcatgagcagcactgcctttttgtctatgtggctcagcaacacctcgacggctgccatggtgatgcccattgcggaggctgtagtgcagcagatcatcaatgcagaagcagaggtcgaggccactcagatgacttacttcaacggatcaaccaaccacggactagaaattgatgaaagtgttaatggacatgaaataaatgagaggaaagagaaaacaaaaccagttccaggatacaataatgatacagggaaaatttcaagcaaggtggagttggaaaagcactggaaacttgcagttcaagatggctccccatctccctctgtccattctgtatcgcagctagctgctcaaggaaaggagaaagtggaaggcatatgtacttagaaattattctattactttcctggatttaagagtattcagattttctatttcaacatcaaacaattgcatttttaaaaagaaatttatgtgttccatgtcaaatttagtagtgtgtggttgtttataatattttcttatatctacttaatttctatagtatttatagttatatgtctttatttctaacatttttcttgtgcttttaaagattatttaaagattatttttaaataatctttatttcatttaaataaaatattttatttaagtcttttttaa

SEQ ID NO: 729669 - DNA, 463 bp, Homo sapiens; identical to SEQ ID NO: 248625

SEQ ID NO: 729670 - DNA, 461 bp, Homo sapiens
ctcaaatgccctccccccaaactcctatcacctggaagcctctactaggcctgtgccccattccagggaaccctctgctcccatccagggccctcatttcaccccttccctgaagcctgtctgcggctgtccccacctccctccagccaggggagggtgctccctgaccagatggctccacctgtcactccctgtcactatggtggtccttcctcctctgaactctgggaccttgcagaggctgctcaacacctctgagctcgaatctctgctccaggggatgcaggttatgaagatgagagcgtgagacagcgagctgtaagggaagcaggttacccagggatggacagaggatgggccctggccctcatgttatgaagcttctccacgtggtgccttcctctgtcaaatgggcagaagaatatccttttgatagaattaaaatatacgaaaaccaaata

SEQ ID NO: 729671 - DNA, 374 bp, Homo sapiens; identical to SEQ ID NO: 401187

SEQ ID NO: 729672 - DNA, 623 bp, Homo sapiens
tgggcagggcccaggcatgagatcagagtcacaacatgtaggtgctgggccaagtgatatgtcacaatgcccactgtagacaggttccaggaagaaaaggagcatcacatcatctaggtgataaaccctgagatatctcacaatgacccctttgtgcagagatcacaaagaagaatcatataacctgtgtgctggatccagtggtatgaaagtcaacacctgtattttgggtctaagtacatgagacacaatggtggacaatctatactgagagcctcaattcttcctgtagacagtgtctcctcagtggagtaaaagcctcacggtgtgttgaatcttggtctgagagtcgccaacccactggtggaccggatccacttacaagagtcaatgttcaaactttcaactgtctccagctgtgagattcagaacctcaacagggatgcaggttatgaagatgagagcgtgagacagcgagctgtaagggaagcaggttacccagggatggacagaggatgggccctggccctcatgttatgaagcttctccacgtggtgccttcctctgtcaaatgggcagaagaatatccttttgatagaattaaaatatacgaaaaccaaata

SEQ ID NO: 729673 - DNA, 608 bp, Homo sapiens; identical to SEQ ID NO: 401189

SEQ ID NO: 729674 - DNA, 503 bp, Homo sapiens
catgtgcaacaaacggagatttcacagactgtatcaactgggagtcaatcatcttgagttgcagcgtacccgataccttaccaaatggacctgtcttgtggttcaagggaacagggccaaaccggaaattaatctacaatttcaaacaagagcagaatccaagacctcccaagaacagacctgcaggcagagcaggctccagggcccaccatgatgcccatacctgcctctcggccctgcctgagagaaacagcacaaactatttcgtccaaccctgctgctgcctccggctgctgggactcacaggcttgctgtcaaaataatccaaacagggaaggaacgtacaagtaaataacaaaagcccccatactcttctgactccctggagacagctactttttaggagtttcatttgccttcttcaagagagctttcttccactgacataaaatgccagcttgatcgtacaataaatctgtctatttacctgggtccaaaaaaaa

SEQ ID NO: 729675 - DNA, 521 bp, Homo sapiens
catgtgcaacaaacggagatttcacagactgtatcaactgggagtcaatcatcttgagttgcagcgtacccgataccttaccaaatggacctgtcttgtggttcaagggaacagggccaaaccggaaattaatctacaatttcaaacaaggtaactttcccagagtaaaagagattggagacaccaccaagcctggcaacacagacttttccacccgcatccgtgaaatctctcttgctgatgctggcacctattactgcgtgaagttcataaaaggaagagctatcaaggagtaccaatcaggtcggggcactcaggtgtttgttactgtctcttacagttctagaagccagaagtctgaaatctgcatctctggactgaaatcaaggcatcagcagaactgctccttctggaggttctaggagagagcatattccctttctcttttggcttctggtttgctgccagcatccctggcctgtcagcagcatagaataaatcttcaaggccagtgtcaaatc

SEQ ID NO: 729676 - DNA, 355 bp, Homo sapiens
aggcaagaactgtcttctctgctcggagcactgagtcgagggcatctccaggacaggcattcaggcagagcaagctccaggtttcaccacaatgcccatccctgcctccccactccacccacctctgccttccttactgctgtatctgctgcttgaactggcagtctcttacagttctagaagccagaagtctgaaatctgcatctctggactgaaatcaaggcatcagcagaactgctccttctggaggttctaggagagagcatattccctttctcttttggcttctggtttgctgccagcatccctggcctgtcagcagcatagaataaatcttcaaggccagtgtcaaatc

SEQ ID NO: 729677 - DNA, 533 bp, Homo sapiens
gtaactttcccagagtaaaagagattggagacaccaccaagcctggcaacacagacttttccacccgcatccgtgaaatctctcttgctgatgctggcacctattactgcgtgaagttcataaaaggaagagctatcaaggagtaccaatcaggtcggggcactcaggtgtttgttactgagcagaatccaagacctcccaagaacagacctgcaggcagagcaggctccagggcccaccatgatgcccatacctgcctctcggccctgcctgagagaaacagcacaaactatttcgtccaaccctgctgctgcctccggctgctgggactcacaggcttgctgtcaaaataatccaaacagggaaggaacgtacaagtaaataacaaaagcccccatactcttctgactccctggagacagctactttttaggagtttcatttgccttcttcaagagagctttcttccactgacataaaatgccagcttgatcgtacaataaatctgtctatttacctgggtccaaaaaaaa

SEQ ID NO: 729678 - DNA, 1955 bp, Homo sapiens
agctttggcactgcctgacaaggttctgctggaggacgccatgaagctcttcgactgcctgccaggcgcctctgagcctgagggtaccctgtgcgaggtccctgggccggccctgcctgacagcagtggtgggaactcagccgatgacatccgctcgctgtgcctgcccgaggagctgctgtcctttgactacagcgtgcctgagatcctggacaccgtgtccaacgttgactacttcttcaacttcaaggcgctcgacgaggagcagccgccccacccggggccccctgccaccaacaccccggcccccattctgtctggcaagagaaaggcctcgacggccaagaagggaaagccgggaaggaaggccaggcagccggcaggcccagccagcgccactcccccggggcccagggaggacctgggagccaccccgcattaaagcacatttgacctttcaaaaaaaaaaaaaaaaaaaaaaaaaaaaaaaaaaaacaaaaaaaccccgcagaggcctcataatgtgcggcgggggcgggaaacaagcggagaaaaggaaagcgggccaagtgggcaccaacagcggcggtccacgcggcccacacacattatcgtggtgcacaccaaggggggaaaacattcggcgcgggatccccccaatatagaggaagagagcgcgaatatataaaactcgcgagagaaaacgccgaggggtaacccgcggggatatcagaggaaccgcccggaaaaaaaaagacaagaccgacacacgaccacacacacgacgaccgacaaagacaaaaacccaaaaagaagacaagagacaaagaggacacaaaacaacacaaacctcaagaggacaaacaaaacaacagacggagagaaaaagagaaaacaaaacgaacaacaatacacacgaacaagcaacaagacacaccagcgacaccgcacaaagacacacccacagccacagaaaacaaaacagaaacacaaagaagggacccccgcaccacaaaacgaacacaacaccaccacagacaagcaccgaggaagaggagcgggagaggagagagagagggggaggcggcgggagacgcggaggcaaggagaagggacggaggcacagaagcagagagacaacgaagcgaacggcagagcacgacgcgcgagcggaggaggcgcaggaggcgcgcagggaggagagggacagacggcgggcggagggagcagagacggcagagagcacgcaagcaagaaggcgagagggaagagaggagagagagggaggaggaggcagagagacgcgaggagcgagagagggcggacgggcgccgggcgcagggggccggcagagcgcgacggcggagggcgagaggggaggcgcgggcaggcaggcggagcgacagcacaagagcacaaggcagcgcgagcggaagcagagaggcgacgccggacaggaagggagagaaggcgggggacaaaaccagccgggggagaacaggggggaggcaggaaagagcgcacaaggcaggcgcaagggcgagggagagaggcgcagggggggaagcaagggagagggagcgaaggagagaaaggaaggccgcccagcggcaaagaggacggcagacgaagcaacggagcgaaccaacaggcagacacgagcaggacgacgccaagcacgagaggaacagcaggcaggaagagcagcacaaacaacaagaacgaaagagaaggaggagcaaagggaggaggaagcggcaggggaacgcaaccaaagaaccgagaggagcgagacacgggacagaggaagcgaacgcagagcgagaagcgacccagacacaagagcgagccaacagaacaacgacgagcaaagcagacaacggacagacaaccaaagacagcaaggaaggcgagacacaggcaagcagcagagcgaaaagacacacaggacgacg

SEQ ID NO: 729679 - DNA, 4984 bp, Homo sapiens
  misc_feature (1091)..(1092): n is a, c, g, or t
  misc_feature (1095)..(1096): n is a, c, g, or t
  misc_feature (1104)..(1104): n is a, c, g, or t
  misc_feature (1109)..(1109): n is a, c, g, or t
  misc_feature (3874)..(3874): n is a, c, g, or t
  misc_feature (4509)..(4509): n is a, c, g, or t
gggcccggaggactctggagctacctctagctgcagcactgcctctggatggggacttccccatgctgtgggctgtggctccatagcgggcactggaagttcctctctctctgcacgtgcggcaagagctgaaaaaggagaaagggtcactgagcaggttttctgtgtctgagccccagagttcaatctctgctgaccagacccccactgaccagacccctgagcggtggtgttcagagtcccctaccaatggcccttctcagtccacagacctctccctcccctcatcagcacccacaggtgactgagagtcttctcgggactggaccccaactccaggacacagggaggggcagtttgtcccaggctccgggtgctgagcttcacgcttgtgccacaaggtcctctgggccatctcaaagggggcagtgatgtggcctcgcacatctggatgcactgtctgggcctattcctgagccacatagccagaggaacaggaagctgtttgtcaacccaggcaccccactctgctgggtctcccagggtccttcccatggaggccagatccagagacacagcacagaggcagcagggtgaccggcccagaacccttgagactaggctggggacgacaggaggactgtccccagacaaccagaagaccctttgctagtttcttgatacttcatttctcacctgctacccttactccaccagaaatccccttcatgcagagtcaatgaggagaggaagacggacacagaatctgtggaaagaaagaaaacaaaagatgggtggggagaagagttgggagtgtaacgttgtaagcgtcctacactatgcgtattatttgagggttgattaattaaaggtgtgccttgtagacaaccattacacacactataaataaattttatatatatatacatatatatatatacatatatatatatgtatatatatatatatggagagagagagagagagacagggtcttgctccgtcacccaggctgaagtgcagtggcccaaacacagctcactacagccttgacttcccaggctcaagcaatcctcccacctcagcctccnnaanngctgggantacangtgtgagccaccgcgacttgccagctctgtctagttgagaggtgcagtgcctctcctgtgggccggtgtgctgtgggacctcccgccctgccgccctgccgccctgccgctgcccgagggctcacccggctgtagtcctccacgtgctggagctgggtctcctggcagatgcacaggttcaggaagttctgccactccatcttcagggcctcctggtgggcctgggtaccgcagcacggagccctcggaccacgccccgcccccgcacccacgtccaccccccccttccccgcccaccacgtcccttctcactctcgccctgcccccagcgcacctggatgggccccaccgcggggtgccgcagctccaccatgcgcttgccgtcctcctccagctggtttacgctctgctcctggctcagcagctcgtgctgcttgaagtgctgggggcgagtcgggtggggagcggcggtgaggaccaggatggccctggtcgcccccgcctggccccaacctctgccagccgacctcgtattcccgccgcacgcccgcagggtcggccatgaggtcgctccagtcctgctgcaggatgcggcgctgctgctccgccagggcgctcagctgccacgtgcagccctgcagtgcgtgtacaggctgcccaggctctgcccgcgccacgacgccgccctctgtgctcaggacccgccgccagcagcagggtggggagagagaaagtggggggcaaaaggcgccattgggcggcgctcaggaacactggccccgggcagggtccgggcggccacccaggcccacctgcagccaccctgcccgaccctccctcctgctcaccagtaggtctcggtattggctccggatggtggcggcatcctgccttgaccaaggggagaaacaagcccgtgagaggtggggcacagggagacggccccctaagatctgggcaagccataccccacccacccctatccccagggcccagccgatctagctccggctctgactggaaaaacaggggctggggctggccccggatgtaacatcttcccggctcacccaccggccccaccaggctccgcagctgctctccttggtcgttgatctccttctgcacgatgttgagctccgcgatctgttcctccagctccgccatgcccggcccatactggcctgcgcagaccagcttctgcaggagagccggcggctcagtcaccacaggaccagggtggagagccagagaaccccacacgtctcccacccggagaagtggacttggtcatttgggcagagcgtggacgagcctgagagcagcccgggtgcacgccctgcagctcacccagggtgagccattctgctctgcagggtggccactgcagaggccattctgcagtggcccctgagtcccactggttcccagacgctgggctcagcctcagaagtctccagctccatcctgccttgtctgtgacccagcctcagtgcttcctgcctggacacctccagccaagctctagggccctcagaacgccctgctgcacccgggcccttccccactgttcctctattgtcatgatgacaccccttctgtgtggcatcaaagcacaactcctcaaccagggatcagaatgccccatgtcctggctctgcccacctggccagaaatccccacttcccatcgaatcctaggcttcctcctggcaggtgcctttgctccttctttctggaattgtcctctcctcactacttcaccctgacccaaccgagccctctcacccctctgaggtctcttcatgtgcctcctcctacaggaagtcttccctgactgcactgtctcctctgctgtctccctgcccagacccctgagacaccactatacactgactgttcaagcctacagtcaggccctgggttaaatgcagttccgtatcaccctctgatcacactggggtgtgactttgagctcctgacctgtttctgctccagcacgtgtgcccagtcgaccttggatcccacgtcggggcggcagcaccatcttctcgtacagggcacagtactccgcacactcctgggtcacccgctcgtgcagctgctcgatgctgtcaagaaggtggccagcaggtcagggctgggcctgggtcttccccagggacccccagccctgccgcagccccactcactccttctcagtctcctcagcctgcgggtgcttgagccgccgggccttgtccacgtccaggaagaggtccttgagcagcacctcggcctccttcaggctgctgcccgtctcctgctggtgctgcagggcctggctctgctcactgttcagccggtcctgtgggcaggggatgggcagacttgccagggtccagagcccccacacccctgctgcccatcattgtgggcctgagccccacctttgggaccccagctatgctggccaacctcgaggcccacgccaggcacagggtcaggcccagggcgtccatgaggcaggtgacaaagacacaggggagcccagcaaagaaggaagttgagccctctctcccaccgtgtgttaggggacaggcggtgcaggacaaatgtcatctgtcccatcttcaccatcaccagggggcactcagggagtgccaggcctgatgatgggcctcccatgccacccagcctgcccacaccctgccaactgctgccgggttctcacctgctgcagcctcttctgcgtctccaggatgtcccgctccacctggtcggcgntggcttgcatgtgggagatgagcagggtcagctcctgggtggcattcttggtgggtggaggggacagtgggcagctcggtggaagaggcccctctgtgccccatccaggtggcgtcccctgccctctctccaccccatcccgcccccacagcctagcacactgccctgactttggggtctctctctgcaggaggctctgtgagctagacctggttgggggtgttagcactgccccgccacatgaggggtcaaaaggtgagggtctcaggtctgtgtggtgctgggtgtcaggcggcctcggtgtcccagcctcagccagctgtgctggcagtgagttcccgaccccacccagctgcctgccacttcccccctgtgagccggtagtacctgagccagcctggctgggccctgggaggggcagttgggctggctggggcagggaggcagcagcatgccccccacccccacctcctcccactccagccctgtgttcccctatacctcctccaccccagggagctttgccagagtgctggcttcagcagccgtctagaggagcctcacactgtcagagtcggggagcgggggcaggcgcaagagactgctgggcaccctaacattctccagagttgagngttcaaagcccagattgtgccctaacttgctctgagttacgtggtcagggacggaggggaaaccttgcttccaccccagggctttttctgtgcattcgccctgcagcctccatagagcacctgctgtgtgcatgcagtcactctgtggaggtcacaaggccaagcagacctaaaagagggcagattggtccaagccttatgagcacagtgccttatgggggatcattatcctggggcaggggaagccttgaactgggtcaaaggatgggcccccccaggcaacgggacagtgctggtgaaggcacagcagtctggaagaactctgtggccaagacagcctggtttcatctttctccatcattaatgctgtgtgaccttgggcaagttactcaacctctctgtgcctgaggttcctcactcgtaaagcaggattttaataaaaatatctatgccttagggctattgtgagcattaa

SEQ ID NO: 729680 - DNA, 441 bp, Homo sapiens; identical to SEQ ID NO: 728394

SEQ ID NO: 729681 - DNA, 941 bp, Homo sapiens; identical to SEQ ID NO: 252598

SEQ ID NO: 729682 - DNA, 690 bp, Homo sapiens; identical to SEQ ID NO: 250865

SEQ ID NO: 729683 - DNA, 568 bp, Homo sapiens
tggtggctcaattttaaccccagcagccaatggaaaaatcacgacttctgagactttgggagtttccacagaggtgagagtcgggtgggaaggaaacaaaacaaaacaaaaacatcaaaccaatgaaataaaataaatcatgtctcctgctagaatagtattggatacctgactaaattacacaaaatagaccataataggatagcgctgtgaatacatccttcccgatcactgagtcacagtgacccttggctgctgctgttctcttctgcaaggttgaagcttgacgtgtgatgaacatgggtgggctcttggtccaccccaggctggggcctgcgccaagcatgaactagctgggaccagtggctgacagaacacaggacttccctaagtacccgtaggtctgtggagcaagacagagcagagttgccatgtcaacacatggggaatgatatgatagaaacaatctttatgactaaaagaaactcatcttcttcattaaaaaaactttggtgtccttaatctctctgaatttggctgtgtaataaacaactggaactgactcaca

SEQ ID NO: 729684 - DNA, 703 bp, Homo sapiens
tggtggctcaattttaaccccagcagccaatggaaaaatcacgacttctgagactttgggagtttccacagaggtgagagtcgggtgggaaggaagcagggaagagaaagcaggcccagctggagatttcctggtggctgtccttggccccaaagcagactcactaatcccaaacaactcagctgccatctggcctctctgaggactctgggtaccttaaagactataaaacaaaacaaaacaaaaacatcaaaccaatgaaataaaataaatcatgtctcctgctagaatagtattggatacctgactaaattacacaaaatagaccataataggatagcgctgtgaatacatccttcccgatcactgagtcacagtgacccttggctgctgctgttctcttctgcaaggttgaagcttgacgtgtgatgaacatgggtgggctcttggtccaccccaggctggggcctgcgccaagcatgaactagctgggaccagtggctgacagaacacaggacttccctaagtacccgtaggtctgtggagcaagacagagcagagttgccatgtcaacacatggggaatgatatgatagaaacaatctttatgactaaaagaaactcatcttcttcattaaaaaaactttggtgtccttaatctctctgaatttggctgtgtaataaacaactggaactgactcaca

SEQ ID NO: 729685 - DNA, 1166 bp, Homo sapiens; identical to SEQ ID NO: 250868

SEQ ID NO: 729686 - DNA, 508 bp, Homo sapiens
ccaaagcagactcactaatcccaaacaactcagctgccatctggcctctctgaggactctgggtaccttaaagactataaaacaaaacaaaacaaaaacatcaaaccaatgaaataaaataaatcatgtctcctgctagaatagtattggatacctgactaaattacacaaaatagaccataataggatagcgctgtgaatacatccttcccgatcactgagtcacagtgacccttggctgctgctgttctcttctgcaaggttgaagcttgacgtgtgatgaacatgggtgggctcttggtccaccccaggctggggcctgcgccaagcatgaactagctgggaccagtggctgacagaacacaggacttccctaagtacccgtaggtctgtggagcaagacagagcagagttgccatgtcaacacatggggaatgatatgatagaaacaatctttatgactaaaagaaactcatcttcttcattaaaaaaactttggtgtccttaa

SEQ ID NO: 729687 - DNA, 533 bp, Homo sapiens
gaagttacagcagcgcccaggcagcctgacagagatcattcaaggggggaaaggggaagtgggaggtgcaatttctcagattggtaaaaattaggctgggctggggaaattctcctccggaacagtttcaaattccctcgggtaagaaatctcctgtataaggttcaggagcaggaatttcactttttcatccaccaccctcccccttctctgtaggaaggcattggtggctcaattttaaccccagcagccaatggaaaaatcacgacttctgagactttgggagtttccacagaggtgagagtcgggtgggaaggaagcagggaagagaaagcaggcccagctggagatttcctggtggctgtccttggccccaaagcagactcactaatcccaaacaactcagctgccatctggcctctctgaggactctgggtaccttaaagactataaaacaaaacaaaacaaaaacatcaaaccaatgaaataaaataaatcatgtctcctgctagaatagtattggatacctgact

SEQ ID NO: 729688 - DNA, 837 bp, Homo sapiens
gcgccacaacttcactgccattttgtgaggtgccgccgtctctcctccagcaaggtcaggacttcaggactgaaacaatgaccgataaaacagagaaggtggctgtagatcctgaaactgtgtttaaacgtcccagggaatgtgacagtccttcgtatcagaaaaggcagaggatggccctgttggcaaggaaacaaggagcaggagacagccttattgcaggctctgccatgtccaaagcaaagaagcttatgacaggacatgctattccacccagccaattggattctcagattgatgacttcactggtttcagcaaagataggatgatgcagaaacctggtagcaatgcacctgtgggaggaaacgttaccagcagtttctctggagatgacctagaatgcagagaaacagcctcctctcccaaaagccaacaagaaattaatgctgatataaaacgtaaattagtgaaggaactccgatgcgttggacaaaaatatgaaaaaatcttcgaaatgcttgaaggagtgcaaggacctactgcagtcaggaaacgattttttgaatccatcatcaaggaagcagcaagatgtatgagacgagactttgttaagcaccttaagaagaaactgaaacgtatgatttgagaatacttgtccctggaggattatcacaccccaaatgcataatctcgttaatgattgaggagagaaaaggatcagattgctgttttctacaatggagcaggatattgctgaagtctcctggcatatgttaccgaatcaactggccttccagaggctaagaaatttctgttagtaaaagatgttctttttc

SEQ ID NO: 729689 - DNA, 783 bp, Homo sapiens
gcgccacaacttcactgccattttgtgaggtgccgccgtctctcctccagcaaggtcaggacttcaggactgaaacaatgaccgataaaacagagaaggtggctgtagatcctgaaactgtgtttaaacgtcccagggaatgtgacagtccttcgtatcagattgcaggctctgccatgtccaaagcaaagaagcttatgacaggacatgctattccacccagccaattggattctcagattgatgacttcactggtttcagcaaagataggatgatgcagaaacctggtagcaatgcacctgtgggaggaaacgttaccagcagtttctctggagatgacctagaatgcagagaaacagcctcctctcccaaaagccaacaagaaattaatgctgatataaaacgtaaattagtgaaggaactccgatgcgttggacaaaaatatgaaaaaatcttcgaaatgcttgaaggagtgcaaggacctactgcagtcaggaaacgattttttgaatccatcatcaaggaagcagcaagatgtatgagacgagactttgttaagcaccttaagaagaaactgaaacgtatgatttgagaatacttgtccctggaggattatcacaccccaaatgcataatctcgttaatgattgaggagagaaaaggatcagattgctgttttctacaatggagcaggatattgctgaagtctcctggcatatgttaccgaatcaactggccttccagaggctaagaaatttctgttagtaaaagatgttctttttc

SEQ ID NO: 729690 - DNA, 525 bp, Homo sapiens; identical to SEQ ID NO: 251791

SEQ ID NO: 729691 - DNA, 356 bp, Homo sapiens
ccgtctccctcttctaccgcaatgactccgcccacctgcccctgcctctcagcctccccgggtgcccggccccctgtccactaggccgcttctaccagctgactgccccggcccggcctcccgcccatggggtctcctgccatggcccctatgaggctgccatccccccagctccagtggtgcccctgctggccggagctgtagctgtgctggtggcactcagcttggggctggcctgctggcctggagaccagggtgcctgcggccttggggggccccgtgtgagccagaaaccagggcttccctacccccagctgacactggaccccaacatgtatgctcagtagctgctctgg

SEQ ID NO: 729692 - DNA, 2353 bp, Homo sapiens; identical to SEQ ID NO: 252569

SEQ ID NO: 729693 - DNA, 1358 bp, Homo sapiens; identical to SEQ ID NO: 253728
  misc_feature (4)..(4): n is a, c, g, or t
  misc_feature (6)..(8): n is a, c, g, or t

SEQ ID NO: 729694 - DNA, 516 bp, Homo sapiens; identical to SEQ ID NO: 253729
  misc_feature (4)..(4): n is a, c, g, or t
  misc_feature (6)..(8): n is a, c, g, or t

SEQ ID NO: 729695 - DNA, 748 bp, Homo sapiens
ggataaggagtggatgcctgtcacaaagctgggccgctttgtcaaggacatgaagatcaagtccctggaggagatctatgtcttctccctgcccattaaggaatcagagatcattgattcttcctgggggcctctctcaaggatgaggttttgaagattatgccagtgcagaagcagacccgtgtcggccagcgcaccaggttcaaggcatttgttgctatcggggactacaatggccacgtcggtctgggtgttaagtgctccaaggaggtggccaccgccaaccgtggggccatcatcctggccaagctctccatcgtccccgtgcgcagaggctactgggggaacaagatcagcaagccccacactgtcccttgcaaggtgacaggccgctgcggctctgtgctggtacgcctcatccctgcacccaggggcactggcatcgtctccgcacctgtgcctaagaagctgctcatgatggctggtatcgatgactgctacacctcagcccggggctgcactgccaccctgggcaacttcgccaaggccacctttgatgccatttctaagacctacagctacctgacccccgacctctggaaggagactgtattcaccaagtctccctatcaggagttcactgaccacctcgtcaagacccacaccagagtctccgtgcagcggactcaggctccagctgtggctacaacatagggtttttatacaagaaaaataaagtgaattaagc

SEQ ID NO: 729696 - DNA, 562 bp, Homo sapiens; identical to SEQ ID NO: 728395

SEQ ID NO: 729697 - DNA, 388 bp, Homo sapiens; identical to SEQ ID NO: 256671

SEQ ID NO: 729698 - DNA, 200 bp, Homo sapiens
ttccagccttggtgctgcccacagggtggattatgacatactgctaagccctgcactcaggttggattgtgacatacactttagcacagctcatggttgtgatgatgacacttacgccacaaaacagccaataggagagatactgccacttgtagctagacttacagaaatgaataaactcctgagtcttctgtagtaaa

SEQ ID NO: 729699 - DNA, 427 bp, Homo sapiens; identical to SEQ ID NO: 256673

SEQ ID NO: 729700 - DNA, 559 bp, Homo sapiens
cagcctggaagtccataggactgtgatgaagatgactgcttgcattttctgaatcactttgtcgatgagacatgcatcctattagatctaacaaagcttcacagaaaggttgttttgaagttgacactgaggaagatataagtgctctaggatcagtatgtgaggctgccacaaacatgctatagtctgcacattcttgcagagaggttgcagagtctgcttgggagagaagcctcaaaaacatggctggtgtcttggcagagtttgctctggcccccaggagggtgtacaaacagccttcatgagaaggtgacttgctggccactcttaaccactagaagaaactgatgccatggaactttgaaaaatcagaaagcaattccacaaaagaagaacctctgaagatagtagagcccaatgaagataaatgacatcgcccataggagggaacagtggtatcaacctaaaggggctcactgccctatgtgctggaggccaatactatgacaatgggtttttgagaaaataaaagctttgcattgagattcaacccctaaaa

SEQ ID NO: 729701 - DNA, 519 bp, Homo sapiens; identical to SEQ ID NO: 295139

SEQ ID NO: 729702 - DNA, 521 bp, Homo sapiens; identical to SEQ ID NO: 286531

SEQ ID NO: 729703 - DNA, 472 bp, Homo sapiens
cttattaactgtgtgttttcctcttcgagaacttgtatcgtcaataacgtcatcgtgaaccagactagcagtgtggatcatttctgcaattaaggctatggcgcggtggctggcttgcacatgtcaaattaacagacagcaatgctttttaacagacgccgcctagaaccttctcagcaatcagcttgtgaaaattggacatcggatcgggagttgttatgatggatattacatgctcgggccattagcaccccaataattggtcgaaaggcttttccttttccatcaaagtagtactcagacatttcctgaagttctgttgttgatatgagcagttcctttctaatgtcctcatacagacctttcaagtctctgcaaccgaatttgaaaggatcggtgatctgtatatttctcaccactgtgtgttttactgtccggggttgtgtgataaaaccgtgatatactgtataca

SEQ ID NO: 729704 - DNA, 502 bp, Homo sapiens
  misc_feature (42)..(43): n is a, c, g, or t
atcaaattagacgatgctgccatgttaattctccaaacgagnnacaaaagtgtatagagaacttgtatcgtcaataacgtcatcgtgaaccagactagcagtgtggatcatttctgcaattaaggctatggcgcggtggctggcttgcacatgtcaaattaacagacagcaatgctttttaacagacgccgcctagaaccttctcagcaatcagcttgtgaaaattggacatcggatcgggagttgttatgatggatattacatgctcgggccattagcaccccaataattggtcgaaaggcttttccttttccatcaaagtagtactcagacatttcctgaagttctgttgttgatatgagcagttcctttctaatgtcctcatacagacctttcaagtctctgcaaccgaatttgaaaggatcggtgatctgtatatttctcaccactgtgtgttttactgtccggggttgtgtgataaaaccgtgatatactgtataca

SEQ ID NO: 729705 - DNA, 388 bp, Homo sapiens
cttattaactgtgtgttttcctcttcgagaacttgtatcgtcaataacgtcatcgtgaaccagactagcagtgtggatcatttctgcaattaaggctatggcgcggtggctggcttgcacatgtcaaatttgttatgatggatattacatgctcgggccattagcaccccaataattggtcgaaaggcttttccttttccatcaaagtagtactcagacatttcctgaagttctgttgttgatatgagcagttcctttctaatgtcctcatacagacctttcaagtctctgcaaccgaatttgaaaggatcggtgatctgtatatttctcaccactgtgtgttttactgtccggggttgtgtgataaaaccgtgatatactgtataca

SEQ ID NO: 729706 - DNA, 480 bp, Homo sapiens; identical to SEQ ID NO: 263067

SEQ ID NO: 729707 - DNA, 444 bp, Homo sapiens
aggttaagcatgaatcgaggaaaggaaacagaaatcctcttcctagtcctctttcctctgttttctcctctgggtaccagaattgcgacagagtgggacagctcaggcagctgcaggtcttggccagtgctcttcctcacccaggccatgcagcatcaacacagtcaccgtagaactcctcttaagacaagcaaaggaactttccaacccagtactcagggagttttgagattttccaagatgccatcgaggaactgaaaagtgctgcccagctgcagtgagggctttttaaaggcagtttcatgtctacaccccactgagttcagactgtccaatgaagcactgacattgttacacatgcgtgttgtggacaacttgagaaaacacttgtctgcaggaagatgaaattaaaatcaagtgtgatcctaccaccgaaagataagt

SEQ ID NO: 729708 - DNA, 259 bp, Homo sapiens
aggttaagcatgaatcgaggaaaggaaacagaaatcctcttcctagtcctctttcctctgttttctcctctgggtaccagaattgcgacagagtgggacagctcaggcagctgcaggtcttggccagtgctcttcctcacccaggccatgcagcatcaacacagtcaccgtagaactcctcttaagacaagcaaaggaactttccaacccagttgagtgcacttttcccaagtgtgtggtaaaaagttaaatgacactt

SEQ ID NO: 729709 - DNA, 582 bp, Homo sapiens; identical to SEQ ID NO: 265123

SEQ ID NO: 729710 - DNA, 987 bp, Homo sapiens
attgtcaaaatatgtaactggaggattacagtatgcttacctctgattttatttctacagtgctgctataagtaacaatgagtaaatctactaaattatgtggtaagacttcttgtccaagaagcaatatattctgcaatctccttgacaaaattgttaaaagaccctccctacagtttttgggtcagtggggatatcactgttacgaaccaaggatttacagatcactggcaaaaattctgaggtatgtggacttggatggttttgacgcactactcacagattacattgcatttgtggaaaaatcaggataccgttttgaagtaagttttaacctcgacttcactgaaatatgtgtgaatacaattctgtactgggtttttgccagaaaaggtaatcctgactttgtggaattgcttctcaagaagacaaaagactatgttcaagacagaagttgtaacctggcactgatatggagctcagacaagacagtctaatatcttcaaaatactactgcaatatggaatcttagaaagagaaaaaaaccctatcaacattgtcttaacaatagtactctacccttcgagagtaagagtaatggttgatcgtgaattggctgacatccatgaagatgccaaaacatgtttggtactatgttccagagtgctttctgtcatttcagtcaaggaaataaagacacagctgagtttaggaagacatccaattatttcaaattggtttgattacattccttcaacaagatacaaagatccatgtgaactattacatctttgcagactaaccatcaggaatcaactattaaccaacaatatgctcccagatggaatattttcacttctaattcctgctcgtctacaaaactatctgaatttagaaatctaacatacgtcagtgtcctaagttccttaacaatgcttaccaatgtatggcttagaagttaataaaaattcacttcatgtaagtttt

SEQ ID NO: 729711 - DNA, 521 bp, Homo sapiens; identical to SEQ ID NO: 263755

SEQ ID NO: 729712 - DNA, 5803 bp, Homo sapiens
  misc_feature (4176)..(4176): n is a, c, g, or t
  misc_feature (4249)..(4249): n is a, c, g, or t
  misc_feature (4320)..(4320): n is a, c, g, or t
agcccagacactggggctccagtgtttgtcaccagggggcgccggaaggggcgcgccgggcggtcggcggcggccgttggcgagctgaggcctgccaggcgaagtctggagaccagccgggccgcggccgcaatggccaaggactcgcccagccccttgggcgcgtcgcccaagaagccgggctgctccagcccggcggcggcagtgctggagaaccagaggcgggagctggagaagctacgggcggagctggaggcggagcgggcaggctggcgggcggaacggcggcgcttcgctgcccgggagcgccagctgcgtgaggaggccgagcgggagcggcggcagctggctgaccgtctgcgctccaagtgggaggcacagcgcagccgggagttgcggcagctgcaagaggagatgcagcgggaacgcgaggccgagatccggcagctgctgcgctggaaggaggccgagcagcggcagctgcagcagctgctgcaccgggagcgcgatggcgtggtgcgccaagcccgggagctgcagcgccagctggccgaggagctggtgaaccgcggccactgtagccgcccgggggcgtccgaggtttccgcggcgcagtgccgctgtcgcctgcaggaagtgttggcgcagcttcgctggcagactgacggcgagcaggcggcgcgcatccgctatctgcaggcggcgctggaggtggagcgccagctcttcctcaagtacatcctggcgcacttccgcgggcacccggctttgtcgggatcaccggacccccaagctgtgcattccttggaagaaccgctgccccagacctccagcggctcttgccacgcccccaaacccgcctgccaactcggatctctagacagcctgagtgctgaagtcgacggcctgctctccacgcacgccagctcccttgattgcttcgcacctgcgtgttcccgctcgcttgacagcacccggagcctccccaaggcctccaaatccgaggagcggccctcctcaccagacacctccacccctggctcccggaggctctcgccgccaccatcgccactcccgccgccaccaccaccgtcagcccacaggaaactcagcaacccgcggggaggagaaggctctgagagccagccctgcgaagtcctgactccctcacccccgggcctgggccaccacgagctgataaagctgaactggctgctggccaaggcgttgtgggtgctggcgcgccgctgttataccctgcaagaggagaacaagcagctgcggcgtgcaggctgcccctaccaggcagacgagaaggtgaagcggctcaaggtaaagcgcgcggagctgaccgggctcgcgcggcgcctagctgaccgcgcccgcgagctgcaggagaccaacctccgggccgtgagcgcgcctatacccggcgagagttgcgccggcctggagctgtgccaagtctttgcccgccagcgcgctcgggacctgtcggagcaggcgagcgcgccgctggccaaggacaagcagatcgaagagctgcggcaggagtgccacctcctgcaggcgcgtgtcgcctcgggtccctgcagcgacctgcatactggaaggggcggcccctgcacccagtggctcaacgtcagagacttagaccgcctgcagcgcgagtcccagcgggaagtgctgcgcctgcagaggcagttgatgcttcagcagggcaacggtggcgcttggcccgaggcgggcggccagagcgcaacctgcgaggaggtgcgacggcagatgctggcgctggagcgcgagctggaccagcggcggcgcgagtgccaggagctgggcacgcaggcggccccggcgcggcgacgtggcgaggaggccgagacacagctgcaggcggcgctgctcaaaaacgcctggctggcggaggagaatgggcggctgcaggccaagaccgactgggtgcggaaggtggaggctgagaatagcgaagtgcgcggccacctgggccgcgcgtgtcaagagcgcgatgcctccggcttgatcgccgaacagctgctgcagcaggcggcgcgcgggcaggacaggcagcagcagctgcaacgcgacccgcagaaggccctgtgtgacctccatccttcctggaaggagatacaggcgctccagtgtcggcctggtcaccctcctgaacagccctgggagaccagtcaaatgccggagtcccaagttaaaggtagcagaaggcccaagttccacgcacggcctgaagactacgcagtgtcacagcccaacagagacatacaggagaaaagggaagcctccctcgaggagagcccagttgcccttggggagtcagccagtgtcccccaagtttcagagacagtccctgccagccaacctctgtccaagaaaaccagctcccagtcaaactcctcctctgaggggtcgatgtgggccaccgtgccgtcctcccctactctggacagggacacagccagtgaggtggatgacctggagcctgacagcgtgtccctggccctggaaatggggggctcggcggctcctgctgcccccaagctcaagatcttcatggctcagtataactacaacccatttgaggggcccaatgatcaccctgagggtgagctgcccctcacagctggggactacatatatatcttcggggacatggatgaggatggcttctatgagggggagcttgacgatggccggcgggggctggtgccctccaacttcgtggagcagattccggacagctacatcccaggctgcctgcctgccaaatcccctgatcttggccccagtcaactcccagcggggcaggatgaagctctggaggaagacagcttattatctgggaaagcccagggaatggtggacagagggctgtgccagatggtcagggtgggctccaagacagaagtagcaacagagatcctggataccaagacggaagcctgccagctgggcttgctgcagagcatggggaagcagggcctctccagaccccttctggggaccaaaggggtgctccgtatggctcccatgcagctacacctgcagaatgtcacagccacatcagccaacatcacctgggtctacagcagccaccgccacccccatgtggtatatcttgatgaccgagagcatgccctgaccccagcgggcgtgagctgctacaccttccagggcctgtgccccggcacgcactaccgggtgcgggtggaggtgcggctgccatgggacttgctgcaggtgtattggggaactatgtcctccaccgtcaccttcgacacactcttggcaggacctccctacccaccgctggatgtgctggtggagcgccatgcctcgccaggtgtcctggtggtcagctggctccctgtgaccattgactcagctgggtcctccaatggagtccaggtcaccggttatgctgtgtatgcagatgggcttaaggtttgtgaggtcgccgatgccactgctgggagcaccgtattggaattctcccagctacaggtgcccctcacgtggcagaaggtctcagtgagaaccatgtcactctgtggtgagtccctggattcagtgcctgctcagatccccgaggacttcttcatgtgtcaccgatggccagagactccaccctttagctacacttgtggcgacccatccacctacagagtcaccttccccgtctgcccccagaagctgtcactggctcctccgagtgccaaggccagcccccacaaccctggaagctgcggggagccccaggccaagttcctagaagcattctttgaagaacccccaaggaggcaatccccagtgtccaacctgggctcagaaggagaatgtccgagttcaggggctggcagccaagcccaggagcttgcagaggcctgggagggctgtagaaaggacctgctctttcagaagagtccccagaaccacaggccaccttcagtcagtgaccagcctggggagaaggaaaattgctaccagcacatgggcaccagcaaaagccctgctccaggattcatccatctacgcaccgagtgtgggcccaggaaagaaccgtgtcaggaaaaggctgcccttgagagggtacttcggcaaaagcaagatgcccaagggttcacacctccccagctgggngccagccaacagtatgcatctgacttccataacgttttgaaggaggagcaggaggcactgtgcttggatctgnggggcacagagaggcgagaggagaggagggagcctgagccccacagcaggcaaggacaagctctgggggtnaagagagggtgccagctccatgagcccagctcggcactgtgtccagctccatccgccaaagtcatcaagatgcccaggggtggcccccaacagctggggacgggggccaacactccagccagggtctttgtggccctctctgattacaaccccctggtgatgtctgccaacctcaaggctgcagaggaggagctggtcttccagaaaaggcagttgctaagagtgtggggctctcaggacacccatgatttctacctcagcgagtgcaacaggcaagtgggcaatatccccgggcgcctagtggctgagatggaggtggggacagagcagactgataggaggtggcgttctccggcccaagggcacctgccttctgtggcccacctcgaggactttcaggggctcaccatcccccagggttcctccctggtgctccaggggaactccaagagactcccactgtggactccaaagatcatgatagcagctctggactatgatcctggggatgggcaaatggggggccaggggaagggcaggctggcgctgagggcaggagacgtggtcatggtttacgggcccatggatgaccaaggattctattatggagagttgggcggccacaggggcctggttcctgcccacctgctggatcacatgtccctccatggacactgagcaagcatccttgcccaggtagtggcctctggctgctcacaccctgccagaggagaagcaagcgttcagaccctcacaccagcacccctcctcaccaccataagtagcatgtgctccaagtgccactgtgttaaactgatggtagtccttaagtgtcccctaggctctgaaagtagcaggacttaagcctgagttatttgcaaaagcaaacacaacaagccaacccctgagagtctgagaagccatttcaaagttgctgataactatggcaggtatacggagaagcgcctttttctgtggccaatgtgtgttttctctgggaggttaaggttatctgtccattgccttgtacgaaagtctcaagaaaagtctacatcttaaaaaagaaaaagcaatctgagtgttatttttgggatgtgagggtgatctggctgcgacatgtgtcaccccattgatcatcagggttgattcggctgatctggctgactaggcgggtatccccttcctcccgcaccactccatgtgcgtccctccagaagctgtgcgctcaatggaagaggatgaccatccccgatagaggacgatcggtcttcagtcaagagtataagagtagctgcgctcccctgctagaacctccaaacgagctctcagaatgttatttttctgtcttatgtccaacccctcattaaaatgttcatagaaaaaacatattttagaagttgaagcacaaccaaggaaacatgagcctggctttcctccctctcacttctgcgcactgggtccgcaagggctacagaaatgtttt

SEQ ID NO: 729713 - DNA, 4655 bp, Homo sapiens
  misc_feature (3275)..(3275): n is a, c, g, or t
  misc_feature (3348)..(3348): n is a, c, g, or t
  misc_feature (3419)..(3419): n is a, c, g, or t
acggcctgctctccacgcacgccagctcccttgattgcttcgcacctgcgtgttcccgctcgcttgacagcacccggagcctccccaaggcctccaaatccgaggagcggccctcctcaccagacacctccacccctggctcccggaggctctcgccgccaccatcgccactcccgccgccaccaccaccgtcagcccacaggaaactcagcaacccgcggggaggagaaggctctgagagccagccctgcgaagtcctgactccctcacccccgggcctgggccaccacgagctgataaagctgaactggctgctggccaaggcgttgtgggtgctggcgcgccgctgttataccctgcaagaggagaacaagcagctgcggcgtgcaggctgcccctaccaggcagacgagaaggtgaagcggctcaaggtaaagcgcgcggagctgaccgggctcgcgcggcgcctagctgaccgcgcccgcgagctgcaggagaccaacctccgggccgtgagcgcgcctatacccggcgagagttgcgccggcctggagctgtgccaagtctttgcccgccagcgcgctcgggacctgtcggagcaggcgagcgcgccgctggccaaggacaagcagatcgaagagctgcggcaggagtgccacctcctgcaggcgcgtgtcgcctcgggtccctgcagcgacctgcatactggaaggggcggcccctgcacccagtggctcaacgtcagagacttagaccgcctgcagcgcgagtcccagcgggaagtgctgcgcctgcagaggcagttgatgcttcagcagggcaacggtggcgcttggcccgaggcgggcggccagagcgcaacctgcgaggaggtgcgacggcagatgctggcgctggagcgcgagctggaccagcggcggcgcgagtgccaggagctgggcacgcaggcggccccggcgcggcgacgtggcgaggaggccgagacacagctgcaggcggcgctgctcaaaaacgcctggctggcggaggagaatgggcggctgcaggccaagaccgactgggtgcggaaggtggaggctgagaatagcgaagtgcgcggccacctgggccgcgcgtgtcaagagcgcgatgcctccggcttgatcgccgaacagctgctgcagcaggcggcgcgcgggcaggacaggcagcagcagctgcaacgcgacccgcagaaggccctgtgtgacctccatccttcctggaaggagatacaggcgctccagtgtcggcctggtcaccctcctgaacagccctgggagaccagtcaaatgccggagtcccaagttaaaggtagcagaaggcccaagttccacgcacggcctgaagactacgcagtgtcacagcccaacagagacatacaggagaaaagggaagcctccctcgaggagagcccagttgcccttggggagtcagccagtgtcccccaagtttcagagacagtccctgccagccaacctctgtccaagaaaaccagctcccagtcaaactcctcctctgaggggtcgatgtgggccaccgtgccgtcctcccctactctggacagggacacagccagtgaggtggatgacctggagcctgacagcgtgtccctggccctggaaatggggggctcggcggctcctgctgcccccaagctcaagatcttcatggctcagtataactacaacccatttgaggggcccaatgatcaccctgagggtgagctgcccctcacagctggggactacatatatatcttcggggacatggatgaggatggcttctatgagggggagcttgacgatggccggcgggggctggtgccctccaacttcgtggagcagattccggacagctacatcccaggctgcctgcctgccaaatcccctgatcttggccccagtcaactcccagcggggcaggatgaagctctggaggaagacagcttattatctgggaaagcccagggaatggtggacagagggctgtgccagatggtcagggtgggctccaagacagaagtagcaacagagatcctggataccaagacggaagcctgccagctgggcttgctgcagagcatggggaagcagggcctctccagaccccttctggggaccaaaggggtgctccgtatggctcccatgcagctacacctgcagaatgtcacagccacatcagccaacatcacctgggtctacagcagccaccgccacccccatgtggtatatcttgatgaccgagagcatgccctgaccccagcgggcgtgagctgctacaccttccagggcctgtgccccggcacgcactaccgggtgcgggtggaggtgcggctgccatgggacttgctgcaggtgtattggggaactatgtcctccaccgtcaccttcgacacactcttggcaggacctccctacccaccgctggatgtgctggtggagcgccatgcctcgccaggtgtcctggtggtcagctggctccctgtgaccattgactcagctgggtcctccaatggagtccaggtcaccggttatgctgtgtatgcagatgggcttaaggtttgtgaggtcgccgatgccactgctgggagcaccgtattggaattctcccagctacaggtgcccctcacgtggcagaaggtctcagtgagaaccatgtcactctgtggtgagtccctggattcagtgcctgctcagatccccgaggacttcttcatgtgtcaccgatggccagagactccaccctttagctacacttgtggcgacccatccacctacagagtcaccttccccgtctgcccccagaagctgtcactggctcctccgagtgccaaggccagcccccacaaccctggaagctgcggggagccccaggccaagttcctagaagcattctttgaagaacccccaaggaggcaatccccagtgtccaacctgggctcagaaggagaatgtccgagttcaggggctggcagccaagcccaggagcttgcagaggcctgggagggctgtagaaaggacctgctctttcagaagagtccccagaaccacaggccaccttcagtcagtgaccagcctggggagaaggaaaattgctaccagcacatgggcaccagcaaaagccctgctccaggattcatccatctacgcaccgagtgtgggcccaggaaagaaccgtgtcaggaaaaggctgcccttgagagggtacttcggcaaaagcaagatgcccaagggttcacacctccccagctgggngccagccaacagtatgcatctgacttccataacgttttgaaggaggagcaggaggcactgtgcttggatctgnggggcacagagaggcgagaggagaggagggagcctgagccccacagcaggcaaggacaagctctgggggtnaagagagggtgccagctccatgagcccagctcggcactgtgtccagctccatccgccaaagtcatcaagatgcccaggggtggcccccaacagctggggacgggggccaacactccagccagggtctttgtggccctctctgattacaaccccctggtgatgtctgccaacctcaaggctgcagaggaggagctggtcttccagaaaaggcagttgctaagagtgtggggctctcaggacacccatgatttctacctcagcgagtgcaacaggcaagtgggcaatatccccgggcgcctagtggctgagatggaggtggggacagagcagactgataggaggtggcgttctccggcccaagggcacctgccttctgtggcccacctcgaggactttcaggggctcaccatcccccagggttcctccctggtgctccaggggaactccaagagactcccactgtggactccaaagatcatgatagcagctctggactatgatcctggggatgggcaaatggggggccaggggaaggtagcatgtgctccaagtgccactgtgttaaactgatggtagtccttaagtgtcccctaggctctgaaagtagcaggacttaagcctgagttatttgcaaaagcaaacacaacaagccaacccctgagagtctgagaagccatttcaaagttgctgataactatggcaggtatacggagaagcgcctttttctgtggccaatgtgtgttttctctgggaggttaaggttatctgtccattgccttgtacgaaagtctcaagaaaagtctacatcttaaaaaagaaaaagcaatctgagtgttatttttgggatgtgagggtgatctggctgcgacatgtgtcaccccattgatcatcagggttgattcggctgatctggctgactaggcgggtatccccttcctcccgcaccactccatgtgcgtccctccagaagctgtgcgctcaatggaagaggatgaccatccccgatagaggacgatcggtcttcagtcaagagtataagagtagctgcgctcccctgctagaacctccaaacgagctctcagaatgttatttttctgtcttatgtccaacccctcattaaaatgttcatagaaaaaacatattttagaagttgaagcacaaccaaggaaacatgagcctggctttcctccctctcacttctgcgcactgggtccgcaagggctacagaaatgtttt

SEQ ID NO: 729714 - DNA, 1288 bp, Homo sapiens
ctccaggcggcccaggtctccgagcactcgggcctgcgcctgggtgctggcagccttgccgctcgctgtgccagtgcctggtgggccgttctggccatccagcatggtggactactacgaggtgctggacgtgccccggcaggcctcatccgaggccatcaagaaggcgtaccgcaagctggcgctcaagtggcaccccgacaaaaaccctgagaacaaggaggaagcggagaggagattcaagcaggtggccgaggcctacgaggtgttgtcggacgccaagaaacgcgatatctatgaccgctatggcgaggcgggggcggagggcggctgcacaggcggcaggcccttcgaggaccccttcgagtacgtcttcagcttccgcgacccagccgacgtcttcagggagttcttcggcggccaggacccattctcctttgacctcttgggaaacccgctggagaatattttgggggggtcagaggaactgctggggaagcagaagcagagcgtctgcaccccttttctctgccttcagtgaatttccagcttttgggggtgttttttcttcttttgatacaggatttcgttcctttggctccctgggaagtgggggcctttcttccttctgcatgtcctacggtagtgatgggacaggcagcttcaagtccatgtcgacttccactgaaatagttgatggtaaaaaaatcaccaccaagagaatcattgagaatggccaagaaagggtggaagtggaggaagatggagagttgagttaaagtccttcataataaacggcatagagcagttgctccccattgacaccaagtaattccagtccacatttgcctttaagcacatctggaggaatagcggactttttttaggattgaaagtgaactttactttcagaacagctgtacccaagaatttataaacactttatgccaacacctgttcttatcgttgggactacacggataggacctctgtttgtctttcaatcgttgtaaaatatctgtatgcaatttgctatttattaaacttaagcctgaggcagacaatgattatttgctagtggtaggacagaatgttcagttcagcactttgagcattacctttttccgttgggaaagtgtgagccaggtggtttgctctaaatcatttgactttattgtttagtgtgtagtggtgaaatctacaaataatatcaatacttctggcttaatttaatgatggttcaaaacaacatgcatttattatcttaatattttggaggtcagacatt

SEQ ID NO: 729715 - DNA, 1072 bp, Homo sapiens
ctccaggcggcccaggtctccgagcactcgggcctgcgcctgggtgctggcagccttgccgctcgctgtgccagtgcctggtgggccgttctggccatccagcatggtggactactacgaggtgctggacgtgccccggcaggcctcatccgaggccatcaagaaggcgtaccgcaagctggcgctcaagtggcaccccgacaaaaaccctgagaacaaggaggaagcggagaggagattcaagcaggtggccgaggcctacgaggtgttgtcggacgccaagaaacgcgatatctatgaccgctatggcgaggcgggggcggagggcggctgcacaggcggcaggcccttcgaggaccccttcgagatttcgttcctttggctccctgggaagtgggggcctttcttccttctgcatgtcctacggtagtgatgggacaggcagcttcaagtccatgtcgacttccactgaaatagttgatggtaaaaaaatcaccaccaagagaatcattgagaatggccaagaaagggtggaagtggaggaagatggagagttgagttaaagtccttcataataaacggcatagagcagttgctccccattgacaccaagtaattccagtccacatttgcctttaagcacatctggaggaatagcggactttttttaggattgaaagtgaactttactttcagaacagctgtacccaagaatttataaacactttatgccaacacctgttcttatcgttgggactacacggataggacctctgtttgtctttcaatcgttgtaaaatatctgtatgcaatttgctatttattaaacttaagcctgaggcagacaatgattatttgctagtggtaggacagaatgttcagttcagcactttgagcattacctttttccgttgggaaagtgtgagccaggtggtttgctctaaatcatttgactttattgtttagtgtgtagtggtgaaatctacaaataatatcaatacttctggcttaatttaatgatggttcaaaacaacatgcatttattatcttaatattttggaggtcagacatt

SEQ ID NO: 729716 - DNA, 485 bp, Homo sapiens
acacacacttcactccctggcttgccttgtatgggggtgagtatggaaccccgcagggactctgggctctccccacagagtcccatctagacctaaatgcagtcccaggtcccacaccccaacccccctccccccaccactgccacttccaaacccgccccgcagtctactgtgggaaggaggtggggtaggagggttctgagtgcctcccacacccagggcatgagctcagcagcctcagggttctggtgcttcctaggcctgactttacaatctctgcaggatctctcagtgagcatagctaccccaagcccctgagaatcgtgaatcccagagacagatgcctggagctgcttccagccctggggcaggcctcaaggggctacccactaggacccgtggccctccagggatgggaatgattgttttaatcacttttattttctaaatattaaagacattcttccttagtgaaggatatttgg

SEQ ID NO: 729717 - DNA, 609 bp, Homo sapiens
ttacttgtatagtccaagaagatatgcccactaaccctgctatcctagcagtgctggattcctctggcagaagttcctgctatcatcccaatggaaatgtctgggtatacatcaatatcttgggaggtcaatattcagatcaagccggcaacagaataagggcttggaattggtcaaattccatcacttcctcaccctttgtttcatttaaacctgtctttctggctttgaaccgttatattggagtccgcatcttagaacaagacaagatttctataacttttctagcaatgggccaacaggcaagaatcagtgttggaaccaaagtgaagctaccaaaccctgaggagattccaatcctccgatacgtaagtggagatgaccttcttctgctggccagtttaataaagatccgtcgcctgtttcataaacttgaaggatgtgtgaattttccctcaagccaggtttgggaaaaattaaagcaaccttcctacctttcttcactttctctaaaactaattgccctttgtcacagttctggtataaagcaagatataatgaagacaataagaaatataataaatgaagaaatttaactaagaaaaaaag

SEQ ID NO: 729718 - DNA, 1810 bp, Homo sapiens; identical to SEQ ID NO: 462386

SEQ ID NO: 729719 - DNA, 501 bp, Homo sapiens; identical to SEQ ID NO: 269278

SEQ ID NO: 729720 - DNA, 471 bp, Homo sapiens
ccagaaatggctttgctgccgaatgcattatcttgccattttcgtgtcccaatactgaacaaacgatcgcctgatcgatcggctgttgtccagctctaatgatgtcctagagcagaagtgtttcttctgatgtctcattttaacaagaggatgatgtctgtgtatgtctctgtgttttagagaggctggcaaatgctgctaagaggatctgaggttcacataaagaggatgaaaattctgaattactttcattgcaaataaaccttaacaattgtgagagttagagagcatacttttcacataagactttggtatgctgcctaaagctacttacataatttgctattcagagaaatgcatttgtttattgaggacccacccggacttaaattggaaaaatgtaacattcagatttttattttatatgtgaaataaatgtgtgattgctgttcttaaaaatttgaaaaaaaa

SEQ ID NO: 729721 - DNA, 460 bp, Homo sapiens
gtgagaaattctacactgaataagactggttgggactcaaagaagctacaaggatgcacttttccagcacaaacatgttctaggttggatgatcaaatgcatatgcctagcaattgaaatctccaactaggaacaaaaaactaatcacaaaaagcaaaggattcactttggtgttcacagtaggagcaacagcagcatcttgtttgcagttctggtagcagcagcagctgcaatggcttcagccatatcaaatatcctgtggcacagagggcttcgaggttaagagatacaaatttgcttaccgcatgaactttgcagtttgatttttactttgatttggtcaccttgctttctttgctcttgattgttttctagccctacttctgtgactacattaaataattctttagctaataataatccttccaataaattcactcttctgcttgaatgattcaca

SEQ ID NO: 729722 - DNA, 1003 bp, Homo sapiens
ccccaggacttctgctggaaccgctgggagttggaagctttcttcccactgaggggcaaaccttctaggtatctgaagatgttgaagaccatttcctggaacagcagaggtaaatgcccagaggatgagaacacatagccattaggagagcctgaaagttcagtgtgactgaaagatgaagttcaagagaagggacaaactgcaaaacacaagctggagagttttagagagactgtggaatggaatgactctccagagctgcagattgaaggcatattttcatctgactttggtgattatgtttccaatctctctgggaataagatctcaatggcgggaacaccttcatggcccctttatagctggtatgttttcttcttatggacaatgagaaacatgtaataaactgtgtttccttctcgctaggaaaccctgagttaaagctttacttccctctcaggaaccatcaaagagccataatctgtacaccctggtgcaacatttcccctggatttgatcccctttcaattgttttagccttattttacatttcttaaatctatttctctatgttgccatgtgtattatcaaatgctatttcagatgccaaccatgagctaaagcatatgttggaattattaagagaaacagagggatatacttatgtaaaataacacatataaatgcaatgctgattttttttccttaagaagtctttaacaattgcttcggaggaatctgcttttcactgaagcttcaatattttcagatcctttaataccaggtgtcaaacttattcactgggatgaattatagaaagttgcaccactttcttctgcctcatttattctcattgtaaatatgagaattttaaaaagtcttcctaattcttgctttatgatggattctatacaaacaattgaggtgctgttcactaaactactggaaacatggggaagtgagctaaggagataggaactatgaaatgacctgttttaagaaa

SEQ ID NO: 729723 - DNA, 971 bp, Homo sapiens
ccccaggacttctgctggaaccgctgggagttggaagctttcttcccactgaggggcaaaccttctaggtatctgaagatgttgaagaccatttcctggaacagcagaggtaaatgcccagaggatgagaacacatagccattaggagagcctgaaagttcagtgtgactgaaagatgaagttcaagagaagggacaaactgcaaaacacaagctggagagttttagagagactgtggaatggaatgactctccagagctgcagattgaaggcatattttcatctgactttgatctcaatggcgggaacaccttcatggcccctttatagctggtatgttttcttcttatggacaatgagaaacatgtaataaactgtgtttccttctcgctaggaaaccctgagttaaagctttacttccctctcaggaaccatcaaagagccataatctgtacaccctggtgcaacatttcccctggatttgatcccctttcaattgttttagccttattttacatttcttaaatctatttctctatgttgccatgtgtattatcaaatgctatttcagatgccaaccatgagctaaagcatatgttggaattattaagagaaacagagggatatacttatgtaaaataacacatataaatgcaatgctgattttttttccttaagaagtctttaacaattgcttcggaggaatctgcttttcactgaagcttcaatattttcagatcctttaataccaggtgtcaaacttattcactgggatgaattatagaaagttgcaccactttcttctgcctcatttattctcattgtaaatatgagaattttaaaaagtcttcctaattcttgctttatgatggattctatacaaacaattgaggtgctgttcactaaactactggaaacatggggaagtgagctaaggagataggaactatgaaatgacctgttttaagaaa

SEQ ID NO: 729724 - DNA, 906 bp, Homo sapiens
ccccaggacttctgctggaaccgctgggagttggaagctttcttcccactgaggggcaaaccttctaggtatctgaagatgttgaagaccatttcctggaacagcagaggtaaatgcccagaggatgagaacacatagccattaggagagcctgaaagttcagtgtgactgaaagatgaagttcaagagaagggacaaactgcaaaacacaagctggagagttttagatctcaatggcgggaacaccttcatggcccctttatagctggtatgttttcttcttatggacaatgagaaacatgtaataaactgtgtttccttctcgctaggaaaccctgagttaaagctttacttccctctcaggaaccatcaaagagccataatctgtacaccctggtgcaacatttcccctggatttgatcccctttcaattgttttagccttattttacatttcttaaatctatttctctatgttgccatgtgtattatcaaatgctatttcagatgccaaccatgagctaaagcatatgttggaattattaagagaaacagagggatatacttatgtaaaataacacatataaatgcaatgctgattttttttccttaagaagtctttaacaattgcttcggaggaatctgcttttcactgaagcttcaatattttcagatcctttaataccaggtgtcaaacttattcactgggatgaattatagaaagttgcaccactttcttctgcctcatttattctcattgtaaatatgagaattttaaaaagtcttcctaattcttgctttatgatggattctatacaaacaattgaggtgctgttcactaaactactggaaacatggggaagtgagctaaggagataggaactatgaaatgacctgttttaagaaa

SEQ ID NO: 729725 - DNA, 919 bp, Homo sapiens; identical to SEQ ID NO: 265686

SEQ ID NO: 729726 - DNA, 953 bp, Homo sapiens; identical to SEQ ID NO: 265685

SEQ ID NO: 729727 - DNA, 306 bp, Homo sapiens
agagactgtggaatggaatgactctccagagctgcagattgaaggcatattttcatctgactttggtgattatgtttccaatctctctgggaataagatctcaatggcgggaacaccttcatggcccctttatagctggatgatcatttcctgttctctccaccatggccacctggtccaagccaccatcttcatgcacctggatacctgccataacctcagctgacctttcctgtgtccattcttgttcctttgggcccagtctcctcgctcatagcagcagaatgagtctattaaaaagtgaaa

SEQ ID NO: 729728 - DNA, 952 bp, Homo sapiens
tttcttctccaattgttggggtaactggagtgaggagcctgaggggacccaaagatgttctcctggtaggattccctctcatggtcttctgcatttgtagacattttgattggttccatttctaagggccaattatctgtgctttaacctgaaataaggaacctgccttctgatcttcaaggatatgtacatggacacacatctttcagattcaactcttgagatttttggttttaaacaaacaattgtgttcatcacaaatgaagattccctcaagcagcagccgcctggaatcaactgctgagtccaaatcttgtagcccttaaaaatatttagtatttttactaagtaataagtatttagggtgttatgaaaaatgcaatttgaaaaagtacattggtttttaagaacaagaggaactatttagaaattatacaatatattaacaaaagtaaatatttaatatatctcaaacacaaaaatgcaaaaactggttaccaagcatcaagaaaaacttaaaacttgtaaaatacaaaggttaaatgtattttatcttcattctattattagcagataaccttaataaaaatgagctgttatttacagcaaaatatcatgtaattttagatttatcactttttatttctatggaaaagcaacaccagcatgtattgttgctgaaggtgaagcaactttttgattctgttctgttccactctgtgttctaagatgtgtgtcagataccggccacacaccctacatgtgctcggggcacagcctggccccacacagcactttagtctgcaggtgggcatctaaggccctgccattcccacttcttattgtcatatttacttagttctcagcacctctgcccatctttaaatgacttaagtgagagtatgttaaagtagcttacatgttcctaagcttcctcacagcacatcccatc

SEQ ID NO: 729729 - DNA, 472 bp, Homo sapiens
gccaagtcctggacagtctttaggccatgttggaactacatttggaaaggtggttgttaaacatttcccagcacacacctggatctgcatctgctgtgtcaattgaaccactcactggttctgtgacctcagttcttcgtagactctggaatggagctggaagctgtcatcctcagcacactaacgcaggaacagaaaaccaagcactgcatgttcccacttataagtgagagctgaacgagcagaacacatggacatatgaaggggaacaacacactctggggcctgtgaggtgcagggagagcatcaagaagaacagctaatgggtgctgggcttaatacctgggtgatgggttgatctgtgcggcaaaccaccatggcacacatttacctatgtaacaaaccttgacatcctgcacatgtaccccggaacttaaaaataaaagttgacaaaaagaaaacataacttact

SEQ ID NO: 729730 - DNA, 313 bp, Homo sapiens
ccatgttggaactacatttggaaaggtggttgttaaacatttcccagcacacacctggatctgcatctgctgtgtcaattgaaccactcactggttctgtgacctcagttcttcgtagactctggaatggagctggaagctgtcatcctcagcacactaacgcaggaacagaaaaccaagcactgcatgttcccacttataagtgagagctgaacgagcagaacacatttacctatgtaacaaaccttgacatcctgcacatgtaccccggaacttaaaaataaaagttgacaaaaagaaaacataacttact

SEQ ID NO: 729731 - DNA, 337 bp, Homo sapiens
aaacaaacattgacatcggccagattccactctcatatgacaatcaatgacagactttttcaatctgccaaaaactggactggaattgcaaacattcatttggccaccttggaggagaaactgaacaaatagcagcaaccccctcttccagaatgtgagagctccctccacctaagagctaaaagaagcaaatccttactagtaattaactattgcttctacaatgtattatgattcatcaaagcttttaatcatttatattttgcttacactattaataaaactacaatatgccctgagaacatagtaaattctagagaaatgcctatttaagatt

SEQ ID NO: 729732 - DNA, 966 bp, Homo sapiens
aaacaaacattgacatcggccagattccactctcatatgacaatcaatgacagactttttcaatctgccaaaaactggactggaattgcaaacattcatttggccaccttggaggagaaactgaacaaatagcagcaaccccctcttccagaatgtgagagctccctccacctaagagctaaaagaagcaaatgcaaagtttttcactggttttagagaaataatgctttagatataagcaagcatcacctatataattaggtgagccctgtgcccatgaatctagtcctttctacctctgatcacttgttcagtacagtcttatctgctaacttccctaaagtaatttatttaccaattacaatggaaaaacccaagacaatattctcagaagacttcagaacccaagttctcctcctttacacgctcagctactaagaaggctttcgtttccattaatccagtatttaactgaacaaatttttaagcccttatcaccaacataaaggtgcagtagaaagaaaatgagtataacacagttcccattaccatcaagcttatggttatgaagtgtgtatgggagagatgggagaaccatatcatatggtacactatgataagagtcacaggaccgcctgttcaggctcttcatctaaggagaaacatacgtgcagacagagcgacctacagtctgtgctacaacgacatcttccacgcatcctgagctcggtgttacttaccctacagtggaaatccaaatagtccaaatatcaaccagctgtttcagtgggtatgaaaaatgggacagataatccaaagcagccttactagtaattaactattgcttctacaatgtattatgattcatcaaagcttttaatcatttatattttgcttacactattaataaaactacaatatgccctgagaacatagtaaattctagagaaatgcctatttaagatt

SEQ ID NO: 729733 - DNA, 1158 bp, Homo sapiens; identical to SEQ ID NO: 264495

SEQ ID NO: 729734 - DNA, 392 bp, Homo sapiens
aagaatgctcctggggaagccccataggaaaacatcatggtgctgatgattccagattcagtattttagctctatcattcacaagtttggataaaattaatctagagaaagaattagaaaatgaaaatcataactaccatataggatttgaaagtagcattcctccaacaaattcatccttctcaagtgacttcatgccgaaagaagagaataaaaggagtggacatgtgaacattgtggaaccatctttgatgcttttgaaaggctctcttcaacccggaatgtgggaaagtacatggcagaagaatatagagtcaataggttgttccattcagctagtggaagtacctcaaagcagcaatacgagtctggcctctttttgcaacaaagta

SEQ ID NO: 729735 - DNA, 584 bp, Homo sapiens
agagatagctgcattctcatgtttattgaagtcctgttgaaatagccaaaatatggaatcaacctaagtgcccatcagtggatgaatggttaaagaaaatgtgattgatatgcaatggaatattattcagccataaaaaagaatgaaatcctggcggggcacagtggctcatgcaagtaatcccagcactgacctcatgaagacagagagtagattggtggttaccagaggttgagaaggggagaggagaggagggatgaagagaggttgattgatggatagaaatatacagtttgataatgataaatcagtagggtgactatagtttataataacctattgtatggttcaaaatagctaaaagagaataattgaaataacgtaagacaaaaatttaagatgatagatatcccaattacactgatttgatctttacaaattatatgaatgtattaaattattacatgtatccccaaaatatgtacaagtattttgtatcaataaaaaataaaatttaagataaagtaaatgtaatgattagcttatatttcctagatcggaaataaatatttacttaagtatgt

SEQ ID NO: 729736 - DNA, 635 bp, Homo sapiens
  misc_feature (93)..(93): n is a, c, g, or t
aacgggaccctgtggattagacatataccaagctcccacatggtcgactatcagccctacaggaagcacaaatactccagagtcacgccgcangagcaggcaaagctcgatgctcaactccgggacaaagagttttacaggcccatccctaaccccaaccccaagctaacagatgggtaccctgctttcaaaagaccccacatgactgccaaagacctgggactccccggcttcttcccatcacaggaacatgaggccacgagggaggacgagcgcaagttcaccagcacctgccatttcacatatccagcttcccacgatctgcacctggcccagggtgaccccaaccaggtcctccagagtgctgactttccgtgcctcgtggatcccaaacaccagcctgctgcagagatggccaaaggctacctgctactgccagggtgtccctgtcttcattgccatatagtcaaggtccccatcttgaaccggtggggacccttgatgccattttaccagtaggaaggatgaaaataccttccaaaggctcttccaagggcatgtggaaatcctatgaccttggagtgcagagaggagaactgaaaataaaactggaaagatgttccaactgcaaaaaa

SEQ ID NO: 729737 - DNA, 1080 bp, Homo sapiens
tcagttgctccacagctttgccactgtccctcagaccccacacatgccgcacttcctttcgttcctagccgaagaagcccccttgtcatttgctttatgtagtggatcccattgttttaatttggaattccccagtggtatatgtgctgagcatgttttcataggttttgttgccattggcatcatactttcttttggaaagatgccatattttctttggatgctctggtattcagttggtgacactggattctctccatcatggagggggtgggcctttgcttgggaaaacacaggctttctgcatgtgggttttcctctctatgatcgtgcttttgccggcactattatcccaacattgcctctgattaatgtgcttattgcacagaggacatgcgttgaaggactcaggcccagaggactcaccatactacacctagcttccctctcacccagaagcagctaacctgatgaaacaaatgccctggccttgggaagacttagctatatcctaattggagccaacacccagaaaaaaagaagcactgtcctaaagatagtagatgatttgaatcagcgtgtgatatggggtgctgatttttccaaagcttgaatatatgggtccaggaatcaaggaccaagtgggagtgttttctccactattacacaagatttctcacttacagaatttttatattcttcctctatcaagctctactacctttggttccaacggaaacatgcctgtaccagggccagcaccctcgaacagtgactgacaggagctggtatttatatattccagattcttctttggctggagacaaccctgaggtgtgtgtttcatgctatctgaaacccccgtgggattaaactcctgttgcatgtagtggtaacgagtttgataacacattctgcctacatttttttaatcttatttcctcctcctctactggtggttcctgaaactcttaaataaattgattagactcaaattcttgtcttgtgtctgcttctgggggaaatccagtctaagactgttgagcattttattgtgggtttttccaactttgcattccc

SEQ ID NO: 729738 - DNA, 2017 bp, Homo sapiens
ccccttatttttgggaattggccggatacaatttccaccggaaccgtttgaccggttccgattttacccgacccctatagaaatttgcccctgggccaaaaatttcgcacgaggggtttaaagggattttgggagaaccctgtcccatgataaggggaagttgaagtgtcctttggagtttcatgtgtgggccctttgggcatgtttaattgtctgaactcttcccgtgaattgccttcaaatttggtgtttatgcaaaaataatttagaagaccataaaaatccctgaagaaagtctgagaaagaggtgcaaggagagagggagaatttccagcttcatcaaaactgtgtgcagatggagcctctgcaggccacagctctttcctcagcagacatcatcctgcctgttacagaggaagtgggcactgccgggcagagccccagctcttctgcaccacgttcaagaaggcaggcaccacacaggcaacctcacgcctccttcggaagcagatggaggttttttttttttttttgcacaaggttactctaacctgtttgtcttcttggggtaacttgttcattcatatatgaattgtcacccattctatcaaacaaataaaatcaccatgacaattgctatttttaggcacattttaaagctataaatgagatcatgttagttaataaaaattatctcctcagttaaatgggtattaattacaatttccaaaattacagcaaactctgaaccctccttttagactggctggtaccatctgttctagctaggtattatactttacttagccattcccctgctgttggacatttaggacgtttctaatttgaaatttaacattgggtggttttccaagtatttatgtatatatgtattggtgctgattatgacgacgtcaaatttctctccgtctctgcctgccggcttcagctgcggcccctcctctcggaaggttcctcaggggttctcctgtccagttagaggttttggggtttcctccttacgctggtctcagcgacttcctgcggctcagaagcagcacaggctggacccaacccctgcctcggaaaaccactgtgctgatgcgccagcagagggccgagaggacagccgcgtcggaacccaggggcgacagttccctggggccaaggggagccatgtggagcccggcccaggcttggcgcccaggctcggccgggctgctgtgcgcgcggggagtccgggtgtccactggcccgagccagggtcccgctggcgggaggacgccccgcgagtggggtgggccgcgagcgggaggaacacgcacgtcccggggcggccggaggggccccgcttgcgcagggggttgtcagaagactcgcacgcggcaggaggcctggccgtgggtgcagagttcccaccttgcagcttcaggactgctgatcctgattatgctgtgcaaagggtgttcgttccacggtcacactgtctctatgaggcagcaacgtctaggagtgttatccccattgagggggcagataaaccaaggaaggaggagggcaggtgctggcccaagtcacacacagatgaaggcacacatggttctatcagtgcaaagagggcccactaagacccactctgcagggctgttgaggaaagccccatctgacaggcacccgacaaagctcctcacactccgtaaatgccacccatcatgaatgtggctatgattaaattgtgatgaggactgtgacccacaagactggaaaaccagtttggcaccttgatgcagatgttttcaaggactgggttagagaatacataccatcattctacttttagctgttttgtttcattaaaacctttttggttttaatgaaacaaaccataacatgtatgacaaccataacatgtatgacaacatagcatgacaaccataacaagtacaatattttggccaatttcatttaatttggcacatagaatggaagaaatattaagatattattttctacatga

SEQ ID NO: 729739 - DNA, 544 bp, Homo sapiens
cgcacagcccagacaaaaacaggacacagcagtgtgtgaatgagccgggctttctccttccctccacgtaatagaaggtgcctgaggttgttgaaacacagtccatttctcctgggaatgacaagaatttgagggatgctgactttcaaggaatactgcatgacaggcatcaagataaacctgatgaagaaaacataggccagaatctgggaatcgggagcaaagtaatacagcttcggggacaggcacgtaatgaggtcatgatgtaggagactccctgcaggactggcggcccctgttccctgggttgttctggctctttcagaacctgaccctggaacaggactgagcaggtgcctgtgtgcacagaagaccttgtgtgagtcctttggtaccacgtttgctgcacgaatgtctgagacacctcacagtcgcttggttcagcctctccctcctctctccgctggggaacatcatccctcatcactggaagaaattacaaggattgtgtaaacaattacaagtattctacaaacagtgagca

SEQ ID NO: 729740 - DNA, 1301 bp, Homo sapiens
agcggagaggcgcagagagagctgggagctaaggggtggcggcgaccggaagcgcagtgcacacccccatggcccgggctttggtccagctctgggccatatgcatgctgcgagtggcgctggctaccgtctatttccaagaggaatttctagacggagagcattggagaaaccgatggttgcagtccaccaatgactcccgatttgggcattttagactttcgtcgggcaagttttatggtcataaagagaaagataaaggtctgcaaaccactcagaatggccgattctatgccatctctgcacgcttcaaaccgttcagcaataaagggaaaactctggttattcagtacacagtaaaacatgagcagaagatggactgtggagggggctacattaaggtctttcctgcagacattgaccagaagaacctgaatggaaaatcgcaatactatattatgtttggacccgatatttgtggatttgatatcaagaaagttcatgttattttacatttcaagaataagtatcacgaaaacaagaaactgatcaggtgtaaggttgatggcttcacacacctgtacactctaattttaagaccagatctttcttatgatgtgaaaattgatggtcagtcaattgaatccggcagcatagagtacgactggaacttaacatcactcaagaaggaaacgtccccggcagaatcgaaggattgggaacagactaaagacaacaaagcccaggactgggagaagcattttctggacgccagcaccagcaagcagagcgactggaacggtgacctggatggggactggccagcgccgatgctccagaagcccccgtaccaggatggcctgaaaccagaaggtattcataaagacgtctggctccaccgtaagatgaagaataccgactatttgacgcagtatgacctctcagaatttgagaacattggtgccattggcctggagctttggcaggtgagatctggaaccatttttgataactttctgatcacagatgatgaagagtacgcagataattttggcaaggccacctggggcgaaaccaagggtccagaaagggagatggatgccatacaggccaaggaggaaatgaagaaggcccgcgaggaagaggaggaagagctgctgtcgggaaaaattaacaggcacgaacattacttcaatcaatttcacagaaggaatgaactttagtgatccccattggatataaggatgactggtaaaatctcattgctactttaatctatgtttcaaactcaaatgtctaca

SEQ ID NO: 729741 - DNA, 542 bp, Homo sapiens
agcggagaggcgcagagagagctgggagctaaggggtggcggcgaccggaagcgcagtgcacacccccatggcccgggctttggtccagctctgggccatatgcatgctgcgagtggcgctggctaccgtctatttccaagaggaatttctagacggagagcattggagaaaccgatggttgcagtccaccaatgactcccgatttgggcattttagactttcgtcgggcaagttttatggtcataaagagaaagataaaggacccgatatttgtggatttgatatcaagaaagttcatgttattttacatttcaagaataagtatcacgaaaacaagaaactgatcaggtgtaaggttgatggcttcacacacctgtacactctaattttaagaccagatctttcttatgatgtgaaaattgatggtcagtcaattgaatccggcagcatagagtacgactggaacttaacatcactcaagaaggaaacgtccccggcagaatcgaaggattgggaacagactaaagacaacaaagcccag

SEQ ID NO: 729742 - DNA, 490 bp, Homo sapiens; identical to SEQ ID NO: 728397

SEQ ID NO: 729743 - DNA, 438 bp, Homo sapiens
gctagcacactcctccccttcaccatgcgatgcccttcactaccttgcgactctacagcgagtcaccaccagcaatgagacgctcatcagatatggatcctcaaccttgaaatgctcatctccatactgctttgaaataatcattaaaactatacatttaacaagatcggagtcatatggtgcgcatctgccagcacagattgccacctttggacagatgaaaatactgaggcagagaaaagttaagtaagttccccaaagagaaatacacagctaagaagtgttagtttaacctgaccatgtggcagaaagccagatatgcaaagaaaaacatgggggaatggatcaagaatggtaaattgacatattattataaaagaatttaaatgaaaatttaagatgttttgtgtcaaataaatgaatgagagtcatcgtagg

SEQ ID NO: 729744 - DNA, 325 bp, Homo sapiens
attgccacctttggacagatgaaaatactgaggcagagaaaagttaagtaagttccccaaagagaaatacacagctaagaagtgttagtttaacctgaccatgtggcagaaagccagatatgcaaagaaaaacatgggggaatggatcaagaatgcaataatacaagaggacatcaccaagggaatgagcctagaccaagaaaggtactacaaactgggtctgaagcactgtgaacagggtggaagaagagcaaaacataaaacctgtttcagagaatgagtgacaagttttgttgggtcaaatacagcgactgctcatgtataa

SEQ ID NO: 729745 - DNA, 605 bp, Homo sapiens
aggtgtgctagggaataaatgaaatgcctgggacatcatcgttaagtggcatctgatgcataagcagtgccctaggaatggggttgcctgccttggtctctaaaggatgggttcaaaaggcaagagcagcacacaagaagatagcttcaagcaggagaaaaagcttggcccagggcccaaaggggatacgacccttcagcaaactgacatgctgaaagctgccctatggagaggctcatgtggcaaggaacagagggtggcttctggccaacacccagtgaggaactcaggccctcagtcaaacagcctgcaaggaactgaaccctgccaataaccctgggttgaaagcttccctttggagaagaactgagggctgtctctggtcaatagcactgaggaactgaatccagcaaacaattatgtgaagaaacttggaagcttgtcctcccctctagttgagctttgagatgactgccgccctagtggacaccttgattgaagccttatgagaaaccctaagccagagaacccaattaagctacgcttacattcctaacacagagaaaatatgagctaataaatgttgtttcaaaccactaaaaatt

SEQ ID NO: 729746 - DNA, 551 bp, Homo sapiens
aggtgtgctagggaataaatgaaatgcctgggacatcatcgttaagtggcatctgatgcataagcagtgccctaggaatggggttgcctgccttggtctctaaaggatgggttcaaaaggcaagagcagcacacaagaagatagcttcaagcaggagaaaaagcttggcccagggcccaaaggggatacgacccttcagcaaactgacatgctgaaagctgccctatggagaggctcatgtggcaaggaacagagggtggcttctggccaacacccagtgaggaactcaggccctcagtcaaacagcctgcaaggaactgaaccctgccaataacccactgaggaactgaatccagcaaacaattatgtgaagaaacttggaagcttgtcctcccctctagttgagctttgagatgactgccgccctagtggacaccttgattgaagccttatgagaaaccctaagccagagaacccaattaagctacgcttacattcctaacacagagaaaatatgagctaataaatgttgtttcaaaccactaaaaatt

SEQ ID NO: 729747 - DNA, 581 bp, Homo sapiens
aggtgtgctagggaataaatgaaatgcctgggacatcatcgttaagtggcatctgatgcataagcagtgccctaggaatggggttgcctgccttggtctctaaaggatgggttcaaaaggcaagagcagcacacaagaagatagcttcaagcaggagaaaaagcttggcccagggcccaaaggggatacgacccttcagcaaactgacatgctgaaagctgccctatggagaggctcatgtggcaaggaacagagggtggcttctggccaacacccagtgaggaactcaggccctcagtcaaacagcctgcaaggaactgaaccctgccaataaccgctgagctctgaaacttctcctggcagttcaagagagcgatggagggaatgctggggcacatctaaataaagcctccaagtgggagttcctgctcagctatgcatgagctctttgtgacttcatctcccagcctacaacttgtgaaataagcacgacttcactcagagcacagccagaaacatacaaactttccaaaaatatttgaatgttgacagcaaaatgtcttgcattccagtgaataatt

SEQ ID NO: 729748 - DNA, 472 bp, Homo sapiens; identical to SEQ ID NO: 348797

SEQ ID NO: 729749 - DNA, 569 bp, Homo sapiens; identical to SEQ ID NO: 348798

SEQ ID NO: 729750 - DNA, 728 bp, Homo sapiens; identical to SEQ ID NO: 348794

SEQ ID NO: 729751 - DNA, 650 bp, Homo sapiens
gcagtgtcagcccccggccaatgaccaccatggacctccctgtagttgaacaaagttgggtttgctgactggtggcagtgagggagaatgcacaccacagggagctgtgcagtgtctcagtaagaagccaggagccatcccgtgaggccgttactgcaaacaagctgaaaatcctgctttgtttcttttggacacaacatgctttccttcagcttcagtagacgatgaggccagcaccacatgggctagatgtacatgagatgtgagcaaccacacttcccctctgacggggacagacagcatcacagtatcctgttgggacagacagatgaagaaccagagaccagagagtttaagtagcttgccaaaggtcacacagcagtgtaagcagtacgggtgattcttaagcccacattgtttgacttccgagacatatcagaaaactacgtcaaagaacacgcacaactcagacctatttccagtggcctatgcagaagagctaccctgcttgaatggaaaccccttaagatacactattctcaaaaacctaagtgcttagcctggcttatggaggaggcaatgcaatctaccacaagatgattaagacaacaatgaacttaagtcccagccactgctggagaatatcaaaa

SEQ ID NO: 729752 - DNA, 426 bp, Homo sapiens
ccaggagccatcccgtgaggccgttactgcaaacaagctgaaaatcctgctttgtttcttttggacacaacatgctttccttcagcttcagtagacgatgaggccagcaccacatgggctagatgtacatgagatgtgagcaaccacacttcccctctgacggggacagacagcatcacaggctgagctctgaaacttctcctggcagttcaagagagcgatggagggaatgctggggcacatctaaataaagcctccaagtgggagttcctgctcagctatgcatgagctctttgtgacttcatctcccagcctacaacttgtgaaataagcacgacttcactcagagcacagccagaaacatacaaactttccaaaaatatttgaatgttgacagcaaaatgtcttgcattccagtgaataatt

SEQ ID NO: 729753 - DNA, 998 bp, Homo sapiens; identical to SEQ ID NO: 348802

SEQ ID NO: 729754 - DNA, 469 bp, Homo sapiens; identical to SEQ ID NO: 348801

SEQ ID NO: 729755 - DNA, 1455 bp, Homo sapiens
tggtgactcctggtctccatgtcatctgccagaaaggccacctgcgccagcacctcctgagaccggccttcaaagacacgacgcatgccgctctgccgtccggagcacttaatgcctagagccagcagggtcccagtggccgcgtcactgcctctgagccacgcggtcattccaactcaactgccctcgcgttctggccacaggccccctgggagaccccggagatgcccaaaggcctcatgcctgccgcctccagtgggacctagcagcacacagacagcgaagcgggtgaccatggggtggccacggccgggccaagccctcgtggcagtcaaagccttgctggtcttgtcgctgctccaggtgcccgcgcaggcggtggtacgggccgtgctggaagacaactcgagctcggtggactttgcggatctgccggcgctgttcggcgtccccctggcccccgagggcatacggggctacctgatggaggtcaagccagccaacgcgtgccatcccatcgaggccccgcgactgggcaaccgctctctgggctccatcgcgctgatccgccactacgactgcaccttcgacctcaaggtgctgaacgcccagcgcgccggcttcgaggcggccatcgtgcacaacgtccactccgacgacctcgtgagcatgacccacgtctacgaggacttgagggggccagatcgccatcccctcagtgttcgtgagcgaggccgctcgcaggacctgcgggtcatcctgggctgcaacaagtcggcccacgcgctgctcctgcccgacgacccaccgtgccacgacctgggctgtcaccccgtgctgaccgtgtcctgggtgctgggctgtaccctggccctggtcgtatcagccttctttgtcctgaaccacctgtggctctgggcccaggcctgctgcagccacagacggccggtgaagacgtctacctgccagaaggcccaggtccgcaccttcacgtggcacaacgacctgtgtgccatctgcctggatgagtatgaggagggcgaccaactcaagatcctgccctgctcccacacctaccactgcaaatgcattgacccctggttctcccaagccccccggcgctcctgccccgtgtgcaaacagtcggtggccgccacagaagacagctttgactccaccacctacagcttcagggacgaggacccctccctaccgggccaccggccccccatttgggccattcaagtccagctacgctcccggaggctggagctgctgggccgcgccagtccccactgccactgcagcaccacgtccctggaggcagagtataccactgtctcctcagcccctcctgaggcccctggtcagtaaagatctagggcagggaggggggtgcaatgaggaatgtttctggtctgaaaagaataaagtgggtttgaaagcggaaactca

SEQ ID NO: 729756 - DNA, 353 bp, Homo sapiens
cctctcagcattctccttgggaggtcacaggcgccggtctcatcaggtgagaaggacaaaagcagccctggccgccgtcagctgagagctggcccgtgctactcagccagggcgttgaacacgccaggggatgccacaatcagatgcgcgtgctcagtgacccaaggagctgaggccaaagggagatcttccgcagtcaaagctgagtgcatatcagaacactgcacacagcacagaaatgaccagctttccccctcccagctaacagggcttgtctgctccaaatttagccctgctccactcttgctacctactagataaaaattattaaaatatccaactattaaactacc

SEQ ID NO: 729757 - DNA, 512 bp, Homo sapiens
tccaggaagagcgaccaggccttgagaggacatggccttaggaccagatccagggaagacacagtcactaacccctggctcatctggcaggtgtgggaagcagccaggcccgtggcttcaccagctccccccgatctctgccttcagctgtcctgcagcctgggtcaggcacctaggcagctttatggcaggcggagatgcaccacccacatcctctttccaggcagggcttgctgccctggctgtagcgagtgcggcagcaggtggcctccagctatcagcaacttcagagagctgccttgcctgaggtcccgtcccttctggggaagctcccatctgccagggggctacaaaagcacagtggacaccatgatgggcaattctggctgatgggagcaccacctggtggctgaggcattcttgggccacatagcagttgactgccctctccaccatcttttcacaagtgttaatcccaataaacacccatcctcttccatcccaaaaagtct

SEQ ID NO: 729758 - DNA, 598 bp, Homo sapiens
tactgatattgcagaaagaagatagttatacaagggtggcactgaacacacaagaaacaaatgattcacggtagcattagaggcaccagcaaaggacacacttttagagaaaggaatctgctcccctgtggctctccaaatcacactccttaggcaccacatctacagggaagacccaggtagagactgtgaggatctcaatggcctggtgggccacaagatcacttctgcttccggctggaatgctccttctccacagagtccggaaactgacatatgcagccacccacccagaaggacatgtccaagaaggaatggaaagaaaaatgatggcccagatgttctgtagcttgcagtgactgccaattcaccacagaccccagtacctgggagggcaaggcagcatcaggctcttgcttcctggtttcaggcagccagggccctgatggtgggtggcaactctgacagaatgcagactggccaggggagaaacctttagaagggcactggctgacgggacttgggggttgaacacacagcgctgatttatcacttccttactcataaaaatgtgattcgaactgctaaaaaaaatgaa

SEQ ID NO: 729759 - DNA, 1757 bp, Homo sapiens
gttgcgacggacgggtaggggaggcgaccccggcgttctgctccgcactgtggaggaggtggggaggtgttgggccagggctgaggtaggagggagtctgtccctcgacgcctcctgcgacgccagcccctgagcgatgatgcgaacgtgcgtcctactctccgcggtgctctggtgcctcacaggagacaaaatatatgtagagttacatcaaaatagtccagtccttatctgtatggattttaagctttctaaaaaagaaatagtggaccccacctacttatggattgggcctaatgaaaagacgttaacaggaaataatagaataaatataactgaaactggacagctgatggtgaaagattttttggagcctttgtctggactttacacatgtactctttcttataagactgttaaagcagaaactcaagaagaaaaaacagtcaaaaagagatatgactttatggtctttgcctatcgggaacctgattattcatatcagatggctgtacgttttaccacaaggtcttgtatagggagatacaatgatgtattctttagagtgctgaagaaaatcttggatagtctaatttctgatttgtcatgccatgtcatagagccatcatataaatgccattctgttgaaattccagaacatggcctcatacatgagctatttatagcatttcaagttaatccttttgcgccggggtggaaaggtgcttgcaatggatctgttgactgtgaagataccactaatcataatatcctccaggtgagaatttcatgccaagcatatattttctaccataactttaataaaactctaccagcaatgcattttgtggaccacagtttgcaagtagtacgtctggatagctgtcgaccaggctttggaaaaaatgaacgtctacacagtaattgcgctagctgttgtgtggtttgtagtcctgcgacttttagtcctgatgttaatgtaacttgtcagacctgcgtttccgtccttacctatggagctaaatcttgcccacaaacttcaaacaaaaatcagcaatatgaagattagaggtgaaagcattgttacttacttgtggaagtcggggacataagatgattttcacatcccagagcatcatagatagttccattaagtaaaatcagtaagaccaaaccactggaaaacatgcattttggaaactttaaaataaatggttaacatggcatttctaagaaggcatttaatccagtatctctagtgtacaaaggaaacttgaagttttaatggattatttttaatgaaatgttttattgtttacaaacggtatgttgctgtgtacctaagagtatagtaaggtcaagaagagtatcaaagtataataaaataaaaattgtatactctccatatatttatttgtttggaatcactctttgtgtgatataaaggcgtgtatattatctttgtattagaaccaaaaaagttatttattttggtccctatgattttattttttaagataaattaatatactgtattttttaaagtataggtttaggtttacagaataatagagcagataatatatagagttccatacacccactgcaccccataccctcattcctccttacacaatttctcctattattaagatggtgcattagtgtggcacatttgttacaaatgatgaaccaatattaatttattattaattatagcccatagttcacattaagattcattgtgttgtaaggtt

SEQ ID NO: 729760 - DNA, 615 bp, Homo sapiens
ccaagcatatattttctaccataactttaataaaactctaccagcaatgcattttgtggaccacagtttgcaagtagtacgtctggatagctgtcgaccaggctttggaaaaaatgaacgtctacacagtaattgcgctagctgttgtgtggtttgtagtcctgcgacttttagtcctgatgttaatgtaacttgtcagacctgcgtttccgtccttacctatggagctaaatcttgcccacaaacttcaaacaaaaatcagcaatatgaagattagaggtgaaagcattgttacttacttgtggaagtcggggacataagatgattttcacatcccagagcatcatagatagttccattaagtaaaatcagtaagaccaaaccactggaaaacatgcattttggaaactttaaaataaatggttaacatggcatttctaagaaggcatttaatccagtatctctagtgtacaaaggaaacttgaagttttaatggattatttttaatgaaatgttttattgtttacaaacggtatgttgctgtgtacctaagagtatagtaaggtcaagaagagtatcaaagtataataaaataaaaattgtatactctccata

SEQ ID NO: 729761 - DNA, 3263 bp, Homo sapiens
ctggttctgagattctgtgcaagcctcatggaaatgaagctgccaggccaggaagggtttgaagcctccagtgctcctagaaatattccttcaggggagctggacagcaaccctgaccctggcaccggccccagccctgatggcccctcagacacagagagcaaggaactgggagtacccaaagaccctctgctcttcattcagctgaatgagctgctgggctggccccaggcgctggagtggagagagacaggcagctcctctgcatctctgctcctggacatgggagaaatgccctcaataacactgtctacccaccttcatcacaggtgggtactgtttgaggagaagttggaggtggctgcaggccggtggagtgccccccacgtgcccaccctggcactgcccagcctccagaagctccgcagcctgctggccgagggccttgtactgctggactgcccagctcagagcctcctggagctcgtggagcaggtgaccagggtggagtcgctgagcccagagctgagagggcagttgcaggccttgctgctgcagagaccccagcattacaaccagaccacaggcaccaggccctgctggggctctactcatccaagaaaggcttctgacaatgaggaagcccccctgagggaacagtgtcagaaccccctgagacagaagctacctccaggagctgaggcagggactgtgctggcaggggagctgggcttcctggcacagccactgggagcctttgttcgactgcggaaccctgtggtactggggtcccttactgaggtgtccctcccaagcaggtttttctgccttctcctgggcccctgtatgctgggaaagggctaccatgagatgggacgggcagcagctgtcctcctcagtgacccgcaattccagtggtcagttcgtcgggccagcaaccttcatgaccttctggcagccctggatgcattcctagaggaggtgacagtgcttcccccaggtcggtgggacccaacagcccggattcccccgcccaaatgtctgccatctcagcacaaaaggcttccctcgcaacagcgggagatcagaggtcccgccgtcccgcgcctgacctcggctgaggacaggcaccgccatgggccacacgcacacagcccggagttgcagcggaccggcaggctgtttgggggccttatccaggacgtgcgcaggaaggtcccgtggtaccccagcgatttcttggacgccctgcatctccagtgcttctcggccgtactctacatttacctggccactgtcactaatgccatcacttttgggggtctgctgggagatgccactgatggtgcccagggagtgctggaaagtttcctgggcacagcagtggctggagctgccttctgcctgatggcaggccagcccctcaccattctgagcagcacggggccagtgctggtctttgagcgcctgctcttctctttcagcagagattacagcctggactacctgcccttccgcctatgggtgggcatctgggtggctaccttttgcctggtgctggtggccacagaggccagtgtgctggtgcgctacttcacccgcttcactgaggaaggtttctgtgccctcatcagcctcatcttcatctacgatgctgtgggcaaaatgctgaacttgacccatacctatcctatccagaagcctgggtcctctgcctacgggtgcctctgccaatacccaggcccaggaggaaatgagtctcaatggataaggacaaggccaaaagacagagacgacattgtaagcatggacttaggcctgatcaatgcatccttgctgccgccacctgagtgcacccggcagggaggccaccctcgtggccctggctgtcatacagtcccagacattgccttcttctcccttctcctcttccttacttctttcttctttgctatggccctcaagtgtgtaaagaccagccgcttcttcccctctgtggtgcgcaaagggctcagcgacttctcctcagtcctggccatcctgctcggctgtggccttgatgctttcctgggcctagccacaccaaagctcatggtacccagagagttcaagcccacactccctgggcgtggctggctggtgtcaccttttggagccaacccctggtggtggagtgtggcagctgccctgcctgccctgctgctgtctatcctcatcttcatggaccaacagatcacagcagtcatcctcaaccgcatggaatacagactgcagaagggagctggcttccacctggacctcttctgtgtggctgtgctgatgctactcacatcagcgcttggactgccttggtatgtctcagccactgtcatctccctggctcacatggacagtcttcggagagagagcagagcctgtgcccccggggagcgccccaacttcctgggtatcagggaacagaggctgacaggcctggtggtgttcatccttacaggagcctccatcttcctggcacctgtgctcaagttcattccaatgcctgtgctctatggcatcttcctgtatatgggggtggcagcgctcagcagcattcagttcactaatagggtgaagctgttgttgatgccagcaaaacaccagccagacctgctactcttgcggcatgtgcctctgaccagggtccacctcttcacagccatccagcttgcctgtctggggctgctttggataatcaagtctacccctgcagccatcatcttccccctcatgttgctgggccttgtgggggtccgaaaggccctggagagggtcttctcaccacaggaactcctctggctggatgagctgatgccagaggaggagagaagcatccctgagaaggggctggagccagaacactcattcagtggaagtgacagtgaagattcagagctgatgtatcagccaaaggctccagaaatcaacatttctgtgaattagctggagtaggagtctgggagtggagaccccaggaaacagcatgagttcacaggtgcttactcaggaagtcaggacatttttggcctttggcttaacttccagatgctcagtcggcttggggaaggactgaagggcagctgccaagacctcagttacctcctgacctgagggtggagagtggcaggaagcaagcatgtttgctgtgcacttaggaaaggctggtgagccagagggactgatcaggccccattcactctctactcattaaaaggtcctgagccacg

SEQ ID NO: 729762 - DNA, 3101 bp, Homo sapiens
ctggttctgagattctgtgcaagcctcatggaaatgaagctgccaggccaggaagggtttgaagcctccagtgctcctagaaatattccttcaggggagctggacagcaaccctgaccctggcaccggccccagccctgatggcccctcagacacagagagcaaggaactgggagtacccaaagaccctctgctcttcattcagctgaatgagctgctgggctggccccaggcgctggagtggagagagacaggcaggtgggtactgtttgaggagaagttggaggtggctgcaggccggtggagtgccccccacgtgcccaccctggcactgcccagcctccagaagctccgcagcctgctggccgagggccttgtactgctggactgcccagctcagagcctcctggagctcgtggagcaggtgaccagggtggagtcgctgagcccagagctgagagggcagttgcaggccttgctgctgcagagaccccagcattacaaccagaccacaggcaccaggccctgctggggctctactcatccaagaaaggcttctgacaatgaggaagcccccctgagggaacagtgtcagaaccccctgagacagaagctacctccaggagctgaggcagggactgtgctggcaggggagctgggcttcctggcacagccactgggagcctttgttcgactgcggaaccctgtggtactggggtcccttactgaggtgtccctcccaagcaggtttttctgccttctcctgggcccctgtatgctgggaaagggctaccatgagatgggacgggcagcagctgtcctcctcagtgacccgcaattccagtggtcagttcgtcgggccagcaaccttcatgaccttctggcagccctggatgcattcctagaggaggtgacagtgcttcccccaggtcggtgggacccaacagcccggattcccccgcccaaatgtctgccatctcagcacaaaaggcttccctcgcaacagcgggagatcagaggtcccgccgtcccgcgcctgacctcggctgaggacaggcaccgccatgggccacacgcacacagcccggagttgcagcggaccggcaggaaggtcccgtggtaccccagcgatttcttggacgccctgcatctccagtgcttctcggccgtactctacatttacctggccactgtcactaatgccatcacttttgggggtctgctgggagatgccactgatggtgcccagggagtgctggaaagtttcctgggcacagcagtggctggagctgccttctgcctgatggcaggccagcccctcaccattctgagcagcacggggccagtgctggtctttgagcgcctgctcttctctttcagcagagattacagcctggactacctgcccttccgcctatgggtgggcatctgggtggctaccttttgcctggtgctggtggccacagaggccagtgtgctggtgcgctacttcacccgcttcactgaggaaggtttctgtgccctcatcagcctcatcttcatctacgatgctgtgggcaaaatgctgaacttgacccatacctatcctatccagaagcctgggtcctctgcctacgggtgcctctgccaatacccaggcccaggaggaaatgagtctcaatggataaggacaaggccaaaagacagagacgacattgtaagcatggacttaggcctgatcaatgcatccttgctgccgccacctgagtgcacccggcagggaggccaccctcgtggccctggctgtcatacagtcccagacattgccttcttctcccttctcctcttccttacttctttcttctttgctatggccctcaagtgtgtaaagaccagccgcttcttcccctctgtggtgcgcaaagggctcagcgacttctcctcagtcctggccatcctgctcggctgtggccttgatgctttcctgggcctagccacaccaaagctcatggtacccagagagttcaagcccacactccctgggcgtggctggctggtgtcaccttttggagccaacccctggtggtggagtgtggcagctgccctgcctgccctgctgctgtctatcctcatcttcatggaccaacagatcacagcagtcatcctcaaccgcatggaatacagactgcagaagggagctggcttccacctggacctcttctgtgtggctgtgctgatgctactcacatcagcgcttggactgccttggtatgtctcagccactgtcatctccctggctcacatggacagtcttcggagagagagcagagcctgtgcccccggggagcgccccaacttcctgggtatcagggaacagaggctgacaggcctggtggtgttcatccttacaggagcctccatcttcctggcacctgtgctcaagttcattccaatgcctgtgctctatggcatcttcctgtatatgggggtggcagcgctcagcagcattcagttcactaatagggtgaagctgttgttgatgccagcaaaacaccagccagacctgctactcttgcggcatgtgcctctgaccagggtccacctcttcacagccatccagcttgcctgtctggggctgctttggataatcaagtctacccctgcagccatcatcttccccctcatgttgctgggccttgtgggggtccgaaaggccctggagagggtcttctcaccacaggaactcctctggctggatgagctgatgccagaggaggagagaagcatccctgagaaggggctggagccagaacactcattcagtggaagtgacagtgaagattcagagctgatgtatcagccaaaggctccagaaatcaacatttctgtgaattagctggagtaggagtctgggagtggagaccccaggaaacagcatgagatgctcagtcggcttggggaaggactgaagggcagctgccaagacctcagttacctcctgacctgagggtggagagtggcaggaagcaagcatgtttgctgtgcacttaggaaaggctggtgagccagagggactgatcaggccccattcactctctactcattaaaaggtcctgagccacg

SEQ ID NO: 729763 - DNA, 880 bp, Homo sapiens
ttcattccaatgcctgtgctctatggcatcttcctgtatatgggggtggcagcgctcagcagcattcagttcactaatagggtgaagctgttgttgatgccagcaaaacaccagccagacctgctactcttgcggcatgtgcctctgaccagggtccacctcttcacagccatccagcttgcctgtctggggctgctttggataatcaagtctacccctgcagccatcatcttccccctcatgttgctgggccttgtgggggtccgaaaggccctggagagggtcttctcaccacaggaactcctctggctggatgagctgatgccagaggaggagagaagcatccctgagaaggggctggagccagaacactcattcagtggaagtgacagtgaagattcagagctgatgtatcagccaaaggctccagaaatcaacatttctgtgaattagctggagtaggagtctgggagtggagaccccaggaaacagcatgagttcacaggtgcttactcaggaagtcaggacatttttggcctttggcttaacttccagatgctcagtcggcttggggaaggactgaagggcagctgccaagacctcagttacctcctgacctgagggtggagagtggcaggaagcaagcatgtttgctgtgcacttaggaaaggctggtgagccagagggactgatcaggccccattcactctctactcattaaaaggtcctgagccacgaagcgcttcccattttgaactttctgtcctcacagattctgtttgacagaatctaagggccatcagggaactcttttcatcttgcaaagagaaaaagccagtctttccagaataaatattcatctgtttgaaataaattttta

SEQ ID NO: 729764 - DNA, 896 bp, Homo sapiens
ggaacagaggctgacaggcctggtggtgttcatccttacaggagcctccatcttcctggcacctgtgctcaagttcattccaatgcctgtgctctatggcatcttcctgtatatgggggtggcagcgctcagcagcattcagttcactaatagggtgaagctgttgttgatgccagcaaaacaccagccagacctgctactcttgcggcatgtgcctctgaccagggtccacctcttcacagccatccagcttgcctgtctggggctgctttggataatcaagtctacccctgcagccatcatcttccccctcatgttgctgggccttgtgggggtccgaaaggccctggagagggtcttctcaccacaggaactcctctggctggatgagctgatgccagaggaggagagaagcatccctgagaaggggctggagccagaacactcattcagtggaagtgacagtgaagattcagagctgatgtatcagccaaaggctccagaaatcaacatttctgtgaattagctggagtaggagtctgggagtggagaccccaggaaacagcatgagatgctcagtcggcttggggaaggactgaagggcagctgccaagacctcagttacctcctgacctgagggtggagagtggcaggaagcaagcatgtttgctgtgcacttaggaaaggctggtgagccagagggactgatcaggccccattcactctctactcattaaaaggtcctgagccacgaagcgcttcccattttgaactttctgtcctcacagattctgtttgacagaatctaagggccatcagggaactcttttcatcttgcaaagagaaaaagccagtctttccagaataaatattcatctgtttgaaataaattttta

SEQ ID NO: 729765 - DNA, 760 bp, Homo sapiens
ttgctgggccttgtgggggtccgaaaggccctggagagggtcttctcaccacaggaactcctctggctggatgagctgatgccagaggaggagagaagcatccctgagaaggggctggagccagaacactcattcagtggaagtgacagtgaagattcagagctgatgtatcagccaaaggctccagaaatcaacatttctgtgaattagctggagtaggagtctgggagtggagaccccaggaaacagcatgaggccatagaacaccctcatcttcatgcttctccaagctcaagagcctaagagccaggccaggcacggtggctcacgcctgtaatcccagcactttgggaggccgaggcgggtggattacttgagttcacaggtgcttactcaggaagtcaggacatttttggcctttggcttaacttccagatgctcagtcggcttggggaaggactgaagggcagctgccaagacctcagttacctcctgacctgagggtggagagtggcaggaagcaagcatgtttgctgtgcacttaggaaaggctggtgagccagagggactgatcaggccccattcactctctactcattaaaaggtcctgagccacgaagcgcttcccattttgaactttctgtcctcacagattctgtttgacagaatctaagggccatcagggaactcttttcatcttgcaaagagaaaaagccagtctttccagaataaatattcatctgtttgaaataaattttta

SEQ ID NO: 729766 - DNA, 702 bp, Homo sapiens
gacttaggcctgatcaatgcatccttgctgccgccacctgagtgcacccggcagggaggccaccctcgtggccctggctgtcatacagtcccagacattgccttcttctcccttctcctcttccttacttctttcttctttgctatggccctcaagtgtgtaaagaccagccgcttcttcccctctgtggtgcgcaaagggctcagcgacttctcctcagtcctggccatcctgctcggctgtggccttgatgctttcctgggcctagccacaccaaagctcatggtacccagagagttcaagcccacactccctgggcgtggctggctggtgtcaccttttggagccaacccctggtggccacagaggccagtgtgctggtgcgctacttcacccgcttcactgaggaaggtttctgtgccctcagttacctcctgacctgagggtggagagtggcaggaagcaagcatgtttgctgtgcacttaggaaaggctggtgagccagagggactgatcaggccccattcactctctactcattaaaaggtcctgagccacgaagcgcttcccattttgaactttctgtcctcacagattctgtttgacagaatctaagggccatcagggaactcttttcatcttgcaaagagaaaaagccagtctttccagaataaatattcatctgtttgaaataaattttta

SEQ ID NO: 729767 - DNA, 460 bp, Homo sapiens
tcttatcactctttttgctctgttctttgcagtagtatgtcccctgagcacttgctttggcctcaccatgtcttctattagttcttcacaggtgcttactcaggaagtcaggacatttttggcctttggcttaacttccagatgctcagtcggcttggggaaggactgaagggcagctgccaagacctcagttacctcctgacctgagggtggagagtggcaggaagcaagcatgtttgctgtgcacttaggaaaggctggtgagccagagggactgatcaggccccattcactctctactcattaaaaggtcctgagccacgaagcgcttcccattttgaactttctgtcctcacagattctgtttgacagaatctaagggccatcagggaactcttttcatcttgcaaagagaaaaagccagtctttccagaataaatattcatctgtttgaaataaa

SEQ ID NO: 729768 - DNA, 696 bp, Homo sapiens; identical to SEQ ID NO: 233614

SEQ ID NO: 729769 - DNA, 489 bp, Homo sapiens
gagaagcattgttttcaaactatataactgagccttatttataattagggatattatcaaaatatgtaaccatgaggcccctcaggtcctgatcagtcagaatggatgctttcaccagcagacccggccatgtggctgctcggtcctgggtgctcgctgctgtgcgagacattagccctttagttatgagcctgtgggaacttcaggggttcccagtggggagagcagtggcagtgggaggcatctgggggccaaaggtcagtggcagggggtacttcagtattatacaactgctgtgaccagacttgtatactggccgaatatcagtgctgtttgtaatttttcactttgagaaccaacattaattccatatgaatcaagtgttttgtaactgctattcatttattcagcaaatatttattgatcatctcttctccataagatagtgtgataaacacagtcatgaataaagttattttccacaaaaaa

SEQ ID NO: 729770 - DNA, 736 bp, Homo sapiens
  misc_feature (736)..(736): n is a, c, g, or t
acatcttcatggactacgtggtgctgtccaaccctgtggctggactggtcattggcgtgctggtcacagccctggtgcagagttccagcacgtctcctccatcgtggtcagcatggtggctgctaagctgctgactgtccgggtgtctgtgcccatcatcatgggtgtcaacgtaggcacatccatcaccagcaccctggtctcaatggcgcagtcaggggaccgggatgaatttcagagggctttcagcggctcggcggtgcacgggatcttcaactggctcacagtgctggtcctgctgccactggagagcgccacggccctgctggagaggctaagtgagctagccctgggtgccgccagcctgacacccagggcgcaggcgcccgacatcctcaaggtgctgacgaagccgctcacacacctcatcgtgcagttggactccgacatgatcatgagcagtgccacaggcaacgccactaacagcagtctcattaagcactggtgcggcaccacggggcagccgacccaggagaacagcagctgtggcgccttcggcccgtgcacagagaagaacagcacagccccggcggacaggctgccctgccgccacctgtttgcgggcacggagctcacggacctggccgtgggctgcatcctgctggccggctccctgctggtgctctgcggctgcctggtcctcatagtcaagctgctcaactctggcgcgcggccn

SEQ ID NO: 729771 - DNA, 270 bp, Homo sapiens; identical to SEQ ID NO: 681973
  misc_feature (30)..(30): n is a, c, g, or t
  misc_feature (270)..(270): n is a, c, g, or t

SEQ ID NO: 729772 - DNA, 2862 bp, Homo sapiens
tttttaagtgacattttcaaaagacaagatctaataagccccccaatggtaaccatttcctattcccaggcagctagtgagaaacgcaagctcccagaggtggtggttgtgttacgaaggctgaccctgccaatggccgacaaaatggtgcgcacccccaagtgctcgagatgcaggaaccatggcttcctggtgcccgtcaagggacacgcgggcaaatgccgctggaagcagtgcctctgcgagaagtgctacctgatctccgagcgccagaagatcatggccgcgcagaaggtgctcaagacgcaggccgccgaggaggagcaggaggcggccctgtgtgcgcaggggcccaagcaggcctccggggctgcggccgccgcccccgcccccgtccccgtcccggccgcgagcctccgcccgctgtccccggggactccctccggagacgccgacccgggacccgagggccgcgcggccgcttgcttcttcgagcagcccccgcggggccggaaccccggcccgagagccctccagccggttctgggcggccgcagccacgtggagccgagcgagcgagccgccgtggcgatgcccagccttgcgggacccccttttggggcggaggccgcaggcagtggctaccctggccccctagacctgcgcaggccgatgcggaccgtgcccggcccactgttcaccgactttgtgcgccctctgaacatcaacccggaccgtgcactgggccctgagtaccctggtggctccagcatgcacccctactgcccgttcccgctgggctacctggacgcccctcctggcgtccccctgcagcagggcttccggcatgtgtcccgcagccagtaccaaggcggaggcttggtgtcagaaccaggaggagacttccagccaagctactacctgccgccgccgccgccgccactgccgccccttccaccgcttccaccgcagccccagttcctcccgccaggctacctctctgcgctccacttcctccccccgccaccgccaccaccacctccatcatctttctcactgaccgtcctgtttgatactgacaaggagaacactgatgaccaggatgcagaggtactgtcgggtgagcccagccagccatcgtctcaggagcagtccgactaggccccaggcccgccctcctggccagcagagtggggcactggggggcaacagcaacagttttcttgtcttcattcagtgatatgtagggaggaaggaggttgatagcatagatggcaactgattcccagtttaagataggaggaaggagagcaatttctaagtttcaatcctgcgctgtacagttgaagaagagtgtggaggaagctattaccaggggagggccagggctctgaggagtgggcgctgggagaagctcccatttaggaatgaatttaactgtccttgggttacactaccatttattggaacaagccccagaggcagtatttgatttcctcaggccccactctaggacaggaggcaccatctatttcagccttctgctgcctttgcctggtcctccaggttgctgggggcaccacagacatcaagattccagttcatccaggtggctggagccagcagccaggaccagggtcgttgacagcaggttctgcagcatcctgccttgctgctctgtcccccacatcttcctggccacagccccttgcccctcctctaaggggttttactagcaagcatcctggctgctggggctacttcattccccctccataaagtttcagccattatgggcactggttttaaaaaatttattagtttgactatttgatgtttttatagtgattgccaactttaaaaagtaggctgttcataagcactgatgcagtccctagggaatagaatggtgcttctgatcacctgtgacatgaacagtttcttctgtgaggacagttggctattgaaataaaatgagcaatggaaatccttgtggaaggcttattctccctttgatcctggtggaaggcctgtgagctgatgaatctccagaaattggtcggcatctttcctggagccttggaggcacctgctggggtgaaaagaccaactgggggtcaggggcttgtcccagtgctgccccctggcttactggttttcaggaaggcctgccttcctacctttccccgctgtgtattgttgggctcatcatgtaatttttccaagccttactttgtcctctggtaacattggttcagtggtgctctgaggatgcaggagtgcttgtgtgaaacaccttctttgatggcacctgtgtcattggatgcttgaaggcagtgacctttttgagaccacgtcagaggctagaaatgaccaaggctctttacttcctggtgctccccacattccaggcactgtgctgaatgcttcctacgcattctgtctctgagtcctcagagtgacccctcaggcaggcaccaagtacctcatcttacagatggcaaaactgaggcctacagagattagattttccccctcagttgccctgtccataagtggcaaattcaagttccacctgagtgcagagctaagttcctagctgcactgtgctctcctgcttctctgagagggagtcttggggaagtggtccccccaggacttgctgcccagctggggttcagtgagtgtggaccagtcaaaagcaaagaacaactagcttaggtcctacacgaggaatgaaatcatttctcagaaatttccaaatcctttaatttcattttgaaaatgatgaacaaacaaacatgaagttgagtttttaaaaaaaacatgagtattaatagcatattaaaatttaagccttgt

SEQ ID NO: 729773 - DNA, 475 bp, Homo sapiens
tggtttgactttcatcaaaaattaaacgacagaccataccgacgctttgaaaacgtgactgagctggtgcacaaaacaatggtgcctagaattttgaattgtgcaatgttgtgcatggccgcggatatgtggggccttgtggttccaagagcctgtctcaggtgtaccggccctcatcactgggcttcagaggttcaatctgcaaggaggcatctcctgccaggaaattggaagcaaaggccactcggcccttctgttcctcagtcaagttattgtagacatgacgactggagtaagtgatcacctgtgggatagaccgaggcagagtcaagcagcgtaactctcagcctgcctttcctgatggtgtgaagaagaggaaagggagtactcccagtggcacaaagtagtcaagcctggggctgagagtccaagagacctctgttctaaataaaagttaaaaatacagtaaattgca

SEQ ID NO: 729774 - DNA, 3185 bp, Homo sapiens
  misc_feature (1)..(1): n is a, c, g, or t
  misc_feature (2439)..(2439): n is a, c, g, or t
natttgggaagaaaaagaaaatgttggatcatttacaaatcgaatgaccccagaaaagcacttaaattctttgcggaatttggctaaatcattggatgctgagcaggacaccacaaacccaaaacccttctggaacatgggagagaactcgaaacagctgcccggacctcagaagctctcagatcctaggctctggcaggaaagtttttggaagaattatagccagcttttctggggcctcccctctctgcacagcgagtccctggtggctaacgcctgggtaactgacaggtcttatactttacagtctcctcctttcttgttcaatgaaatgtccaatgtctgcccaattcaaagggagactacaatgtccccactgcttttccaggcccagcccctgtcccatctggggcccgagtgccaaccctttatttcatccacaccccaattccggcccacacctatggctcaggccgaggctcaggcccatcttcaatcttctttcccagtcctatctcctgcttttccatccctgattcagaacactggagtagcttgccctgcatcgcagaataaagtgcaagctctctccctacctgaaactcagcaccctgaatggcctttgttgaggagacaactagaaggtaggttggctttaccctctagggtccaaaaatctcaggacgtctttagtgtctccactcctaaccttccccaggaaagtttgacatccattctgcctgagaactttccagtcagtcctgaactccggagacaactggagcaacacataaaaaagtggatcatccaacactggggcaacctgggaaggatccaagagtctctggatctgatgcagcttcaggacgaatcaccagggacaagtcaggccaagggcaaacccagtccctggcagtcctccatgtccacaggtgaaagcagcaaggaggcacagaaggtgaagttccagctagagagggacccgtgcccacatctggggcaaattctgggtgagaccccacaaaatctatccagggatatgaaaagcttcccacggaaggttctgggggtgacttctgaggagttggaaaggaacttgaggaagcccttgaggagtgactcgggaagtgatttattaagatgcacagagaggactcatatagaaaacatcctgaaagcccacatgggcaggaacttgggccagaccaacgagggcttgatccccgtgcgtgtgcgtcgatcctggcttgctgtcaaccaggctcttcccgtgtccaacacccatgtgaaaaccagcaatctagcagccccgaaaagtgggaaagcctgtgtgaacacagcccaggtgctttccttcctcgagccgtgtactcagcaggggttgggagcccatattgtgaggttttgggccaaacacaggtggggtctacccctcagggtcctcaagcccattcagtgctttaaactggaaaaggtttcatccttgtcccttacacagcttgctggtccctcctcagccacctgtgaatctggggctggctcagaagttgaggtggacatgttccttagaaagccaccaatggcaagtctgagaaagcaggtgctgaccaaagcatctgatcacatgccagagagtcttctggcctcctcacctgcatggaagcagttccagagggcaccgcgaggaatcccatcttggaatgatcatgaacccttgaagcctcctccagctggacaggagggcaggtggccatctaagcccctcacgtacagcctcacaggcagcacccagcagagcaggagcttaggagcccaatcttcaaaggctggagagacaagggaggcagtgccacaatgcagagtccccttggaaacctgtatgctggcaaacctccaagccacaagtgaggatgtgcatggtttcgaggctccagggaccagcaaaagctctctacaccctagagtgtctgtctcccaagatccaagaaagctgtgtcttatggaggaggttgttagtgaatttgagcctggaatggccacaaagtcagagacccagcctcaagtttgtgccgctgttgtgctccttccagatgggcaagcatctgttgtgccccacgcttcagagaatttggtttctcaagtgccccagggccatctccagagcatgcctactgggaacatgcgggcttcccaggagctacatgacctcatggcagccagaaggagcaaactggtgcacgaggagcccagaaaaccaaactgtcaaggctcatgcaagagccaaaggccaatgtttccccctattcacaagagtgagaagtttaggaagcccaacttagaaaaacatgaagaaaggcttgaaggattgaggactcctcaacttaccccagtcaggaaaacagaagacacccatcaggatgaaggcgtccagctactgcnatcaaagaaacagcctccttcagtaagcccctttggagaaaacatcaagcaaatttttcagtggattttttcaaagaaaaaaagcaagccagcaccagtcactgctgagagccaaaaaacagtaaaaaacagatcatgtgtgtacagcagcagtgctgaagctcagggtctcatgacggcagttggacaaatgctggacgagaaaatgtcactttgccatgcgcgccatgcctcgaaggtaaatcagcacaaacagaagtttcaagccccagtctgtgggtttccctgcaaccacaggcacctcttctactcagaacacggcagaatactgagctatgcagccagcagtcaacaagccactctcaagagccagggttgtcccaacagagacagacaaatcagaaatcaacagcccttgaaaagtgtgcggtgcaacaatgagcaatggggcctgcgacatccccaaatcttgcaccccaagaaagctgtatccccagtcagtccccttcagcactggccgaagacatccggtgcctctagccaccatcaccactgtccaaggcactgtcttctttgggaaggtatctgatttggtcagtcacaaattcttttttagccttccctggagaaaaacaagtccccaagaaaaaattcactctatgtagagaaaaaatattttctctcatgttagtacatgcagaacatttaatattccacaatatatatggttttttattcataaaaaa

SEQ ID NO: 729775 - DNA, 438 bp, Homo sapiens
tcaagaaagtcaggattctaaataccaacagcatcactctgtcaaaaccacccttgcaacctttctcagaaaaggaaatgtaatgacaagatgaaagttagccagaacggccacgtccagaaaagctctcagtagtacagccatctgtccgaaatactctaaccttcaaggtggccacggtctcttcagagggtcatggagctctgcaaagcttgtcttaaaactgattaaggttgttaaactgaaccatcttgactggccccagccaagtttcttacagtggaaatggcacattaactatgcagctgtcatgagagaagtcagtactcttagattctaacccaaaagaattcaaatatattggatttcctctcctgttcaattggaattcaaggacttaatccacttttaattacactgttcctgttgttgcatcaa

SEQ ID NO: 729776 - DNA, 706 bp, Homo sapiens
agcagtggctccgaaggcaccgtcttcttcaagaagtttatccggaagccaatgcacccattggacataaccgggaatcctacatggttccttttataccactgtacagaaacggtgatttctttatttcatccaaagatctgggctatgactatagctatctacaagattcagacccagactcttttcaagactacattaagtcctatttggaacaagcaagtcggatctggtcatggctccttggggcggccatggtaggggccgtcctcactgccctgctggcagggcttgtgagcttgctgtgtcgtcacaagagaaagcagcttcctgaagaaaagcagccactcctcatggagaaagaggattaccacagcttgtatcagagccatttataaaaggcttaggcaatagagtagggccaaaaagcctgacctcactctaactcaaagtaatgtccaggttcccagagaatatctgctgatatttttctgtaaagaccatttgcaaaattgtaacctaatacaaagtatagccttcttccaactcaggtagaacgcacctgtctttgtcttgctgttttcactcagcccttttaacattttcccctaagcccatatgtctaaggaaaggacgctatttggtaatgaggaactgttacttgtatgtgaattaaagtgctcttcttattttaaaaaattaaaaa

SEQ ID NO: 729777 - DNA, 459 bp, Homo sapiens
tgggaaatatgagtgagcatgtgagaacaagatcccaatcctcagaaagaggaaatgaccaagagtcttcccagccagttggatctgtgattgtccaggagcccactgaggaaaaacgtcaagaagaggaaccaccaactgataatcagggtattgcacctagtggggagatcgaaaatgaaggagcacctgccgttcaagggcctgacatggaagcttttcaacaggaactggctctgcttaagatagaggatgagcctggagatggtcctgatgtcagggaggggattatgcccacttttgatctcactaaagtgctggaagcaggtgatgcgcaaccataggtttcaagcaagacaaatgaagactgaaaccaagaacgttattcttaatctggaaatttgactgataatattctcttaataaagttttaagttttctgcaaagaaaacttacaca

SEQ ID NO: 729778 - DNA, 1338 bp, Homo sapiens; identical to SEQ ID NO: 270241

SEQ ID NO: 729779 - DNA, 220 bp, Homo sapiens
tgcagagacacagagaaaatgccatgtgaagatggatcagagacagaagtgatgcggctgcaagccaaggaatgtgaagaatggccagccaccaccggaagctaggggagacgccagcacagattctccctgagagtatccagaagaaaccaaccctccaacacctggatttcagacttctgaccttgagaagtgtgagccaataaaacaactgcagtgg

SEQ ID NO: 729780 - DNA, 445 bp, Homo sapiens
tgtccatcagacaaggatgagctaatcaaaagaaaacactgcctatgtgcacgactcagcagcctggacagctaataccaaggaacacgttttcactataaagattcagctttcaaaatccagttccctcttgtagagccacagggttaaaagggaccttagagatcatctacatacaggccaaaccctcaatgaatgccagtgttcgccttatgttcttcttgccggactcttttctggcctctgttctgtcaggatgtttcctgttttgcaaaacagctttaatccttgagtatatttaattgttagaaaacagttcctcaaatttgaccccaaatttaagtctaatttatgaagaaagttttgcctttggagacaggtttaattttacttccatgtggaaaaccttcaaataaaatgatgactattgtgtactcacgaaaaa

SEQ ID NO: 729781 - DNA, 860 bp, Homo sapiens
gaggcacctgaggaactaagagcccaggaagaaaggacagtaatgaaaaagccaacaaatgagaccaattctactctaaaagtcaccaggaaaaattcagctccactggtcctggctctaagtctactagcaaaatcttccagagaagtggaaaagccatcagccaatgtttggaaaccattttccattataaaagaaattcttccaaatcacacaaaacactctgacacttctccaattccccctatcatggggctggcagcagccgctttgcgtcctgaatgtcatgacagtgatggtaacagtaatgatgataacagcaatgatgaagtctcacatttaaaattttcaagtcactcatcacatcccaagtcactcccttcattaccttttatttatactggagtcatcctgtgtgcctcagtcagaccattttgtatgtacaatgaccatctgaggcactgcctataaagtggaagatataattataatactacagacgtcattccagctttccagttgcttatggtccagcagggaggatgcacatgggaaaaataataactaatgacaaatgtgatgagtcttaacaaagaagaagagcatattgcaagggaatgtaattcactccagggacaatgagatttaacatgcagtttgcagatcctcccttctctgggtcacctgaaaataagccacaaacaaaggaatgaaattgttgatgaaaagggaagaggcaagactccatatgaagaatacaactgactcacctgtctgtacatgcctctgtgtgtgtgttttatattggtgctggtgaagatagttctttatgctgatgcttaataaggtgaaatgtgtct

SEQ ID NO: 729782 - DNA, 507 bp, Homo sapiens
ttggaaaccattttccattataaaagaaattcttccaaatcacacaaaacactctgacacttctccaattccccctatcatggggctggcagcagccgctttgcgtcctgaatgtcatgacagtgatggtaacagtaatgatgataacagcaatgatgaagtctcacatttaaaattttcaagtcactcatcacatcccaagtcactcccttcattaccttttatttatactggagtcatcctgtgtgcctcagtcagaccattttgtatgtacaatgaccgacaatgagatttaacatgcagtttgcagatcctcccttctctgggtcacctgaaaataagccacaaacaaaggaatgaaattgttgatgaaaagggaagaggcaagactccatatgaagaatacaactgactcacctgtctgtacatgcctctgtgtgtgtgttttatattggtgctggtgaagatagttctttatgctgatgcttaataaggtgaaatgtgtct

SEQ ID NO: 729783 - DNA, 485 bp, Homo sapiens
ttttggtttgatgtaggattgcagtttgattccagctaaccttgtggaggcatttggtttattgattaactgcaacgagtcatctccctgccacccatttcttcctactgtgcaacacactttgaacaaagccattaatcctgaagggctgttttatgcggcttctagacagttcacaactgaagattttgaaaagctattggcttttgcaaagaatttgaatgtagaattcagcttggaagcagaaagaatgacccatggctattatctagcaagtcgcagaatcagaacaggctctgtatgtggatcaaagctgtcagcatctgcattaaaatatctcgttttcctatctgaagcccatgcacgactgaacttaaggaacaaagtgcttaaagaagatgtgctgattgcagccttactatttgaaacatccctcacattgaaatatggtaatgaattaaattattaatgatcactaaaaataa

SEQ ID NO: 729784 - DNA, 533 bp, Homo sapiens
ttcatcttcctattaacatttgccataataacccctcattgaccaccatcattcctccatccaccaccaactcagctccttctctaaagtgccctctaatgggcagtggctttggtctctgtttggcaaattatgtccagagggttaacattaatttctctttctcctattcctccctcatgctagattcagtccatcactcagcctcctgtcaggaaaaccatagcaaatcctactttctgctaaaatgaagttacaagacacttttccagagtagtcacactcaatgaagggacccagggtgtatctgagtgtgatgtaattgaaaccacatggaaagactagaaataccttgctcccagtcagatatagtgaaacagcttactcaagactggactaagatttagaatataggggggctagggaggagaaagagaaagatcctcagaagtggattgtccctgaatacaggatgaaatcatctagatttttttctccaattaaatttgcatttcattcaaccacaaaaaaat

SEQ ID NO: 729785 - DNA, 561 bp, Homo sapiens
acctggcaagggaacctccacagcccaagaatattaacatttatcaggtgccgggcatgggcctcatgtgttttatgtaattcaatcctcccaacaaaagtatgagagccagccctgcagcacagccttcaacatgagcaactcctgctctctgtagctccagccccagcctggacctatctttcagagccataatgctgagacagtccctgagtcttggatgaacacaggactcacagtgtctacaccggacagtttctgtttgcacgacgttgagtaaacttcacatccatcggggaagttaccctttgggattactgatgaaggtgaggagaagatgctgttctgagagctgctgataatacgtggatccaaacccacaggcttgagctgcttaattgaaattcacgtcaaaatgaaattctggtttagctcaacttgactactatggatgatgaaaataaatccctgggtcacacaaggatagtgattgagtagagcttgtttgctggcacaggaatgacatttcaactggaattaaattgtcgtcagttaacagaa

SEQ ID NO: 729786 - DNA, 463 bp, Homo sapiens
acctggcaagggaacctccacagcccaagaatattaacatttatcaggtgccgggcatgggcctcatgtgttttatgtaattcaatcctcccaacaaaagtatgagagccagccctgcagcacagccttcaacatgagcaactcctgctctctgtagctccagccccagcctggacctatctttcagagccataatgctgagacagtccctgagtcttggatgaacacgtgaggagaagatgctgttctgagagctgctgataatacgtggatccaaacccacaggcttgagctgcttaattgaaattcacgtcaaaatgaaattctggtttagctcaacttgactactatggatgatgaaaataaatccctgggtcacacaaggatagtgattgagtagagcttgtttgctggcacaggaatgacatttcaactggaattaaattgtcgtcagttaacagaa

SEQ ID NO: 729787 - DNA, 1357 bp, Homo sapiens
gtgcctgcaggactggggccccttcttctccctggctgtccccagcatgctcatgatctgtgttgagtggtgggcctatgagatcgggagcttcctcatggggctgctcagtgtggtggatctctctgcccaggctgtcatctacgaggtggccactgtgacctacatgattcccttggggctcagcatcggggtctgtgtccgagtggggatggctctgggggctgcggatactgtgcaggccaagcgctcggccgtctcgggcgtgctcagcatagttggcatttccctggtcctgggcaccctgataagcatcctgaaaaatcagctggggcatatttttaccaatgatgaagatgtcattgccctggtgagccaggtcttgccggtttatagtgtctttcacgtgtttgaggccatctgttgtgtctatggcggagttctgagaggaactgggaagcaggcctttggtgccgctgtgaatgccatcacatattacatcatcggcctaccactgggcatccttctgacctttgtggtcagaatgagaatcatgggcctctggctgggcatgctggcctgtgtcttcctggcaactgctgcctttgttgcttatactgcccggctggactggaagcttgctgcagaggaggctaagaaacattcaggccggcagcagcagcagagagcagagagcactgcaaccagacctgggcctgagaaagcagtcctatcttcagtggctacaggcagttcccctggcattaccttgacaacgtattcaaggtctgagtgccacgtggacttcttcaggactccagaggaggcccacgccctttcagctcctaccagcagactatcagtgaaacagctggtcatccgccgtggggctgctctgggggcggcgtcagccacactgatggtggggctcacggtcaggatcctagccaccaggcactagcaaagaagcttggaaatagaaagccaggagtggctgtccccagtatgcaaacacaccacggtctgccctgcaaaaacaccaatggggtctagtgcaggtggacactttgaaccactcctcaaaaaaagaactttggctgattccttgtggtgacactcagaggggtctgaacagacttgacaattctgttctggtcaagctggagttttcttctgtgacttggactgctctacagaagacatcagccaactgcacgagtcagagtccagggattgtcactattattaataatgtaaatggcttcaaatgggacactgcagataaaatcacaaaaaccactgttatattaaagattacacatttcctgggcacagcctgctgctcaagtctgtcata

SEQ ID NO: 729788 - DNA, 2054 bp, Homo sapiens; identical to SEQ ID NO: 272491

SEQ ID NO: 729789 - DNA, 635 bp, Homo sapiens; identical to SEQ ID NO: 728399

SEQ ID NO: 729790 - DNA, 840 bp, Homo sapiens; identical to SEQ ID NO: 272436

SEQ ID NO: 729791 - DNA, 925 bp, Homo sapiens; identical to SEQ ID NO: 284514

SEQ ID NO: 729792 - DNA, 325 bp, Homo sapiens
gaatggatgttttcttttaaaaatggtttattgaagtatcatgtacctatcttaagtgtacagcacgatgatgtgtatgcccatgtaaccatcacctagaaggatgagaaccacaagcatgagaacatgaggataaatacactttggggaaaaagaaaacagacagaggcagcagagaaggaagacgagaagaagagaaaaagagaagtaggaagaggatgaattcatttcgcttatctggcaaatgtgtaatctgagtaatagaggtgagtgtttctaagaggatgctgttcagagacaaatacactgtttaaaatccattaaa

SEQ ID NO: 729793 - DNA, 577 bp, Homo sapiens; identical to SEQ ID NO: 259235

SEQ ID NO: 729794 - DNA, 530 bp, Homo sapiens
gctggtctcgaattcctgacctcaggtgatccacctgcctcagcctcccaaaatgctgggattacaggtgcgagccaccatgctcagccctgaatccctgactttgttaatgacctgtccttaccaaccatgacctagagaagatttggctttttaagagttttggagaaagatggcataaaaatagattatttccttaaatcaattttttagcattacgctacctaagctcgtttggtctctcatagacaagaaaatacattatattgtaggttacattcttttaattttgaagagtcacaaaactcacattatttagagcaacaatatttgtatttggaaattaaaaattcatgatttcaagaaaatacataaaatttacatttttgagtagtttgaataagtttctatcttaattataatatttgtaggaaataacaaaacaaactcaaagcctttattatttccagtctctttgtaactgatgtggtatggtatcatcatgaaatctaaacagtggtacactgagt

SEQ ID NO: 729795 - DNA, 442 bp, Homo sapiens
  misc_feature (22)..(22): n is a, c, g, or t
  misc_feature (32)..(33): n is a, c, g, or t
ctgctgcctgagagggcttcancctacaacanncgtgcccaggcccggcgactccagggagacgtggcaggcgccctggaggatctggaacgcgcggtggagctgagcggcggccggggccgcgccgcccgccagagctttgtgcagcgcggactcctggcgcggctgcagggccgagacgacgacgcccgcagggacttcgagagggcggcacggctgggcagccccttcgcgcggcgccagctggtgctgctcaacccctacgccgcgctgtgcaaccgcatgctggccgacatgatggggcagctgcgccgcccccgtgacagccgctgagcgccgcggacccgggcgtccgcgggcgaggggacgggactgggccctgaaccaataaagccgtcgggcctcaccgactccgcctgctcctgcgtcctgcccgcgcccg

SEQ ID NO: 729796 - DNA, 1790 bp, Homo sapiens; identical to SEQ ID NO: 265178

SEQ ID NO: 729797 - DNA, 484 bp, Homo sapiens
cgctgggaactcctgagcgcccccgctcccagcctttgtgccctccatcatttcctggccccagaccccctaccgaccttctctcttggagcgcggagccctcttcgacgcattccgcaggaccgccccttctcagctgctgcccagagcgcccccatccgtcaagaaggcccactgttggtgcttggttcccatctgtcacctagcgcccccagtgcagagcccagcataacctagagcccgctgtcaacagcgcccaccgagggctccccgcccccacgcagcaccagcgccaccgcacacctgactctgtccgctcacacagcctcaccttcacctcttgggtatttcagatccgctctggcccagtgggcagaggcatcgcctagagaaaataacctcagggttccctcatccctctgacaaacctgcctctttccctgaaaccattcaataaaacctctgatcaaagtgtcaaaaattt

SEQ ID NO: 729798 - DNA, 460 bp, Homo sapiens
tggtccttgtgccaattatcactgccccactcatgccgcaggatataaagcagagtgacagggtcacaggactgccagaggaatacagcttctagaggctacccacattcctgggctaatggccccttcctacatcttcaaagccagcagtggtgggctgagtctttctcctggtatcatctcttcattctctatctccctctcccaattttaaggacctctgtgattatattgggcacctggatattgcaggatacgctctctattttaaggctatgctccgtaaagagagtgcctcctctagaatcacaagacctaagcatgaatcttcctttgaaggataaaatggaaggaaaaaaactggatgaggaaaagaagagtggggaatagaaagagagagagagagaaagatggataaatttttaaagttactataataaaaatcttctacaacgaaaaa

SEQ ID NO: 729799 - DNA, 517 bp, Homo sapiens
aactgctatttgtatattgcatgatattttatcaggaaaaaatataaaacagatctaatttcatgaaaatgctgttgccataatgctcaggagaacagggggaagagagagattcaagtcttcctaatgtctaccttatatgcaggtacattttacaagttctattgtattctgacttattaagcagtgcatatttctttcttttacattagctttcattgcagaagggtgtggggagatgagactgctggaaactgacgtgggattgatgtttatcagggctgtaggcttcagaaatatattaagcctcggaatgtcctaggtatgaaaaagataataaataacaggtcaatttattatattccctttatctctatattacctgagagagattgctatactgcagtgacactttcaagatgccccaatcctccaatctccatgcataacaatttgaaaaagggaaggttgactaaggctgggatgttcaggatcaatttctaatcagtttcaggtt

SEQ ID NO: 729800 - DNA, 300 bp, Homo sapiens
aactgctatttgtatattgcatgatattttatcaggaaaaaatataaaacagatctaatttcatgaaaatgctgttgccataatgctcaggagaacagggggaagagagagattcaagtcttcctaatgtctaccttatatgcagagccttggaaagatgggcaaatgctctgtgacaagccaccagggtagactggtactgaaaagaccctactacacacaggggctctgtccctggctggaaagttacaagtcagcctacctctctgtgatctggtttccacacctactactctttat

SEQ ID NO: 729801 - DNA, 452 bp, Homo sapiens
ttcaggatggagcagacacagccgcagcaaggcctctgtgcagcccccggcttaaaacacatcaacgcatccgtgggcacttttgtgagttaaagctcaacttacacatctgcctgtatccataggaaatgaatgaaaataaacaaacaaattccttgcattcaacgcagcgtaagaaaaatcacatcctgttccccagtagctgaggaaagccggctcacgagagtatacagggagaagaggccagcattgtgtggctgccagcaaagctcacttgtatgtcaaatgcagcgcttttcttagcccattatgtattttttttttcttgaacactcctgtgtctaccgggatctcctgtttttattgttttgggatgagattttaaaaacaccatttaatgtagcctgtgtgctcttgttcattaaaccaaaaagaaaccctggatcacggca

SEQ ID NO: 729802 - DNA, 430 bp, Homo sapiens
cctttcaggtggacatggactccatggaagcctgagctgccaggggcttccctggggcagcactgcttcgcgtaggctcacgagaaacttccagggttcctgggaaatgaatgaaaataaacaaacaaattccttgcattcaacgcagcgtaagaaaaatcacatcctgttccccagtagctgaggaaagccggctcacgagagtatacagggagaagaggccagcattgtgtggctgccagcaaagctcacttgtatgtcaaatgcagcgcttttcttagcccattatgtattttttttttcttgaacactcctgtgtctaccgggatctcctgtttttattgttttgggatgagattttaaaaacaccatttaatgtagcctgtgtgctcttgttcattaaaccaaaaagaaaccctggatcacggca

SEQ ID NO: 729803 - DNA, 406 bp, Homo sapiens
agaaatccagccatatcatcttggcctgttgtgtcctccacaacatctccctggagcatgggatggatgtttggtcctctccaatgacaggacccatggaacagcccccggaagaggagtatgagcacatggagtccctggacttagaggctgaccgtattcgtcaggagctaatgctcactcattttagctaatgtagaaggtggagaggagggatacttcccaggagttgtgacagactttcctcctcatcaccttttacacagttccatcatctagcatgactgagtatacagatacttgtcataaactgacatttaatatgtgtgttttggtaaggttggggctatgccagaatatcttgattcatttgcatatgcattaattaaactgaaaccaagaaaaa

SEQ ID NO: 729804 - DNA, 798 bp, Homo sapiens
aatgtggctggcaactgcgggggtagaagaactcaggcaaagtaggcacaggaatgggggagatgagagccaagggacaaacgccgagaaagcgttccgacaagcatgtgtgttcatacatgcatacccccaacaaagggcaatgcactgtgtaacagaactgaacacaatttaacaaagctgctcccagccttcctgtcacctctttggcagtagggcaggccatctcaacttcggacacacaaagacattctcttcaggaggaaggctgtcctgtgtggtggggacaaggcttcagttgcaagatggtcgtctctccttcttcctgaataagacaacgtaccactgttataagattccaagtgaattccttcagaggaagagaaggacaacataagaaggcgtggatgacagactttcagttaaactaacaaagaaagaacactgcagcaccatctatgcctacctttttctcagcgtttataaaaaaaaattcatattccctacaaagcaaaactatggtataacaggacaactaagactgccctggcaccagagaaactacaatctagatgtgctctgcttccagtcggccgagaagcctgcagcaaatcacctaaacacttaaggtctttgtgtgccatccacacccaactgcaactagagactttcattagcccctttctgtctcagagctttcggtggttctacaagtcaccagcctggatctctaacaatgtgtctctccaaagctgttaatacattcacatccaaaatatctccagccacgaaatccta

SEQ ID NO: 729805 - DNA, 547 bp, Homo sapiens
aatgaattcatcaattttttaaaaagaagcatgagatcaaaggtagaactaagtggtgaatttcacaaagtagacctaggcaatttcaaattggctgctatacttttcaaggtaaaggacacaaaccaaaggtacctatatattcttttcatgatatttatttcaaggagacagatcaaattaaaaacttcaagaatgttttctgcctggtaaataaatattccagcaacccacataggcacagactcagacacttagtccaatagaactccaaagaggttttcctgacactgagaagagggggtgagttttgggggaaaaatttttaaaaataaagtacttccagtctatatattgtaaactcacctattcatggatttgtgaaatttagaaacagcctaataaaaattctaggacaactgagttgtcacaacgtcacaagagcacaaattcatattgagtgacttttctagtaatatgaacaaaaccaacataaatttccctcaacatatcagaaataatatatattctatttagttccaagaaa

SEQ ID NO: 729806 - DNA, 478 bp, Homo sapiens
aaaaagagttacagtgagctaagtataacttattgaaaacatttttttaatttagtatagcctaactgtgtttatacagtctacagtagtatacagtaatatcctagacctccacattccctcgccactcactcactcactcaccgactcactcagagcaacatccagtcctggaagctccattcacagaagctattggaagagatgctcaaagaagaaaaaattaccataatccaataaagaagaagacctgagatccaggaagcagatgatctgaactgcagagaaagttcaggaaagttccctcattcatgatgatgggaaataacagtaaattctgtacagcagtcttggacaacaaccaatctaaactggcacagtgcagaggcaatcaacagagaacataatattgatagaatgcctgacgcttttgattgtattcacaggaaacataaacaattggaagacagtttatgaa

SEQ ID NO: 729807 - DNA, 498 bp, Homo sapiens
tgccacgcagaaaaacgaggggttgcaactgccacgcagcaactgccacacagaagaaggagggactgcaactgccatgcagcaactgccacacagaaaaaggaggggttgcaactgccacgcagaaaaaggaggggttgcaactgccacgcagcaactgccacgcagaaaaaggaggggttgaaaagggagtagcttctgatattcagaagctattggaagagatgctcaaagaagaaaaaattaccataatccaataaagaagaagacctgagatccaggaagcagatgatctgaactgcagagaaagttcaggaaagttccctcattcatgatgatgggaaataacagtaaattctgtacagcagtcttggacaacaaccaatctaaactggcacagtgcagaggcaatcaacagagaacataatattgatagaatgcctgacgcttttgattgtattcacaggaaacataaacaattggaagacagtttatgaa

SEQ ID NO: 729808 - DNA, 650 bp, Homo sapiens
gtaagtacgaatcggccttaggttccctgcctcaagaccctattctcctgcctcacttttagctaagggttattacaaaagagtcagaaagttaagacaaaatatgaaagtttataaagtaaaaagagttacagtgagctaagtataacttattgaaaacatttttttaatttagtatagcctaactgtgtttatacagtctacagtagtatacagtaatatcctagacctccacattccctcgccactcactcactcactcaccgactcactcagagcaacatccagtcctggaagctccattcacagtaagtaccttatacaggtataccatttttacatcttgtatagtgtatttctactgtgccttttctatatttaaatttatttaaatacacaaatattacgtgttaaaattgcctataggattcagcacggtaacgtgctgtacagacttgtagctaagtagcaataggcactgccatatagaaggtgcagtagggtataccatctaggtttgtgtaagtacactccttgatgttggtacaacaatgaaatcacctagctgtgcatttctcagaatgtatccccactgtcaagtgatacatgactgtatattaatatgaagatgaaacctagctatgtaaaga

SEQ ID NO: 729809 - DNA, 517 bp, Homo sapiens; identical to SEQ ID NO: 728402

SEQ ID NO: 729810 - DNA, 1417 bp, Homo sapiens; identical to SEQ ID NO: 21

SEQ ID NO: 729811 - DNA, 238 bp, Homo sapiens
gtccaggcaagcccctagctcctactttttggccttgacgtgcagcgcccggggctgcaccgggtgtaactcgggcctacagggggcgccctcggaagaggcgggcggcagcaggagccgcaggtcgggcctgaactgccgctgggagaggaagcagcgcccttgccaggaacgtggggctgtggtagcagcaacacctgctccagcttcacctccagcagtgctgcgccgcacacgg

SEQ ID NO: 729812 - DNA, 381 bp, Homo sapiens
tttttttcaggttcctgtatcttcatgtcgagttgctcattgcccaacgtagaggactaggaatcaggattcggtggctatatgctggaggctggacgcgggagcgcggctcgcctcattgcagttgttggcagtgatggagagatagcatcgcggctggagagtctttccatcgtgttccactgtcgcagctacacaccagatatgaagactacaagcaacctcaaaaggtcttttcatttgttcagcatttgaaacttcttcctgacaccagaggggctcttcttagctgtctttttcctgggttattcctggtaaactagctgatatttgtttcaaagcatatgtctctaataaagtgccagtctctcttaaaaaaaa

SEQ ID NO: 729813 - DNA, 377 bp, Homo sapiens
gcaccatcctctgatccagggactgtgagcaacagggccccgtggccaggacatctctcaccctccagttaaaatctcgccagttgagtctgcccatgaaagtaggcgctgaactgcccaataaatccacaagtaagagttgcaagaaggagccaaaaagggctgagctgaatgactcatatatgaaataatttgataattaatataaataggaaatttaaagtctccagctgagtgacagaaaacaccttaaaaagctcaagagagaggaaaggaagaaaataaacctataattgcaaaataaaagcattgaaagaagccgtgctcaaggtaagatgctacagatgcaataaattcatgttttaacattaaaaaaa

SEQ ID NO: 729814 - DNA, 842 bp, Homo sapiens
ataaaccgaaacttctctgccttcccgctgcaagagtgaatgagcgatccctctcaactgactcaaaatgtttgcctcacccaggagggctccctatgcctctccttttttcctttcatctgcattattcccgttgccaaaatctggagcctggtaaaggcccagtagcggtggcaacaatagagctgtgtgtcaccccagtgagctgaaagagcagacatcaagctctatgccagagaacagtggggcatccccaaggtcctgctggaaggcagctctgatctggaactgggaaggacaacacacagtcaagctctttctcgtctcagagaatccagcagaatcttcagggatccttccagaccaggaagactctcacactctgcagagaagttgcggcttgtttagcatttgacctacattcagaaacgaccagcctcccaactttcagctctaaggattacttaaaaaaacaaatggtgttcattctcagatatcttgcctttctcaggagagaaaaatgaagcttgcaattagccagcaaactagcacatacacaaacacacacacacgtacatacactccaacacagggagcaatgtggtatgttgttgaccagctggaagttaggatctcaaaggaaagaacaggataacttaagaggcacttctgggactgcagagctgagctggtggttctgaagagccatcggagtgtgggttcaggcagcttccctaattcagaagcagccccaagtgaatagatgacaaagaagtggatgtgaacatgacagaaaaagccagtcatggcttagaataaattttattattgttctttaaaaa

SEQ ID NO: 729815 - DNA, 143 bp, Homo sapiens; identical to SEQ ID NO: 513934

SEQ ID NO: 729816 - DNA, 1252 bp, Homo sapiens; identical to SEQ ID NO: 257223

SEQ ID NO: 729817 - DNA, 1434 bp, Homo sapiens; identical to SEQ ID NO: 257225

SEQ ID NO: 729818 - DNA, 363 bp, Homo sapiens
gtgaatggctacttcctggcaggccgggacatgacgtggtggccgattggagcctccctcttcgccagcagcgagggctctggcctcttcattggactggcgggctcaggcgcggcaggaggtctggcgtactgtaggaggtttgctttctctgggagccctttagagtccggagggacttggccttggcctgcccttaaggctgagtttagagctttccactcatactcttccttcctctcccacatttcttgatctccaccccacccccatgccagccacccccatgccagccacctccctggaaaccagggatacagaaataaacaagacctggccctggtctgccaggggctcgcactg

SEQ ID NO: 729819 - DNA, 446 bp, Homo sapiens
attggagcctccctcttcgccagcagcgagggctctggcctcttcattggactggcgggctcaggcgcggcaggaggtctggccgtggcaggcttcgagtggaatgccacgtacgtgctgctggcactggcatgggtgttcgtgcccatctacatctcctcagaggtgagtagcaaaccccgtaccgcagtcttcgccagatgcccttggcgtactgtaggaggtttgctttctctgggagccctttagagtccggagggacttggccttggcctgcccttaaggctgagtttagagctttccactcatactcttccttcctctcccacatttcttgatctccaccccacccccatgccagccacccccatgccagccacctccctggaaaccagggatacagaaataaacaagacctggccctggtctgccaggggctcgcactg

SEQ ID NO: 729820 - DNA, 453 bp, Homo sapiens; identical to SEQ ID NO: 411517

SEQ ID NO: 729821 - DNA, 552 bp, Homo sapiens
aggcaacattcgaaacccaggtgccactccttcaggaaggtaccatcaagctccaaggactcttatcctctttctccttccccactacctagtcattagagcgtcagcatccacttcttgaaaggaagatgcctgtttttcacatatcccagaaaaccccattttaggacagcatttagcagagtatattcaggatcccactaacctttttggaagacatgacttccagatgatataaggctccatcaggaactgtgcaggactgtgcactctgttgatactcacatggtggaattatattgcctttggccaaccctaaagccatcaagatagcaggtttggaataattcactgtcgaagtcttcttgagctgagcagtcatgtgagcttggaagatgatccctctccagctgatccttcagctcaggccatcatctacatctggattcctgacccggagaaactatgagtaatgtgtgctgcttttgagccactaagctacatggtaataggctatgcttcaataaacaataatacacttgaaaaaaaaaa

SEQ ID NO: 729822 - DNA, 839 bp, Homo sapiens
aggcaacattcgaaacccaggtgccactccttcaggaaggtaccatcaagctccaaggactcttatcctctttctccttccccactacctagtcattagagcgtcagcatccacttcttgaaaggaagatgcctgtttttcacatatcccagaaaaccccattttaggacagcatttagcagagtatattcaggatcccactaacctttttggaagacatgacttccagatgatataaggcaagaataagaaatttcagtgacagggaacagaaatcatatttctgcattcaggatcatgttttcttggctccatcaggaactgtgcaggactgtgcactctgttgatactcacatggtggaattatattgcctttggccaaccctaaagccatcaagatagcaggtctggtctaccgagaagagagatcaaagagctcttcagctgttcccagctccccacacaaatctacctaacaaagtcccgataaacagtctgttttctggagtctatcaatactgatgaggtcttgttcttttggccaggctggagtgcagtggtacagtcgtgactcactgcagcttcaaacacctgggttccagcattcatcccacttcagcctcccgtgtagccgggactacaggtccctatcttttttgttggagaatgaaattaaaaaagatttggacactcattggttgtacacattgttactggggaatgtgttgattggaggccttgttagctaacagagcaaagagtaaatatacacatatgtttacaaatttctacaagtctccatatgtatctgcattaaattaaacatgaattcctacagc

SEQ ID NO: 729823 - DNA, 451 bp, Homo sapiens
tgcctcctggactcaaagaatcctcctacctcagcctcccaagtagctaggaccacagagttgtgctctcctgcagcgttttgcggacggctggctatcttacccagaatcaatcacactgggaccctgaaaaaaaaaaaaaaaggaaaaaagagcaagggagtaattctagcctgtttttacaagaacacagtggctatagacagtgccagtgtgaagatgactcagcaaacgtggagaaccaaagattctagggcagcaccaaaactgggaaagcaattacagcagaagttgccttccccatggtagcttagcaacttcgtgtctctccaaggcagagaggaaaatcaagtctaacaggccttcccgaaggctaggtgtgaaataccagaagccatctttgtttctggcgatgtcactaaataaatatttgttgatataaagtattaca

SEQ ID NO: 729824 - DNA, 583 bp, Homo sapiens
ggctggagcagccttagatgccaggtcagggtggcccgggggccactgcctccagctgtgtctagtgctgcagggatctcggcatgaggccccttctcccaggaggggaggcacagcctggagacacaggccccatccttcccaatggggacacttcagggagcggctctcaggtcccgagaaagaccttcctggccacaggagacacacggacatcgggaacggacggaggaaggatgtgcagttgcagccttttcagcagacgccctgagaacgggaggtcaagagttggagcagacgggtcgacagggcctcagacctaaggcaggagcaccccctatgccagacctcctgggtcacaggatatgcacggacattgggaagggatggaggatggacggaggaaggacgtgcagttgcagctctttctgcagatgccctgagagaggagcaagaaggtcctcgccagatgctcctggacttgctttggactttcccttgctcttggacttgctctggcacctgtgctcttggacttcacagcctctagaactgtgagaaataaatttccgttcagtataaa

SEQ ID NO: 729825 - DNA, 353 bp, Homo sapiens
gaccaggagaccatccctgcagcagccgggccatgctctgaggatgtgggacgaggacccccactgtctctgagtacagggcctcagacctaaggcaggagcaccccctatgccagacctcctgggtcacaggatatgcacggacattgggaagggatggaggatggacggaggaaggacgtgcagttgcagctctttctgcagatgccctgagagaggagcaagaaggtcctcgccagatgctcctggacttgctttggactttcccttgctcttggacttgctctggcacctgtgctcttggacttcacagcctctagaactgtgagaaataaatttccgttcagtataaa

SEQ ID NO: 729826 - DNA, 256 bp, Homo sapiens; identical to SEQ ID NO: 274819

SEQ ID NO: 729827 - DNA, 665 bp, Homo sapiens
agcctggagacacaggccccatccttcccaatggggacacttcagggagcggctctcaggtcccgagaaagaccttcctggccacaggagacacacggacatcgggaacggacggaggaaggatgtgcagttgcagccttttcagcagacgccctgagaacgggaggtcaagagttggagcagacgggtcgacagggcctcagacctaaggcaggagcaccccctatgccagacctcctgggtcacaggatatgcacggacattgggaagggatggaggatggacggaggaaggacgtgcagttgcagctctttctgcagatgccctgagagaggaggtaggagcacccttgctgtggtttgaatgcttctctcctccaaaactcatgttgaaatttcattgccattgtaacagtatgaagagtgattaggtcataaggtccccacctcatgggtgggattggtgctgttataaaagggtgagttcggccccctcttgctctctttcttgccttccgccatgtgatgacacagcaagaaggtcctcgccagatgctcctggacttgctttggactttcccttgctcttggacttgctctggcacctgtgctcttggacttcacagcctctagaactgtgagaaataaatttccgttcagtataaa

SEQ ID NO: 729828 - DNA, 566 bp, Homo sapiens
acttgaacccaaggctggcacaaaagccagaaggtgttactctccaccagctcagggattgtgaagatctctgtgcagactccactctgtggttggacagcatccctgagacatgcattttggaaattgtgatcaaccagaatccagaacacgctgtgcttaatggagtgaactgcctgtgaagcgcaggtgtgaggggcggatgataagtgacagtgccggtgcccccagcgcccttttacctgatggctcacccggcctacagctgcgcccttccctttgaatcgtcttgggtaacgggtgctgctttggaaatgcctggaaggtcatgtcctttgtctggggatggcttccagctgtggttgactgatagcagggggcacagaaggccagacacaacttgcctcaggtgggccgactctgagggtttgttcggcctccacgtggacttcagctgagcctgcatctttgcttggcttttcccactggcctattctgcttccctctccttaagggttctcccaggagaactcccttaataaatcacttgcacaaggaaaaaaaaa

SEQ ID NO: 729829 - DNA, 825 bp, Homo sapiens
gaatcatgagagatgaaattgcaacaacagttttctttgtcacaagattggtgaaaaaacatgataaactaagtaaacagcaaatagaagactttgcagaaaagctgatgacgatcttgtttgaaacatacagaagtcactggcactctgattgcccttctaaagggcaagccttcaggtgcatcaggataaacaacaatcagaataaagatcccattctagaaagggcatgtgtggaaagtaatgtagatttttctcacctgggacttccgaaggagatgaccatatgggtagatccctttgaagtatgctgtaggtatggtgagaaaaaccatccatttacagttgcttcttttaaaggcagatgggaggaatgggaactatatcaacaaatcagttatgcagttagtagagcctcatcagacgtttcctctggcacttcctgcgatgaagaaagttgtagcaaggaacctcgtgtcattcctaaagtcagcaatccgaagagtatttatcaggttgaaaacttgaaacagccctttcaatcttggttacaaatcccccgcaaaaagaatgtggtggacggccgtgttggcctcctgggaaacacttaccatggctcgcagaagcatcctaagtgttacaggcctgctatgcaccggctggacagaattttataacccacatctgggaatgaatttgcagcacctggtagaagaaggcaccttggaaggcactgccttgggcttccatggcaggaagatgagaagaaatcttcagggtgatttctggagcctgaaaagaataaaaaacaaaaccaaacctatc

SEQ ID NO: 729830 - DNA, 720 bp, Homo sapiens
tcttaatactcatatttagaacctatattctaaacctccttgtgaagtttatctcttctcgcttagaaaccatcaagcttcagatggtgctgaaaatggagccgaaaatgaaactgccctcctacgagggacccttaaatcaaccccaggaggagccctagctgctgttccccacacaacgccactctccagcaggaagtagccagaagaaatcgtcacccagtttcccctagcagcagttatggatttcattcctgaggggggaaatatgttataggaggcagaaagaaatgatttaggtagacatttagggtaaagtgagtccccagcagaaaactttccttttaacaaaaagcactaaaaacagacttgggcggatgtctgcagctgcaagaagatgtgtgggaacagacacagaaactctccctcccagataagcaagacaaagaaacacagaataagagtccatctatgtggtcagagaatgggataagagctgatttaaaaaaactctgctctatatagaaggcacacctggtcccaaccaaaccactggaccctaggaggataagacctcctctgctcatgagccccctcctcagtagcccatttataaaaaccctgacaattttactaccacttggcaacccgctcgggacccctctctgtgatggagagctgttcttttcttttgcctattaaactcctgctccaaactca

SEQ ID NO: 729831 - DNA, 590 bp, Homo sapiens
tctagttctgggcaattatcctacaaatcctgccagaaaccatcaagcttcagatggtgctgaaaatggagccgaaaatgaaactgccctcctacgagggacccttaaatcaaccccaggaggagccctagctgctgttccccacacaacgccactctccagcaggaagtagccagaagaaatcgtcacccagtttcccctagcagcagcgcagtaagattgaggagctaaaaacagacttgggcggatgtctgcagctgcaagaagatgtgtgggaacagacacagaaactctccctcccagataagcaagacaaagaaacacagaataagagtccatctatgtggtcagagaatgggataagagctgatttaaaaaaactctgctctatatagaaggcacacctggtcccaaccaaaccactggaccctaggaggataagacctcctctgctcatgagccccctcctcagtagcccatttataaaaaccctgacaattttactaccacttggcaacccgctcgggacccctctctgtgatggagagctgttcttttcttttgcctattaaactcctgctccaaactca

SEQ ID NO: 729832 - DNA, 482 bp, Homo sapiens
tcagtagactccagcgtggattttaattgcctcaatcagcagtcattctccccagccgtcactcagagcctggacggtgggtcccgcgatctagcccttggctacgcaggaacggtgcgcccccgggtacggcgcggttcagcaggcaggcgtcaggttctaccaaggcgctgaaatgagcccatcagcgggtaggagcccttcccccgccgtcccctccccaggctcgtgaacggcgcctgatgcccgcccggggcgcgagctctcgaggtcgcagtgacctcagcacctgcttggaggaaaacggcgcgggaaccccgcttccttcccctcagctggagccagacctcaaacaaaaccccaatcgatgcacacagaaaactcctctgggccacgcttcccgcctcgccgaggtctccccagtctgcccctcgctgacgctggcgcgcagcggctgtggcagcacccgggacagcggccgc

SEQ ID NO: 729833 - DNA, 471 bp, Homo sapiens; identical to SEQ ID NO: 243214

SEQ ID NO: 729834 - DNA, 656 bp, Homo sapiens
  misc_feature (35)..(35): n is a, c, g, or t
caaaacccgcaggagaaacaggtccgactcagtantgcagtcgcaataacatgtctgctcccgaggttaacattcaagcgtttctactttgaaattcagcaagagtttctgggccttatgtttgagggtaccttttgctgcagttgtgaatattcagtacattgccagctcttggtcactgagtgattgagttagggctccgcaagagactttggggagtgaagtggatctcttcctcatcttttggtcctctgaaatgtgtgttctgaagccatggggctcgtcttctggggtgttcccctgcaggtgctggtgaaggtaacctggggcttaatgatggagtccctgatcatttttgcacaagacaggttgctgaggggtcggcaagcatctgacttgcccaatcccctggatatggtgagccccgccatgcttttattctgtatcgcttttgtctttattgctgctttcaacatttacgtttggttacagttaactattttcggagtgtggtgattgaagacaatttcatcatcccactgtacttttttttttgagactctgtctcaaataaagaaaaaaaaaaagataaaaataatttttaaaaagtaaagataggcctgggcaacagagtgagactctgtctcaaataaaga

SEQ ID NO: 729835 - DNA, 420 bp, Homo sapiens
aaaggaaaaattcattagctactttggcggatactaggaaattgattctttttttttttttaactcataaatggaggttgaaacccaacctatttatcctgtcttccctaagtgagctgtagttcagggcaaccaaaccactgaggagccaagtttctctctctaggagtattctagctaaataaatgaggaaggagtgatggaccaagatggtggccatggagccacccctaatgcattagtggaccaggcaataatcatcaatggctgctaatatcacaaaaggagagacaggcagacatttcgtgtcccctgatgggatgcagtaggaggaaccaccacccgtaaggcagatatgccaaagattcaaacttgaatctgattaaacctctaagtccatctgccaacttgcaaaaaaaa

SEQ ID NO: 729836 - DNA, 614 bp, Homo sapiens
tcattcctaactttgtagttgggacagacctctgattaacaagagaaaaacaagcaagtttactaaggcatgcagcccacagcacgtgggagaaacctcagtgaaactcaaagcgcagtggcttagaagtctggctcatcttcaacaatacatttgtggagaaatgacaggacaatggaaagcaattttaggtgtccgaaggcaagaaaccgtgggaagataaatatatgggaagaaactagtggaatacgtgtgtttgtacattcttctgctgacatccctgagctggtaagaatggtctccggtaaaagagaatttacatcctgtctttagatgaaaagaggggaggatctagagagctcttcctccattggctgcttcttaattgcctttacttcaaaatatttgtcaaaaaggcatatttgggggtgacatattctgattaccttcagaagcttgtctttatacacatttatttcttttagggtagattttactttcatttgtcactaatatgattgcttcagtacacagcattctgtggcatggcttcatgctttagcactgtggctctgaattaaagcctgaaacaatttataaaaatactggtaaaa

SEQ ID NO: 729837 - DNA, 991 bp, Homo sapiens
aaccaatgaaagtaaatagcctaagggtacaaacataagtaaatctataaattaaagccaaagaatgataagcacaaattcaaggcagtgatttcctctagctacagagggaagggaatgaagtaaggaaaaggtgaacaaggagcttaaaagtatgataattatatgtgttggtttggccaaacagtcctggtttacctagcacagttctggtttgctgattgcctggtgtaatgattaatagcactgtcactccccaaattgtcattgtttggataatgaattatatgcatcctttttagagtaaaagtaacttttttctccttaaactggatggagggcatgtgggtctttatcattcttccttatacatgtatttttaaaatataatttaaaactagtcagtattttaaaatataatttaaaactttagtcagtgttagtcactgtgttagtgacaacacagtaaaaaaaaaaatttgtaagataaatcaatataaataggatccaaatgaactcttttcatctgggtggatacagggataaataacatactatatgcctggcattgtattaagcttgttactgatattacttcatattcatagcaagacatttaggtaggcattattatctccattttacacatgaagaatctaagacacaaagactatacataatttaaccaaagtcatattatatgtgacagcgcagaatttgaacccaagcagtgtgacatcagactacatgctcttaactaccatgccagagcccataacagattttcttaaccttttttatgccacagatccctttgacagtctggtgaagcctatagagtcctttttagagtaatgtcttttgtacatcaaatataatgcacaggattataaataaaatcaattatactaaaatatggtaatcaaaatatttaacaaatgtatactatacctgtactttttattaatgcattaaataaataataaaatct

SEQ ID NO: 729838 - DNA, 394 bp, Homo sapiens
tgggccttgactttctcctatggccgagccctgcaggcctctgctctaaaggcttggggtgggaagaaggagaacctgaaggcagcccaggaggagtacatcaagcgagccctggccaacagcctcgcttgtcaaggaaagtacactccaagtggccagtctggagccgcagccagtgaatctctcttcatctctaaccatgcctactaaccagagctgatctaaggctgctccatcgacactccaggcccctgcctacccacttgctattgaagaggggccttcaggctctttcccatcactcttgctgccctcgtgtgtgcagtgttgtctgtgaatgctaaatctgccatcccttccagcccactgccaataaacagctatttaaggggga

SEQ ID NO: 729839 - DNA, 2677 bp, Homo sapiens; identical to SEQ ID NO: 172361

SEQ ID NO: 729840 - DNA, 1174 bp, Homo sapiens
cttctgggccaccgggaggcggtgaagtgtaggctgggcgtggggggctccgaccccgggggccatccgggggacctggcgcccaactctgacccagtggagggagccactctgctgcccggggaggacatcaccacagtgggctctactccggcctcgctggcggtgagcgccaaagacccggacaagcagcccgggccccagggcggcccgaaccccagccaagccggccagcagcagggccaacagaagcagaagcgccaccggacgcgcttcacccccgcacagctcaacgagttggagaggagcttcgccaagactcactaccccgacatctttatgcgtgaggagctggcactgcgtatcgggctgaccgagtcccgagtgcaggctgcctgtgcgttcctgtatcgagttatctccttctctacccggaaactggtccccatcgccatcccccaatggacacgcaaggcccgtctccggccagtatagcgacatcccggaagaagctcctcaaaatcgaagcccggcgttgtcgggctacagggttcgcctcctccgcctgagaaggcaacctcagcgcccccccgggcggcccagccgagcgcacacctcaactcctgctcgcattattgacaaatattaccccctaatgagtttgtgttaagcgtttggataaaaggaggaatgcaacaattatacagaaaacaagagaaaagagcaaataaggcgaatgagcgccttttaaaaaagtgctacacccaggtttcacggcgtggctttattaccttaagtatcaccctccctctgcactcaggcgaaatattcctagctttgatgtttgcaaggggtttgaactttcgtagtctaccagtgcgctgggggcagctgacgagattcccaaagccggtgagccccgttttgttttggagtcctctaaggaagctacggtgggggaggggaaatgaaggctttctgttgtggatatcatgtctgaagaaggggcattcagaacgggaaaggttgacaggcagtagaggaaatcattgctgaccccttattctcctccaaccactctccaagctgtaaattatatataacctagaaaatcacacctataattattctgaaaattggtgaataaaagtataagcctagtgaatcccagatt

SEQ ID NO: 729841 - DNA, 624 bp, Homo sapiens
gatattgcaggcttaatccatgttgctcacaccttcatatagcagtgcctcttacagaataaactattgttaaataggaacccatcttgtcaatcagttgcttcatgcccagggaagagagtatgttttataggctttgtgtgcagcctgttaggccagcgtttaattgacatagactgttgtttctcaaacaacagttctattacgtacgtatgcaagtaatttctgtgcttcaaggagcttcagagagattgccttgttcaaagccctatggttattcaaatggtagagccaaaaatttgatctatgttctgacttaactccatgggctttggaccttggcagaggaaatggtgtctttgaactgtagtctgtagtcctagaaattgaataaactatttcctaaatagaggtaagagactaggatcctagcaacttctctaagttaacaaaaggggaaaaatatccccataccatttttctcttcattctattaatgagggctagagtcgtttcatagattgaatagtttcaagagcatattgagcagtgcctggctaacagctgaaagtctgccatttcatgcaactttgttaggctttagaagtgaagcaggaatataga

SEQ ID NO: 729842 - DNA, 585 bp, Homo sapiens
attttgtatttttagaaaaggaatggggatcacaccaaggcagaagtgcttgctgggggacagacactggcttggctgggatcaagtagcctctttctgctctccagcccagcggactggaagcagcagatcagcactcttcttcctggacaggggtaatgagaatgagtattttcctttaaagctcacttgtttccgtattctaagcggacgcgaacattgttcttttctcgtgctttcccactttcaagacccaccaacacctgcctgcccacatttcgagttatcttcgtcggctcctgcaagcccgcactcttctccgcggtggctactctccgctcatccagactcccgccctcactgcgccttcttcctgcgatgaccgaggaggtggtgggagaccaccacttgcgagcttccaaaggactttcaaacctgaaccgcagagtcagagccctcgcgccgtagaaaagtcaggagcgccccggggcccccatcggaagcttcgtgccttcccgtggaaaggtcgcgagcagggaaggccttcgtggccactgagtcccctactccaggggcggcggccgc

SEQ ID NO: 729843 - DNA, 484 bp, Homo sapiens
tctgtcctattcccaattgcatgcttttcctcttgcataggcactgatcttccaaatcaaagtgggatggtctgctggacagcctcaataccactgagtaagctattagtgccctcctggggtaaggggacccagggatctagaatccaaggtatggaggtttttcctgcccacatttcgagttatcttcgtcggctcctgcaagcccgcactcttctccgcggtggctactctccgctcatccagactcccgccctcactgcgccttcttcctgcgatgaccgaggaggtggtgggagaccaccacttgcgagcttccaaaggactttcaaacctgaaccgcagagtcagagccctcgcgccgtagaaaagtcaggagcgccccggggcccccatcggaagcttcgtgccttcccgtggaaaggtcgcgagcagggaaggccttcgtggccactgagtcccctactccaggggcggcggccgc

SEQ ID NO: 729844 - DNA, 1177 bp, Homo sapiens
ggtgcaggttttgcaaaaacaaaccattgatttggaaatcataaatatattctaaattttaatatagttacttatgttaaacataatgtgttaaagttttagcatattctttttgactaatcattagttacttatgttaaacataatatgttacatttttgacatattcttttgactaattaatcatttcctttttaaactcggagaggcaatggggggtacagagtgagacaggaaggcagcctctgtaacaacctgaggactcatggttggggaaagatgtcatctacttttagtcaagagataaatgttttacctgctaatagggaaacccacccaaaagcacagagaaaagtctggtcaaaacattgcattgcatctaataaaaactaattaactggtttaaaagcaaaagatcccttggtactgcaaaactcaatcgctttcacaataaatagataaactgctttgtgggaagaatttactaatacatggaagaacttccattagaaactacatgtttatttgatttcttaaaacgtatttaggcataatgtgtgttctaattattttcatttcttgaagaatatgtattcttatacaattcttattgttgacaattttgtggctacacttttgtcttttcttctttccttcctttctctctattatgccttctttttccccttttttcttcgtcaaaattcttaagccttctaaagtcaatcctgtcacaatgaaaatacattaaaatggctataacgtccgatccatgaacttcagtgaactctaaagactcctcaaatatacgcagatgtataggattcttacgtttctcctaatttctactagagaatctgtctcttatctcttcttccccagctgttccttctattcaccccatattaacccaagcatgaagcacagccctaatatttgttaaaaaatccaaaagcttgtgaagttttaatgaaaccctagaacttggaaagtattatatcaaactacagaaagttgaaaatttaatgtttgtctccctcttcttaaaggtcctctactcaacctttagactgacaaactcctcacggcttgcctcaatgtcttaaatgcttttcccaccgctttttttgttctacttccgattttctgtttttagcaaaccttgatgtttctggga

SEQ ID NO: 729845 - DNA, 498 bp, Homo sapiens
tagaattccagggcaagtaaaatgtaaatgagtgatgaaacaacatcactcctcacaacccgggtgatttgcaaagtcaccagggaatttcaggacacctggattacaaaaccatagcaagacttggagtccgcattagcatagtgaagtggaagctgccagctcagttaagggctatgcctagaactggcatagcaccacttctcccatgttctcgtggtcaaaggagttacaaggcccacccagatgaaaagggatggagaaatagattctacctctggatggggactggcaaagtcacattgaagagcatgtggaatgggaattgtgttgtatggtagccattttggaaaatacaatctactgcaacagatgattaaaatacttaaaaagaaattttagtgtgttatcgtctttaaacattgtacaaatttaaggtgtataatgtgatgttttgatgtatattttattaaagtgattactagtcaagcaaattaa

SEQ ID NO: 729846 - DNA, 546 bp, Homo sapiens
accacacacgtgtcctaattattccaaaggtgatacatttgcatgtttccctttaaactcctttccctctgtcactctgtggagggttcacatgctgcaatatttctgttccaagtaaagatcacaggttttgatcctcagtcctcagtatacacacctcttttagggatttctgggcttcttgactagctcaagctcttcagaggcatgcactttatcttggtgttcagtcttgactggtttaaacttttgatgtccagaaggttttcttcatgtgttgttgtgtggaattgtaaatattttctagcttttgtaaggttgtggctcatatttatatttctcctggtttgaaagaagagagagaaagaagtatgtcaaattgagactcttagattggaaatctgaatttatttacacgattgagattgatctagagttttattttttctgctgtaactgaaatttggattcaagattatatgtgttttgtgaatatgtttggtaacattgtgacttttctataatttagggaagtttgatgtagga

SEQ ID NO: 729847 - DNA, 774 bp, Homo sapiens
aagagacataagacataagagtctcattacgttgcccatgctggtatcgaactcctgggctcaagagatcctcccaccccagcctctgaattagctaggactacaggccagtgccagtacacccggctggctagaattttcttctttttaaaggctgcattgtttccattgtatttccatttgcatgtgccacattttctttatccatccaatgatggacacttaggttgattccacatcttggctattgtgaataatgctgcaatgaacatgggagtgaagatatctctttgatacactgatttcaattcctttgaatatatatgcagaagtgggattgctggataatatggtaattaaaattttagttttttgaggggcctccatactcttttccaaaatggctgtactaatttacattcccaccaacaatgttcaaggatttcatattcttgacattcttaccaaaattgtcacagtttgtaaaaggtagtctaataagtggcctaagtgaatgtgacaacacttcattgaaagcaatcttaggtttttccaactatagtcaataataacttaattgtacattctaaaataactcaaagagtgtaattggattgcttgtaacttaaaggataaatgcttgaggggatggatgcctcattctccatgatgtgcttatttcacattgcatgcctgtatcaaaacattacatttatcccataatatacacacttactatgtaccccccaaaaataaacattaaaattaagtttt

SEQ ID NO: 729848 - DNA, 1005 bp, Homo sapiens; identical to SEQ ID NO: 249068

SEQ ID NO: 729849 - DNA, 871 bp, Homo sapiens; identical to SEQ ID NO: 248300

SEQ ID NO: 729850 - DNA, 580 bp, Homo sapiens
cattttatgcctgatattcctgcattctgtgggaggttattctttgcattgtaggatattaatagtatctttaggctataccaccacataccagtagcatcaccacctaatcattataattcaaaatgtctccagacactgacaagtgttctatggaaacaaagtcattccttgttggaaaccacttgtaaacaaaaagtctagtaatggtggaattatacagtgacagaaaagctcaggtttttctgattaggttgaaaaagctgctcagaaattaaatcctactgtgttcataaaaaacaaggaacccagccctgaagcaaagaactcatcagggaagttgttttctctttcaagtctatgatttcaaatgaccttaaagtggtcatctttacagtcagagaagcatatgtgtgttggggaggagaaaaaagaaggaaatgaggcagactttagaattatacctaggaaagaactgtatgtttggttataaactagatccaataaataaataaatggtttccacataactacttggcaaaggtacaataagcctattgtgagaaaaaaaaattaaggc

SEQ ID NO: 729851 - DNA, 942 bp, Homo sapiens
  misc_feature (31)..(31): n is a, c, g, or t
  misc_feature (435)..(435): n is a, c, g, or t
  misc_feature (780)..(780): n is a, c, g, or t
aggagaacaaacttacggctaggtacgaggnctgggtgtgctagagcccagctgctggcggctgctggaatatcctacctgataggattaaaaggcctagtggagctgggggctctcagtggttaaacaatgcccaacaaccaaccagctggcccttggtctcctctctttcctcctttggttaaagagcatctcagccagcttttcccaccagtggtgctgttgagatattttaaaatattgcctccgttttatcgaggagagaaataataactaaaaaatataccctttaaaaaaacctatatttctctgtctaaaaatatgggagctgagattccgttcgtggaaaaaagacaaggccaccctctcgccctcagagaggtccacctggtttgtcattgcaatgcttttcattttttttttcggtaatggttncatttcagttccgctggctattcttcctaatctatatccatagatctaaggggcaaacagatactagttaactgcccccacctctgtctccctgtcttctttagatcggtctgattgattttcaaaagtggacccaaacttagggaattctgtgattaaggggtggctggtggcaaggaggggcaggggatatggggacgtgactgggacaggttcctgccttatcattttctccctaggacattcccttgtagcccccagaattggtctgggcccaaaattgaatagaagcagaaaaacatttaggggataaccatcagggccagtagaattaagcctctccanctgttcccaaccataaaaagggtctcccagctttccatctctggccaatatgctttatcccaaaaaaaagcgataacgttcagacgtcggccattagaaatttaagggaatttccagcagcaagcatgctttgatatctggttcagactatcatcaggaaga

SEQ ID NO: 729852 - DNA, 757 bp, Homo sapiens; identical to SEQ ID NO: 250833

SEQ ID NO: 729853 - DNA, 583 bp, Homo sapiens; identical to SEQ ID NO: 250834

SEQ ID NO: 729854 - DNA, 571 bp, Homo sapiens
ccacagagaattccacatgtctccactccccgggcagtgttggcactggctaactggagaaactgtgggcacagccgcccaggcaccaccacatggcgcaatccatcgattgtgggaactgtaaaggagaaaggagaatagtctgcgaccactgagccctgcctcctcaagcagacctcacagccagcagccctggaggagcaacattaagccactgggattcccccaacttcaggcagatctggtactcagatgcagagactactacttttatcttgaagtcagtctgtgctgctctgaagcttttagatgggcaacaatgaaagtgaagacccacctttactgtgtctttcttttcaggaatgacagcagatttgtaatctcgatgttttggtagtttctcaataaagagcctaaggaaacagttcaaaatgattatgaagcaaatggtccaaatgtccataagaccctaaagctatgcaacccccttatcctgaagcccttatatgaaaggttccagaagtgcagcggagggagagctaatacacccagctgggccatgctcctttcc

SEQ ID NO: 729855 - DNA, 474 bp, Homo sapiens
ccacagagaattccacatgtctccactccccgggcagtgttggcactggctaactggagaaactgtgggcacagccgcccaggcaccaccacatggcgcaatccatcgattgtgggaactgtaaaggagaaaggagaatagtctgcgaccactgagccctgcctcctcaagcagacctcacagccagcagccctggaggagcaacattaagccactgggattcccccaacttcaggcagtgagtagggatctcattctaatggcaccaaaaaaagggctgtaaagtgtcttctccaatcttgggccacagctgtaaggagcacattacttcaagaagagaaaatagtaggctttaattattcaagttaagaaaagggcaaactactaccttaagaaaagttttcttaaaaataaccttaagaatgtaattggattgtttgtaactcaaaggataaatacttgaggggatggaaa

SEQ ID NO: 729856 - DNA, 454 bp, Homo sapiens
gatttggcctcccaaagtgctgggattataggtgtgagccactgtgtccagccaaggaggctgtttgaactgcatgattgaaaacacatttgcaaaagtagttttagggtattttttaattgcctctggtttgaactgaatggaaaaatcttggctgatttcaatgtatagatcttcaaaagaagtttaaaaggatagtaagatctgttttaaatgtgcacgtgtgtctgaaggctggttaaggaaatcataacagggtttgggaccgattagccagccgttcttcagccccaaggtcctcaaaacactcagatttgaagatgatcccgtcttgttccgtggtctcgtccgctcctccacggtcattcttttcgaacctggccgccagtatgtgccctgagagtctatttctcttgtaaatcattgtaatattcttgactttggtttaaataaa

SEQ ID NO: 729857 - DNA, 6435 bp, Homo sapiens; identical to SEQ ID NO: 205032

SEQ ID NO: 729858 - DNA, 1800 bp, Homo sapiens; identical to SEQ ID NO: 720740

SEQ ID NO: 729859 - DNA, 1883 bp, Homo sapiens
ccctttccccactgtggtgtgataagaggctgccctcacagtcacaatgctcccgggtcacagaggtgctgggccccaggccagcctctgcctgggaagttctctctgggaacatctggtgggtactacaggccctattccaggccctatggcctgtggaacctcaccacgggggggagggctgggccagacggagacatcacctgtggtgtcagccccatggatgagacagagtggatacacagacatcccaaggctgaggacctaagggttgggctcatcagctgggcaggaacctacctcacctttgaggcatgcaagaatacagtcactgcaactgcgaagagtttgggcaggagacagacctgggagatcttggtgagcaatgagcatgagacacaggccgtggtgcgactaaagagcgtgcagggcctctacctgctgtgtgagtgtgatggcaccgtgtgttatggccgcccaaggaccagccaccatgggtgctttctactgcgtttccaccggaacagcaagtggaccctccagtgcctaatctctggtcgttatttggagtccaatggcaaggacgtgttttgcacttcccacgtcctctcagcttaccacatgtggaccccccgaccagccctccatgtccacgtgatcctctacagccccatccaccgctgctatgcccgggctgaccccactatgggccgcatctgggtggacgcagcagttccctgcctggaggagtgtggcttcctgttgcatttccgagatggatgctaccacctggagacctctacacaccacttcttgtcccatgtagaccggctgttctcccaaccctcatcacagacagcttttcacatgcaagtgcggcctggagggcttgtggcactgtgtgatggagaaggaggcatgttatatccacagggcacgcatctgctcttgggcatgggctgcaaccccatgaggggtgaggagtggttcatcctacagcactgcccaacctgggtcagcctcaggtcaaagactgggcggttcatctcagtcatctacgatggtgaggtgcgtgctgcttctgagcgcttaaaccgaatgtccttgttccagtttgaatgtgacagtgagagccccactgtgcagcttcgttcagccaatggctactacctatcccagaggcgccacagggcagtaatggctgatgggcaccccctggagtctgacacgttcttccgaatgcactggaactgtggcaggatcatcctgcagtcctgcagggggcgcttcctgggcattgcacccaacagcctgctgatggccaatgtcatccttccaggcccaaatgaggaatttgggattttatttgccaatcgctccttccttgtattgcgaggtcgttatggctatgtgggctcctcatcgggccatgacctcatacagtgcaaccaggatcagcccgaccgcattcatctactaccctgccgaccgggtatctaccacttccaggcacaggggggatccttctggtcaataacatcctttggcacctttcgcccttggggcaagtttgccctcaacttctgtatcgagcttcaggggagcaacttactcactgtactggcccccaatggcttctacatgcgagccgaccaaagtggcaccctgttggcagacagtgaagacattaccagagagtgtatctgggaattttaggtcaatgggatgtcacctaccaaaatccaaatcctccaggaaaaactactacactaaatggaccaggaacctcagagtcaagatccaagagaagaacatctgttacaacttttcctacccagtttagcaaaacacctgttttatgcaacaatacatcacaacaggcc

SEQ ID NO: 729860 - DNA, 1337 bp, Homo sapiens; identical to SEQ ID NO: 256737

SEQ ID NO: 729861 - DNA, 1092 bp, Homo sapiens
ccctttccccactgtggtgtgataagaggctgccctcacagtcacaatgctcccgggtcacagaggtgctgggccccaggccagcctctgcctgggaagttctctctgggaacatctgacctgggagatcttggtgagcaatgagcatgagacacaggccgtggtgcgactaaagagcgtgcagggcctctacctgctgtgtgagtgtgatggcaccgtgtgttatggccgcccaaggaccagccaccatgggtgctttctactgcgtttccaccggaacagcaagtggaccctccagtgcctaatctctggtcgttatttggagtccaatggcaaggacgtgttttgcacttcccacgtcctctcagcttaccacatgtggaccccccgaccagccctccatgtccacgtgatcctctacagccccatccaccgctgctatgcccgggctgaccccactatgggccgcatctgggtggacgcagcagttccctgcctggaggagtgtggcttcctgttgcatttccgagatggatgctaccacctggagacctctacacaccacttcttgtcccatgtagaccggctgttctcccaaccctcatcacagacagcttttcacatgcaagtgcggcctggagggcttgtggcactgtgtgatggagaaggaggcatgttatatccacagggcacgcatctgctcttgggcatgggctgcaaccccatgaggggtgaggagtggttcatcctacagcactgcccaacctgggtcagcctcaggtcaaagactgggcggttcatctcagtcatctacgatggtgaggtgcgtgctgcttctgagcgcttaaaccgaatgtccttgttccagtttgaatgtgacagtgagagccccactgtgcagcttcgttcagccaatggctactacctatcccaggtgagaccttggcttcctgagcaagagaaaccttaagctctgagctctccctccctagacttccttctcctttttcaaggcaaatgatgagaggatgatgtgggctgtggaggcacttgttgataaacattcattttcacccaatgggggctccttta

SEQ ID NO: 729862 - DNA, 2005 bp, Homo sapiens; identical to SEQ ID NO: 256738

SEQ ID NO: 729863 - DNA, 2250 bp, Homo sapiens; identical to SEQ ID NO: 256736

SEQ ID NO: 729864 - DNA, 2814 bp, Homo sapiens; identical to SEQ ID NO: 257114

SEQ ID NO: 729865 - DNA, 922 bp, Homo sapiens
acgtgccccgtcccgttgccccggcgaccgcggcggtttgttctcaggccccggcctttctcaccgtgcgacgccccaacccgccgctccgccgcggtggtacgctccaggccgcgaggcccaccgagcggacgccagtggatgacccgcggcgggggaggaggagataccatcagcaaaatgccagacgtcaaggagagtgtgcccccgaaatatcctggcgactcagagggcaggtcctgtaagcccgaaacctcaggacccccccaggaagacaagagcggctccgaggacccccctccctttctttctgtcacaggtctgacagaaaccgttaatgaagtttccaagctgagcaacaagattgggatgaattgtgattactacatggaagagaaggttttacctccaagcagtctggaaggcaaggtcaaggagacagtgcacaatgccttttgggaccatcttaaagagcaactatcagcaactccccctgacttcagctgtgctcttgaacttctgaaagaaattaaagagatcttgctatcactgctattaccacgccagaaccgcctgagaattgagattgaagaagctctggacatggacttgctcaagcaggaggcagaacatggggccctgaaagtcctctatctctctaagtacgttctcaacatgatggctttgctgtgtgcaccagttcgagatgaagcagtgcagaaactagaaaacattacggatcctgtttggctactgagagggatcttccaggttctgggccggatgaaaatggacatggtgaactacactatccagagccttcaacccacctgcaggaacattccattcagtatgaacgggctaaattccaggaactcctcaataagcagcctagtatgtatataatgtgagggcaggagtg

SEQ ID NO: 729866 - DNA, 1891 bp, Homo sapiens
acgtgccccgtcccgttgccccggcgaccgcggcggtttgttctcaggccccggcctttctcaccgtgcgacgccccaacccgccgctccgccgcggtggtacgctccaggccgcgaggcccaccgagcggacgccagtggatgacccgcggcgggggaggaggagataccatcagcaaaatgccagacgtcaaggagagtgtgcccccgaaatatcctggcgactcagagggcaggtcctgtaagcccgaaacctcaggacccccccaggaagacaagagcggctccgaggacccccctccctttctttctgtcacaggtctgacagaaaccgttaatgaagtttccaagctgagcaacaagattgggatgaattgtgattactacatggaagagaaggttttacctccaagcagtctggaaggcaaggtcaaggagacagtgcacaatgccttttgggaccatcttaaagagcaactatcagcaactccccctgacttcagctgtgctcttgaacttctgaaagaaattaaagagatcttgctatcactgctattaccacgccagaaccgcctgagaattgagattgaagaagctctggacatggacttgctcaagcaggaggcagaacatggggccctgaaagtcctctatctctctaagtacgttctcaacatgatggctttgctgtgtgcaccagttcgagatgaagcagtgcagaaactagaaaacattacggatcctgtttggctactgagagggatcttccaggttctgggccggatgaaaatggacatggtgaactacactatccagagccttcaacccacctgcaggaacattccattcagtatgaacgggctaaattccaggaactcctcaataagcagcctagtctccttaatcacaccaccaaatggctgacccaagcagcaggagacctcaccatgtcacctccgacttgcccagacacttctgactcctccagtgtggctggcccctctcccaatgaggcagccaacaacccagagcccctcagccccacaatggtgctgtgtcagggcttcttgaacctccttctctgggaccttgaaaatgaagagttccctgagaccctgctgatggacagaacccggctgcaggagctgaagtcccagttgcaccagttaaccgtcatggcctcagtcttgctggtggccagtagtttctccggcagtgttttgtttggctcaccccaatttgtagataaactgaaacgcataaccaaatccttgttggaagactttcactccaggcctgaggaagctatactgactgtgagtgaacaggtatctcaggaaatccatcaaagcctcaagaatatgggccttgttgctctaagcagtgataatacagcatctctaatgggacagctccagaacattgccaagaaggagaactgtgtctgcagtgttattgatcagcggatccatttgtttctcaaatgctgtttggttcttggtgtgcagcggtctctattagaccttcctggaggccttactctcattgaagcagaactggcagaactgggccaaaagtttgtcaacttgacacatcacaatcagcaggtgtttggtccctactacactgagatcctaaaaaccctcatttccccagcccaggcactggaaacaaaagtggagtctgtttgatagcgtcggctcagagccctggtaccttggacccaagaggaggcccatcatcttcctggagtaacatcaccagtgaccagcagacagtgagcttctatcccaggccctgcagccagtacaccaaggctgtagggatcaagcatgtaaacaccaactggtccatacccattcattaataaacttcttaagtgcaagaaaac

SEQ ID NO: 729867 - DNA, 1753 bp, Homo sapiens
acgtgccccgtcccgttgccccggcgaccgcggcggtttgttctcaggccccggcctttctcaccgtgcgacgccccaacccgccgctccgccgcggtggtacgctccaggccgcgaggcccaccgagcggacgccagtggatgacccgcggcgggggaggaggagttctttctgtcacaggtctgacagaaaccgttaatgaagtttccaagctgagcaacaagattgggatgaattgtgattactacatggaagagaaggttttacctccaagcagtctggaaggcaaggtcaaggagacagtgcacaatgccttttgggaccatcttaaagagcaactatcagcaactccccctgacttcagctgtgctcttgaacttctgaaagaaattaaagagatcttgctatcactgctattaccacgccagaaccgcctgagaattgagattgaagaagctctggacatggacttgctcaagcaggaggcagaacatggggccctgaaagtcctctatctctctaagtacgttctcaacatgatggctttgctgtgtgcaccagttcgagatgaagcagtgcagaaactagaaaacattacggatcctgtttggctactgagagggatcttccaggttctgggccggatgaaaatggacatggtgaactacactatccagagccttcaacccacctgcaggaacattccattcagtatgaacgggctaaattccaggaactcctcaataagcagcctagtctccttaatcacaccaccaaatggctgacccaagcagcaggagacctcaccatgtcacctccgacttgcccagacacttctgactcctccagtgtggctggcccctctcccaatgaggcagccaacaacccagagcccctcagccccacaatggtgctgtgtcagggcttcttgaacctccttctctgggaccttgaaaatgaagagttccctgagaccctgctgatggacagaacccggctgcaggagctgaagtcccagttgcaccagttaaccgtcatggcctcagtcttgctggtggccagtagtttctccggcagtgttttgtttggctcaccccaatttgtagataaactgaaacgcataaccaaatccttgttggaagactttcactccaggcctgaggaagctatactgactgtgagtgaacaggtatctcaggaaatccatcaaagcctcaagaatatgggccttgttgctctaagcagtgataatacagcatctctaatgggacagctccagaacattgccaagaaggagaactgtgtctgcagtgttattgatcagcggatccatttgtttctcaaatgctgtttggttcttggtgtgcagcggtctctattagaccttcctggaggccttactctcattgaagcagaactggcagaactgggccaaaagtttgtcaacttgacacatcacaatcagcaggtgtttggtccctactacactgagatcctaaaaaccctcatttccccagcccaggcactggaaacaaaagtggagtctgtttgatagcgtcggctcagagccctggtaccttggacccaagaggaggcccatcatcttcctggagtaacatcaccagtgaccagcagacagtgagcttctatcccaggccctgcagccagtacaccaaggctgtagggatcaagcatgtaaacaccaactggtccatacccattcattaataaacttcttaagtgcaagaaaac

SEQ ID NO: 729868 - DNA, 1751 bp, Homo sapiens
ataccatcagcaaaatgccagacgtcaaggagagtgtgcccccgaaatatcctggcgactcagagggcagagaacgtaactagtcatcaaactgaggagctgtccgtgtgcaacaactcaagataaaattcttgactattgaaatgcgaaaaattagattgaggctttgcggctgaattagattggtttttcttgtggccacatgaggtcgctgctggttaactgaatggcaccaaaaggcatattggggtcatttccaacagctatgaacctgagtctggaaggcaaggtcaaggagacagtgcacaatgccttttgggaccatcttaaagagcaactatcagcaactccccctgacttcagctgtgctcttgaacttctgaaagaaattaaagagatcttgctatcactgctattaccacgccagaaccgcctgagaattgagattgaagaagctctggacatggacttgctcaagcaggaggcagaacatggggccctgaaagtcctctatctctctaagtacgttctcaacatgatggctttgctgtgtgcaccagttcgagatgaagcagtgcagaaactagaaaacattacggatcctgtttggctactgagagggatcttccaggttctgggccggatgaaaatggacatggtgaactacactatccagagccttcaacccacctgcaggaacattccattcagtatgaacgggctaaattccaggaactcctcaataagcagcctagtctccttaatcacaccaccaaatggctgacccaagcagcaggagacctcaccatgtcacctccgacttgcccagacacttctgactcctccagtgtggctggcccctctcccaatgaggcagccaacaacccagagcccctcagccccacaatggtgctgtgtcagggcttcttgaacctccttctctgggaccttgaaaatgaagagttccctgagaccctgctgatggacagaacccggctgcaggagctgaagtcccagttgcaccagttaaccgtcatggcctcagtcttgctggtggccagtagtttctccggcagtgttttgtttggctcaccccaatttgtagataaactgaaacgcataaccaaatccttgttggaagactttcactccaggcctgaggaagctatactgactgtgagtgaacaggtatctcaggaaatccatcaaagcctcaagaatatgggccttgttgctctaagcagtgataatacagcatctctaatgggacagctccagaacattgccaagaaggagaactgtgtctgcagtgttattgatcagcggatccatttgtttctcaaatgctgtttggttcttggtgtgcagcggtctctattagaccttcctggaggccttactctcattgaagcagaactggcagaactgggccaaaagtttgtcaacttgacacatcacaatcagcaggtgtttggtccctactacactgagatcctaaaaaccctcatttccccagcccaggcactggaaacaaaagtggagtctgtttgatagcgtcggctcagagccctggtaccttggacccaagaggaggcccatcatcttcctggagtaacatcaccagtgaccagcagacagtgagcttctatcccaggccctgcagccagtacaccaaggctgtagggatcaagcatgtaaacaccaactggtccatacccattcattaataaacttcttaagtgcaagaaaac

SEQ ID NO: 729869 - DNA, 822 bp, Homo sapiens
acgtgccccgtcccgttgccccggcgaccgcggcggtttgttctcaggccccggcctttctcaccgtgcgacgccccaacccgccgctccgccgcggtggtacgctccaggccgcgaggcccaccgagcggacgccagtggatgacccgcggcgggggaggaggagataccatcagcaaaatgccagacgtcaaggagagtgtgcccccgaaatatcctggcgactcagagggcaggtcctgtaagcccgaaacctcaggacccccccaggaagacaagagcggctccgaggacccccctccctttctttctgtcacaggtctgacagaaaccgttaatgaagtttccaagctgagcaacaagattgggatgaattgtgattactacatggaagagaaggttttacctccaagcagtctggaaggcaaggtcaaggagacagtgcacaatgccttttgggaccatcttaaagagcaactatcagcaactccccctgacttcagctgtgctcttgaacttctgaaagaaattaaagagatcttgctatcactgctattaccacgccagaaccgcctgagaattgagattgaagaagctctggacatggacttgctcaagcaggaggcagaacatggggcccctggtaccttggacccaagaggaggcccatcatcttcctggagtaacatcaccagtgaccagcagacagtgagcttctatcccaggccctgcagccagtacaccaaggctgtagggatcaagcatgtaaacaccaactggtccatacccattcattaataaacttcttaagtgcaagaaaac

SEQ ID NO: 729870 - DNA, 684 bp, Homo sapiens
acgtgccccgtcccgttgccccggcgaccgcggcggtttgttctcaggccccggcctttctcaccgtgcgacgccccaacccgccgctccgccgcggtggtacgctccaggccgcgaggcccaccgagcggacgccagtggatgacccgcggcgggggaggaggagttctttctgtcacaggtctgacagaaaccgttaatgaagtttccaagctgagcaacaagattgggatgaattgtgattactacatggaagagaaggttttacctccaagcagtctggaaggcaaggtcaaggagacagtgcacaatgccttttgggaccatcttaaagagcaactatcagcaactccccctgacttcagctgtgctcttgaacttctgaaagaaattaaagagatcttgctatcactgctattaccacgccagaaccgcctgagaattgagattgaagaagctctggacatggacttgctcaagcaggaggcagaacatggggcccctggtaccttggacccaagaggaggcccatcatcttcctggagtaacatcaccagtgaccagcagacagtgagcttctatcccaggccctgcagccagtacaccaaggctgtagggatcaagcatgtaaacaccaactggtccatacccattcattaataaacttcttaagtgcaagaaaac

SEQ ID NO: 729871 - DNA, 1779 bp, Homo sapiens
acgtgccccgtcccgttgccccggcgaccgcggcggtttgttctcaggccccggcctttctcaccgtgcgacgccccaacccgccgctccgccgcggtggtacgctccaggccgcgaggcccaccgagcggacgccagtggatgacccgcggcgggggaggaggagataccatcagcaaaatgccagacgtcaaggagagtgtgcccccgaaatatcctggcgactcagagggcaggtcctgtaagcccgaaacctcaggacccccccaggaagacaagagcggctccgaggacccccctcccttctggaaggcaaggtcaaggagacagtgcacaatgccttttgggaccatcttaaagagcaactatcagcaactccccctgacttcagctgtgctcttgaacttctgaaagaaattaaagagatcttgctatcactgctattaccacgccagaaccgcctgagaattgagattgaagaagctctggacatggacttgctcaagcaggaggcagaacatggggccctgaaagtcctctatctctctaagtacgttctcaacatgatggctttgctgtgtgcaccagttcgagatgaagcagtgcagaaactagaaaacattacggatcctgtttggctactgagagggatcttccaggttctgggccggatgaaaatggacatggtgaactacactatccagagccttcaacccacctgcaggaacattccattcagtatgaacgggctaaattccaggaactcctcaataagcagcctagtctccttaatcacaccaccaaatggctgacccaagcagcaggagacctcaccatgtcacctccgacttgcccagacacttctgactcctccagtgtggctggcccctctcccaatgaggcagccaacaacccagagcccctcagccccacaatggtgctgtgtcagggcttcttgaacctccttctctgggaccttgaaaatgaagagttccctgagaccctgctgatggacagaacccggctgcaggagctgaagtcccagttgcaccagttaaccgtcatggcctcagtcttgctggtggccagtagtttctccggcagtgttttgtttggctcaccccaatttgtagataaactgaaacgcataaccaaatccttgttggaagactttcactccaggcctgaggaagctatactgactgtgagtgaacaggtatctcaggaaatccatcaaagcctcaagaatatgggccttgttgctctaagcagtgataatacagcatctctaatgggacagctccagaacattgccaagaaggagaactgtgtctgcagtgttattgatcagcggatccatttgtttctcaaatgctgtttggttcttggtgtgcagcggtctctattagaccttcctggaggccttactctcattgaagcagaactggcagaactgggccaaaagtttgtcaacttgacacatcacaatcagcaggtgtttggtccctactacactgagatcctaaaaaccctcatttccccagcccaggcactggaaacaaaagtggagtctgtttgatagcgtcggctcagagccctggtaccttggacccaagaggaggcccatcatcttcctggagtaacatcaccagtgaccagcagacagtgagcttctatcccaggccctgcagccagtacaccaaggctgtagggatcaagcatgtaaacaccaactggtccatacccattcattaataaacttcttaagtgcaagaaaac

SEQ ID NO: 729872 - DNA, 1985 bp, Homo sapiens
acgtgccccgtcccgttgccccggcgaccgcggcggtttgttctcaggccccggcctttctcaccgtgcgacgccccaacccgccgctccgccgcggtggtacgctccaggccgcgaggcccaccgagcggacgccagtggatgacccgcggcgggggaggaggagataccatcagcaaaatgccagacgtcaaggagagtgtgcccccgaaatatcctggcgactcagagggcaggtcctgtaagcccgaaacctcaggacccccccaggaagacaagagcggctccgaggacccccctccctagaacgtaactagtcatcaaactgaggagctgtccgtgtgcaacaactcaagataaaattcttgactattgaaatgcgaaaaattagattgaggctttgcggctgaattagattggtttttcttgtggccacatgaggtcgctgctggttaactgaatggcaccaaaaggcatattggggtcatttccaacagctatgaacctgagtctggaaggcaaggtcaaggagacagtgcacaatgccttttgggaccatcttaaagagcaactatcagcaactccccctgacttcagctgtgctcttgaacttctgaaagaaattaaagagatcttgctatcactgctattaccacgccagaaccgcctgagaattgagattgaagaagctctggacatggacttgctcaagcaggaggcagaacatggggccctgaaagtcctctatctctctaagtacgttctcaacatgatggctttgctgtgtgcaccagttcgagatgaagcagtgcagaaactagaaaacattacggatcctgtttggctactgagagggatcttccaggttctgggccggatgaaaatggacatggtgaactacactatccagagccttcaacccacctgcaggaacattccattcagtatgaacgggctaaattccaggaactcctcaataagcagcctagtctccttaatcacaccaccaaatggctgacccaagcagcaggagacctcaccatgtcacctccgacttgcccagacacttctgactcctccagtgtggctggcccctctcccaatgaggcagccaacaacccagagcccctcagccccacaatggtgctgtgtcagggcttcttgaacctccttctctgggaccttgaaaatgaagagttccctgagaccctgctgatggacagaacccggctgcaggagctgaagtcccagttgcaccagttaaccgtcatggcctcagtcttgctggtggccagtagtttctccggcagtgttttgtttggctcaccccaatttgtagataaactgaaacgcataaccaaatccttgttggaagactttcactccaggcctgaggaagctatactgactgtgagtgaacaggtatctcaggaaatccatcaaagcctcaagaatatgggccttgttgctctaagcagtgataatacagcatctctaatgggacagctccagaacattgccaagaaggagaactgtgtctgcagtgttattgatcagcggatccatttgtttctcaaatgctgtttggttcttggtgtgcagcggtctctattagaccttcctggaggccttactctcattgaagcagaactggcagaactgggccaaaagtttgtcaacttgacacatcacaatcagcaggtgtttggtccctactacactgagatcctaaaaaccctcatttccccagcccaggcactggaaacaaaagtggagtctgtttgatagcgtcggctcagagccctggtaccttggacccaagaggaggcccatcatcttcctggagtaacatcaccagtgaccagcagacagtgagcttctatcccaggccctgcagccagtacaccaaggctgtagggatcaagcatgtaaacaccaactggtccatacccattcattaataaacttcttaagtgcaagaaaac

SEQ ID NO: 729873 - DNA, 1573 bp, Homo sapiens
acgtgccccgtcccgttgccccggcgaccgcggcggtttgttctcaggccccggcctttctcaccgtgcgacgccccaacccgccgctccgccgcggtggtacgctccaggccgcgaggcccaccgagcggacgccagtggatgacccgcggcgggggaggaggagtctggaaggcaaggtcaaggagacagtgcacaatgccttttgggaccatcttaaagagcaactatcagcaactccccctgacttcagctgtgctcttgaacttctgaaagaaattaaagagatcttgctatcactgctattaccacgccagaaccgcctgagaattgagattgaagaagctctggacatggacttgctcaagcaggaggcagaacatggggccctgaaagtcctctatctctctaagtacgttctcaacatgatggctttgctgtgtgcaccagttcgagatgaagcagtgcagaaactagaaaacattacggatcctgtttggctactgagaatgaccatagtgaaggagatctagactgaaggcttcaaggtccagagacttagctgttcccaattctgccactgactcaccctgggtattgggttctgggccacatgttatcttctgaaaatgtaggagagggatcttccaggttctgggccggatgaaaatggacatggtgaactacactatccagagccttcaacccacctgcaggaacattccattcagtatgaacgggctaaattccaggaactcctcaataagcagcctagtctccttaatcacaccaccaaatggctgacccaagcagcaggagacctcaccatgtcacctccgacttgcccagacacttctgactcctccagtgtggctggcccctctcccaatgaggcagccaacaacccagagcccctcagccccacaatggtgctgtgtcagggcttcttgaacctccttctctgggaccttgaaaatgaagagttccctgagaccctgctgatggacagaacccggctgcaggagctgaagtcccagttgcaccagttaaccgtcatggcctcagtcttgctggtggccagtagtttctccggcagtgttttgtttggctcaccccaatttgtagataaactgaaacgcataaccaaatccttgttggaagactttcactccaggcctgaggaagctatactgactgtgagtgaacaggtatctcaggaaatccatcaaagcctcaagaatatgggccttgttgctctaagcagtgataatacagcatctctaatgggacagctccagaacattgccaagaaggagaactgtgtctgcagtgttattgcccaggcactggaaacaaaagtggagtctgtttgatagcgtcggctcagagccctggtaccttggacccaagaggaggcccatcatcttcctggagtaacatcaccagtgaccagcagacagtgagcttctatcccaggccctgcagccagtacaccaaggctgtagggatcaagcatgtaaacaccaactggtccatacccattcattaataaacttcttaagtgcaagaaaac

SEQ ID NO: 729874 - DNA, 1693 bp, Homo sapiens
acgtgccccgtcccgttgccccggcgaccgcggcggtttgttctcaggccccggcctttctcaccgtgcgacgccccaacccgccgctccgccgcggtggtacgctccaggccgcgaggcccaccgagcggacgccagtggatgacccgcggcgggggaggaggagataccatcagcaaaatgccagacgtcaaggagagtgtgcccccgaaatatcctggcgactcagagggcaggtcctgtaagcccgaaacctcaggacccccccaggaagacaagagcggctccgaggacccccctccctttctttctgtcacaggtctgacagaaaccgttaatgaagtttccaagctgagcaacaagattgggatgaattgtgattactacatggaagagaaggttttacctccaagcagtctggaaggcaaggtcaaggagacagtgcacaatgccttttgggaccatcttaaagagcaactatcagcaactccccctgacttcagctgtgctcttgaacttctgaaagaaattaaagagatcttgctatcactgctattaccacgccagaaccgcctgagaattgagattgaagaagctctggacatggacttgctcaagcaggaggcagaacatggggccctgaaagtcctctatctctctaagtacgttctcaacatgatggctttgctgtgtgcaccagttcgagatgaagcagtgcagaaactagaaaacattacggatcctgtttggctactgagagggatcttccaggttctgggccggatgaaaatggacatggtgaactacactatccagagccttcaacccacctgcaggaacattccattcagtatgaacgggctaaattccaggaactcctcaataagcagcctagtctccttaatcacaccaccaaatggctgacccaagcagcaggagacctcaccatgtcacctccgacttgcccagacacttctgactcctccagtgtggctggcccctctcccaatgaggcagccaacaacccagagcccctcagccccacaatggtgctgtgtcagggcttcttgaacctccttctctgggaccttgaaaatgaagagttccctgagaccctgctgatggacagaacccggctgcaggagctgaagtcccagttgcaccagttaaccgtcatggcctcagtcttgctggtggccagtagtttctccggcagtgttttgtttggctcaccccaatttgtagataaactgaaacgcataaccaaatccttgttggaagactttcactccaggcctgaggaagctatactgactgtgagtgaacaggtatctcaggaaatccatcaaagcctcaagaatatgggccttgttgctctaagcagtgataatacagcatctctaatgggacagctccagaacattgccaagaaggagaactgtgtctgcagtgttattgcccaggcactggaaacaaaagtggagtctgtttgatagcgtcggctcagagccctggtaccttggacccaagaggaggcccatcatcttcctggagtaacatcaccagtgaccagcagacagtgagcttctatcccaggccctgcagccagtacaccaaggctgtagggatcaagcatgtaaacaccaactggtccatacccattcattaataaacttcttaagtgcaagaaaac

SEQ ID NO: 729875 - DNA, 1555 bp, Homo sapiens
acgtgccccgtcccgttgccccggcgaccgcggcggtttgttctcaggccccggcctttctcaccgtgcgacgccccaacccgccgctccgccgcggtggtacgctccaggccgcgaggcccaccgagcggacgccagtggatgacccgcggcgggggaggaggagttctttctgtcacaggtctgacagaaaccgttaatgaagtttccaagctgagcaacaagattgggatgaattgtgattactacatggaagagaaggttttacctccaagcagtctggaaggcaaggtcaaggagacagtgcacaatgccttttgggaccatcttaaagagcaactatcagcaactccccctgacttcagctgtgctcttgaacttctgaaagaaattaaagagatcttgctatcactgctattaccacgccagaaccgcctgagaattgagattgaagaagctctggacatggacttgctcaagcaggaggcagaacatggggccctgaaagtcctctatctctctaagtacgttctcaacatgatggctttgctgtgtgcaccagttcgagatgaagcagtgcagaaactagaaaacattacggatcctgtttggctactgagagggatcttccaggttctgggccggatgaaaatggacatggtgaactacactatccagagccttcaacccacctgcaggaacattccattcagtatgaacgggctaaattccaggaactcctcaataagcagcctagtctccttaatcacaccaccaaatggctgacccaagcagcaggagacctcaccatgtcacctccgacttgcccagacacttctgactcctccagtgtggctggcccctctcccaatgaggcagccaacaacccagagcccctcagccccacaatggtgctgtgtcagggcttcttgaacctccttctctgggaccttgaaaatgaagagttccctgagaccctgctgatggacagaacccggctgcaggagctgaagtcccagttgcaccagttaaccgtcatggcctcagtcttgctggtggccagtagtttctccggcagtgttttgtttggctcaccccaatttgtagataaactgaaacgcataaccaaatccttgttggaagactttcactccaggcctgaggaagctatactgactgtgagtgaacaggtatctcaggaaatccatcaaagcctcaagaatatgggccttgttgctctaagcagtgataatacagcatctctaatgggacagctccagaacattgccaagaaggagaactgtgtctgcagtgttattgcccaggcactggaaacaaaagtggagtctgtttgatagcgtcggctcagagccctggtaccttggacccaagaggaggcccatcatcttcctggagtaacatcaccagtgaccagcagacagtgagcttctatcccaggccctgcagccagtacaccaaggctgtagggatcaagcatgtaaacaccaactggtccatacccattcattaataaacttcttaagtgcaagaaaac

SEQ ID NO: 729876 - DNA, 1219 bp, Homo sapiens
  misc_feature (2)..(2): n is a, c, g, or t
  misc_feature (5)..(5): n is a, c, g, or t
  misc_feature (8)..(8): n is a, c, g, or t
gncanganggcggcgcggtcgtcgtcgggggtggcggcggcagagggggcggcggccctggcggcagcggagacggcagccgtgacggtggcagcggcggcgcgggacctgggcctgggggaatgaggcggccgcggcgggccagcggcggagccgtgtagcggagaagctccccctccctgcttcccttggccgagccgggggcgcgcgcgcacgcggccgtccagagcgggctccccacccctcgactcctgcgacccgcaccgcacccccacccgggcccggaggatgatgaagctcaagtcgaaccagacccgcacctacgacggcgacggctacaagaagcgggccgcatgcctgtgtttccgcagcgagagcgaggaggaggtgctactcgtgagcagtagtcgccatccagacagatggattgtccctggaggaggcatggagcccgaggaggagccaagtgtggcagcagttcgtgaagtctgtgaggaggctggagtaaaagggacattgggaagattagttggaatttttgagaaccaggagaggaagcacaggacgtatgtctatgtgctcattgtcactgaagtgctggaagactgggaagattcagttaacattggaaggaagagggaatggtttaaaatagaagacgccataaaagtgctgcagtatcacaaacccgtgcaggcatcatattttgaaacattgaggcaaggctactcagccaacaatggcaccccagtcgtggccaccacatactcggtttctgctcagagctcgatgtcaggcatcagatgactgaagacttcctgtaagagaaatggaaattggaaactagactgaagtgcaaatcttccctctcaccctggctctttccacttctcacaggcctcctctttcaaataaggcatggtgggcagcaaagaaagggtgtattgataatgttgctgtttggtgttaagtgatggggctttttcttctgtttttattgagggtgggggttgggtgtgtaatttgtaagtacttttgtgcatgatctgtccctccctcttcccacccctgcagtcctctgaagagaggccaacagccttcccctgccttggattctgaagtgttcctgtttgtcttatcctggccctggccagacgttttctttgatttttaattttttttttttattaaaagataccagtatgagatgaaaacttcc

SEQ ID NO: 729877 - DNA, 1339 bp, Homo sapiens
  misc_feature (2)..(2): n is a, c, g, or t
  misc_feature (5)..(5): n is a, c, g, or t
  misc_feature (8)..(8): n is a, c, g, or t
gncanganggcggcgcggtcgtcgtcgggggtggcggcggcagagggggcggcggccctggcggcagcggagacggcagccgtgacggtggcagcggcggcgcgggacctgggcctgggggaatgaggcggccgcggcgggccagcggcggagccgtgtagcggagaagctccccctccctgcttcccttggccgagccgggggcgcgcgcgcacgcggccgtccagagcgggctccccacccctcgactcctgcgacccgcaccgcacccccacccgggcccggaggatgatgaagctcaagtcgaaccagacccgcacctacgacggcgacggctacaagaagcgggccgcatgcctgtgtttccgcagcgagagcgaggaggaggtgctactcgtgagcagtagtcgccatccagacagatggattgtccctggaggaggcatggagcccgaggaggagccaagtgtggcagcagttcgtgaagtctgtgaggaggctggagtaaaagggacattgggaagattagttggaatttttgagaaccaggagaggaagcacaggacgtatgtctatgtgctcattgtcactgaagtgctggaagactgggaagattcagttaacattggaaggaagagggaatggtttaaaatagaagacgccataaaagtgctgcagtatcacaaacccgtgcaggcatcatattttgaaacattgaggcaaggctactcagccaacaatggcaccccagtcgtggccaccacatactcggtttctgctcagagctcgatgtcaggcatcagatgactgaagacttcctgtaagagaaatggaaattggaaactagactgaagtgcaaatcttccctctcaccctggctctttccacttctcacaggcctcctctttcaaataaggcatggtgggcagcaaagaaagggtgtattgataatgttgctgtttggtgttaagtgatggggctttttcttctgtttttattgagggtgggggttgggtgtgtaatttgtaagtacttttgtgcatgatctgtccctccctcttcccacccctgcagtcctctgaagagaggccaacagccttcccctgccttggattctgaagtgttcctgtttgtcttatcctggccctggccagacgttttctttgatttttaattttttttttttattaaaagataccagtatgagatgaaaacttccaataatttgtcctataatgtgctgtacagttcagtagagtggtcactttcactgcagtatacatttatctacacattatatatcggacatataatatgtaaataaatgacttctagaaag

SEQ ID NO: 729878 - DNA, 384 bp, Homo sapiens; identical to SEQ ID NO: 284788

SEQ ID NO: 729879 - DNA, 2564 bp, Homo sapiens
  misc_feature (1)..(1): n is a, c, g, or t
  misc_feature (368)..(368): n is a, c, g, or t
natccctgcagtggaagtgaggaggaagaaaggtgaactccttttctcaagcacttctgctctcctctaccagaatcactcagaatgcttcccgggtgtatattcttgatgattttactcattcctcaggttaaagaaaagttcatccttggagtagagggtcaacaactggttcgtcctaaaaagcttcctctgatacagaagcgagatactggacacacccatgatgatgacatactgaaaacgtatgaagaagaattgttgtatgaaataaaactaaatagaaaaaccttagtccttcatcttctaagatccagggagttcctaggctcaaattacagtgaaacattctactccatgaaaggagnagcgttcaccaggcatcctcagatcatggatcattgtttttaccaaggatccatagtacacgaatatgattcagctgccagtatcagtacgtgtaatggtctaaggggattcttcagaataaacgaccaaagatacctcattgaaccagtgaaatactcagatgagggagaacatttggtgttcaaatataacctgagggtgccgtatggtgccaattattcctgtacagagcttaattttaccagaaaaactgttccaggggataatgaatctgaagaagactccaaaataaaaggcatccatgatgaaaagtatgttgaattgttcattgttgctgatgatactgtgtatcgcagaaatggtcatcctcacaataaactaaggaaccgaatttggggaatggtcaattttgtcaacatgatttataaaaccttaaacatccatgtgacgttggttggcattgaaatatggacacatgaagataaaatagaactatattcaaatatagaaactaccttattgcgtttttcattttggcaagaaaagatccttaaaacacggaaggattttgatcatgttgtattactcagtgggaagtggctctactcacatgtgcaaggaatttcttatccagggggtatgtgcctgccctattattccaccagtatcattaaggatcttttacctgacacaaacataattgcaaacagaatggcacatcaactggggcataaccttgggatgcagcatgacgagttcccatgcacctgtccttcaggaaaatgcgtgatggacagtgatggaagcattcctgcactgaaattcagtaaatgcagccaaaaccaataccaccagtacttgaaggattataagccaacatgcatgctcaacattccatttccttacaattttcatgatttccaattttgtggaaacaagaagttggatgagggtgaagagtgtgactgtggccctgctcaggagtgtactaatccttgctgtgatgcacacacatgtgtactgaagccaggatttacttgtgcagaaggagaatgctgtgaatcttgtcagataaaaaaagcagggtccatatgcagaccggcgaaagatgaatgtgattttcctgagatgtgcactggccactcgcctgcctgtcctaaggaccagttcagggtcaatggatttccttgcaagaactcagaaggctactgtttcatggggaaatgtccaactcgtgaggatcagtgctctgaactatttgatgatgaggcaatagagagtcatgatatctgctacaagatgaatacaaaaggaaataaatttggatactgcaaaaacaaggaaaacagatttcttccctgtgaggagaaagatgtcagatgtggaaagatctactgcactggaggggagctttcctctctccttggagaagacaagacttatcaccttaaggatccccagaagaatgctactgtcaaatgcaaaactatttttttataccatgattctacagacattggcctggtggcgtcaggaacaaaatgtggagagggaatggtgtgcaacaatggtgaatgtctaaacatggaaaaggtctatatctcaaccaattgcccctctcagtgcaatgaaaatcctgtggatggccacggactccagtgccactgtgaggaaggacaggcacctgtagcctgtgaagaaaccttacatgttaccaatatcaccatcttggttgttgtgcttgtcctggttattgtcggtatcggagttcttatactattagttcgttaccgaaaatgtatcaagttgaagcaagttcagagcccacctacagaaaccctgggagtggagaacaaaggatactttggtgatgagcagcagataaggactgagccaatcctgccagaaattcatttcctaaataaacctgcaagtaaagattcaagaggaatcgcagatcccaatcaaagtgccaagtgagcttgaagttggatatccaaaatggccgtgcaagcttaggctggggattctggatgcaacgtctttacaaccttacctagatatctgctactcacatttttggtagtgtttcaaacgttctttatccagacagacaatgtttaagagaaacaacttatttctgttaatatttaccggtagaattcacaccctctatcataaacatatgctgcaga

SEQ ID NO: 729880 - DNA, 717 bp, Homo sapiens
agtctggtttgccctcgtagctatttcctggagggaaggggtagctacagtttcctgtccctcttcagcacttctccagctccatatcgcagaaatggtcatcctcacaataaactaaggaaccgaatttggggaatggtcaattttgtcaacatgatttataaaaccttaaacatccatgtgacgttggttggcattgaaatatggacacatgaagataaaatagaactatattcaaatatagaaactaccttattgcgtttttcattttggcaagaaaagatccttaaaacacggaaggattttgatcatgttgtattactcagtgggaagtggctctactcacatgtgcaaggaatttcttatccagggggtatgtgcctgccctattattccaccagtatcattaaggatcttttacctgacacaaacataattgcaaacagaatggcacatcaactggggcataaccttgggatgcagcatgacgagttcccatgcacctgtccttcaggaaaatgcgtgatggacagtgatggaagcattcctgcactgaaattcagtaaatgcagccaaaaccaataccaccagtacttgaaggattataagccaacatgcatgctcaacattccatttccttacaattttcatgatttccaattttgtggaaacaagaagttggatgagggtgaagagtgtgactgtggccctgctcag

SEQ ID NO: 729881 - DNA, 576 bp, Homo sapiens
actcttctggtccccacagactcagagagaacccaccatggtgctgtctcctgccgacaagaccaacgtcaaggccgcctggggtaaggtcggcgcgcacgctggcgagtatggtgcggaggccctggagaggatgttcctgtccttccccaccaccaagacctacttcccgcacttcgacctgagccacggctctgcccaggttaagggccacggcaagaaggtggccgacgcgctgaccaacgccgtggcgcacgtggacgacatgcccaacgcgctgtccgccctgagcgacctgcacgcgcacaagcttcgggtggacccggtcaacttcaagctcctaagccactgcctgctggtgaccctggccgcccacctccccgccgagttcacccctgcggtgcacgcctccctggacaagttcctggcttctgtgagcaccgtgctgacctccaaataccgttaagctggagcctcggtggccatgcttcttgccccttgggcctccccccagcccctcctccccttcctgcacccgtacccccgtggtctttgaataaagtctgagtgggcggc

SEQ ID NO: 729882 - DNA, 1626 bp, Homo sapiens
ggcacgaggacgtggggtggtaccccaggcctgggtcagacagggacatggcaggggacacaggacagaggggtccccagctgccacctcacccaccgcaattcatttagtagcaggcacaggggcagctccggcacggctttctcaggcctatgccggagcctcgagggctggagagcgggaagacaggcagtgctcggggagttgcagcaggacgtcaccaggagggcgaagcggccacgggaggggggccccgggacattgcgcagcaaggaggctgcaggggctcggcctgcgggcgccggtcccacgaggcactgcggcccagggtctggtgcggagagggcccacagtggacttggtgacgctgtatgccctcaccgctcagcccctggggctggcttggcagacagtacagcatccaggggagtcaagggcatggggcgagaccagactaggcgaggcgggcggggcggagtgaatgagctctcaggagggaggatggtgcaggcaggggtgaggagcgcagcgggcggcgagcgggaggcactggcctccagagcccgtggccaaggcgggcctcgcgggcggcgacggagccgggatcggtgcctcagcgttcgggctggagacgaggccaggtctccagctggggtggacgtgcccaccagctgccgaaggccaagacgccaggtccggtggacgtgacaagcaggacatgacatggtccggtgtgacggcgaggacagaggaggcgcgtccggccttcctgaacaccttaggctggtggggctgcggcaagaagcgggtctgtttctttacttcctccacggagtcggcacactatggctgccctctgggctcccagaacccacaacatgaaagaaatggtgctacccagctcaagcctgggcctttgaatccggacacaaaaccctctagcttggaaatgaatatgctgcactttacaaccactgcactacctgactcaggaatcggctctggaaggtgaagctagaggaaccagacctcatcagcccaacatcaaagacaccatcggaacagcagcgcccgcagcacccaccccgcaccggcgactccatcttcatggccaccccctgcggcggacggttgaccaccagccaccacatcatcccagagctgagctcctccagcgggatgacgccgtccccaccacctccctcttcttctttttcatccttctgtctctttgtttctgagctttcctgtctttccttttttctgagagattcaaagcctccacgactctgtttcccccgtcccttctgaatttaatttgcactaagtcatttgcactggttggagttgtggagacggccttgagtctcagtacgagtgtgcgtgagtgtgagccaccttggcaagtgcctgtgcagggcccggccgccctccatctgggccgggtgactgggcgccggctgtgtgcccgaggcctcaccctgccctcgcctagtctggaagctccgaccgacatcacggagcagccttcaagcattccattacgccccatctcgctctgtgcccctccccaccagggcttcagcaggagccctggactcatcatcaataaacactgttacagca

SEQ ID NO: 729883 - DNA, 1886 bp, Homo sapiens
ggcacgaggacgtggggtggtaccccaggcctgggtcagacagggacatggcaggggacacaggacagaggggtccccagctgccacctcacccaccgcagctgaagcattttacagtggtttgccattagggtattcattcagataatgttttcctactaggaattacaaactttaaacactttttaaatcttcaaaatatttaaaacaaatttaaagggcctgttaattcttatatttttctttactaatcattttggatttttttttttgaattattggcagggaatatacttatgtatggaagattactgctctgagtgaaataaaagttattagtgcgaggcaaacataactcatttgaggataaagtttgtgttggatatgtggttcctgatgcattttgacttgtctttttaaatgctttttttttttttttaaagatttatttcaataaaactaattgggaccacccgtatttcagtaggacctgggtagggattggaagtacttggcagggcagcagcaatcttgctgtgtttgatataacatgcatccttgggcaggttgcccttaaatcttacactgtggtgaagggatgttttttttgtaatgctgcagtagagttggagtacttagttctcttgttgtccagtatatctaataagtgtttttcatattatttccacgtaagggaaataaggtagtacttttctttttatatttctatgcttaaaattctctttcctagtcaaaaattgcccaaatctgtgtttgctttctgcttgctacatttgtctcccttacttttcttgagctaaagacaggctttttccaccggcatcatcactgctatcatcattaacagcgtaattatacaagcatatttaatgctgagtttaatttaatatgtaatacatatggtaattgtagggtaatacccacaacaactgtagtttcttacttggccaagagaatgcttatttaagtgttagacttccattctggcaaaatcttgccttatcagaagacattggaaagagggattccctttggtgtttggtcttctacttagaaaaacctattgcagttagtttatcttgtagtattcatctttgtattctgaggataaggtttgaattaaattgatacacacagaggggaaccgattttttttatccaatgtgaattataaatgagataatccacagttattcattgtggagttgttgagactatgaaagactcattgtctttgtattcagctcttaaatagtgtaactatatccccacctctgcttgctttctttccctcccctccaatgataaagaaaatgataaattttctgttgtgcattcaattcttattttaaataagactaagtataggcattgtacctgacattgctacgtttctaccagtgtttcaatttaaagtgctagtgtttaaaaacattttcaagggataaggccttctgtactttgcttatttgaagaatcagtggtaggagcagtgaagtaaattctatggagtacatttctaaaataccacatttctgaaatcataaataagtttattcaggttctaaccctttgctgtacacaagcagacagaaatgcatctgttacataaatgagaaaaagctattatgctgatggagcatgctttttaaatcctttaaaaacactcaccatataaacttgcatttgagcttgtgtgttcttttgttaatgtgtagagttctcctttctcgaaattgccagtgtgtacttggcttaactcaagaacagtttcttctggattccttatttgatttatttaacctaattatattctaatattgcaaatattaccataagtgggtaaaagtaaaattcctcttctg

SEQ ID NO: 729884 - DNA, 2653 bp, Homo sapiens
ctcactgcctgtataatcaggtctttattcaaaagaagctgtccaaaatgatttgacctttatggaataatcaaatttaagagtttatgcagcaggcttcttctcctctgtagtaggtttcttctctgcaggcttcttttcaggggctggtttcttggtagctgctgccttttttcccaccagaggcttcttctgcttcttaacaccaacagcagccttctttcctttcttacctaccacaggcttcttgcctgcaaccgccgccttctcatctgatttggcttgtagtgccgctgctgcagcagctgccttatccacccggagcttgtgattcctggcctggcgaagaatggtgttccggcgcatggtctttgcatatgggtttagcttcaacatgattctcaagtttttcagtgggttcttctttaggactctgcgatggatcttcttgcgtggtgctcgaagggctctttggatctctgggcttttcaagattctgctaagatctgtattaatcatcttgtgcatgggaagattgtagttactcttgagggaagcggctttacgccaagtgccgtacaattcatctaacttccggaaagcactttcagtccaaatgcagaaacgtcccacatgcccaccaggagcaagcttcaaaatgttcagcttgcttacattaagcagagtaattccagggatgtttctgaaggccttgatgataccattatcctcattatagatgatgcacgggcccctgcgctggatacggcgacggtttctcattttgcctttgccagctctcattcgctgagaggcatagacctttttgatatcattccaggctttaagtttcttaaggagcaaaacagcttccttggtcttcttgtagccttcaactttatcttcaactaccaaaggaagttcaggaacttcctcaatacgatgacctttagacatgaccagtgctggtagggctgaggcagccagggcagaacagatggcgtatcgtttttgggttgtgttcactctacgatgccaacggcgccaggttttggttggtgcaaacattcggcctccacgacacatgtttccaaaagcaccctggccagagcggtgagtcccaccacctcgaactctgggaattcgagccacagctctgccagtaccccaagactcagcactagtctgatgacctgctaattcactgacagcatagggctgtctgttgtttttgcgcaagttggtcaccaggagggcgaagcggccacgggaggggggccccgggacattgcgcagcaaggaggctgcaggggctcggcctgcgggcgccggtcccacgaggcactgcggcccagggtctggtgcggagagggcccacagtggacttggtgacgctgtatgccctcaccgctcagcccctggggctggcttggcagacagtacagcatccaggggagtcaagggcatggggcgagaccagactaggcgaggcgggcggggcggagtgaatgagctctcaggagggaggatggtgcaggcaggggtgaggagcgcagcgggcggcgagcgggaggcactggcctccagagcccgtggccaaggcgggcctcgcgggcggcgacggagccgggatcggtgcctcagcgttcgggctggagacgaggccaggtctccagctggggtggacgtgcccaccagctgccgaaggccaagacgccaggtccggtggacgtgacaagcaggacatgacatggtccggtgtgacggcgaggacagaggaggcgcgtccggccttcctgaacaccttaggctggtggggctgcggcaagaagcgggtctgtttctttacttcctccacggagtcggcacactatggctgccctctgggctcccagaacccacaacatgaaagaaatggtgctacccagctcaagcctgggcctttgaatccggacacaaaaccctctagcttggaaatgaatatgctgcactttacaaccactgcactacctgactcaggaatcggctctggaaggtgaagctagaggaaccagacctcatcagcccaacatcaaagacaccatcggaacagcagcgcccgcagcacccaccccgcaccggcgactccatcttcatggccaccccctgcggcggacggttgaccaccagccaccacatcatcccagagctgagctcctccagcgggatgacgccgtccccaccacctccctcttcttctttttcatccttctgtctctttgtttctgagctttcctgtctttccttttttctgagagattcaaagcctccacgactctgtttcccccgtcccttctgaatttaatttgcactaagtcatttgcactggttggagttgtggagacggccttgagtctcagtacgagtgtgcgtgagtgtgagccaccttggcaagtgcctgtgcagggcccggccgccctccatctgggccgggtgactgggcgccggctgtgtgcccgaggcctcaccctgccctcgcctagtctggaagctccgaccgacatcacggagcagccttcaagcattccattacgccccatctcgctctgtgcccctccccaccagggcttcagcaggagccctggactcatcatcaataaacactgttacagca

SEQ ID NO: 729885 - DNA, 2098 bp, Homo sapiens
gcaggagcacgtggagaggccgggtagccacagcggcagctccagcccggcccggcagcgacatggaagatatacaaacaaatgcggaactgaaaagcactcaggagcagtctgtgcccgcagaaagtgcagcggttttgaatgactacagtttaaccaaatctcatgaaatggaaaatgtggacagtggagaaggcccagccaatgaagatgaagacataggagatgattcaatgaaagtgaaagatgaatacagtgaaagagatgagaatgttttaaagtcagaacccatgggaaatgcagaagagcctgaaatcccttacagctattcaagagaatataatgaatatgaaaacattaagttggagagacatgttgtctcattcgatagtagcaggccaaccagtggaaagatgaactgcgatgtgtgtggattatcctgcatcagcttcaatgtcttaatggttcataagcgaagccatactggtgaacgcccattccagtgtaatcagtgtggggcatcttttactcagaaaggtaacctcctccgccacattaaactgcacacaggggaaaaaccttttaagtgtcacctctgcaactatgcatgccaaagaagagatgcgctcacggggcatcttaggacacattctgtggagaaaccctacaaatgtgagttttgtggaaggagttacaagcagagaagttcccttgaggagcacaaggagcgctgccgtacatttcttcagagcactgacccaggggacactgcaagtgcggaggcaagacacatcaaagcagagatgggaagtgaaagagctctcgtactggacagattagcaagcaatgtggcaaaacgaaaaagctcaatgcctcagaaattcattggtgagaagcgccactgctttgatgtcaactataattcaagttacatgtatgagaaagagagtgagctcatacagacccgcatgatggaccaagccatcaataacgccatcagctatcttggcgccgaagccctgtgccccttggtccagacaccgcctgctcccacctcggagatggttccagttatcagcagcatgtatcccatagccctcacccgggctgagatgtcaaacggtgcccctcaagagctggaaaggaaaagcatcctccttccagagaagagcgtgccttctgagagaggcctctctcccaacaatagtggccacgactccacggacactgacagcaaccatgaagaacgccagaatcacatctatcagcaaaatcacatggtcctgtctcgggcccgcaatgggatgccacttctgaaggaggttccccgctcttacgaactcctcaagcccccgcccatctgcccaagagactctgtcaaagtgatcgacaaggaaggggaggtgatggatgtgtatcggtgtgaccactgccgcgtcctcttcctggactatgtgatgttcacgattcacatgggctgccacggcttccgtgaccctttcgagtgtaacatgtgtggagatcgaagccatgatcggtatgaattctcgtctcacatagccagaggagaacacagaagcctgctgaagtgaatatctggtctcagggattgctcctatgtattcagcatcgtttctaaaaacagttgacctcgcctaacagattgctctcaaaacatactcagttccaaacttcttttcataccatttttagctgtgttcacaggggtagccagagaaacactgtcttccttcagaaattattcgcaggtctagcatattattacttttgtgaaacctttgttttcccatcagggacttgaattttatggaatttaaaagccaaaaaggtatttggtcattatcttctacagcagtggaatgagtggtcccggagatgtgctatatgaaacattctttctgagatatatcaaccacacgtggaaaagcctttcagtcatacatgcaaatccacaaagaggaagagctgaccagctgaccttgctgggaagcctcacccttctgcccttcacaggctgaagggttaagatctaatctccctaatctaaatgacagtctaagagtaagtaaaagaacag

SEQ ID NO: 729886 - DNA, 1566 bp, Homo sapiens
gtgagaagcgccactgctttgatgtcaactataattcaagttacatgtatgagaaagagagtgagctcatacagacccgcatgatggaccaagccatcaataacgccatcagctatcttggcgccgaagccctgtgccccttggtccagacaccgcctgctcccacctcggagatggttccagttatcagcagcatgtatcccatagccctcacccgggctgagatgtcaaacggtgcccctcaagagctggaaaggaaaagcatcctccttccagagaagagcgtgccttctgagagaggcctctctcccaacaatagtggccacgactccacggacactgacagcaaccatgaagaacgccagaatcacatctatcagcaaaatcacatggtcctgtctcgggcccgcaatgggatgccacttctgaaggaggttccccgctcttacgaactcctcaagcccccgcccatctgcccaagagactctgtcaaagtgatcgacaaggaaggggaggtgatggatgtgtatcggtgtgaccactgccgcgtcctcttcctggactatgtgatgttcacgattcacatgggctgccacggcttccgtgaccctttcgagtgtaacatgtgtggagatcgaagccatgatcggtatgaattctcgtctcacatagccagaggagaacacagaagcctgctgaagtgaatatctggtctcagggattgctcctatgtattcagcatcgtttctaaaaacagttgacctcgcctaacagattgctctcaaaacatactcagttccaaacttcttttcataccatttttagctgtgttcacaggggtagccagagaaacactgtcttccttcagaaattattcgcaggtctagcatattattacttttgtgaaacctttgttttcccatcagggacttgaattttatggaatttaaaagccaaaaaggtatttggtcattatcttctacagcagtggaatgagtggtcccggagatgtgctatatgaaacattctttctgagatatatcaaccacacgtggaaaagcctttcagtcatacatgcaaatccacaaagaggaagagctgaccagctgaccttgctgggaagcctcacccttctgcccttcacaggctgaagggttaagatctaatctccctaatctaaatgacagtctaagagtaagtaaaagaacagccataaaataagtatctgttacgagtaactgaagaccccattctccaagcatcagatccatttcctatcacaacatttttaaaaaatgtcatctgatggcacttctgcttctgtcctttaccttcccatctccagtgaaaagctgagctgctttgggctaaaccagttgtctatagaagaaaatctatgccagaagaactcatggttttaaatatagaccatcatcgaaactccagaaatttatccactgtggatgatgacatcgctttcctttggtcaaggttggcagagcaagggtataaagggggaaattgtttggcagcaccaacagaaaacaaacaagcaaaaaacagcta

SEQ ID NO: 729887 - DNA, 335 bp, Homo sapiens
ggcccagccaatgaagatgaagacataggagatgagccgtagtgtgcagactaaacactgatgcctgtagatattgcttaggcttagtgtagagaagaaatcagctctccaaggaaaacttgcaattgtaggtttagttaggagtgattctgttttgttaatttcacaaatatttgcatttcatagttgtaggttatcagcaaattttgagaatttaaggtgcttatccagtgttccaattatattaacttcacttaaaacatgatgtttgactattttccattataaaagtaatacatgtttattgtagaaagtttgtctggggtgttttctga

SEQ ID NO: 729888 - DNA, 1975 bp, Homo sapiens; identical to SEQ ID NO: 643469
  misc_feature (921)..(921): n is a, c, g, or t

SEQ ID NO: 729889 - DNA, 1996 bp, Homo sapiens; identical to SEQ ID NO: 643472
  misc_feature (921)..(921): n is a, c, g, or t

SEQ ID NO: 729890 - DNA, 1404 bp, Homo sapiens; identical to SEQ ID NO: 728415

SEQ ID NO: 729891 - DNA, 1248 bp, Homo sapiens; identical to SEQ ID NO: 258206
  misc_feature (20)..(20): n is a, c, g, or t
  misc_feature (29)..(29): n is a, c, g, or t
  misc_feature (36)..(36): n is a, c, g, or t
  misc_feature (39)..(39): n is a, c, g, or t
  misc_feature (57)..(57): n is a, c, g, or t

SEQ ID NO: 729892 - DNA, 702 bp, Homo sapiens; identical to SEQ ID NO: 262017

SEQ ID NO: 729893 - DNA, 1961 bp, Homo sapiens; identical to SEQ ID NO: 260646

SEQ ID NO: 729894 - DNA, 2068 bp, Homo sapiens
  misc_feature (864)..(864): n is a, c, g, or t
  misc_feature (882)..(882): n is a, c, g, or t
  misc_feature (957)..(957): n is a, c, g, or t
  misc_feature (1093)..(1093): n is a, c, g, or t
  misc_feature (1257)..(1258): n is a, c, g, or t
  misc_feature (1292)..(1292): n is a, c, g, or t
  misc_feature (1303)..(1304): n is a, c, g, or t
  misc_feature (1353)..(1353): n is a, c, g, or t
  misc_feature (1355)..(1355): n is a, c, g, or t
  misc_feature (1404)..(1404): n is a, c, g, or t
  misc_feature (1465)..(1465): n is a, c, g, or t
  misc_feature (1566)..(1566): n is a, c, g, or t
  misc_feature (2052)..(2052): n is a, c, g, or t
  misc_feature (2054)..(2054): n is a, c, g, or t
  misc_feature (2056)..(2056): n is a, c, g, or t
  misc_feature (2058)..(2058): n is a, c, g, or t
  misc_feature (2061)..(2062): n is a, c, g, or t
  misc_feature (2064)..(2066): n is a, c, g, or t
tggggctgcgcgtgagaaggtggcggtgtaggcacctgcgctcggggaaggctggcggcggcggccgggccatggccagagaccccctcctctgggctccctgaagtcctggggagccgtgacccatgggatcgtcgagcagccgggtgctgggccagccgaggcgagcccttgcccagcaggaacagggtgccagggccaggggctcggcccggaggccggacactggagacgatgcggcgagctacggcttctgttactgcccgggcagtcacaagcgcaagcggagcagcggggcctgccgctactgtgacccggactcgcacagggaggagcatgaggaggagggggacaagcagcagccgctcctcaacacccctgcaaggaaaaaattaaggagtacatccaaatatatttatcaaacattatttttgaatggtgaaaacagtgacattaagatttgtgctctaggagaagaatggcgattacacaaaatatatttatgtcaatctggctacttttctagtatgttcagtggttcttggaaagaatccagcatgaatattattgaactggagattcctgaccagaacattgatgtagacgcactgcaggttgcgtttggttcactgtatcgagatgatgtcttgataaaacccagtcgagttgttgccattttggcagcagcttgtatgctgcagctggatggtttaatacagcagtgtggtgagacaatgaaggaaacaattaatgtgaaaactgtatgcggttattacacatcagtagagatctatggattagattctgtaaagaaaaagtgccttgaatggcttctaaacaatttgatgactcaccagaatgttnaactttttaaagaactcngtataaatgtcatgaaacagctcattggttcctctaacttatttgtgatgcaagtggagatggatgtatacaccnctctaaaaaagtggatgttccttcaacttgtgccttcttggaatggatctttaaaacagcttttgacagaaacagatgtctggttttctaaacagagaaaagattttgaaggtatggcctttcttgaaactgaacnaggaaaaccatttgtgtcagtattcagacatttaaggttacaatatattatcagtgacctagcttctgcaagaattattgaacaagatggtatagtaccttcagaatggctgtcttctgtgtataaacagcagtggtttgctatgctgcgggcagaacaagacnntgaggtagggcctcaagaaatcaataaagaaganctagagggaannagcatgaggtgtggtagaaagcttgccaaagatggtgaatactactggngntggacgggttttaacttcggctttgacctacttgtaatttacaccaatngatacatcattttcaaacgcaatacactgaatcagccatgcagcgggtctgtcagtttacngcctcgaaggagcatagcatttagattacgcttggcttcttttgatagtagtggaaaactagtatgtagtagaacaactggctatcaaatacttatacttnaaaaggatcaggaacaagtggtgatgaacttggacagcaggtttctgaccttccctttatatatctgctgtaacttcttgtatatatcaccagaaaaaggaattgaaaataatcgccacccagaagatccagaaaactgaagatctcatcagttggaaacagtagcactttgaaaactttcaggccagctttaatttaatggccctactgatattcacatctaaggtgactaacaatgacaaaggccttatgaactgtacggacaatacagaagactattcttatcctcattgcatttctatgcatatacaaaaaaaaccattttaaagccaagaaaatatctgtcaaaccatttctgtcagtacgatgtcaactcatgcttttaattcagcatcagcagaaaatgactgtaggtaaatctcacatttatctgcacaaaatatagatttaatttttagcttaaactttgtttctacttagtagtgnancnanttnncnnncg

SEQ ID NO: 729895 - DNA, 1870 bp, Homo sapiens; identical to SEQ ID NO: 128464

SEQ ID NO: 729896 - DNA, 1107 bp, Homo sapiens; identical to SEQ ID NO: 267536
  misc_feature (729)..(729): n is a, c, g, or t

SEQ ID NO: 729897 - DNA, 8733 bp, Homo sapiens; identical to SEQ ID NO: 86623

SEQ ID NO: 729898 - DNA, 8834 bp, Homo sapiens; identical to SEQ ID NO: 86626

SEQ ID NO: 729899 - DNA, 8668 bp, Homo sapiens; identical to SEQ ID NO: 86624

SEQ ID NO: 729900 - DNA, 8535 bp, Homo sapiens
gccatgttgatttctgatccttgagcttttctgtgcttctctgttcattcttcatggcatccttggaaggatgccaagctaaggaggccaggggggaataaaaggagtccaggctcccaactgtgcccttcccctctcccctgggagcaaccacttagggtcctcatggttcctccagtctggactctgctgcttctggtgggggctgcccttttcaggaaagagaagcctccggaccagaagctggttgttcgcagctctagggacaactatgtcctcacccagtgtgattttgaggatgacgccaaacccctctgtgactggtcccaagtgtccgcagacgatgaagactgggttcgagccagtgggccctctcccaccggctccaccggggcccccggggggtaccctaacggagagggcagctatctgcatatggaatcgaacagcttccaccgtgggggagtggcccgcctgctcagccccgacctatgggagcaaggccccctctgtgtgcactttgcccaccacatgttcgggctgtcttggggcgcccagctcaggctgctgctgctctcgggtgaagagggccgccgccccgatgtgctctggaaacactggaacacccagagaccctcctggatgctcaccaccgtcactgtgcccgcagggttcaccctgcccacccggctgatgtttgagggaacacggggtagcactgcctacctggacatcgccctggatgccctctctatccgccggggctcctgtaatcgcgtctgtatgatgcaaacatgcagctttgacattccaaatgacctctgtgactggacctggatcccaactgcctccggggccaagtggactcagaagaaagggtcatcaggaaagccaggcgtggggcctgatggcgacttctctagccctggtagtggctgctacatgctcctggaccccaagaatgcaagacctgggcagaaagctgtcctcctgagccccgtgagcctgtcctctggctgtctgagcttttccttccactacatcctccggggccagtctcctggtgcagccctccacatttatgcttcagtcttggggagtatccggaaacacactctcttctcaggacaacctgggcccaactggcaggctgtttctgtcaattacacagccgtgggacggatacagtttgccgtggtaggcgtttttggaaagaccccagagccagctgtggcagttgatgcaaccagcattgctccttgtggggagggttttcctcagtgtgactttgaagacaacgcccatcccttctgtgactgggtccagacttccggggatggtggacactgggccctcggacataaaaatggacccgtccatggcatgggccctgcgggaggtttccctaatgcagggggtcactatatctaccttgaggctgacgagttctcccaggcaggccagtcagtcagactggtgagccggcccttctgcgccccaggtgacatctgcgtggagttcgcataccacatgtatggccttggggagggtactatgctcgaactcctcctgggaagtcctgcggggagtcccccgattcctctctggaaacgcgtggggtctcagcgcccttactggcagaacacctccgtcaccgtcccctcaggacaccaacagcccatgcagcttattttcaagggcatccagggaagcaacacggcctctgtggttgctatgggtttcatcttgatcaatcctgggacttgtccagtaaaagtgctaccagagcttcctcccgtatctccagtttcttccactggcccttctgaaaccactggcctcacagaaaaccctacaatctccaccaagaaacctacagtttccatagaaaaacccagtgtcaccacagaaaagcccacagtccccaaagaaaagcccaccattcccacagaaaaacccaccatctccacagaaaaacccaccattccttcagaaaaacccaacatgccctcagaaaaacccaccattccctcagaaaaacccaccatcctcacagaaaaacccaccattccctcagaaaaacccaccattccctcagaaaaacccaccatttccacagaaaaacccaccgtccccacagaagagcccaccacccccactgaggagaccaccacctccatggaagagcctgtcatccctacagaaaaacccagcatccctacagaaaaacccagcatccccacggaaaaacccaccatctccatggaagagactatcatctccacagaaaaacccaccatctccccagaaaaacccaccatccccacagaaaaacccaccatccccacagaaaaatccaccatctccccagaaaaacccaccacccccacagaaaaacccaccatccccacagaaaaacccaccatctccccagaaaaacccaccacccccacagaaaaacccaccatctccccagaaaaactcaccatccccacagaaaaacccaccatccccacagaaaaacccaccattcccacagaaaaacccaccatctccacagaagagcccaccacccccactgaggagaccaccatctccacagaaaaacccagcatccccatggaaaaacccactctccccactgaagaaaccaccacctctgttgaagagactaccatctctacagaaaaactcaccatccccatggaaaaacccaccatctccacagaaaaacccaccatccccacagaaaaacccaccatctccccagaaaaactcaccatccccacggaaaaactcaccatccccacggaaaaacccaccatccccattgaagagactaccatctccacagaaaaactcaccatccccacagaaaaacccaccatctccccagaaaaacccaccatctccacggaaaaacccaccatccccacggaaaaacccaccatccccactgaagagactaccatctccacagaaaaactcaccatccccacagaaaaacccaccatctccccagaaaaactcaccatccccacagaaaaacccaccatctccacggaaaaacccaccatccccacggaaaaacttaccatccccacggaaaaacccaccatccccacagaaaaacccaccattcccacagagaagctcacagccctgaggccaccccatcccagccccacagccactgggctggcagccttggtgatgtctccacatgctccaagtacccctatgaccagtgtgattctgggcactaccacaacctccagatccagtacagagcgctgccctccaaatgcccgctacgaatcctgtgcttgtcctgcttcgtgcaagagccccaggcctagctgtgggcccctctgtcgggagggctgtgtctgcaaccctggctttttgtttagtgacaaccactgcatccaggcctcttcctgcaattgcttctacaacaacgactactatgagcctggggcagagtggttcagccccaactgcacagaacattgccgctgctggcccggcagtcgggtcgagtgccagatctctcagtgtgggacacacaccgtgtgccagcttaagaatggccagtatggatgccacccctacgcaggcactgccacctgcttggtctacggagaccctcattatgtcacctttgacgggaggcactttggcttcatgggcaagtgcacttacatcttggcccagccctgtggcaactcaacagacccattcttcagggtgacagccaagaatgaggagcagggacaggaaggcgtgtcctgcctgagcaaagtctacgtgaccctgcccgagagcaccgtcaccctgcttaagggcagacgcactctggttgggggtcagcaagttactctcccagccataccctctaaaggcgtcttcctgggtgcaagcgggcggtttgtggagctgcagacggagttcggtttgcgggtgagatgggatggtgaccagcagctgtatgttactgtgtccagcacatactctggcaaactctgtggtttgtgtgggaactatgacggcaacagtgacaatgaccacctgaagttggacggcagcccagcaggagacaaggaggagctggggaacagctggcagacggaccaggacgaggaccaggagtgtcagaagtaccaggtggtgaattccccgtcttgtgattcatctctgcagagcagcatgtcggggccagggttctgtggacggctggtcgacactcatggcccatttgagacatgcctgctgcacgtgaaggccgcttccttcttcgacagctgcatgcttgatatgtgcggattccaggggctgcagcacctgctgtgcacacacatgtccaccatgaccaccacctgccaggacgcaggccacgctgtgaagccctggagggaaccccacttctgcccaatggcctgcccgcccaacagcaagtactccctgtgtgcgaagccatgccctgacacctgccattcaggattctccggcatgttctgctcagaccggtgcgtggaggcctgtgaatgcaatccgggcttcgtcctcagtggcctcgagtgcatacctcgctcccagtgtgggtgcctccaccctgcaggcagctacttcaaggtaggggagcggtggtacaagccaggctgcaaagagttgtgcgtctgtgaaagcaacaacagaattcgctgccagccctggaggtgtagggcccaggagttctgtggccaacaggatggtatctatggctgccatgcccaaggtgccgccacctgcacagcctcgggtgacccccactacctgaccttcgatggcgccttgcaccacttcatgggcacctgcacctatgtcctgacccggccttgctggtccaggtcccaagacagctattttgttgtgagcgccaccaacgagaaccgcggggggatcctggaggtctcctacatcaaagccgtccacgtgacagtctttgacctcagcatctcactgctcagaggctgtaaggtcatgctgaatggccatcgggtggccctacctgtgtggcttgcacaaggccgggtgaccataaggctcagcagcaacctcgtcctcctctacacgaactttgggctccaagttcgctacgacgggagccacttggtggaagtgacagtcccctcctcctatggcggccagctctgtgggctgtgtgggaactacaacaacaacagcttggatgacaacctgcgccccgacagaaagcttgcaggcgattccatgcagctgggggccgcctggaagttacctgaatcctctgaacctggctgtttccttgtgggtggcaagccctccagctgccaggagaacagcatggcagacgcctggaacaagaactgtgcgatcttaataaaccctcagggacccttctctcaatgtcaccaggtggtgcctccccagtccagctttgccagttgcgtgcatggtcagtgtgggaccaagggcgacaccacagccctgtgccgctccctgcaggcctacgcgtccctgtgtgcccaggctggccaggcccctgcctggcggaacagaaccttctgccctatgaggtgcccacctggcagcagctacagcccctgcagcagcccctgcccagacacctgcagcagcataaacaacccgagggactgccccaaagcactgccctgtgctgagagctgtgaatgtcagaaaggccacatcttgagtggaacctcctgcgtgccccttggccagtgtggctgcactgacccagcgggctcctaccacccggtcggggagcgctggtacacagagaacacctgcaccaggctctgcacctgctccgtccacaacaacatcacctgcttccagagcacctgcaaacccaaccagatatgctgggccctggatgggctgctccgttgtcgggcctcaggtgtgggagtgtgtcagctcccaggggagtcccactacgtgagctttgatggtagtaaccattctatcccggacgcctgcactcttgtcctggtgaaagtgtgccaccccgccatggccttgcccttcttcaagatcagtgccaagcatgagaaggaggaaggtggaactgaggctttccgccttcatgaggtctacattgacatctacgatgcccaggtcaccctgcagaagggccaccgtgtgctaatcaacagcaaacaggtcaccctccccgccatctcccagatccctggggtcagtgtcaagtccagcagcatctacagcattgttaacatcaagatcggggtgcaagtcaagtttgacgggaatcatctcttagagattgaaatccccacaacctactatggaaaggtctgcggcatgtgtgggaacttcaatgatgaggaagaggacgaactaatgatgcccagcgatgaagtagcaaatagtgacagtgaatttgtgaacagttggaaagataaggacattgacccaagttgtcagagtctcctggtagatgagcagcagattccagcggaacagcaggagaacccgagtggaaactgcagggcggccgacctccgcagggcgcgggaaaagtgcgaggcagcgctccgggctcctgtgtgggcccagtgcgcctcccgcatagacctcacgcccttcctggtggactgtgcaaacaccctctgtgagttcggaggtctctaccaggccctctgccaggctctgcaagccttcggggccacctgccagagccaggggctcaagcccccactctggagaaacagcagcttctgccctctggaatgccctgcctacagcagctacaccaactgccttccctcctgctcaccctcctgctgggacctggatggccggtgtgagggcgccaaagtcccctctgcctgcgctgagggctgcatttgtcagcccggctatgtgctgagtgaagacaagtgtgtccccagaagtcagtgtggctgcaaggatgcccatggtggctccatccctctgggcaagagctgggtctccagcggttgcacggagaagtgtgtctgcacgggaggagccattcagtgcggggacttccgatgcccctctgggtcccactgccagctcacttccgacaacagcaacagcaattgtgtctcagacaagtctgaacaatgctcagtctatggcgacccccgttacctcacatttgacggcttcagctaccgcttgcaaggccgcatgacctatgttctgatcaagactgtggacgtactgcctgagggggtggagcccctcctcgtggaaggacgcaacaagatggatccgcccaggagctccatcttcttgcaggaagtgattaccaccgtctacggctataaagtgcagctccaagctggtctggagcttgtggtcaacaaccagaagatggccgtcccctacaggccaaatgaacacctgcgggtcaccctgtggggccaacggctctacctggtcaccgactttgagctggtcgtcagctttggtggaaggaaaaatgcagtgatctccctacccagcatgtacgaggggcttgtgagtggcctgtgcggaaactacgacaagaaccgcaagaatgacatgatgctgcccagtggcgccctgacccagaacctcaacacctttggcaacagctgggaggtgaagaccgaggacgcactcctgcgcttccccagggctataccagcggaggaggagggacaaggggcggagctgggcctccgcacgggcctccaagtgtccgaatgtagcccggagcagctggcgagcaacagcacccaggcctgtagggtgctggcagacccccagggcccctttgctgcctgtcaccagacggtggccccagagcccttccaagagcactgcgtgctggatctgtgctctgctcaggacccaagagagcaagaggagctgcgttgccaggtcctcagtgggtacgccatcctctgccaggaggcgggcgctgccctggctggctggcgggaccgcaccctctgcagctgggcagcagctttctgactgaggactgctctcagcggtgcacctgtgccagctcacggatcctgctgtgtgagcccttcagctgcagagcgggggaggtctgcaccctggggaaccacacccaaggctgctttccagaaagcccgtgtctgcagaacccctgtcagaatgacgggcagtgtcgggagcagggagccaccttcacctgcgagtgtgaagttggttacgggggaggcctgtgtatggagcctcgagatgcgccacctcccagaaagccagcatctaacctggtggccgtcctactgggactgctggtgcctgtggtggtcgtactactggccgtgaccagagagtgcatttacagaacgaggaggaagagagagaaaacgcaggagggagacagactggccaggctggtggacacagatactgttctggactgtgcctgttaagttgctcagttttgagctgtcttcagacaagaagattaaataaatttatatatttatttatttg

SEQ ID NO: 729901 - DNA, 8470 bp, Homo sapiens
gccatgttgatttctgatccttgagcttttctgtgcttctctgttcattcttcatggcatccttggaaggatgccaagctaaggaggccaggggggaataaaaggagtccaggctcccaactgtgcccttcccctctcccctgggagcaaccacttagggtcctcatggttcctccagtctggactctgctgcttctggtgggggctgcccttttcaggaaagagaagcctccggaccagaagctggttgttcgcagctctagggacaactatgtcctcacccagtgtgattttgaggatgacgccaaacccctctgtgactggtcccaagtgtccgcagacgatgaagactgggttcgagccagtgggccctctcccaccggctccaccggggcccccggggggtaccctaacggagagggcagctatctgcatatggaatcgaacagcttccaccgtgggggagtggcccgcctgctcagccccgacctatgggagcaaggccccctctgtgtgcactttgcccaccacatgttcgggctgtcttggggcgcccagctcaggctgctgctgctctcgggtgaagagggccgccgccccgatgtgctctggaaacactggaacacccagagaccctcctggatgctcaccaccgtcactgtgcccgcagggttcaccctgcccacccggctgatgtttgagggaacacggggtagcactgcctacctggacatcgccctggatgccctctctatccgccggggctcctgtaatcgcgtctgtatgatgcaaacatgcagctttgacattccaaatgacctctgtgactggacctggatcccaactgcctccggggccaagtggactcagaagaaagggtcatcaggaaagccaggcgtggggcctgatggcgacttctctagccctggtagtggctgctacatgctcctggaccccaagaatgcaagacctgggcagaaagctgtcctcctgagccccgtgagcctgtcctctggctgtctgagcttttccttccactacatcctccggggccagtctcctggtgcagccctccacatttatgcttcagtcttggggagtatccggaaacacactctcttctcaggacaacctgggcccaactggcaggctgtttctgtcaattacacagccgtgggacggatacagtttgccgtggtaggcgtttttggaaagaccccagagccagctgtggcagttgatgcaaccagcattgctccttgtggggagggttttcctcagtgtgactttgaagacaacgcccatcccttctgtgactgggtccagacttccggggatggtggacactgggccctcggacataaaaatggacccgtccatggcatgggccctgcgggaggtttccctaatgcagggggtcactatatctaccttgaggctgacgagttctcccaggcaggccagtcagtcagactggtgagccggcccttctgcgccccaggtgacatctgcgtggagttcgcataccacatgtatggccttggggagggtactatgctcgaactcctcctgggaagtcctgcggggagtcccccgattcctctctggaaacgcgtggggtctcagcgcccttactggcagaacacctccgtcaccgtcccctcaggacaccaacagcccatgcagcttattttcaagggcatccagggaagcaacacggcctctgtggttgctatgggtttcatcttgatcaatcctgggacttgtccagtaaaagtgctaccagagcttcctcccgtatctccagtttcttccactggcccttctgaaaccactggcctcacagaaaaccctacaatctccaccaagaaacctacagtttccatagaaaaacccagtgtcaccacagaaaagcccacagtccccaaagaaaagcccaccattcccacagaaaaacccaccatctccacagaaaaacccaccattccttcagaaaaacccaacatgccctcagaaaaacccaccattccctcagaaaaacccaccatcctcacagaaaaacccaccattccctcagaaaaacccaccattccctcagaaaaacccaccatttccacagaaaaacccaccgtccccacagaagagcccaccacccccactgaggagaccaccacctccatggaagagcctgtcatccctacagaaaaacccagcatccctacagaaaaacccagcatccccacggaaaaacccaccatctccatggaagagactatcatctccacagaaaaacccaccatctccccagaaaaacccaccatccccacagaaaaacccaccatccccacagaaaaatccaccatctccccagaaaaacccaccacccccacagaaaaacccaccatccccacagaaaaacccaccatctccccagaaaaacccaccacccccacagaaaaacccaccatctccccagaaaaactcaccatccccacagaaaaacccaccatccccacagaaaaacccaccattcccacagaaaaacccaccatctccacagaagagcccaccacccccactgaggagaccaccatctccacagaaaaacccagcatccccatggaaaaacccactctccccactgaagaaaccaccacctctgttgaagagactaccatctctacagaaaaactcaccatccccatggaaaaacccaccatctccacagaaaaacccaccatccccacagaaaaacccaccatctccccagaaaaactcaccatccccacggaaaaactcaccatccccacggaaaaacccaccatccccattgaagagactaccatctccacagaaaaactcaccatccccacagaaaaacccaccatctccccagaaaaacccaccatctccacggaaaaacccaccatccccacggaaaaacccaccatccccactgaagagactaccatctccacagaaaaactcaccatccccacagaaaaacccaccatctccccagaaaaactcaccatccccacagaaaaacccaccatctccacggaaaaacccaccatccccacggaaaaacttaccatccccacggaaaaacccaccatccccacagaaaaacccaccattcccacagagaagctcacagccctgaggccaccccatcccagccccacagccactgggctggcagccttggtgatgtctccacatgctccaagtacccctatgaccagtgtgattctgggcactaccacaacctccagatccagtacagagcgctgccctccaaatgcccgctacgaatcctgtgcttgtcctgcttcgtgcaagagccccaggcctagctgtgggcccctctgtcgggagggctgtgtctgcaaccctggctttttgtttagtgacaaccactgcatccaggcctcttcctgcaattgcttctacaacaacgactactatgagcctggggcagagtggttcagccccaactgcacagaacattgccgctgctggcccggcagtcgggtcgagtgccagatctctcagtgtgggacacacaccgtgtgccagcttaagaatggccagtatggatgccacccctacgcaggcactgccacctgcttggtctacggagaccctcattatgtcacctttgacgggaggcactttggcttcatgggcaagtgcacttacatcttggcccagccctgtggcaactcaacagacccattcttcagggtgacagccaagaatgaggagcagggacaggaaggcgtgtcctgcctgagcaaagtctacgtgaccctgcccgagagcaccgtcaccctgcttaagggcagacgcactctggttgggggtcagcaagttactctcccagccataccctctaaaggcgtcttcctgggtgcaagcgggcggtttgtggagctgcagacggagttcggtttgcgggtgagatgggatggtgaccagcagctgtatgttactgtgtccagcacatactctggcaaactctgtggtttgtgtgggaactatgacggcaacagtgacaatgaccacctgaagttggacggcagcccagcaggagacaaggaggagctggggaacagctggcagacggaccaggacgaggaccaggagtgtcagaagtaccaggtggtgaattccccgtcttgtgattcatctctgcagagcagcatgtcggggccagggttctgtggacggctggtcgacactcatggcccatttgagacatgcctgctgcacgtgaaggccgcttccttcttcgacagctgcatgcttgatatgtgcggattccaggggctgcagcacctgctgtgcacacacatgtccaccatgaccaccacctgccaggacgcaggccacgctgtgaagccctggagggaaccccacttctgcccaatggcctgcccgcccaacagcaagtactccctgtgtgcgaagccatgccctgacacctgccattcaggattctccggcatgttctgctcagaccggtgcgtggaggcctgtgaatgcaatccgggcttcgtcctcagtggcctcgagtgcatacctcgctcccagtgtgggtgcctccaccctgcaggcagctacttcaaggtaggggagcggtggtacaagccaggctgcaaagagttgtgcgtctgtgaaagcaacaacagaattcgctgccagccctggaggtgtagggcccaggagttctgtggccaacaggatggtatctatggctgccatgcccaaggtgccgccacctgcacagcctcgggtgacccccactacctgaccttcgatggcgccttgcaccacttcatgggcacctgcacctatgtcctgacccggccttgctggtccaggtcccaagacagctattttgttgtgagcgccaccaacgagaaccgcggggggatcctggaggtctcctacatcaaagccgtccacgtgacagtctttgacctcagcatctcactgctcagaggctgtaaggtcatgctgaatggccatcgggtggccctacctgtgtggcttgcacaaggccgggtgaccataaggctcagcagcaacctcgtcctcctctacacgaactttgggctccaagttcgctacgacgggagccacttggtggaagtgacagtcccctcctcctatggcggccagctctgtgggctgtgtgggaactacaacaacaacagcttggatgacaacctgcgccccgacagaaagcttgcaggcgattccatgcagctgggggccgcctggaagttacctgaatcctctgaacctggctgtttccttgtgggtggcaagccctccagctgccaggagaacagcatggcagacgcctggaacaagaactgtgcgatcttaataaaccctcagggacccttctctcaatgtcaccaggtggtgcctccccagtccagctttgccagttgcgtgcatggtcagtgtgggaccaagggcgacaccacagccctgtgccgctccctgcaggcctacgcgtccctgtgtgcccaggctggccaggcccctgcctggcggaacagaaccttctgccctatgaggtgcccacctggcagcagctacagcccctgcagcagcccctgcccagacacctgcagcagcataaacaacccgagggactgccccaaagcactgccctgtgctgagagctgtgaatgtcagaaaggccacatcttgagtggaacctcctgcgtgccccttggccagtgtggctgcactgacccagcgggctcctaccacccggtcggggagcgctggtacacagagaacacctgcaccaggctctgcacctgctccgtccacaacaacatcacctgcttccagagcacctgcaaacccaaccagatatgctgggccctggatgggctgctccgttgtcgggcctcaggtgtgggagtgtgtcagctcccaggggagtcccactacgtgagctttgatggtagtaaccattctatcccggacgcctgcactcttgtcctggtgaaagtgtgccaccccgccatggccttgcccttcttcaagatcagtgccaagcatgagaaggaggaaggtggaactgaggctttccgccttcatgaggtctacattgacatctacgatgcccaggtcaccctgcagaagggccaccgtgtgctaatcaacagcaaacaggtcaccctccccgccatctcccagatccctggggtcagtgtcaagtccagcagcatctacagcattgttaacatcaagatcggggtgcaagtcaagtttgacgggaatcatctcttagagattgaaatccccacaacctactatggaaaggtctgcggcatgtgtgggaacttcaatgatgaggaagaggacgaactaatgatgcccagcgatgaagtagcaaatagtgacagtgaatttgtgaacagttggaaagataaggacattgacccaagttgtcagagtctcctggtagatgagcagcagattccagcggaacagcaggagaacccgagtggaaactgcagggcggccgacctccgcagggcgcgggaaaagtgcgaggcagcgctccgggctcctgtgtgggcccagtgcgcctcccgcatagacctcacgcccttcctggtggactgtgcaaacaccctctgtgagttcggaggtctctaccaggccctctgccaggctctgcaagccttcggggccacctgccagagccaggggctcaagcccccactctggagaaacagcagcttctgccctctggaatgccctgcctacagcagctacaccaactgccttccctcctgctcaccctcctgctgggacctggatggccggtgtgagggcgccaaagtcccctctgcctgcgctgagggctgcatttgtcagcccggctatgtgctgagtgaagacaagtgtgtccccagaagtcagtgtggctgcaaggatgcccatggtggctccatccctctgggcaagagctgggtctccagcggttgcacggagaagtgtgtctgcacgggaggagccattcagtgcggggacttccgatgcccctctgggtcccactgccagctcacttccgacaacagcaacagcaattgtgtctcagacaagtctgaacaatgctcagtctatggcgacccccgttacctcacatttgacggcttcagctaccgcttgcaaggccgcatgacctatgttctgatcaagactgtggacgtactgcctgagggggtggagcccctcctcgtggaaggacgcaacaagatggatccgcccaggagctccatcttcttgcaggaagtgattaccaccgtctacggctataaagtgcagctccaagctggtctggagcttgtggtcaacaaccagaagatggccgtcccctacaggccaaatgaacacctgcgggtcaccctgtggggccaacggctctacctggtcaccgactttgagctggtcgtcagctttggtggaaggaaaaatgcagtgatctccctacccagcatgtacgaggggcttgtgagtggcctgtgcggaaactacgacaagaaccgcaagaatgacatgatgctgcccagtggcgccctgacccagaacctcaacacctttggcaacagctgggaggtgaagaccgaggacgcactcctgcgcttccccagggctataccagcggaggaggagggacaaggggcggagctgggcctccgcacgggcctccaagtgtccgaatgtagcccggagcagctggcgagcaacagcacccaggcctgtagggtgctggcagacccccagggcccctttgctgcctgtcaccagacggtggccccagagcccttccaagagcactgcgtgctggatctgtgctctgctcaggacccaagagagcaagaggagctgcgttgccaggtcctcagtgagctgggcagcagctttctgactgaggactgctctcagcggtgcacctgtgccagctcacggatcctgctgtgtgagcccttcagctgcagagcgggggaggtctgcaccctggggaaccacacccaaggctgctttccagaaagcccgtgtctgcagaacccctgtcagaatgacgggcagtgtcgggagcagggagccaccttcacctgcgagtgtgaagttggttacgggggaggcctgtgtatggagcctcgagatgcgccacctcccagaaagccagcatctaacctggtggccgtcctactgggactgctggtgcctgtggtggtcgtactactggccgtgaccagagagtgcatttacagaacgaggaggaagagagagaaaacgcaggagggagacagactggccaggctggtggacacagatactgttctggactgtgcctgttaagttgctcagttttgagctgtcttcagacaagaagattaaataaatttatatatttatttatttg

SEQ ID NO: 729902 - DNA, 8395 bp, Homo sapiens; identical to SEQ ID NO: 86628

SEQ ID NO: 729903 - DNA, 474 bp, Homo sapiens
agtcctaccagaagacacaaagatgatgcatccggatgaagaatatatcactgagattaatggccctgggttgcagccaaaagcatctcagagggtatgatgcatttcctgactgtggtcggctttccatgggtgaaacagaaaagtcttcaaatatcctcaccaactgctttcctagatttttcagccagttacttgaccatattaggaaaagaaaggtgagcttgggcttcaggacatagaaaacaacattagttatgctggaaagtatcaccaaagaagtgcagctcagacaagctgtattctattttgttcttttgaacataaacacctataaagggaccaaaagaaatctaaatgatcaacgggagcaatcctgaataggcaacaacaatcattattgccaagtgattgtcttatcatttgtcatcagtttttttttcagagtaattacatttaaatgtaaatgtgtct

SEQ ID NO: 729904 - DNA, 513 bp, Homo sapiens
agtcctaccagaagacacaaagatgatgcatccggatgaagaatatatcactgagattaatggccctgggttgcagccaaaagcatctcagaggtagaacactgttgcagatggtgatgttaccatttgaaaggtatgatgcatttcctgactgtggtcggctttccatgggtgaaacagaaaagtcttcaaatatcctcaccaactgctttcctagatttttcagccagttacttgaccatattaggaaaagaaaggtgagcttgggcttcaggacatagaaaacaacattagttatgctggaaagtatcaccaaagaagtgcagctcagacaagctgtattctattttgttcttttgaacataaacacctataaagggaccaaaagaaatctaaatgatcaacgggagcaatcctgaataggcaacaacaatcattattgccaagtgattgtcttatcatttgtcatcagtttttttttcagagtaattacatttaaatgtaaatgtgtct

SEQ ID NO: 729905 - DNA, 543 bp, Homo sapiens
gatgctgatctcgtttcgttatttttctgacttaaacggttaaatctaaacgcgattactaagaaaaaaaattttatacctatcattgtacacagaaaaaaaatagaaaaatgtttatataagcgtaaagctggtaggacaggaaaggaagccgaaacaaaaagtaaagaaaaatccacaaggacaacttttggagctagtgcctgagattttggatttctgagtcccaggaggtgctgatatcatttatctgcggactcgtattatgaagcgcaaggtcctagagcgtgtgattttacaggcataaggaatataagatgaaggctgagacaaaataggatgggtggcctaattttcttcccccaccctctcgtccctcccatacacatacaacctgacaactaaaagggccgcactccatggaagaactcctgcagagttggactccccaccggcaaacaggaggaggctatgaagaaacttgcctgtctccgattttcttgggaattgaaaaaataaaatttttaagcctttcatgaaaat

SEQ ID NO: 729906 - DNA, 883 bp, Homo sapiens
cggtgaatgattcagctccaaaatcccatttgattgcctgctctttccagacacaactgcagcaaactggattgtctagacacagatgatgagacagagtttagggtgcaagaagctaactagggatcaacacctgtgtaaggaagcaggtggaagcacaattgaagttgagaaagatgaagaggttgaactgccctgcaggccagatagagccttgccaaaccagtggggaactcggaggaagtcctgcctgccagtttcccatgtggagccgaaacagtcgtgcttttatctctccaccttgctcagtcaccagatgcaggccacgcccagaagggtatgtttttctctgcagctcagactgatgttgaggagctgggagctggaagccacctgctgactgcactccctgcagctggtcagcccatccttctcgaggggcatctgaatggcatcttcatcaggtctacaattttatgtacatgccacattctgggctttcccactttgaagcaattatcagttatgaatgttaggaacactttgtacaagttttaccgtgaccaaatgctttcatttctcttgggtaaatatctaggaatggaattgctgggtcatgagacacaaacacaacacgtaagcctaggcctatatgggagcaggatcatccacgtcactgtctttcacctccacatcttgtcctactaaaaagtctgcaggggtaataacacacacggagccgtcatctcctatgataccaacaccttgttctggggtactcccttcagggacctgcttggctgttccacaattaactttttttttttaataagtagagagtacactctaaaataacaataaaaatatagtaaatacaaaaaaa

SEQ ID NO: 729907 - DNA, 728 bp, Homo sapiens
cgcatgatgaggcggttccacgccagtctgaaacccgaaggggatgtggggctgtcgccgtacctggcgggatggagggcactcgtcgagttcctgactcccctcggctccgtcttcgccttcgccactgctccagctggcctaagacggcggctgcggggaccggcgggaacggagcggaccgcccggggtggggccgcgcagcccggggtcagtcctgcagcccgcgccgcggccgcctccgtatcccgcctcttccgtgacgtcgccgcggcgagggccgcccccggcagggaatggcgttgagctccctctgtccgcagtctcggaaagacgggaggagctgtgaggaataaaaaagcaatatttggcagcgtcgacgtagggcgttttgtgtgatgacgacaggcgcttaagggaaataaaaaacgaaggtgagaagatgtgtcatctctgttctcggcagccgagagactcacgctcccccggcctatcgtagtcactcccgtggcttcggttgccaaacacacgctgagtctccagcccagacttgtccctgagcttcacccctgtgcagccaagtatacagcaagcatcctgcacactccacagacgctgcaaatgcaacgcgtccaacacgggtcccaccaccatccccctaagaactacacctcctcctgtgttccctgtctctgtgaataaatggcaccctcacccttcagctaccc

SEQ ID NO: 729908 - DNA, 1210 bp, Homo sapiens
cgcatgatgaggcggttccacgccagtctgaaacccgaaggggatgtggggctgtcgccgtacctggcgggatggagggcactcgtcgagttcctgactcccctcggctccgtcttcgccttcgccactagggaggccttcaccaaggtgacagacctggaggctcgggtgcacggcccggacgcggagcactactggtcgctggcggccatggcggcgtgggagcggagggcgggactgctggagcagccgggggcggccccccgggacccgacccggagctcgggctctcgcacgctgctcctgctgcaccgcgcgctgcgctggtcccagctctgcctccaccgggtggcgaccggcgcgctgggaggcccggaagcgggcgtgcagtgcagcgacgcctaccgtgcggccctgggtccgcatcacccctggctggtccgacagaccgcccgcctcgccttcctcgccttcccgggtcgccgccgcctgctggagctggcgtgtcccggagccaccgaggcggaggcgcgggccgcgctgctccgggccgccggcaccttggaggatgtctacaaccgcacccagagcctgctggccgagcgcggcctgctccagctggcctaagacggcggctgcggggaccggcgggaacggagcggaccgcccggggtggggccgcgcagcccggggtcagtcctgcagcccgcgccgcggccgcctccgtatcccgcctcttccgtgacgtcgccgcggcgagggccgcccccggcagggaatggcgttgagctccctctgtccgcagtctcggaaagacgggaggagctgtgaggaataaaaaagcaatatttggcagcgtcgacgtagggcgttttgtgtgatgacgacaggcgcttaagggaaataaaaaacgaaggtgagaagatgtgtcatctctgttctcggcagccgagagactcacgctcccccggcctatcgtagtcactcccgtggcttcggttgccaaacacacgctgagtctccagcccagacttgtccctgagcttcacccctgtgcagccaagtatacagcaagcatcctgcacactccacagacgctgcaaatgcaacgcgtccaacacgggtcccaccaccatccccctaagaactacacctcctcctgtgttccctgtctctgtgaataaatggcaccctcacccttcagctaccc

SEQ ID NO: 729909 - DNA, 476 bp, Homo sapiens; identical to SEQ ID NO: 728419

SEQ ID NO: 729910 - DNA, 2584 bp, Homo sapiens; identical to SEQ ID NO: 466048

SEQ ID NO: 729911 - DNA, 930 bp, Homo sapiens
  misc_feature (1)..(1): n is a, c, g, or t
ntatgaagaaaatggtgtacatgttaacttaaatggtttcattatttctcttcaggatttttaagatgtgggatcagaatatatgttactattttgagaattagaaataataagaaaaacagaatgtatacattaaaagtcatgcctaaatttccaaagagtagtttttttaatgccagagtttaaataaaatattattttccagagagtaacttttctaaaggtcctaaattctgaaaagagagaaaactactgttataaacaagtttattactaaaagatgcaattcattactatgatttattattattttgtacatgtaaaccttgataaataaacagcatctcaacccaagtttattactcattgcacagttcaaagcaactatgactctcaaaatagcaacagaaggtggggagggtcttttccctttgtttatatagtatttgctaaaaatgaactttactattttgtggctttatagggttacaccatttcattctaaagagaaacaaaaagtaaaccattggccatgtggctttcaaacagtatttcaaagagaatattactgaaatatttttgtgctgttacagtcttaatcaaacattattacaaagatcagatacggaaaaaatagaggagtctccccttaattgttccctttgaaataaattgttttaaattattacagaagttatagctgtatgtacatgcacatttgtatatttacaagtctcatgtacttaatctcaatattgcaaattagctaggtttactatagagttaactgcttttatctagcatttataatcttgtagtataacctattttcaaataactaaaatttaattgatgtcatcaatggtacacatgaaaatgatacaaatttataaactaataaaatgtaactcgtcattgatagtaccatta

SEQ ID NO: 729912 - DNA, 727 bp, Homo sapiens
ttcctatggtcaggtgctgtgctgtgtgctgagtatggaggaggtaggctgagatagatgtgacctttgctcttgcaaagctgatatactaagggttggacagatgctaaatgtgcaaagaaacccaatacttgcagatggtgctgggtactaccaaggaaagaaatagggtatatgacagagtacctggaaagggcactggccagcttttatgggcagggaggtcaaagcaaacctgtctggagatgagacaggccaggaaaatcagggcaggggccagagtagggcaaatgtggtgcctagagcctcatttttttttttagacggattctcgccctgttgcccaggctggagtgcaatggcaggatctcggcccactgcaacctctgcctcccaggttcaagcaattctcctgccccagcttcctgagtagctgggattacagtacagcctcaaatttaaggagggactcactcacaggattgtgcaaatgcaaagttggcttttgcatgaccctgggagtaggtgcctccttaaattttgcaccctcagcaactccatcacctgtcactttgctagtcccaaccctgatgggaacaaatgcagggaaggcattccagatggcgggaacagcaagtacaaaaatccagaggccagaaaggcctggtgtgtttcaggaacagaaactcggctcccatgactgaaatggagtagggaaatcctaatg

SEQ ID NO: 729913 - DNA, 543 bp, Homo sapiens
taatcacttcattttgggggtaggggtgtggattttaaaactttgaagactatgtcacactcaccttgcccctcacctctggccttgacaaccatcttgctttacaagtgaattccgccaggtttctaaagatggtcacaacacaggtgccaggaatgccttcctgggtacatggagttcccgcccacgaccacagaagacattacacaaaactgcccaaaaagtatgaaatggcaatctgacaacaacctgacttaaaagccagtaaagacatcagaaaagatgttggtgtgcagcaagaaacccttcgcagcacctcacatgggcaaaaccaaagaggtaagaccctgatcttcctaatggcagacagtgaactacgaccaccccagaaatcacataaaagcatagaaggtaatttctattcaacaaataattactggcactcacagagaaaagcatggtgggacacaaattaatcaggcaaggcactgccctcgaggcactttcagtcttggcggggagtagtggagggcagaaggaaaa

SEQ ID NO: 729914 - DNA, 1407 bp, Homo sapiens; identical to SEQ ID NO: 270120

SEQ ID NO: 729915 - DNA, 466 bp, Homo sapiens
tcttgcttcctgttcaaacagtccctctgctatggctcttcctcagtagaaacaactggcaacaaaattcaagtttatgattcattcatcagcaaacatgtgagaatcatctacaaagaaccaagaattgtggtctgttacagaagtctcggtttacttcaatttctgttctgcttctctctttggcaccatcaggaaaccctagccccgtgtctgtgaaaactccaaagcttaacattctaaccactctagggagggaggatgggaggaagagagctgagtgtgcaccaaggagcggtaagatgccagacctgtgagtgaagaagcatcttggaagtggaccctatagctccaggcacctgctgacacatagtcggaggcaaaccacccagtcaagttcaacccaaattcctgacccaaaaaatcataagcaaaataaaatatttgtttaaagccaaaaaattgt

SEQ ID NO: 729916 - DNA, 488 bp, Homo sapiens; identical to SEQ ID NO: 271165

SEQ ID NO: 729917 - DNA, 497 bp, Homo sapiens
tcttgatctgtcaccaggctgaagtgcagtggtacaatcaaagctcactgcagtctcaacctcctaggctcaaacaatcctcccacttcagcctcccaaccagctgggaccacaggttgacatcaccacacccagtccctctgctatggctcttcctcagtagaaacaactggcaacaaaattcaagtttatgattcattcatcagcaaacatgtgagaatcatctacaaagaaccaagaattgtggtgaaaactccaaagcttaacattctaaccactctagggagggaggatgggaggaagagagctgagtgtgcaccaaggagcggtaagatgccagacctgtgagtgaagaagcatcttggaagtggaccctatagctccaggcacctgctgacacatagtcggaggcaaaccacccagtcaagttcaacccaaattcctgacccaaaaaatcataagcaaaataaaatatttgtttaaagccaaaaaattgt

SEQ ID NO: 729918 - DNA, 387 bp, Homo sapiens
atccacattcattcatcatgcttggcactatgggccctttccatctgaagccccctggttttcattagttttggaatttttttttctgttcttttttattattttctctcctccatttcctctggtctttcttatggtaatgaataaatattgaactgaggtacctgaaaataccaaagtaaggaactacataacctaccagtacaatactttgttgtattttcctcctaggaagaactgcctttcctatttctttttctttaggtctgttacagaagtctcggtttacttcaatttctgttctgcttctctctttggcaccatcaggaaaccctagccccgtgtctgtaagtgtacacaaaatttgaaggtgggcgcgggcttgta

SEQ ID NO: 729919 - DNA, 419 bp, Homo sapiens
tgccgtgcgctgagtgtccgcgtcgccctcgccgcagtcgcgggcaccccgctcggcgtcggtgcctgagggaggccgcgatggcggccgaggccctggcggcggaggccgtggcgtcgcgcctggagcggcaggaggaggacatccgctggctgtggtcggaggtcgagcgcctgagggacgagcagctgaactcgccctacagctgccaggcggaggggccgtgcctcacgcgggaggtggcgcagctccgggccgagaactgcgacctgcgccaccgcctgtgcagcctgcggctgtgcctcgccgaggagcggagccgccaggccacgctggagagcgcggagctagaggcggcgcaggaggccggcgcacagcctcctcctagtcaaagccaagacaaggacatgaaaaaaaaa

SEQ ID NO: 729920 - DNA, 744 bp, Homo sapiens
cgaaaaggctgcaggagctgaaggcaaagggagagctggtggattgcagggtgtcagcccagaaacggctgagctcgctgcaaaagggggtgttcaagcctggagcccacgtggacttctactataaataagcccatgtctttggcttcctgaacctttctgcccccactttcagacacacccccagagccccgtggctccccacaccctgccatggtggcagtcctgccttacacagataaacactcatgtctactgtcctaccttcacacatagcctgctgtgatgagcttccaggtcgctggccttaccagttgtcgagagtctggatgtggcaccctggattatgaggaggcttaggagagaggttatgggtattcatgtctctatccccaggaatagaatttaagggatgggaagagcaggaaaagaagctgaaacacacaagagaagaggttgtgtctcctgctcatagctagtccatggggagagggaagagtgacctgagtcaaataggagaacgcatgcagattcgcagatggcctggtagggaggaagagcagagggtacaagtccccgctcacacagatgccccttgctgaggggagcagcagcttctgttgaactttgtgtcctcactctgatgtctacttcctccagaatccaccaccccttccccaggctgggagaaggggccgttgggtgtctatgtacatggccaaggcagatacaaataaaattaaa

SEQ ID NO: 729921 - DNA, 1742 bp, Homo sapiens
cggcggcaaaaaccggcggcggcgggagcaaaatgccgcaggggcaaaaagccgcaaaaagccgcggcggcgggggcaagaagccgcggtggcgggagcaaaaatctgcggcggcaaaaaggggcggcggcgggggcaaaaagccgcaaaaagcctcggcatctgacccatgataaaaagtcctggctctgtgcctgctacagctccatctccatctactctccagggagagctccttgccaactcacatgtccatgggggtgtggagcttcctgcagccaggatcccagtggtctgcagcgagaatcaacgaagtacaactgagagcccagagagagtaaaatcagcaaaatggcaagaatgtacagctccaaacacctgctcctccacagaaacagggaaaaacaagcagaactgtcagaaacgatgttacaagagacgagaagacctgaactctgggacagtctggggagaaaagaatccaaaaagggttgaggcagcaagggctgagctcccacgggtgccccggcccaaaggtgcaggtccaggctgttttccaggtggcattcagtgcaggttcttcaatgccactggaaggcatgaaaaacccactgtagctgctgcttcttccttttcttaagctctgaaaatgcaaacactttttcaaggttttcagatatgcccagctggttacccaggtgccccgatggggaaaggaaggaaatggtgagaatcttcagcacagcggatcacatcaccctggaagagaccagtcctgcctgcgcatagcacaagcagccgcaggctagaggcagtcatgtcaggcctcctccatacagcatctctcctgcttttttttcaaacggccctaatcacttaatttggtcatcttccctgtcacaatggggcacctggcgctatagacacttgggaaacacacagatctgggatcctacagtgtccaggtgaagacgccgggagtcagagaggaaagtcttttgaagcctccaaaaggaatgcacaggaccccacttgaagaggtggcgtgcccagtggcggatacaggccccacacatcgcagcagtaaacagggactccacggtgtccagctctccagcctggggtttctcatcacccagtgattccaaaagaaacgatctacaatggcatgactaagttccagaaacaaataaacaaaatactgagggaagcccattggtcactttgattcttcaaaggtgacaattgtccctccctgaaatcttatgagtgcatgaacagactattctaatgtaaatgaaattcacactaaaactgattgaaagatgattctgtttccaaggtactttgtattctcaaattgcatctgcttaccctggccccctcaaaatggaagagtgatgactatttgtcttcgtaacactgtggggacacagagccttaaatggaagagtgtcaaaagcaacattccataaagggctgtcacttccaattttcaagcgaggttggaaaccaaccatgatgtatgaaacactgttggccaaagtgcacaattagtaatacaaaatgaataatataaactattgtaaatatgtgtggacatcgtggcaatttggacatcaaaaacactgccaaattcagaaagaggaagctgtaaactcatggctgttaggaagcttaacttctgtgtactagaacctatcaaaattaaatttctccatgtcaatccgtccaaacaaaca

SEQ ID NO: 729922 - DNA, 663 bp, Homo sapiens
ggacatacagattctgtgaacagcattgagttttttcctttctccaatactcttctcacaagctctgcagacaagaccctgtctatatgggatgcaagaacaggtatatgtgagcagtcactttatggtcacatgcattctatcaatgatgccatttttgatcccaggggtcacatgatagcatcctgtgatgcctgtggggttacaaagctgtgggactttcggaagctgttaccaattgtgtccatcgatataggtccaagtcctggcaatgaggtgaattttgattcatcaggtcgagttttagctcaggcaagtggcaatggtgttatccatttgctagatcttaaatctggggagattcacaaattgatgggccacgaaaacgaggcacacacggttgtgttttctcacgacggggagattctcttttctggaggctctgacggcacagttcgaacgtggtcttgaccgtcagcacatcccgctgcagagggcattccctttaaggcttgaaaatgcctcctgtagtcccaaaccagcaaagaactggttaaatgtgccagcaggtaacatttacagtctgctttaaaacatgctttggacatatattttagtgctcatactgttactaataaaaaaataactttatgctcaaaaaaa

SEQ ID NO: 729923 - DNA, 620 bp, Homo sapiens
ggtatatgtgagcagtcactttatggtcacatgcattctatcaatgatgccatttttgatcccaggcacaaaggccttcatgaaatgatggtgccatgctctgggacttcccagcctccagaactggtcacatgatagcatcctgtgatgcctgtggggttacaaagctgtgggactttcggaagctgttaccaattgtgtccatcgatataggtccaagtcctggcaatgaggtgaattttgattcatcaggtcgagttttagctcaggcaagtggcaatggtgttatccatttgctagatcttaaatctggggagattcacaaattgatgggccacgaaaacgaggcacacacggttgtgttttctcacgacggggagattctcttttctggaggctctgacggcacagttcgaacgtggtcttgaccgtcagcacatcccgctgcagagggcattccctttaaggcttgaaaatgcctcctgtagtcccaaaccagcaaagaactggttaaatgtgccagcaggtaacatttacagtctgctttaaaacatgctttggacatatattttagtgctcatactgttactaataaaaaaataactttatgctcaaaaaaa

SEQ ID NO: 729924 - DNA, 949 bp, Homo sapiens
tgcgcgcaggcgtagttaagagagcgcattttgacttcgaggcaccgccgacgttactgtgtcgccatggggcgccgtccagctcgctgttaccggtattgtaagaacaagccgtacccaaaatctcgtttctgccgaggggttcctgatgccaagatccgcatctttgacctgggtagaaagaaggcaaaagtggatgagttcccactcggtggccacatggtgtctgatgaatatgagcagctgtcttctgaagccctggaggccgcccgtatttgtgccaacaaatacatggtgaaaagttgtggcagagatggctttcacatgcgagtgcggctccatcccttccatgtcatccgcatcaacaagatgttgtcctgtgctggggctgacaggctccagacaggtatgcgaggtgcctttggaaaaccccagggtactgtagcccgggtccacattggtcaagtcatcatgtccatccgcaccaagcttcagaacgaggagcatgtgattgaagccttgcgcagggccaagttcaagttccctggacgccagaagattcatatctccaagaagtggggcttcacgaagtttaatgctgacgaatttgaagacatggtggccaagaagtgcctcatccctgatggttgtggagtcaagtacgttcccagtcatggccccttggacaagtggcgggttctgcactcatgaaggttttggcagtactgtctccttgggccatgctggtctgacttatgcttactaataaattctgtttactggcaaaaaataaattttccaggggatcggcaaaggggaactcgggggggccgaccactttggccttaggagggagaaaccgccgcgggaatgcacaacgctggatggcgacgccacacaaacaaacagaaagaatatataaaaaaaaaaatatataatcaaatacatc

SEQ ID NO: 729925 - DNA, 594 bp, Homo sapiens
tggagacagataccatcggggctggcgaggggccacagcaggcagtgccctggtcagcctgggtcacgaggcatggctgggtgcgctggtgggtgagccacatgcccccgagctggatccagtggtggagcacctcgaactggcggcaaccgctgcagcgcctgctgtggggtctggaggggatactctacctgctgctggcactgatgttgtgccatgcactcttcaccactggctcccacctgctgagctccttgtggcctgtcgtggccgcggtgtggcgccacctgctaccggctctcctgctgctggtgctcagtgctctgcctgccctcctcttcacggcctccttcctgctgctcttctccacactgctgagccttgtgggcctcctcacctccatgactcacccaggcgacactcaggatttggatcaatagaagggcaaccccatcccactgcctgtgtctgttgagccctggcctagggcctgagaccccacggggagagggagggcaatgggatcagggctccctgccttggcagggcccagacccctagtccctaacaggtagactggcctgaccccggact

SEQ ID NO: 729926 - DNA, 431 bp, Homo sapiens
agaccctcgggatctccgtttacagttcaggacctcagctgcactttggcgctaacgccctgtttcccagggctgtgagggaccaaccaaatatgaagctgttgatttctccaaaataaccatcaaaagtctgatgagataaagagcacactggaaactgggaatgctttgatggaaattctgcaagtaatggacgctctggcttgccttggtgactgtcaaataaaagcaagtatatactcagttctctccacacttcccacatacttaccaagcaaaaagcccatgaaaaatctgcagcagcctctgatagcaggaagacattatgtggtactcctgaactttcactcctggtccatcaactacaccgtgattctcagcagctaaacactaaaaataaaaatgattttaggacagttgcttcagtaatt

SEQ ID NO: 729927 - DNA, 452 bp, Homo sapiens; identical to SEQ ID NO: 283930

SEQ ID NO: 729928 - DNA, 438 bp, Homo sapiens; identical to SEQ ID NO: 283931

SEQ ID NO: 729929 - DNA, 568 bp, Homo sapiens
tcatttatttcttctagggtcacaagatgctgctcatgatttggatacactgaaaaagaataagaatgttttgaatttattgaagaagcaaaaagaaaagatggagtggttcttgttcattgtaatgcaggcgtttccagggctgctgcaattgtaataggtttcctgatgaattctgaacaaacctcatttaccagtgctttttctttggtgaaaaatgcaagaccttccatatgtccaaattctggcttcatggagcagcttcgtacatatcaagagggcaaagaaagcaataagtgtgacagaatacaggagaacagttcatgagttgcattgtagcagacaatggacaactgtagtttctgaattgacttctatagccatcttttcccttttttggagagtagactagcaaaattcccttttttctcttgccttttttatgcataaatggaggtcaatttgattgtcctgacctactgtataagtaaatttcaaatgtcattactttctctttgttattataatgtgtgattaaatgcttttttaaattgctaagggaaaaaaa

SEQ ID NO: 729930 - DNA, 2699 bp, Homo sapiens
aaccagaggcgcgggtcacagagacctagaacagctggaatccttcgcccccggcgcgcagccttcgcccgccggaatcgctgccttatccaccagcgggatgcttacctcgcccgccctctcgggtcaggcgggcccgggaggatgggagggtggctgctgagcgggagccgccacgtcttccacccgacatattgcctagagtttgctgtgacttagatcttgattcagagatggagaaatcaggcccatcttctaccatctctgagcagcagctgcagaggcaagagggatggattaacaccaaaacagacttggctgagcagagtctcatttcatctgagaaatggcttcaactgcatgggcttaagagcaacaaattgaccttgaaacagattttgtcacagatcggattcccacattgtgaagcttgaagaattccctttagcatttcttataaggcaggtctggtagtgatgaactccctcggcttttgtttatctgtgaaagtctttatctctccttcatttgggaaggacagctttgattatgtggcgtctctggggagacctgtggcttctcggtatgctgatggtctgtttccacagctctacagagcagaagatggcagagtatacaatctgacagctaaatcagaactgatttatcagtttgtggaacatttaacacaagctgtggagagctacaagcagcgaatggactggctcaccagcaagagccggcagatttttggtgtcatcttggaacagtgcgtcaccatagtgctggattttggcggcattctggagggggagcttgatctgtgccgagaggctctaacaatggttctccaggagcaggtggctcacataaccgagttcaatatcatacgggtttctcaagagcctgtgaagtggcaggaaaatgctactcctgtgaccgaacagtccatagctactgccatcagttgggttgagaaactgacggttgagctgactgtgagcgaggctggccgcctggatgctctgctggaagccgggagagacaagactttactcttcttcacagatggatctgtcatctgtcacacactttccaaggtgaagtacgcgcaagctgatgactccatccatttttggatgtcaatgtattgacatgaattttgatagggacatttttggaaataaagctttacctggaagaagtgattagatggtggtgtgttatgtctctttgagccacagggtctgtgtttctgggagtgactctagtgatgggagtgttggggcagtggcaagccagtggagacacactctgggcaggcggggtcctttggccagcctggactccctgtgggaaggtctgcttgcctttggatacagttacttaacaattatgtgcttcctccactctggaagtctggggtttctgtaggtttcagactttacccagctgcatcaagaagtccattgttggagaaagaagccacgtgttggcatcttgaaagatagcccccagtggtcaccggcctgtgtttatcaatactgagggcaatggtttgtaattggaaacacattgcttttccttccaaggccaaaagaacaaatgttttccattaaagaagaaccagatacaagctagtttgttccttggtcctttgagtttgttttaacatctgtaaaatttcaagtgtctggacaccttaataagcattcaaaaaaatggaacattcccaggctcagggtgtgtgtgcatgagcctgggcacacagctgttctctttgtctatgaacctggctattgtggtcacagctgcctgtggccccctgacctgactgcaggatccgccagtgaccctgtctttctgtttcactccttctggttcgtgcctctcctttctccggggttcattcctattccaggaagtaaggaacaattcagtgagttccagggaagtcctatggaagaaaaggaatcaagaaagaagcttccaggcactgatcatcaaatgcagcctgaaagcttttgagaagagaccgtggagcagcacatgcaagccctgcacagaccgctgtgcccctctgcccacagccttgatctgggggtggtctcaaggaaaattctagcaaatgcaactgccttgcatataaaaatgccgtgtcctatgttttatgaggagttaaaaaacacatgtgtgtgtggcaggggggagtgggttcccataagtcctgcttctctgctccacacctgtcatgcccatcccagcgagttctgaattcatccagatggctgcagtttgctctgaatagaaaagatggaaggcttaaagaattttttgagcagctaatataaacacctagactgttcctactgatgacagcctgctgcaagttagcatctccctccatgagcgggtgctgagaggagccaggaaagtgggcattgtcttgtgcccacaaattaacatgcaagtcccgtttctataccaagcccacatgaggagtagggctgaaccacgtgcttggtcatggagaaggaagatgcccagagaggctcctggccccctccaggcacaggctttgtaaccaccgcgggccaggaagactgaaacaggaagcaacgagagagagccttgaggtctaagaagagcacatgcagagtgggaggtctgttgaaatgctggctcgacacatagcactg

SEQ ID NO: 729931 - DNA, 2582 bp, Homo sapiens
aaccagaggcgcgggtcacagagacctagaacagctggaatccttcgcccccggcgcgcagccttcgcccgccggaatcgctgccttatccaccagcgggatgcttacctcgcccgccctctcgggtcaggcgggcccgggaggatgggagggtggctgctgagcgggagccgccacgtcttccacccgacatattgcctagagtttgctgtgacttagatcttgattcagagatggagaaatcaggcccatcttctaccatctctgagcagcagctgcagaggcaagagggatggattaacaccaaaacagacttggctgagcagagtctcatttcatctgagaaatggcttcaactgcatgggcttaagagcaacaaattgaccttgaaacagattttgtcacagatcggattcccacattgtgaagattatgtggcgtctctggggagacctgtggcttctcggtatgctgatggtctgtttccacagctctacagagcagaagatggcagagtatacaatctgacagctaaatcagaactgatttatcagtttgtggaacatttaacacaagctgtggagagctacaagcagcgaatggactggctcaccagcaagagccggcagatttttggtgtcatcttggaacagtgcgtcaccatagtgctggattttggcggcattctggagggggagcttgatctgtgccgagaggctctaacaatggttctccaggagcaggtggctcacataaccgagttcaatatcatacgggtttctcaagagcctgtgaagtggcaggaaaatgctactcctgtgaccgaacagtccatagctactgccatcagttgggttgagaaactgacggttgagctgactgtgagcgaggctggccgcctggatgctctgctggaagccgggagagacaagactttactcttcttcacagatggatctgtcatctgtcacacactttccaaggtgaagtacgcgcaagctgatgactccatccatttttggatgtcaatgtattgacatgaattttgatagggacatttttggaaataaagctttacctggaagaagtgattagatggtggtgtgttatgtctctttgagccacagggtctgtgtttctgggagtgactctagtgatgggagtgttggggcagtggcaagccagtggagacacactctgggcaggcggggtcctttggccagcctggactccctgtgggaaggtctgcttgcctttggatacagttacttaacaattatgtgcttcctccactctggaagtctggggtttctgtaggtttcagactttacccagctgcatcaagaagtccattgttggagaaagaagccacgtgttggcatcttgaaagatagcccccagtggtcaccggcctgtgtttatcaatactgagggcaatggtttgtaattggaaacacattgcttttccttccaaggccaaaagaacaaatgttttccattaaagaagaaccagatacaagctagtttgttccttggtcctttgagtttgttttaacatctgtaaaatttcaagtgtctggacaccttaataagcattcaaaaaaatggaacattcccaggctcagggtgtgtgtgcatgagcctgggcacacagctgttctctttgtctatgaacctggctattgtggtcacagctgcctgtggccccctgacctgactgcaggatccgccagtgaccctgtctttctgtttcactccttctggttcgtgcctctcctttctccggggttcattcctattccaggaagtaaggaacaattcagtgagttccagggaagtcctatggaagaaaaggaatcaagaaagaagcttccaggcactgatcatcaaatgcagcctgaaagcttttgagaagagaccgtggagcagcacatgcaagccctgcacagaccgctgtgcccctctgcccacagccttgatctgggggtggtctcaaggaaaattctagcaaatgcaactgccttgcatataaaaatgccgtgtcctatgttttatgaggagttaaaaaacacatgtgtgtgtggcaggggggagtgggttcccataagtcctgcttctctgctccacacctgtcatgcccatcccagcgagttctgaattcatccagatggctgcagtttgctctgaatagaaaagatggaaggcttaaagaattttttgagcagctaatataaacacctagactgttcctactgatgacagcctgctgcaagttagcatctccctccatgagcgggtgctgagaggagccaggaaagtgggcattgtcttgtgcccacaaattaacatgcaagtcccgtttctataccaagcccacatgaggagtagggctgaaccacgtgcttggtcatggagaaggaagatgcccagagaggctcctggccccctccaggcacaggctttgtaaccaccgcgggccaggaagactgaaacaggaagcaacgagagagagccttgaggtctaagaagagcacatgcagagtgggaggtctgttgaaatgctggctcgacacatagcactg

SEQ ID NO: 729932 - DNA, 599 bp, Homo sapiens; identical to SEQ ID NO: 273326

SEQ ID NO: 729933 - DNA, 938 bp, Homo sapiens; identical to SEQ ID NO: 273330

SEQ ID NO: 729934 - DNA, 924 bp, Homo sapiens
agttgtccagggctccctgagggaggccagcacaagagctctgccataaaaggacattggacagaagtgaagagtccaatcagaaactctttttgagagactgaacgcaaagcattcagagagtcagcaggctggagaggccaagacacacacacgaagaaggcaggacactcttctcctcctgcggttggactccaggctctatgaccttcaaactccaggacttacaccagttgcccctgggcactcaggacttctgcttcagactgacagttgcaggacagtgcagcattttattttaaagataccccacaacgtaggtggccagtcctgctgcagggcagatacgctcccttgattctgaggtctttgaacttgctgtgaagccacactacctgcgtcccagggtctccagcttgcagatggactgtggtgggacttctcagtcaccaagattgagagctgtactagcctggcatgcagacagcagctttagaatcagatctgccttctggcggcttcccacctaggagccatgggacctttgtgaagtcaccaattgtgctgtggatgcttcatttgtgaaggagaacaggactgccttgtgaaattacggatggtgctactaaaacatatcaataatttgaatttcacttttgtggatgctttaaacatcatagtcattagaaggtggatctggctgattgtactttaagttttcagtttgagctggagctttgtattataacaggagggtactggacaaggtgagttgctgatagcctccccccacctgccaacagacctatcattagatggaatgtaatggactttggccagttgttctccaccccagctctgacttagcggctctggcaagaatggatatatgagcctaaatacagagcttgttgtgctactttt

SEQ ID NO: 729935 - DNA, 701 bp, Homo sapiens; identical to SEQ ID NO: 273332

SEQ ID NO: 729936 - DNA, 687 bp, Homo sapiens
cagttattaagtggcaaagaccggatttgaatcaagatatctgatttttaaaattcaccttgtttcaaagcattttacttcacctaagaagttaatacacctcacaaccagataactccttcttttcaattagactgtgtctgtatctgggatcagttgcgaagcagaagtatgacgtgactaaggccaccgctgggttaggatacccccatccaagattgagagctgtactagcctggcatgcagacagcagctttagaatcagatctgccttctggcggcttcccacctaggagccatgggacctttgtgaagtcaccaattgtgctgtggatgcttcatttgtgaaggagaacaggactgccttgtgaaattacggatggtgctactaaaacatatcaataatttgaatttcacttttgtggatgctttaaacatcatagtcattagaaggtggatctggctgattgtactttaagttttcagtttgagctggagctttgtattataacaggagggtactggacaaggtgagttgctgatagcctccccccacctgccaacagacctatcattagatggaatgtaatggactttggccagttgttctccaccccagctctgacttagcggctctggcaagaatggatatatgagcctaaatacagagcttgttgtgctactttt

SEQ ID NO: 729937 - DNA, 346 bp, Homo sapiens
ggacactcttctcctcctgcggttggactccaggctctatgaccttcaaactccaggacttacaccagttgcccctgggcactcaggacttctgcttcagactgacagttgcaggacagtgcagcattttattttaaagataccccacaacgtaggtggccagtcctgctgcaggtgcggtttcaagcctttggagtttgaccttctagtccaaggtcattacagctgcaggcagaggctcccgcggggaaaagagcatttcctgggacgctggaactaaatgaatggcccactctccagttcagcccttgcctccttcccgacacataaagttcaagagccacgg

SEQ ID NO: 729938 - DNA, 407 bp, Homo sapiens; identical to SEQ ID NO: 400632

SEQ ID NO: 729939 - DNA, 1976 bp, Homo sapiens
atactcaacttcccagcctcccttgcagctagtggtaatcatgtgacccacttctggccagtaagatgaaaaaaggaagttcactggactggcagagggagcttgggagggcttttgctgatgccacttgttcttcttgccataaagacggtgtctgacttccaggcaacaatgcacacagaagttacaagtgtggatactagagtcagagcctggattccaatgctgcttcttaacagctgtgtgactttccacaagtaatgcaacatctctgggtctctgtttcctgttctgcaaaatgggggtactgtctacttgccccagggacctgctgtgctgaggatcattcccaggaagcacctagcaccatgctgggtcctggcaagccactgacaaatgttcactgtcacaatggccctgcttcctctggtgctcggcaccaggctgacatcgagtacacagtcaatgaagaaacaaggagactctgcaaggagatacattaggatgatgtactgacaaagccttgggaaaactgctggtgcctttgctggggggaagatttccagatggagctcctcaggatggcctgccaatccaataaactcaggttcctagaaagggcctcccccaaccccaccccacccccactctgtaagccccacccaaaccaggacagcagcaattctccccttcccctggtgtgccttccccggtggtctgtttctttaggacaggaacgcagctgtctggaaggcacccagggaagccattccttgggacatgtcccctgacccacccccggcaaggctgggatgacagaaggacaaacccagccaaacatatggacccgtggcccaggataggcaacagctgggccactgcctgacttttcttctgctccttggaatattctggcaatgagaagacatagtctcagcaacttatagacattttcccaggaaatcctaaccgctaagggaacaatttgctccattctcacacatttcaatctacttatttggaagaccaatccttgcgtgggcatgcacgcacatgcgcgcgcgcgcgcacacacacacacacacacacacacacacacacacccttcatgtggtcttgtgtagaagtacacaaacctgataatagcaaccactaatatttagtatatgctaagtaataaaagtagctactatagtcatcatctcatatagtcctcacaacaagcattgagacaggggctctatccacatttcacagatgaggacacagaggtgggctgcctttcacagaacaagctgctagccatgctggggctggcgtcggagcccaggtctaagaactctggtacaaggaatccactccctttcccggatttgcctcctccacctgtgcttaaggagttaaccttgtcggagaggttttctttccttggttatgttttctattctttgggtaagtttgacaaagtggggttctttttcatcgccagagtctgtgtccctggaggctgaggaaggaaccagaagttgcactttccaacatggatcgcctgctaattttccaaggcagctcagcccctgccagcgtcccctccctcctttgggctgagggcccaggaacccagcctcaaagttcagcttgcttcctccagcacgcacatttggaaattgaaatttcccacattttcaccacacaaaagccaggttgtatttttgttctcttcaaaatatgccaaaggaatttttcctaccccttgaactttctccaaaaataagtagaaaaagtcaagaccattttgccctgtaagctgagaatagaaaaatcaacatgcagggtgccatttccaggatgttacgaaacagcgaacatgtgaatccgtctcaacaccatttggcaactttggggatacagtagatgatatttctcacccacaaactcctcactgagtttatattaacattttgcttttttttttt

SEQ ID NO: 729940 - DNA, 564 bp, Homo sapiens
agaggcagaggaatcctagggagggggaagtgaggcatggacaggcagagggactgcactattcaagggcatgatggagagaagtacgtgcctggatttccaatttccctaaggataattttacaccagatcttctttattttaaaaatccaatccttttccttaataaccccatctgtccctgataccaccatttttttctaccagtctctcaggctagaaattttgtggttatctttgcctcttctctccttcatcctgtaaatcctacctgttgggaatacattactgtcctttcttcaaaatgttttatctgtcttttctttttcattctctgctattaactataacttcattctcagttccactgctgcctagctttctgtgccctgctagattcatcattattcatccaacaaacataaaaggaaaaaattggcctggcgcggtggctcacgcctgtaatcccagcactttgggaggccgaggcgggcggatcatgaggtcaggagatcaagaccatcctggctaacatggtgaaaccccgtctccactaaaaataca

SEQ ID NO: 729941 - DNA, 230 bp, Homo sapiens; identical to SEQ ID NO: 728428

SEQ ID NO: 729942 - DNA, 277 bp, Homo sapiens
  misc_feature (7)..(7): n is a, c, g, or t
gaacgcncgacaacgataagaaactttttttttttttctttctttctttctttctttctttttctttctttctttctttctttctcgctctcgctctctccctccctcgctcgttttctctctctctcgctcttgccctctcgctctctccctcgctcgttttctctctctctctctctctctctctctgtctctcgctctcgccctctctctctctctgtctctctctctctctctctctctctctctctctctctctctcttctgtcgtcttctc

SEQ ID NO: 729943 - DNA, 401 bp, Homo sapiens
  misc_feature (384)..(384): n is a, c, g, or t
ctttttttttttttctttctttctttctttctttctttttctttctttctttctttctttctcgctctcgctctctccctccctcgctcgttttctctctctctcgctcttgccctctcgctctctccctcgctcgttttctctctctctctctctctctctctctgtctctcgctctcgccctctctctctctctgtctctctctctctctctctctacttctatcattaaccctttacaccttttccccccccccccccctttttttttttccctttttgggggagttaaacccacggaggatatttaaaccccccttttttattttttaaaacaccccttttttgcccccgggggggctccccccccaaaaaaaagaagcnccccccccccccccgta

SEQ ID NO: 729944 - DNA, 387 bp, Homo sapiens
  misc_feature (228)..(228): n is a, c, g, or t
  misc_feature (240)..(241): n is a, c, g, or t
  misc_feature (268)..(268): n is a, c, g, or t
ctttttttttttttctttctttctttctttctttctttttctttctttctttctttctttctcgctctcgctctctccctccctcgctcgttttctctctctctcgctcttgccctctcgctctctccctcgctcgttttctctctctctctctctctctctctctgtctctcgctctcgccctctctctctctctgtctctctctctctctctcgcagccccgtatnaagtagtaaagnntttaaaggggggggcccccgggggggnccccccccccgggccccctttttccccctttttaaaaaggagaaaaaaaaggggggggggggaaaaaaatttttttcccccccccccccaaaaaaaaaaaaggggggggcccccccttt

SEQ ID NO: 729945 - DNA, 1604 bp, Homo sapiens; identical to SEQ ID NO: 256019

SEQ ID NO: 729946 - DNA, 2742 bp, Homo sapiens; identical to SEQ ID NO: 274510

SEQ ID NO: 729947 - DNA, 1861 bp, Homo sapiens; identical to SEQ ID NO: 273960

SEQ ID NO: 729948 - DNA, 1391 bp, Homo sapiens; identical to SEQ ID NO: 411805
  misc_feature (1387)..(1387): n is a, c, g, or t

SEQ ID NO: 729949 - DNA, 1388 bp, Homo sapiens; identical to SEQ ID NO: 263138

SEQ ID NO: 729950 - DNA, 1279 bp, Homo sapiens; identical to SEQ ID NO: 275052

SEQ ID NO: 729951 - DNA, 1604 bp, Homo sapiens; identical to SEQ ID NO: 273959

SEQ ID NO: 729952 - DNA, 1799 bp, Homo sapiens; identical to SEQ ID NO: 262932

SEQ ID NO: 729953 - DNA, 1606 bp, Homo sapiens
  misc_feature (762)..(762): n is a, c, g, or t
  misc_feature (1605)..(1605): n is a, c, g, or t
gaaacccataagtctgtttattaaatctcaggctaagaatactatacacaccttcattttattttgtcataattcttgtgaggcattccttagatgggttcagtatttaattttaaaagacaaagctattaagagaaaacataatgttactgggttttttttgtcacttttcttggctctatcaaattagaagtgcttgagatgtgacatgaccaattgaaataacatttccagattttgcagacttttgtaggaccatcttggttttacccagacataagacatctgttttcataggcttaacagtcttattctcattctttattttgctcagttctacttccaaacatatgaaatgaaatgacaaatgacatgagtgctatgtaattaggagagaattattttacctcagagagatttttcatcctcatttattttatattaagcatagcacactttcaatttcattttccttcttttgaatttttatcccatctgtttaggggattttaaaaacttagtctttaaaatgacttctgataagcagtagctgacttttttaaaagaaaatgtaaccaaaaattgttactttattcctgtgaagtatattgtaaagataggacatggtataatgtattggagtgggttttggtggtgtttttgttttattctgttttcttaactgttacatgatggcatttaataaagcatctgtaacattctggattaatcttaagaagaactaactttttctttgggcancaagctactctggaaataataattttccctatgttggttatttctcatggcagccttccactgcattttctttgtttgggtactttcttttcttcctgccgttcttagctttctatttttcaacttgagtttacaaaaggatgtgtattcaaagggtttcctacagttcccagtaccttgttaatcctgagaaattacccagtgagccaattctcacagtaaggtataaaaatagtcatccagaaagattacagaatgtggtaccactgtggttttaactaatggaagacttttaaaaccaagatggggagaagaaaacagcacaaatgttactatttccttcgatttttatctgcacaatctattttaggagagccttcaaatttaaaaaagtaatagagcttcaccactgctttattggatacactcaaagatcatcataattggggacaagaaagaaatcacctgcaaataaatcacaagaacagagcctacctgtgattactattgagcatatatccacaatgttcatttaaccaattttattccacaaatttagtccagcattttattgagtgctttaataagttctggtgtgtgaagttgggtggcttaacttctctaagtctgaatttccatattgtagaataaggaagtaattaacctttttttattttaataaactttattttcaagaacagttttagatttacagaaatactgtaaaaatagtacaaagaattcctgtatactctgttattaactctattattattaccttgtattattatggtacatttattataattaataactcaatattgagatgttgttaactaaatnc

SEQ ID NO: 729954 - DNA, 1040 bp, Homo sapiens
  misc_feature (762)..(762): n is a, c, g, or t
gaaacccataagtctgtttattaaatctcaggctaagaatactatacacaccttcattttattttgtcataattcttgtgaggcattccttagatgggttcagtatttaattttaaaagacaaagctattaagagaaaacataatgttactgggttttttttgtcacttttcttggctctatcaaattagaagtgcttgagatgtgacatgaccaattgaaataacatttccagattttgcagacttttgtaggaccatcttggttttacccagacataagacatctgttttcataggcttaacagtcttattctcattctttattttgctcagttctacttccaaacatatgaaatgaaatgacaaatgacatgagtgctatgtaattaggagagaattattttacctcagagagatttttcatcctcatttattttatattaagcatagcacactttcaatttcattttccttcttttgaatttttatcccatctgtttaggggattttaaaaacttagtctttaaaatgacttctgataagcagtagctgacttttttaaaagaaaatgtaaccaaaaattgttactttattcctgtgaagtatattgtaaagataggacatggtataatgtattggagtgggttttggtggtgtttttgttttattctgttttcttaactgttacatgatggcatttaataaagcatctgtaacattctggattaatcttaagaagaactaactttttctttgggcancaagctactctggaaataataattttccctatgttggttatttctcatggcagccttccactgcattttctttgtttgggtactttcttttcttcctgccgttcttagctttctatttttcaacttgagtttacaaaaggatgtgtattcaaagggtttcctacagttcccagtaccttgttaatcctgagaaattacccagtgagccaattctcacagtaaggtataaaaatagtcatccagaaagattacagaatgtggtaccactgtggttttaa

SEQ ID NO: 729955 - DNA, 1965 bp, Homo sapiens; identical to SEQ ID NO: 213449

SEQ ID NO: 729956 - DNA, 798 bp, Homo sapiens
aatgcgcgaggcctggacgggagtggccgaggcggttgggcggaggcggagcaggcgccatgtcagcccgggaagtggccgtgctgctgctgtggctgagctgctatggctccgccctttggaggtattccactaacagcccaaactatcgcatttttagtaccagaagtactattaagttagagtatgaaggaacattatttactgagtggagtgtgccagaaacttgttttgtgctaaataaaagctcacccacgacagaattgcgttgttcctcacctggtgttcacgctataaaaccaattgttactggcccagatgaagaagaacgctatttatttgtggaaagttctcatacttgctttctgtggtactatagagttagacatttctttaacaactttacccagcttatcactgtgtgggcatatgatccagaaagtgcagatcctgatgagttgctggggaatgcagaagaaccttcaataaattccatagtactcagcacacagatggccacattgggacagaagcctgtcatacatacagttctgaagagaaaagtttattcttcaaatgagaaaatgagaagggggacctggcgtattgtagtaccaatgacaaaagatgatgcactaaaggagattagaggaaaccaagttacttttcaggattgctttattgcagattttcttattctgttgacttttcctttgttgaccatacctgaaattcctggttatttaccaatctcctcaccacgtggtagtcaattaatggcttcctgggatgcttgtg

SEQ ID NO: 729957 - DNA, 2298 bp, Homo sapiens; identical to SEQ ID NO: 215907

SEQ ID NO: 729958 - DNA, 666 bp, Homo sapiens
aatgcgcgaggcctggacgggagtggccgaggcggttgggcggaggcggagcaggcgccatgtcagcccgggaagtggccgtgctgctgctgtggctgagctgctatggctccgccctttggaggtattccactaacagcccaaactatcgcatttttagtaccagaagtactattaagttagagtatgaaggaacattatttactgagtggagtgtgccagaaacttgttttgtgctaaataaaagctcacccacgacagaattgcgttgttcctcacctggtgttcacgctataaaaccaattgttactggcccagatgaagaagaacgctatttatttgtggaaagttctcatacttgctttctgtggtactatagagttagcttatcactgtgtgggcatatgatccagaaagtgcagatcctgatgagttgctggggaatgcagaagaaccttcaatagacctggcgtattgtagtaccaatgacaaaagatgatgcactaaaggagattagaggaaaccaagttacttttcaggattgctttattgcagattttcttattctgttgacttttcctttgttgaccatacctgaaattcctggttatttaccaatctcctcaccacgtggtagtcaattaatggcttcctgggatgcttgtg

SEQ ID NO: 729959 - DNA, 870 bp, Homo sapiens
aatgcgcgaggcctggacgggagtggccgaggcggttgggcggaggcggagcaggcgccatgtcagcccgggaagtggccgtgctgctgctgtggctgagctgctatggctccgccctttggaggtagagagacgccagtcgcaggtattccactaacagcccaaactatcgcatttttagtaccagaagtactattaagttagagtatgaaggaacattatttactgagtggagtgtgccagaaacttgttttgtgctaaataaaagctcacccacgacagaattgcgttgttcctcacctggtgttcacgctataaaaccaattgttactggcccagatgaagaagaacgctatttatttgtggaaagttctcatacttgctttctgtggtactatagagttagacatttctttaacaactttacccagcttatcactgtgtgggcatatgatccagaaagtgcagatcctgatgagttgctggggaatgcagaagaaccttcaataaattccctgatcacagctgtctcatgaaagatacatactctcctctggatgaattccatagtactcagcacacagatggccacattgggacagaagcctgtcatacatacagttctgaagagaaaagtttattcttcaaatgagaaaatgagaagggggacctggcgtattgtagtaccaatgacaaaagatgatgcactaaaggagattagaggaaaccaagttacttttcaggattgctttattgcagattttcttattctgttgacttttcctttgttgaccatacctgaaattcctggttatttaccaatctcctcaccacgtggtagtcaattaatggcttcctgggatgcttgtg

SEQ ID NO: 729960 - DNA, 345 bp, Homo sapiens; identical to SEQ ID NO: 215912

SEQ ID NO: 729961 - DNA, 1240 bp, Homo sapiens
aagggggagctggctgtccctccacctcccatctgccattccgaggcatcatctaacgtccccggcgtcccctctcattctggtgtcccctgtgttctagaggaagcatggactgtgtctccaggatgggctgtgggagctgtggggctcccaggggggcaggagccctcaggggagaggggtggggcacgtgggtgcgcaggtaggccgtcctggagcagagcagtgtagggccaagccctgtgtcttctgctgcttctcactggctctggggcaggtggcttcctcacctgcacgatgggaatgaccctggagttctggggaacttggtgagatcaggaccttcccccagcagtgccccccaggtgcctgacgtactgttgtgctgttggtggtattattaccacctcgggccatgcgatgacccttttgcttatctgcaaaataaagcgggtttggcagcaagaaaatcaaagtgaaactggtgaagaaagggccggcctcacgagaccccggggactcagacccagtgagcgcacctcttgctgcctcctgcatccacaccgccaccccgcgggaaggcaggacgagctgcttgccaggtgacctcccgtgcctcagtttcccccatgaccacgaggcggtgagagctccgccgagctgccccagggataactgagctgggcttggtgcggctgcggccagtacgctggtcctgcccctcttgttggtcaaatctcaagcagacttgtcccaggaccctgggtcctgtgtgtggcagatggtcctccctgcctgccccggcccccgccttccccatgggcctacggccaggactggaggacttgccccagcctaggttggccctctggccaggggaccgtccgggattcccgggcccaggcccactgaggtctgccatggacaagtgtaagatgcccaggacccccttccttggcagtgcccagatgggcccaggcccggcttctcccccagggcggctggcggctgcataaaccctgctcccccagggccctggcaaaggccgggcacccagcccaggagactccacaaagggttaaggggcgcaggcggctgtgcccacagtggggcggagcagccgggctggtgctgggccaggagcacgggcgaaggcgctgcattttaatgaatcgttattgccggcgaggcctttgtctttctttatccggtgcacaataaaagaattaattagacagaa

SEQ ID NO: 729962 - DNA, 1234 bp, Homo sapiens
ggcaggacccagcgctgcactcaagcctcagccaggcccttcctgcaggacccagcgctgcactcaagcctcagccgggcccttcctgcagaagtgcaggggcatcaggcaggtgatggaagccagaggctcagatcgcccactgcccaggccctgccagtgacgacatctgcttctctttcctgggaccagaggccccacctctgctccccacagcctggctctgccggcccagtcctgaggccactgcaaacaagggggctgtggcctcctgattactcactggccctcggctgcctgggagctgcagggacccacccaggctccctaccacctgcgaagcccacagtgccccccaggtgcctgacgtactgttgtgctgttggtggtattattaccacctcgggccatgcgatgacccttttgcttatctgcaaaataaagcgggtttggcagcaagaaaatcaaagtgaaactggtgaagaaagggccggcctcacgagaccccggggactcagacccagtgagcgcacctcttgctgcctcctgcatccacaccgccaccccgcgggaaggcaggacgagctgcttgccaggtgacctcccgtgcctcagtttcccccatgaccacgaggcggtgagagctccgccgagctgccccagggataactgagctgggcttggtgcggctgcggccagtacgctggtcctgcccctcttgttggtcaaatctcaagcagacttgtcccaggaccctgggtcctgtgtgtggcagatggtcctccctgcctgccccggcccccgccttccccatgggcctacggccaggactggaggacttgccccagcctaggttggccctctggccaggggaccgtccgggattcccgggcccaggcccactgaggtctgccatggacaagtgtaagatgcccaggacccccttccttggcagtgcccagatgggcccaggcccggcttctcccccagggcggctggcggctgcataaaccctgctcccccagggccctggcaaaggccgggcacccagcccaggagactccacaaagggttaaggggcgcaggcggctgtgcccacagtggggcggagcagccgggctggtgctgggccaggagcacgggcgaaggcgctgcattttaatgaatcgttattgccggcgaggcctttgtctttctttatccggtgcacaataaaagaattaattagacagaa

SEQ ID NO: 729963 - DNA, 706 bp, Homo sapiens
cgacacaatggagtgagcgaaggagacgagcaggttgtgccagcgccaggtgcgcagggggtcggcgcgcacgtgcacgggattgtgcacctgtgcctgcgaaaggctgaccagaagctggtgatcatcaagcagattccagtggaacagatgaccaaggaagagcggcaggcagcccagaatgagtgccaggtcctcaagctgctcaaccaccccaatgtcattgagtactacgagaacttcctggaagacaaagcccttatgatcgccatggaatatgcaccaggcggcactctggctgagttcatccaaaagcgctgtaattccctgctggaggaggagaccatcctgcacttcttcgtgcagatcctgcttgcactgcatcatgtgcacacccacctcatcctgcaccgagacctcaagacccagaacatcctgcttgacaaacaccgcatggtcgtcaagatcggtgatttcggcatctccaagatccttagcagcaagagcaaggcctacacggtgcctgggcatggaagggacctccagggcactagaagtcttgagggccaggacctaaccctgcctcctcccctccccctaaaaaacccttggccctttggcccctgtttgggtggttctgcaggaggaagccccttggcttgctttgagaagaagctgtccccaaatgggcttatgcacagagccc

SEQ ID NO: 729964 - DNA, 589 bp, Homo sapiens; identical to SEQ ID NO: 294771

SEQ ID NO: 729965 - DNA, 1468 bp, Homo sapiens
  misc_feature (1145)..(1145): n is a, c, g, or t
  misc_feature (1150)..(1150): n is a, c, g, or t
  misc_feature (1153)..(1153): n is a, c, g, or t
  misc_feature (1155)..(1155): n is a, c, g, or t
  misc_feature (1164)..(1164): n is a, c, g, or t
  misc_feature (1171)..(1172): n is a, c, g, or t
  misc_feature (1174)..(1174): n is a, c, g, or t
cgacacaatggagtgagcgaaggagacgagcaggttgtgccagcgccaggtgcgcagggggtcggcgcgcacgtgcacgggattgtgcacctgtgcctgcgaaaggctgaccagaagctggtgatcatcaagcagattccagtggaacagatgaccaaggaagagcggcaggcagcccagaatgagtgccaggtcctcaagctgctcaaccaccccaatgtcattgagtactacgagaacttcctggaagacaaagcccttatgatcgccatggaatatgcaccaggcggcactctggctgagttcatccaaaagcgctgtaattccctgctggaggaggagaccatcctgcacttcttcgtgcagatcctgcttgcactgcatcatgtgcacacccacctcatcctgcaccgagacctcaagacccagaacatcctgcttgacaaacaccgcatggtcgtcaagatcggtgatttcggcatctccaagatccttagcagcaagagcaaggcctacacggtggtgggtaccccatgctatatctcccctgagctgtgtgagggcaagccctacaaccagaagagtgacatctgggccctgggctgtgtcctctacgagctggccagcctcaagagggctttcgaggctgcgaacttgccagcactggtgctgaagatcatgagtggcacctttgcacctatctctgaccggtacagccctgagcttcgccagctggtcctgagtctactcagcctggagcctgcccagcggccaccactcagccacatcatggcacagcccctctgcatccgtgccctcctcaacctccacaccgacgtgggcagtgtccgcatgcggagggcagagaagtccgtggcccccagcaacacagggagcaggaccaccagtgtccgctgcagaggtatcccccggggacctgtgaggccagccatcccaccaccactgtcgtcagtgtatgcctggggtggtgggctgggcacccccctgcggctgccaatgctcaacacagaggtggtccaggtggcagctgggcgcacgcagaaagccggcgtcacgcgctctggggcgtctcatcctgtgaggagggcccacccctaggtgcaggacgaggcagactccttacngaggnacngnagcagccanagcccanntncaaccgacgaaccagggaagaccagaacggggtgacaataaagacggtcgacagtggggaaccacaacacgacgggccgaaggaaaacaagcacacacccaagacaaatcgcgaagcgacaaacagggggccaaagcacggcggcagcccctgaaaacacgagccaacacaggggacgcgcaaccgcgacaaaacaggtacaccccgtacaagcaacaccgaagaaaccgatagagaaacaaccaatacgacgaccaaccagacagggtgaagaggcaacaacacaccagagac

SEQ ID NO: 729966 - DNA, 955 bp, Homo sapiens
tagcagagagctctgtacgtggtaggtgctcactcccctattgtttgggtgtatgcctcctgataatgaacttgatcgtaacattattgttgcattatgcctgtattgtttccttaggtgaaggaagaatgcttttgagtacctaataggtggcaagctctgtgcctacttacatacatgaactattccttttaataacctttggaaataaagtggcatttccattgggcattagaaatctgaagactttcgtttacagctgttgcaacagcagaactagaattcgacctccgacatttctgctcaccagagggcatgaactgctggtttgtacctggcttgcagataccttctttgggcagcacaatgttcaaaattaaaaaaactaccaacacttctaaactggatactttgtatcaatatctgggtttctggcttctcttcatgggaaacaaacaaacaaacaaaaaggtttggtgaacactggggcccacattcctgcagggcaacagtcacatggagactttagatgggcacgtgcccagaacacactagagtccccatcgctccccattctcttacattctgttcccaactaggttcttataggcctgggtttgtgcctgttgcacacttatctactctcttgcttcccactggtcaggaagtctggcaaacttaaaaggcctctttttgttgctctctcctgtatggatctctcatcatagaggtgtgtgcatttctgactttgtgatttcaatactaaggaagctgtcggcacattatcaaggaaaacggggatcgctgctccccaacgtacacattctggtgtgccccagtaaaattctatattcagcctccaaactagctgggaaaaatgtggcaaatcatctacttgctccaattcaatagtgtttagaagtaagaagtcactgtgagcaatgccaccaagtgg

SEQ ID NO: 729967 - DNA, 801 bp, Homo sapiens
gtagcgaggcttgggtggcgaactcggcacgaggcttttaataacctttggaaataaagtggcatttccattgggcattagaaatctgaagactttcgtttacagctgttgcaacagcagaactagaattcgacctccgacatttctgctcaccagagggcatgaactgctggtttgtacctggcttgcagataccttctttgggcagcacaatgttcaaaattaaaaaaactaccaacacttctaaactggatactttgtatcaatatctgggtttctggcttctcttcatgggaaacaaacaaacaaacaaaaaggtttggtgaacactggggcccacattcctgcagggcaacagtcacatggagactttagatgggcacgtgcccagaacacactagagtccccatcgctccccattctcttacattctgttcccaactaggttcttataggcctgggtttgtgcctgttgcacacttatctactctcttgcttcccactggtcaggaagtctggcaaacttaaaaggcctctttttgttgctctctcctgtatggatctctcatcatagaggtgtgtgcatttctgactttgtgatttcaatactaaggaagctgtcggcacattatcaaggaaaacggggatcgctgctccccaacgtacacattctggtgtgccccagtaaaattctatattcagcctccaaactagctgggaaaaatgtggcaaatcatctacttgctccaattcaatagtgtttagaagtaagaagtcactgtgagcaatgccaccaagtgg

SEQ ID NO: 729968 - DNA, 784 bp, Homo sapiens
  misc_feature (231)..(231): n is a, c, g, or t
  misc_feature (440)..(440): n is a, c, g, or t
ccgctctccacccaccccgggccgaaagtgctgcctgcacaggttggtgtatggtcctttgagcaggaagaagacatgaagcacattcctgttagctacgacagagaggggcagggcacacactggacatttcaagcccctccagaaaagcaagtcttactgtgctgggagtacttgtggagtgcgggctgtgttgccctgggctttaattatttcaggaacatttaaccncagggttggcaggccggatcttgatacgtgtttcttagttggaaagactttggaccatagggaaatgtcttctcaattcttttaatttcagtaaggttgtcatttttcttcttgtggcctctggaatgtgacacagaactcaagggacaggaaggagatgagttggaggctgggacaggggtccctgccagggatgctggtgactcacntgacggtgttgatgtgtggagtccggtgcctggtttggggaatgttcgtgggatatgttccaaaggactgacggacctatcaggtactggaggtgaatggtcaagtctgatctcagggctgacagtgtcaggcaaggacaggaagttgacgttggactcattggctgaggttgcttgggacccagggagcaacgtgtgccaggacagatgggtctggggctaggaaggcaggtttgggctggagacttgggcttgggacgcatcccaggtagacagtggttgaggctgtggaaatgaccatgattgcctgggatgagagtggagacggacaagattccatctca

SEQ ID NO: 729969 - DNA, 623 bp, Homo sapiens
  misc_feature (231)..(231): n is a, c, g, or t
  misc_feature (440)..(440): n is a, c, g, or t
ccgctctccacccaccccgggccgaaagtgctgcctgcacaggttggtgtatggtcctttgagcaggaagaagacatgaagcacattcctgttagctacgacagagaggggcagggcacacactggacatttcaagcccctccagaaaagcaagtcttactgtgctgggagtacttgtggagtgcgggctgtgttgccctgggctttaattatttcaggaacatttaaccncagggttggcaggccggatcttgatacgtgtttcttagttggaaagactttggaccatagggaaatgtcttctcaattcttttaatttcagtaaggttgtcatttttcttcttgtggcctctggaatgtgacacagaactcaagggacaggaaggagatgagttggaggctgggacaggggtccctgccagggatgctggtgactcacntgacggtgttgatgtgtggagtccggtgcctggtttggggaatgttcgtgggatatgttccaaaggactgacggacctatcaggtactggaggtgaatggtcaagtctgatctcagggctgacagtgtcaggcaaggacaggaagttgacgttgggcgtacggggaggggatactctagagcg

SEQ ID NO: 729970 - DNA, 2068 bp, Homo sapiens
tgagatggagtctcgctttaccgcccaggctggagtgcagtggcactatctcagctcactgcaagctccacctcctgggttcacgccattctcctgcctcagcctccccagtagctgggactacaggcgctcaccaccacgcgcagctaattttttgtatttttagtagagacggggtttcaccgtgttagccaggatggtctcgatctcctgacctcgtgatccgcccgcctcggcctcccaaagtgctgggattacaggcgtgagccaccgcgcctggccaaaaaaagccatgctttttcatccttccagatcgtaacccaggtgttaagtttacatggaatgcctatgccccctcctcttcctagacgtagatatctcctctcccctaggaagtcttccttaactcatcctcagggagttatccacccttcttccagcacagggcacggcactaatggtgagctcttctcacatcttctgctgagactttgttctggggctgagtcccctccccaaccccctgactctcacacatagccccccatcagctgttttactccgtgccttactggatttggcctgtcctcaagaatggtaattatgaagagtggagaagtttggaccttgcctcctttaggggaaaggtaggacaggaatgtccctgcctggtactggtgggggaaatagtccgtatccccaactattaaggatttgtcccaggccaatggtgaacatgctgcattttatgtttggattgtgctgtaataagagcctcttccttccctcagaggatgtggctgggcttctatcctagagatggagtagaaggcacaactggtttgatagttactattttctgacctgtttgctgaagtgatttgcgaattgactttcctagggtgttgcctgagtcctttgaaatctccttctgacatctttcccttctgttgtgaaatatgttaagccacaggccaaactgctataagatcgaagtttgtttttttctcacctaataatagagaggtaatcagatggtctagggcagatttaactctacaaggttatcaggaactttgtttccttctgtcttattcagccattcccagtatgttttcttacccataagatcaaagcagactcatcagctccatatctgcattccactggggaaagagagagagaaaagagcagatttttaaaaaaagatatgactgagcattgctcagatcactgtggccacactttgctgaaagagatgctgggacatagaacctcttatctgggcagtcatgtgctgagttaaaactcagggattctgtgactacaagatgaaagacaatttggttgctgagatgcagttaatggcttctgttacatggagctcaatggacgtgcccaggaatgcttttggctgttattttgcagttaatacctcctgtaactaaagcatttgtttatgagttgacttgagagaagggctgatctcagagccgctttgagctaagttggattagtcacactaggaagttaattccacacctttcgtctaagtctcagtattgaggcctctccagttctcatgcaccctgatcttagggttagaatacttgaccctgatacctgcaccatgcttcatggttcctgagctctttctcctgtttcatttgagcctccaaactacatatttggtcatattgcctgcctaccccatgcctgctgcagaaatattcatccaggttaaccttgatatacacagagatggtcttggagaattgtgaatgtatgtactgtattgtcatcaaggatactgtcccttatttgaaggcatctaaagagaaactgttttcagatccaagtgctcagatctaaagcctctgcaacaagtcaggtggtggtcatgtttcccttctagttttggctgacaggaagctcagttcagtaccataactacagaacctgtcatctgtattttttgttctcaccccgtttttgttattttgtttctggttttttatattgaggtatgttttagatatagtttacaaaaataaaacgcacagatctt

SEQ ID NO: 729971 - DNA, 1326 bp, Homo sapiens; identical to SEQ ID NO: 223065

SEQ ID NO: 729972 - DNA, 1339 bp, Homo sapiens; identical to SEQ ID NO: 223108

SEQ ID NO: 729973 - DNA, 1445 bp, Homo sapiens; identical to SEQ ID NO: 399984

SEQ ID NO: 729974 - DNA, 1894 bp, Homo sapiens; identical to SEQ ID NO: 282318

SEQ ID NO: 729975 - DNA, 2316 bp, Homo sapiens; identical to SEQ ID NO: 222264

SEQ ID NO: 729976 - DNA, 1175 bp, Homo sapiens; identical to SEQ ID NO: 223369

SEQ ID NO: 729977 - DNA, 1998 bp, Homo sapiens; identical to SEQ ID NO: 220055

SEQ ID NO: 729978 - DNA, 1503 bp, Homo sapiens
atgcaattacaaatccaataccattgagcccttttgggacctatccctggaattccctgaacgctatcactgcatagaaaaggggtttgtccctttgaatcaaacagagtgcttgctcactgagatgctggccaaattcacagagacagaggccctggaagggagaatctacgcttgtgaccagtgtaacagtgagtgctgtgtggaggagggggcgtagtggggaagaataattggaatatcagtttaaggtgctgctttgtcctctttagtcaaaagtaacactaatgatattgaatggttctaaagcatcttttaaagatctttttctcccatttttctaaaaacaaaaaaacatggacttgttttaattatgtattaaaaaacaaaacaaggctgggcgttgtggctcacgcctgtaatcccagcattttgggaggccaaggcggacagatcacttgaggtcaggagtttgagaccagcctgaccaacatggtgaaaccctgtctctactaaaaatacaaaaattagctgggcatagtggcagatgcctgtaatcccagctactcgggaggctgaggcaggagaatcggttgaacccaggaagcggagggtgcagtgagccaagatcgcgccattgcactccagcctgggcaacagagcaagactccgtttcaaacaacaacaacaacaacaaatgaaacaaagacctaggagttgattgacctcctgattgacattagttgtcatcttggaagggattttaaagttgtggctcctgaaatggggactctgagaatgttagtacttagcttcttagtgctgtggggctgctgcttaaattcatgaatgtagagtctgacagttcttacttaatctaaacccagatggtatagcctttctgaagggtgcgatatcagaaaagcaagcttttgtactgaactggtagacttaatgtctgtcaaaagtgatgctaaagattggtacagtggaaccaagaaagcaagtcttaaggtgcattgctcagtggcagcttcatgaaatattttctgcattttgtttttattgttcacatgcctgaaaagttcacatttcagagagggtcatacggaagtatttctgtgttgtctgtaattttaaaatggaactcttacatatggttacagaggcatgttatcagggtccttccatcttgccacactaacacttaatgcttctgctaatccagtatggacagaggaaatgcagaacaaatatgtggatgcttatgtttggggtttgtggcatatatagatttggaaactaaaagtataaagttaatggactgtgcagagacctagaaatcaattttcagtcacataatagtttagattaccagttttgaagaaaaaaaaaatcttaggccaggtgcagtggctcatgcctgtaatcccaggactttgggagaccccaaggtgggcgccactgcactccagcctgggtgacagagcgagatgctgtctc

SEQ ID NO: 729979 - DNA, 1397 bp, Homo sapiens
tcacttccccttcctgcaccccatcctgatttgagggagcccaggatgacaaagagggagtagttgagcaaggtatggagtggcagtctctacaggagctcaaaggatgcatttgtccatctgccctgggctcagcttccacactcagagtcactcacatccctccaccgtcgccacagctcacttgtgtgcccacacagacaaggtcacactgaccccaaacgcacactgtttcaactctcagcacttcactgtcacactcgcgtgtgtacacacatgctttctaatttccacagccacatggatgctcacacactcacacctttgcacacacacacaagctggctcacagacacactgggggcccagatcctggtcattccccacaggtcttaataaaggttcatggaaggaaacctgtttcctaaggtagggtgggagtgtgtgtgagtgtgtgggggggagagggtgagagtgagtgtgtgcgtgtgttagtgtgtgtgtgtatgtaaggagcaggagtgactgggtcctgagtttagggagttgggaagaggaaggagagatggagacaagcctggaccaagagccactcagagctgcctggaagggaagccaggctgagataaaggcaaggcaaagaaataagacactgacaaggatcaagccagggttgggtagggactgggaacagagtctgcctccatgagaagctgtcacattgctgctctggtgccctgtgacagcggcaccatctccagctggagactcccctctctggatcttgtcattgtgactttgctttgttggacaaccaggagtggtgacaggcagggaatatggtgcccagggcagctagccatgccacgccagtccagctgccaacccacccgtcactggccatctcatcacctgccagagggagtggggtggtgcagatgaaaccagcgatcagcttggctgcccttgcttcgtagtgccacagtagaggctaggggagcaactggctttcctccccaaaaggcgggcagggttatccacactttgcccaggtccctgaagcctgcggctgagctcggggataacaggggccaagtcaccggtcccagacacctaggaactattagagacaggaaccagcatatgagacaggggctgttaagtaggaggttggagaacacacgtttttggtctaaaccgggggcccctctctttgcccactgagcccgcggcctgcgtggtgctgagactgcctctggccgcgtccgcttgggacaaggcctgagcggtggctgatcccacctggatgtcccgggccggctcccacccgaagcccgccatcccgggacgcggtggggagaagctggcgctgctccttgccatgcttggcggccgct

SEQ ID NO: 729980 - DNA, 2455 bp, Homo sapiens; identical to SEQ ID NO: 226059

SEQ ID NO: 729981 - DNA, 405 bp, Homo sapiens
tgttgcaagtcccaagcctctcggggcctacaggcaaaccctgactgcccatgaagcagccgcaggtgccaaaggacccactgccaacaaggaaatgagggcagtggatcacacaccctggtgaaactgaggaggagcagagaatgaaacaggaaactggagacagcatgacttcagaccagcaaagaaaagtcaccaccctggaaactaatgctctaccctaaacaaagaaactacacactgctttttgccaaagaggctagtggtatgagtcaggaaaggacaagaatgaccaacttctcacaccctgaaccacattcaaagtctaagccaagagagcacctctggaagtcagagtaaagaattcccttcgaaataaaatatttgctttaacatttaaaaaaa

SEQ ID NO: 729982 - DNA, 463 bp, Homo sapiens
tgtcatccccccagcccagcgagcccctcgtgctgctggcggctgagcagaccagtggcagtttctcacagctctcaggaaagccccagctcacagcagacaggaacaatgacactgccattgaaatagacaactgcagcagctacaagataccctctccagtggcatctccaatcaatttgaatatacccatgagagctgccttgagccacagcctctgggaacaagaggactggaatgagcaccttctacaagttcatatagccagttacctaggagagcacttcttgggagcctgacacctaggcaaaacatgctcttccttgcatacgtgtacttgctaccacctcttataatgctccttttccactgtgagccaagtgaccttgggagaggtaagatggtgtttccaacaaggtgcttctctacttccaccaataaacttccaagtgagtccctaaaa

SEQ ID NO: 729983 - DNA, 542 bp, Homo sapiens
ataatagtttgtgattctgggtgtagaacataagactcactgaagtttctactttggttctttctttctctggaatcatgagccctgggggaagctggctgttgtgtcataaggaggcctgtggtccatgtgactaggaagtgagtcctcctgggaccagacaataagaagctaaagcctcttccaaaagccatgtgagagattcttgtgtcttgtgaatccccggccccatttgagccctcagatgattcagccctggaagacaactagactgcaacgttgtgagaggccctgagccagaagcattcagagaaacttctcctggattcctgaccatggataactgtgggagatgataaatatttgttgatttgagctgctaagttgtaggtgacttgttatgcagcagtagataactaatacagcttcacaagagaggatgaatcactgaactttttcatttgctctaaattcattataagatattaaacatgtcatttgcttttaatatttaataaaaatttccatggctatataagata

SEQ ID NO: 729984 - DNA, 496 bp, Homo sapiens; identical to SEQ ID NO: 225458

SEQ ID NO: 729985 - DNA, 1484 bp, Homo sapiens; identical to SEQ ID NO: 398630

SEQ ID NO: 729986 - DNA, 1322 bp, Homo sapiens; identical to SEQ ID NO: 224923

SEQ ID NO: 729987 - DNA, 1742 bp, Homo sapiens; identical to SEQ ID NO: 225317

SEQ ID NO: 729988 - DNA, 1740 bp, Homo sapiens; identical to SEQ ID NO: 672145

SEQ ID NO: 729989 - DNA, 1259 bp, Homo sapiens; identical to SEQ ID NO: 225846

SEQ ID NO: 729990 - DNA, 2114 bp, Homo sapiens
ctggccacagtatgaggtgttttctaaggcttgacattaggtatttcctagtgcaaaatttactgatcccgcgtaggctccaacctagagccaggattccttaatggaacacaaactgatttactttgaatatactcaagcttcacagcaaacacttcctgtttctattactgtccaagtcttcttaccatgcctgaggcagacaatttaaggcttgattcctcaccctttcccttcatctgctgaaatcccatttagttttagtgcaccaggcatgcactggtatttcatcctatgcattccttccacagcctgacctataaagggctgacactgagtcctggcttgttcagatcagagagaattaacacttttatttctttgatttcaaaagcttctgaggtaacttttgagctcgtaaatgtcaataatttgttgtcaagacaattatattcttaacccagctgctacatatagggaacatagagactgacagaaagtcagtgaatttagaattaaaacagtaagtttatctgattgactatgcttctcaaaatgtaaatggatgatacaaattaatacaaccaattcattttatttggtttggttttggtttttgaatgggtttatgggtttaagagacattgctctctgttgtttatgtgtattcagtgtcagaaaggaaaagtgagcaaaatgactgcaaaggaaactgagctgcagagggaaatgcatgagatggcacagaaaacagcagagctgcaagaagaactcagtggagagaaaaataggctagctggagagttgcagttactgttggaagaaataaagagcagcaaagatcaattgaaggagctcacactagaaaatagtgaattgaagaagagcctagattgcatgcacaaagaccaggtggaaaaggaagggaaagtgagagaggaaatagctgaatatcagctacggcttcatgaagctgaaaagaaacaccaggctttgcttttggacacaaacaaacagtatgaagtagaaatccagacataccaagagaaattgacttctaaagaagaatgtctcagttcacagaagctggagatagaccttttaaagtctagtaaagaagagctcaataattcattgaaagctactactcagattttggaagaattgaagaaaaccaaggaacaatgaaggtgaaccctagtctcaggattgctagtctcaagatggtaccactgtaattctacctggaaaaggaggtgttttcattcctacagatatttttcataagataaatacccacagtgtatagtaatgaacctggataataaatatcttccagcaaatattttacttagaagacgattatattttttaaattttgagattaattgaatatatacaaacagaaaattaagtacaaatttattatgtttatggctcttatacaactatcaaggtaaaggaaatttaccaattaaatacaaagtagtaaaattcaaaatcacaataattaataatgttctgctgctacaaaatgagatgttgggtttaataatagaaggaagtagcactgttgaaatagaattaaatgggtcttgaattcatttgtgattggaatcagaagtcgcgagttctgaaagggtaaggtttactgcaacattgctaataaataatttcaagatgaaatatacaaagatgagatccaagctctaacatttacttgcaacatgaatatggtactgtgttcttctccgtcccccatcctcattccccctcctcctcctgctgctgtttggtcttcctttggaaattcatgatgccatatcagatggttttagaattctgcactttaataatgtaatgcatatgccatatataatatcccagagggatctgctataatattgcataatcgaattcatatttctgcagcaaaatgtgtggatactctcacaaggcaggataaatagagactatatatactgggccaggtgtggtgactcatgcctagaatcccagcactttgggaggccagggcaggaggatcacttgaggccaggaatttgagaccagcctgggcaacatagtgagacctcatctcttaaaaaaaaaaa

SEQ ID NO: 729991 - DNA, 1443 bp, Homo sapiens
ctggccacagtatgaggtgttttctaaggcttgacattaggtatttcctagtgcaaaatttactgatcccgcgtaggctccaacctagagccaggattccttaatggaacacaaactgatttactttgaatatactcaagcttcacagcaaacacttcctgtttctattactgtccaagtcttcttaccatgcctgaggcagacaatttaaggcttgattcctcaccctttcccttcatctgctgaaatcccatttagttttagtgcaccaggcatgcactggtatttcatcctatgcattccttccacagcctgacctataaagggctgacactgagtcctggcttgttcagatcagagagaattaacacttttatttctttgatttcaaaagcttctgaggtaacttttgagctcgtaaatgtcaataatttgttgtcaagacaattatattcttaacccagctgctacatatagggaacatagagactgacagaaagtcagtgaatttagaattaaaacagtaagtttatctgattgactatgcttctcaaaatgtaaatggatgatacaaattaatacaaccaattcattttatttggtttggttttggtttttgaatgggtttatgggtttaagagacattgctctctgttgtttatgtgtattcagtgtcagaaaggaaaagtgagcaaaatgactgcaaaggaaactgagctgcagagggaaatgcatgagatggcacagaaaacagcagagctgcaagaagaactcagtggagagaaaaataggctagctggagagttgcagttactgttggaagaaataaagagcagcaaagatcaattgaaggagctcacactagaaaatagtgaattgaagaagagcctagattgcatgcacaaagaccaggtggaaaaggaagggaaagtgagagaggaaatagctgaatatcagctacggcttcatgaagctgaaaagaaacaccaggctttgcttttggacacaaacaaacagtatgaagtagaaatccagacataccaagagaaattgacttctaaagaagaatgtctcagttcacagaagctggagatagaccttttaaagtctagtaaagaagagctcaataattcattgaaagctactactcagatttggcacagcaattgccgaaataccacgatggcacaatctcacacatatgtaacctcagtggaagaaggaaacatgaacgtgcccagcggggaccaatgaaggtgtctgatcacaatcctgtaaacagctggcaacgaggaacacggcgatactgccaaagcaactctctcaattcatgctgccaggagaagcagaacaaccggtctgttatggataccaggtcgatgacttaacagtgagatccagacctggagatctttgccgaacaacaagggcgcctgatctggc

SEQ ID NO: 729992 - DNA, 1155 bp, Homo sapiens; identical to SEQ ID NO: 226136

SEQ ID NO: 729993 - DNA, 2047 bp, Homo sapiens; identical to SEQ ID NO: 228622

SEQ ID NO: 729994 - DNA, 1374 bp, Homo sapiens; identical to SEQ ID NO: 224683

SEQ ID NO: 729995 - DNA, 946 bp, Homo sapiens; identical to SEQ ID NO: 227345

SEQ ID NO: 729996 - DNA, 1437 bp, Homo sapiens
gctcaccataccaggtatcaggaattattttagagtgaaagtaattgtaattaagacaatttactgccaatgcaggaaaaaccaaaagaacaatggaaaagaattgagagtatccaaacagatccatgcatataaagcagaaatagccattacaaatcgatggggggaaatatagcagggtcacttgttcacatgggaaaaagacattagaagcccatttcccattatacataacaatatatatcagtttgattaaggtcctaaacaagtaaaagcaaaatttaaaaacttttagaagaaaatatagaagaaaatctttataatctctgcatagagaagaactgttttaaaaagacataaaaagcagaagtcataaagaaaaagactgataaatctgactattttaaaatcaaaacttttgcaagacaaaaagacaccacaaataaaattttaaaataagccacagactgggagaaaatatttgcaatgcatatagctagcaaagaattagtatctagagtatataatgaacacaaaaagctataagaaaaatgattcaatagaacaacaaaggacacaaacaggcaaatcatcaatggtcaataaacatacaaaaagatgctgaataacactagaaaacagatgtaatacaaaaatgacacttaatacccatcaagctggcaaaagttaatgtgtgactgtgaggtgaggatgtggggaaatggggaactcacacacactgctgggggagtgaaaattggtccaaccactgtggaaaacaatttggcaagatccagttaaacttgaaaatgcatataacatacaactcagtaattccactaagtatacatgccaaacaaactctgtacatttgcaaaaatagatattaggatattaatttcagcactgataataatgaaaaattggaaacaacctaaatatccaactgcaggagaatggataagtagttgtggtatatgccacagttataatgaatgaactaaatgaacacatatctgtaggaataaacctgaaaagcagacttctgaatgaaaaaaattacagaaggatacaggtaatatttatgtaaattataaacacataataagcactactatgtatcatttatggatacaaatgaaatgaacatctaaaaccaagaaagggaagatgcacatcagcttcaggatatttagatatgtctgggaaagaagagtggggaacggtatacacgaggatgtttcaactgtttctgaaatatttttgaataaaaacctgaaaaacaagcaaaattttcgtatctgtttaatctgtgggtgatatttacatgggtgtttatattctctgaatgcttgaaatattttatcattaaaacaaaaatgtataatctcaaaatattaaaacaattataactaaaaacacaagagggtctcattc

SEQ ID NO: 729997 - DNA, 1752 bp, Homo sapiens
tagtcttaggaaacaaaaggtttattgaaatgcatgtagataaattatcatcagcataaaactgttatggagttttcaacatggggtcttttgctcttaaaatgaagtgaagctttgcaagtccattgtccaataggaaaaatattatatctctctgttcagataaagtcctttaaaaaagtaaatctcttttgaaacggtcttttaaacgtctccagcctgtttggctccccccaggtggtgttgctgtccttctccaattgtgagtctgttgaatgggattatcttcatagtggttttcttcatggaataccaccgggttttccaagtggcccaaataatgccattatcataaccattaggagtagatgcttttgagtaagtgccaccttggtaataaactccattgagatggccagcgtgacacttgttcatccaccaaccagatccatcctgttcagcacagttgccttcaaacttatcattgtcattgtcccaggtactgaactgcatgccattatgggatgtgaaaaacttgtcactaggatcatcgccaaaatcaaagccatcaaaggcatctccagcatccccaccagcgaagtaggcatatgttaggcggtacttgtcagcttcaggtcccaccttgaacatggcatagtctgcagtactggttctgccattccagtcttccagttccactcttaatgcatatgggatggcagactgtgtgcttatcaaatgaatcttctcatttcccagccaaaattctgttgtgccagtaggagacagatgtccaaatccttctttatattgaatccagtttttcttgaaatctacactgccatcaagtctcttctgaaacacagtccatccatttccagacccatcgatttcacagtagactaagaattgctggttagctttcagaggtttaataaagtaaagcccgctctgtttagctcccttattggcaatgtcttgacaatctttcccagtgatatcatggatttgcaccgtgtctttgcaaggttcctggcactgtgcttcaagctgggctaccttctctttcaggttaacaatcttttgattatttgaattatatatttcctgcaaatatcgaatacttgagtcatgtgttaaaatcgatgcttcatatttcataatttcttctaacattttcctggacttcaaagtagcagcgtctatcatatttggttttgatgattcatcaggattataagtgagttggattgcttttatcagctgtttgacttctgatgttttgttttcaacttgatgtaagatgtcttccaaagactgtagatccttgtctactttggtttgataagtagacaggaaatctgcaatgccacaggtagttggacaataactaccgaatctttcatctaagatgcagcagttgtctctggtagcaacatatgctacacatgttgaagagagaaataaaagagcatagaagtagagaattaaattccgggggtgcaaggaccaactcatgatgtctgagtgcccggagctccgagccttgtagtgtcagcatttatttatttatgtacctttgttatgatgggatatttttcatttgaaacttgttcataaaaatgtcaatgacattgatgactgatttgtacatatttttcatatagttttgtttaaaaaataattcacgcaaaatcttgaagtcatttttgctattgaaataaaccttaattaaaatatttcatcatcaca

SEQ ID NO: 729998 - DNA, 1885 bp, Homo sapiens; identical to SEQ ID NO: 508198

SEQ ID NO: 729999 - DNA, 2211 bp, Homo sapiens; identical to SEQ ID NO: 399355

SEQ ID NO: 730000 - DNA, 927 bp, Homo sapiens; identical to SEQ ID NO: 225950

SEQ ID NO: 730001 - DNA, 486 bp, Homo sapiens
agattaggtaatggcacaggttgcaaattagtctgcagtaggagtttgaccctgcaaatcagcctgtaggttatgatgctgtctctgctggcaaacagccagaattactgagaagacatttgtgcttcgtgtggacaaaactactggtcaaataagcatacgtgtccacgtctcccattctttaatccgaaatcattcaccgtttgaatccctcctttgggcatggaaaattaacaacatcacctctaaggatgaacacagaatacctgctgcttttgccacagcccagccgggactttccctgcaggtgtcctgggcaggcactgctggggactcccaggtgtgcactcctcggttggccgctgatgaacgcagagggaacagcctttgtaacccagagtgtatgggcggccctctaagcgcaccaggagcactgggaaagaaggtggtcactgctcttccaggaaatgaaaatatcccttgaaa

SEQ ID NO: 730002 - DNA, 935 bp, Homo sapiens
ccggggcacctgtctaaaaacaccccgcctccgaacgcgcgctcttgcggaattctcccgaaccgcatagcaaccgggggcagagtgcgagcccccagcggtgtgctgggatggaaaagcaggagccgctgaggatggactacggggcgtgttcccgaaaagccgggaagagatgtggcggggctgccgcgggcgtctctaaggccggcacgggtggcgtcttgactccctgcccctccagccgcggacctcggacggggggaagggggctcctccaagcggggagacggtcgccggccgagcagcagggctcctggccggcggagggtgctatgctctgcgggaccgccgggaagtcccagacaaggatctatgaaagataaaatgtggtgtgaggacacggcccagccccaccgtcgtcttccagccccaccatcgtcttccagccccaccgtcgtcttccagtcccaccgtcgtcttctagccccaccatcgtcgtcttggactctctgggtggcaccacgctgtgggtgctgctctcctctgtgtcccaaacgagtttgtgcctcactttgtcgggttttggctgtgacttggagcctcaccaagctcccttttcctctgtctcccattctcctctccaggccagggtggcttccccagccctcctccccgggtcctgcctgtgccgagccttcctcccaggagggaggtgatactgacttgagatcttatgggtgttttgtttgtggctgggcctggccgaccctctctccacggccttagatcacactctggatggataggacagtcgtcctcaatactgagcctctttggagcatacccactgatggtggttcacaagctacccacgcccacaggctgacccagatctccgtgaaattaaaaaatactgtgaaaggaaaaagagccaa

SEQ ID NO: 730003 - DNA, 1062 bp, Homo sapiens; identical to SEQ ID NO: 728433

SEQ ID NO: 730004 - DNA, 789 bp, Homo sapiens
ccgtctagatgggagtgataaggaccaagtatccctgggagaagaaaacagctctggtagcagatcactcaagcccgggaggtgtaggctgcagtgagctatgatggtgccactgtacttcagcctgggcaacagagaccccatctcttaaaaacaaacaaaaaaaagctctaagatctagtgccacctcctacaggtaggcacccggcgttctaggtaccctgctagaccagcccttccctgactccaccctgctgtagaatgatggcctctttctttctcttccaccaggctctagggcttggcagaggaaggggcaaggtatctctgcatcccttggacccagccacaccccaacacagagtgaatgtttcctaatgccattccctttccacaactccactccacgagagagaagtgacttaagcctgctaaggagcggagggaaaagttcaggaaggtttcagcatgctatcattagcgctatcattagctcttgaggactgaataggaatttactaggggtgggtgggggagaatattccaggcaaatggaagagaggtagatacaaaggcacagaggtatgtagggaacaataagggaaattgtgtatttgctgggggagggctaaagatgaggattcaaggccaggagcagtaatcccaggactttgggaggtcgaggtgggaggattgcttgagcccaggagttggaggctgtattgatctatgatggcgccactgtactccagcctgtacgacagagcaagactctgtctctaaaagaga

SEQ ID NO: 730005 - DNA, 378 bp, Homo sapiens
ccaggagttcaaggccagcccgggcaacacagtgagacccccatcgctacaagaaatttaaaaattagctgagtgtggtggtgcgcacccgcagtcccaggtgcttgggaggccgaggtgagaggattgcttgagcctaggagttcgaggctgcagtgagctatgatggtgccactgtacttcagcctgggcaacagagaccccatctcttaaaaacaaacaaaaaaaagctctaagatctagtgccacctcctacaggtaggcacccggcgttctaggtaccctgctagaccagcccttccctgactccaccctgctgtagaatgatggcctctttctttctcttccaccaggctctagggcttggcagaggaaggg

SEQ ID NO: 730006 - DNA, 1228 bp, Homo sapiens
ttctctctctctctctctctctctctctctctctctctctctctgtctgtctgtctgtctgcagcctcttgagcagctccaatattccctcccaccccctacttccatgacttctgaagcaactgtcattgacattctctctacagcccctggccgcagatacaaaggatgcatttcaagctctcccaagaactcttgcagtgctccatccctgtgtcctcagaaatggccctgagtctcagcagctcaaaaagactccaccatgtgaagacatgcttgattcccctcaccttcaccatgattgtaagtttcctgaggcttccccagaagtggaagcctgatagcccacagaactgtgagcctattaaacctcttttctttatcagttacccagtctcagaaaaactacttaatgtaattttttctagtttctgggagaataacaaaaagaaggaagattcagtaggaaaggaaagcaatgaagaagccaagaaagagacaaggaaccctggaaagagagtcagcaaagagagaaatagaaacattaatttcagaggagttggaagtgttgtgaactattaatcctttagctttgctttggacttgatagcaaaagtagctgcatgcagaagtaaaattgttaagaatgtcacataaaatgtgagggtgagctcagcatgaaggaacagcctcttccattggtgaggtgaagaaactgaagactttagccagagccaagtggctaattcagagtttaatacacctttgacctcaaaccctttgtggtcacctttgaacagtgcctccctctctgaaataaaatactggttctgtcattaattattaattattgattaatttctcttgattttcattttctcctatgcaaaattctgttactgaattacatgaattccaagacctctttctgatctaacatcccatcattcccctgttaaaaagataacataaaaccagaaacaaagtatgtaattgtaatgccaaatttttaaacatagttgattattccaccttgaaaatgtaaatactacatgaagcgtcaacaaataaaccattaggtcaatatttactgagagctgactctccatcagagtgatgcttgtaattgacatggagggcaaaatgattttaaaaagtaagattcctgccttcttggaactcagagacaaatgtgggaaatgggcaactcaagaaacaatttcaaaat

SEQ ID NO: 730007 - DNA, 746 bp, Homo sapiens
gttggatagtgagaagccactgcttccttgcaagaaccttcccaaatttctctaaccatgtgaagacatgcttgattcccctcaccttcaccatgatttttctgggagaataacaaaaagaaggaagattcagtaggaaaggaaagcaatgaagaagccaagaaagagacaaggaaccctggaaagagagtcagcaaagagagaaatagaaacattaatttcaggtgaagaaactgaagactttagccagagccaagtggctaattcagagtttaatacacctttgacctcaaaccctttgtggtcacctttgaacagtgcctccctctctgaaataaaatactggttctgtcattaattattaattattgattaatttctcttgattttcattttctcctatgcaaaattctgttactgaattacatgaattccaagacctctttctgatctaacatcccatcattcccctgttaaaaagataacataaaaccagaaacaaagtatgtaattgtaatgccaaatttttaaacatagttgattattccaccttgaaaatgtaaatactacatgaagcgtcaacaaataaaccattaggtcaatatttactgagagctgactctccatcagagtgatgcttgtaattgacatggagggcaaaatgattttaaaaagtaagattcctgccttcttggaactcagagacaaatgtgggaaatgggcaactcaagaaacaatttcaaaat

SEQ ID NO: 730008 - DNA, 496 bp, Homo sapiens
gagagaatctggctaagtgtctagcaggatgattgattaacaagatgttttgttttcatcatctcagagaagctgtattgaggtataattgatatgccaaataactggacacattcaacttgtgcaatttgatgagtttggagatacacatacatctgtgaaaccatcaccaaaatcaagaacaactttctctgatctctgtggacatgcttaaaatggctgactcacacagcaagactatttaactgtgcctaaaatcaacccacattcagatgctaactgtaatcctattccctgatccatcaggaaaaagagtctgattgacataacttgtcaagtgttcgccccagcttctatcaactatggggaaggaagggccagaagaggtgtaaccatcatggctaccaggtttcgaaatatttacattacatactgcatttattaaaatacaaattaaatctgcaataaaaaactaattgaccattaaaaaggattc

SEQ ID NO: 730009 - DNA, 454 bp, Homo sapiens
ccagagaataaaagggcattccttagggttgctgaggattttctttgattgtattctgctaatgtgtgtgcaaggcagatataacacatttgtggaaggctctagagacattttctacaaattttaccctggtttcagaacaactttctctgatctctgtggacatgcttaaaatggctgactcacacagcaagactatttaactgtgcctaaaatcaacccacattcagatgctaactgtaatcctattccctgatccatcaggaaaaagagtctgattgacataacttgtcaagtgttcgccccagcttctatcaactatggggaaggaagggccagaagaggtgtaaccatcatggctaccaggtttcgaaatatttacattacatactgcatttattaaaatacaaattaaatctgcaataaaaaactaattgaccattaaaaaggattc

SEQ ID NO: 730010 - DNA, 1595 bp, Homo sapiens
  misc_feature (2)..(3): n is a, c, g, or t
  misc_feature (7)..(7): n is a, c, g, or t
annaaantaagacaaacaaaactacaatggaagaagaaaacgtcctcaactagacatctgccaaaaatatcatccagaatgccctggcaagttcacttccatttagtgaagtgagataatttggcaattcacgcaagagactgagaaccaagcctcaagccctgcctctgattctgcaggtatggaacatgagcagctgacctactcttccacaaggtccaaagcccccagtgtcatcatcacaggtcttaagccagccaccaaatatgtatttcacatccgagtgagaactgcgacaggatacagtggctacagtcagaaatttgaatttgaaacaggagatgaaagactctccatttcaagtgacaaaactgtactggcttaatgaaaagtgggactttattgcctcagcttctgacatggcagcagaacaaggacagattctcgtgatagccaccgccgctgttggcggattcactctcctcgtcatcctcactttattcttcttgatcactgggagatgtcagtggtacataaaagccaagatgaagtcagaagagaagagaagaaaccacttacagaatgggcatttgcgcttcccgggaattaaaacttacattgatccagatacatatgaagacccatccctagcagtccatgaatttgcaaaggagattgatccctcaagaattcgtattgagagagtcattggggcaggtgaatttggagaagtctgtagtgggcgtttgaagacaccagggaaaagagagatcccagttgccattaaaactttgaaaggtggccacatggatcggcaaagaagagattttctaagagaagctagtatcatgggccagtttgaccatccaaacatcattcgcctagaaggggttgtcaccaaaagatccttcccggccattggggtggaggcgttttgccccagcttcctgagggcagggtttttaaatagcatccaggccccgcatccagtgccagggggaggatctttgccccccaggattcctgctggcagaccagtaatgattgtggtggaatatatggagaatggatccctagactcctttttgcggaagcatgatggccacttcacagtcatccagttggtcggaatgctccgaggcattgcatcaggcatgaagtatctttctgatatgggttatgttcatcgagacctagcggctcggaatatactggtcaatagcaacttagtatgcaaagtttctgattttggtctctccagagtgctggaagatgatccagaagctgcttatacaacaactgacctcttccaaactctaacacttaacctctgctattctgcataaattctgagaaaagccaaattttctgtcggtctaagaagacatagcctacacccaactggagataattataaaaaataatgaagcagcatgaggggaaggtatttaatgtgtattttaaagttgggagagattctccttcacctaatttaggtgtttgtgaattggcttgactttttgaagttaatttttaagccttgaacatgtccaactttaagaactttaagaataaatattttaacacaaaaaaga

SEQ ID NO: 730011 - DNA, 1481 bp, Homo sapiens; identical to SEQ ID NO: 233048

SEQ ID NO: 730012 - DNA, 1388 bp, Homo sapiens; identical to SEQ ID NO: 285008

SEQ ID NO: 730013 - DNA, 3128 bp, Homo sapiens
acagactgttagtgcacatcaatatccattttgtcctcttcttttttggcatacaaccaaaacttacataggctttttatcattttactgggcctatgtaactgagttttagccagtggaatatgtccaagtgacatttgccacttctaggtctggcacattaacacttgatgtattacatttcagaccctcttatcattctgcagtgtgtttggcgatctgttgtttaagatctatatgcactggttactgttgcttgccttccattcctacccttactaatcagattcctattatagctacttctgtccttgattcattttgtatattagatgtgtgtgtgttcatgtgcatgcatgcaccctcacatgtaggtgtatatgggagtggtggtaaagacaggatatttcttcagttcatgggattttatttcaggagaattcaaacattcacgtattggagaagatgacacatttcttgaatgtctttggctttgagctgaatgcactaactagaagggacttcagattgtcctccttcgggggaggtaagtatattcttcatatacaggtaagagtgaaatgatagaagaatgttcctcctctccttttcttcctggacaacagatcaaatatttctcagatcttttacagctgaattggagtcacatggacaggtatgatcttaaaatataaaaaattattttaaaattacatgctaaaattttataaaaataaatgctaaaactaacttaaacggaagcatttgattaaaaaatttatccaaaaaagtttgaattttatatgaaacaggatagaagatgaaaaagctaaagaaataaaatataaataaattatggctggggacagtggctcacacctgtaatcccagcactttgggaggctgaggtgggaggactgattgaggctaggagtttgagacctgttatttgaggcacatgggaaggaaagttttctttgagatattccacattttataatattcttcaagagatttacagagttccttgagtgaattgttggtttgttcttaatactgaatttcctattcaaatttatttagaagttcatttcttacagtgatctcatctcctattaagatattcttcaaggtaggttcttggccagtttctcaatgacagatttttaaaaatattgttaatctttttattaatatgagaacataattgttccagatctggaggccatcctttaagcttcttgcaacagtctgggagcaaagagtttactcgccactgggtagtgggccatggacaccccagtctccaccagaagttcgggattgcaaaatgggactctggcagcaaatttcaaactgtatgccagacctggccctttgcagtgatataaaatttttcttgaggtgtctggaaagatggctgaataggaacagctctgctctgcagctcccagcgagatcaacgcagaaggagataatttctgcatttccaactaaagtacccagctcatctcattgggactggttagacagtgggtgcagcccacagaaggcaagcagaagcagggtggggtgtcgcctcacccgggaagcgcaaggggtcagggaactccctcccctagccaagggaagctgtgagggactgtgccgtgaggaacggggcattccggcacagatactatgctttccccacggtctttgcaacccacagaccaggagattcccttgggtgcctgcaccaccagggccctgggtttcaagcaaaaaactgggcagccatttgggcagacactgagctagcagcaggagtttttttcataccctagtagcccctagaatgccagcgagacagaactgttcactcccctggaaaggggcactgaagccagggagccaagtggtctagctcagcagatcccacccccacggagcccaacaagctaagacccactgggttgaaattctcgctgccagcacagcagtctgatgtccacctggaatgcttgagcttggtgcagggaggggcgtctgccattactgaggcttgattaggcagtttccccctcacagtgtaaacaaagctgctgggaagtttgaactgggtggagcccactgcagctcggcaaagttgctgtagcaagagtgtctctctagattcctcctctctgagcagggcatctctgaaacaaaggcagcagccccagtcagggacttatagataaaactcccatctccctgggacagagcacctgggggaaggggcagctgtgggcacagcttcaggacacttaaacgttcctgcctgctggctctgaagagagcagcagatctcccagcacagtgctcaagttctgctaagggacagactgcctcctcaagtgggtccctgacccctgtgcctccggagtgggagagaccttccagcaggggtcaacagacatctggtgggtgcccgtctgagacgaagcttccagaggaaggaacaggcagcaatctgtgctgttctgtagcctgcgctggtgatacccaggtaaacagggtctggagtggatctccaacaaactccagcagacctgcagcagaggggcctgactgttataaggaaaactaacaaacagaaaggaatagcgtcaacatcaacaaaaaggacatccacacaaaaaccccatccgaaggtcaccagcatcaaagaccaaaggtagataaatccatgaagatgaggaaaaaccagtgcaaaaaggctgaaaattccaaaaaccagaacaccttttctcctgcaaaggatcacaactccttgccagcaagagaacaaaactggatggagaatgagtttgacgaatttacagaaggaggcttcagaaggtgggtaataacaaactcctctgagctaaaggagcatgttctaacccaatgcaaggaagctaaaaatgaaaaaaggctggaggaattgctaactagaataaccactttagagaagaacataaatgatctgatggagctgaaaaacacagcacgagaccttcgtgaagcatacagaagtatcaatagctgaatcgatcaagcagaagaaaggatatcagagattgaagatcaacttaatgacataaagtgtgacgtcaagattagag

SEQ ID NO: 730014 - DNA, 1670 bp, Homo sapiens; identical to SEQ ID NO: 411855

SEQ ID NO: 730015 - DNA, 3894 bp, Homo sapiens
acagactgttagtgcacatcaatatccattttgtcctcttcttttttggcatacaaccaaaacttacataggctttttatcattttactgggcctatgtaactgagttttagccagtggaatatgtccaagtgacatttgccacttctaggtctggcacattaacacttgatgtattacatttcagaccctcttatcattctgcagtgtgtttggcgatctgttgtttaagatctatatgcactggttactgttgcttgccttccattcctacccttactaatcagattcctattatagctacttctgtccttgattcattttgtatattagatgtgtgtgtgttcatgtgcatgcatgcaccctcacatgtaggtgtatatgggagtggtggtaaagacaggatatttcttcagttcatgggattttatttcaggagaattcaaacattcacgtattggagaagatgacacatttcttgaatgtctttggctttgagctgaatgcactaactagaagggacttcagattgtcctccttcgggggaggtaagtatattcttcatatacaggtaagagtgaaatgatagaagaatgttcctcctctccttttcttcctggacaacagatcaaatatttctcagatcttttacagctgaattggagtcacatggacaggtatgatcttaaaatataaaaaattattttaaaattacatgctaaaattttataaaaataaatgctaaaactaacttaaacggaagcatttgattaaaaaatttatccaaaaaagtttgaattttatatgaaacaggatagaagatgaaaaagctaaagaaataaaatataaataaattatggctggggacagtggctcacacctgtaatcccagcactttgggaggctgaggtgggaggactgattgaggctaggagtttgagacctgttatttgaggcacatgggaaggaaagttttctttgagatattccacattttataatattcttcaagagatttacagagttccttgagtgaattgttggtttgttcttaatactgaatttcctattcaaatttatttagaagttcatttcttacagtgatctcatctcctattaagatattcttcaagatctggaggccatcctttaagcttcttgcaacagtctgggagcaaagagtttactcgccactgggtagtgggccatggacaccccagtctccaccagaagttcgggattgcaaaatgggactctggcagcaaatttcaaactgtatgccagacctggccctttgcaggtgtctggaaagatggctgaataggaacagctctgctctgcagctcccagcgagatcaacgcagaaggagataatttctgcatttccaactaaagtacccagctcatctcattgggactggttagacagtgggtgcagcccacagaaggcaagcagaagcagggtggggtgtcgcctcacccgggaagcgcaaggggtcagggaactccctcccctagccaagggaagctgtgagggactgtgccgtgaggaacggggcattccggcacagatactatgctttccccacggtctttgcaacccacagaccaggagattcccttgggtgcctgcaccaccagggccctgggtttcaagcaaaaaactgggcagccatttgggcagacactgagctagcagcaggagtttttttcataccctagtagcccctagaatgccagcgagacagaactgttcactcccctggaaaggggcactgaagccagggagccaagtggtctagctcagcagatcccacccccacggagcccaacaagctaagacccactgggttgaaattctcgctgccagcacagcagtctgatgtccacctggaatgcttgagcttggtgcagggaggggcgtctgccattactgaggcttgattaggcagtttccccctcacagtgtaaacaaagctgctgggaagtttgaactgggtggagcccactgcagctcggcaaagttgctgtagcaagagtgtctctctagattcctcctctctgagcagggcatctctgaaacaaaggcagcagccccagtcagggacttatagataaaactcccatctccctgggacagagcacctgggggaaggggcagctgtgggcacagcttcaggacacttaaacgttcctgcctgctggctctgaagagagcagcagatctcccagcacagtgctcaagttctgctaagggacagactgcctcctcaagtgggtccctgacccctgtgcctccggagtgggagagaccttccagcaggggtcaacagacatctggtgggtgcccgtctgagacgaagcttccagaggaaggaacaggcagcaatctgtgctgttctgtagcctgcgctggtgatacccaggtaaacagggtctggagtggatctccaacaaactccagcagacctgcagcagaggggcctgactgttataaggaaaactaacaaacagaaaggaatagcgtcaacatcaacaaaaaggacatccacacaaaaaccccatccgaaggtcaccagcatcaaagaccaaaggtagataaatccatgaagatgaggaaaaaccagtgcaaaaaggctgaaaattccaaaaaccagaacaccttttctcctgcaaaggatcacaactccttgccagcaagagaacaaaactggatggagaatgagtttgacgaatttacagaaggaggcttcagaaggtgggtaataacaaactcctctgagctaaaggagcatgttctaacccaatgcaaggaagctaaaaatgaaaaaaggctggaggaattgctaactagaataaccactttagagaagaacataaatgatctgatggagctgaaaaacacagcacgagaccttcgtgaagcatacagaagtatcaatagctgaatcgatcaagcagaagaaaggatatcagagattgaagatcaacttaatgacataaagtgtgacgtcaagattagagaaaaaaagaatgaaaaggaacgaacaaagcctccaagaaatatgggactatgtgaaaagaccaaacctatgtttaattgatgtacctgaaagtgctggggagaatagaaccaagtttgaaaacactcttaggatattatccaggagaacttccccaacctagcaagacaggccaatattcaaatcagtaaatacagagaacaccacaaagatactcctcgagaagagcaaccccaagacacataatcatcagattcaccaaggatgaaatgaagaaaaaaatgttaagggcagccagagagaaaggtcggtttactcacaaagggaagcccattaaactaatagcagatttgtctgctgaaaccctacaagccagaatagagtggggggccaatatttaacattcttaaagaaaagaattttcagcccagaatttcatatccagccaaactaagcttcattagcaaagaagaaataaaatcctgagagacaagcaaatgctgagcgattttgtcaccaccaggcctgccttacaagagctccagaaggcagcactaaacacataaaggaaaaaccagtaccagccactgcaaaaacataacaaactataaagaccaccgacactatgaagaaactgcatcaactaacaggcaaaataaccaactagcatcataatgacaggatcagattaacacataacaatattaaccttaaatgcaaacgggctaaatgccacaattaaaagacacagactggcaaattggatagagtcaaaatccatcattgtgctgtattcaggagacccatctcacgtgcaaagacacacataggctcaaaataaagggatggaggaatatttaccaagcaaatgg

SEQ ID NO: 730016 - DNA, 1416 bp, Homo sapiens
aaaaaaagaatgaaaaggaacgaacaaagcctccaagaaatatgggactatgtgaaaagaccaaacctatgtttaattgatgtacctgaaagtgctggggagaatagaaccaagtttgaaaacactcttaggatattatccaggagaacttccccaacctagcaagacaggccaatattcaaatcagtaaatacagagaacaccacaaagatactcctcgagaagagcaaccccaagacacataatcatcagattcaccaaggatgaaatgaagaaaaaaatgttaagggcagccagagagaaaggtcggtttactcacaaagggaagcccattaaactaatagcagatttgtctgctgaaaccctacaagccagaatagagtggggggccaatatttaacattcttaaagaaaagaattttcagcccagaatttcatatccagccaaactaagcttcattagcaaagaagaaataaaatcctgagagacaagcaaatgctgagcgattttgtcaccaccaggcctgccttacaagagctccagaaggcagcactaaacacataaaggaaaaaccagtaccagccactgcaaaaacataacaaactataaagaccaccgacactatgaagaaactgcatcaactaacaggcaaaataaccaactagcatcataatgacaggatcagattaacacataacaatattaaccttaaatgcaaacgggctaaatgccacaattaaaagacacagactggcaaattggatagagtcaaaatccatcattgtgctgtattcaggagacccatctcacgtgcaaagacacacataggctcaaaataaagggatggaggaatatttaccaagcaaatggaaaggaaaagaaaaaaagcaggggttgcaatcctagtctctcataaaacagactttaaaccaacaaagataaaaaaagacaaagaagggcattacataatggtaaagggatgaatgcaacaagcagagctaactattctacatatatatgcacccaatacaggagcacccagattcataaagcaagttcttagagacctacaaagagacttagactctcacacaataataatgggagactttgacactccactgtcaatattagacagaacaatgagacagaaaattaacaagaatattcaggacttaaactcagctctggaccaagcagacctacagaactcagaacttgaactcagctttggaccaagcagacatctacacaactctccacttcaaatcaacagaatatacattcttagcagcaccacatcgcacttattctaaaattgaccacataattggaagtaaaacactacacaccgaatgcaaaagaacggaaatcacaacagtctctcagaccacagtgcaatcaaattagaactc

SEQ ID NO: 730017 - DNA, 819 bp, Homo sapiens; identical to SEQ ID NO: 411856

SEQ ID NO: 730018 - DNA, 745 bp, Homo sapiens
aggatcaccatttatttcctatttagatatactgacattcatccatatgaaaatatgcaggtcattagcttactataattttactatttacttttgacttaatggggcataaataaaactttcttagtacacatgaggtggatatttgatacacagaacatttgtggtgggctttctgtgggttagatgtaaagcccacgtattttaatattcactattttaaatgagcaatgcatgaggggaatgcagtgtcagtacctggcctatttttaaactagtgtaatcaccctagtcataccattcagtatgtttgctttttaaaataagtaaccacaattaagttgttgtagcccttgcacttcaagagatttagtccttcctttcagttgtctgttaggtccattctgtttactagacggatgttaataaaaactatgtgagcctgaacgtattctcggccaaatttagtcttgtctctcatcttgattggattaattctaaagtctaaaatgattcagtccacaatagctctaggggatgaagaatttgccttactttgttgttcgctcagttcctaagactgtgagttgtcaaatccctagactgtaagctcttcaaggagcaagaagcacattttctccgtgtcatgtaatttttctaaggtgcttggcagcactctgtaccctgtggagtactcagtaccttttgtttgatgttgctgacaagacctaaaaaacaatccctt

SEQ ID NO: 730019 - DNA, 806 bp, Homo sapiens
tgttgttttacaccgtagataaccaggcaggcagaattcatctccgaggaactggttctttttccttgaaagctgattcatggccctttggttatggcaggaagggtcccagttcatctgcagagatgagctgctctgcacagaggagcgataggaattcaggagttgtcttcttgcagctaaatgatgagttgtaggggtaagattggaactgggagaagagaggatacaggagaaaagcttgagtaaaaagaaggtgaaatggtagaaagctggactctaagaaggaaagtaactggtgagaaattctgacggatggccaaggaactcgaggaatggagatgtctaatgttctattttaagttggttcctgctccttggtgctgctctattacctcgaaactttcagaaaaagtctgacagaagagacagaaactataaactataatttggtttcagttcaggtcactaaatgccatttctggcatccctgaacttgtgaatgaccaatgatcatatgatcatgtgagttactatcatctctaacctgtgtacaactgccacagcatgaattagtgaaaggatacagagtaaagtcagcaaagaagaaaggctttggagcaaagccaggagaaaccacaggcttccaagtgaaccctcccggtggagttgcatgaggactcacttcattctcccagcaacagtgtgtgacaacccatggtggtgttgccaattggaaaagctcacccaagccttgttgtccaaagctcttaatgaggagtcagtcatggagacatacaaaaaaa

SEQ ID NO: 730020 - DNA, 756 bp, Homo sapiens
aaggagtggatgcccgtcaccaagctgggccgcttggtcaaggacatgaagatcaagtccctggaggagatctatctcttctccctgcccattaaggaatcagagatcattgactttttcctgggggcctctctcaaggatgaggttttgaagattatgccagtgcagaagcagacccgtgctggccagcgcaccaggttcaaggcgtttgttgctatcggggactacaatggccacgtcggtctgggtgttaagtgctccaaggaggtggccaccgccacccgtggggccatcatcctggccaagctctccattgtccccgtgcgcagaggctactaggggaacaagatcggcaagccccacactgtcccttgcaaggtgacaggccgctgcggctctgtgctggtacgcctcatccctgcacccaggggcactggcatcgtctccgcacctgtgcctaagaagctgctcatgatggctggtatcgatgactgctacacctcagcccggggctgcactgccaccctgggcaacttcgccaaggccacctttgatgccatttctaagacctacagctacctgacccccgacctctggaaggagactgtattcaccaagtctccctatcaggagttcactgaccacctcgtcaagacccacaccagagtctccgtgcagcggactcaggctccagctgtggctacaacatagggtttttatacaagaaaaataaagtgaattaagcgtgagaaaaaa

SEQ ID NO: 730021 - DNA, 1516 bp, Homo sapiens; identical to SEQ ID NO: 728442

SEQ ID NO: 730022 - DNA, 472 bp, Homo sapiens
ttacaatttgttttttgttctaaaccagggttttttaaccttaacaccattgacattttgggctgggaaattctttgttgtgggggcctgtcctgtgcattttaggaggtttaagcagctctggcccctaccagtagtatatgccctttaccccctggggttgtgacaacgaaaaatgtctctagacattgccaaatgctctcttgggggacaaaatagccaccaatcaagaaccactgttctaaaccagcagtctcaaagcatggtctccatggaccactgaggtcctaagaccctttgagggaggagtgtagatgaagtcacaactgttttcataaaaatcaaagttaactgtccattttcaccgtgtcgacatttgtacttacggtgcataggcaaagtggataaaatttgctggggccctagcaggatgcaagggcaccacactgtattcttcactcacagttaaaaa

SEQ ID NO: 730023 - DNA, 962 bp, Homo sapiens
tgagactccaagatcaccccaatgctaggctaatctccatggcgcctagatctatgcccactccattccccatgttggtccccatagtttcaggcaccaggctccaacaccaggttgggccctacagccccagtctccaggttggcaccagtggatataggctttaggtccactgactgctggtccctacagccccaggttccagtgaacccaggttccaggcctgctccaacaaacccaaggtccaggtctaccccagtagaccctggcaccagaactaccccagagggcctagcctacaggctaccacccacaaacccagcctccatgatggcctctgaagaatcaggctttaggtcttccccagcaccagactagactgctagactgatgttccacttttgtccccatggacccaggcaccaggcccatctgagaggtttcttcagttttatttttcagtaataactttcattcttctttctcagtgataactgtagtactcagtgggctttctatttctggctcccattttccatctttctttttaacactttgggaaaatatccaagttaaactctatatagtggggtaggtggacaatgaaagataagtaaatacataatatgtataatcaacggagtgaaaagacagcctgcagaatgggagaaaatatttgcaaactatatatctgacaaagggttaatatccagagtatatgaagaagtcaactcaatagccaaaaaaaaaaaaaaaaaatccaatttaaaaatgagcaaaaggcctgaatggacatttctcaaaagaaaacatgatgatgactaacaaatatatgaaaaaatgctcagccaggcacagtgactcacacctgtaatcccaaagtgctgggatcttaggcgtgagccactgcacctggccaatcagttgcatttttattcactaacaatgagctatcaaaaaaa

SEQ ID NO: 730024 - DNA, 436 bp, Homo sapiens
attcaatcaccaatggccaatgatttaatcaaccatgcctgtgtcatggaacacaggaaacctaaacaacataaaaatccttaacaacagggtttggtgagcttctggattggtgaacacattgaggtggtagaaggctagagttcaggagatgacatgggaagacatggaagctttgtgtcccttcccatataccttgctctctgcatctcttccatttggctcctcctgagtttggcgtgcctctcaacatccagcagaatgtgggaatattgctgagttgagtaaatatttccttccataaaggtaaataagcatctcaagagcaagtttctacattttgtatttccctgttttatttctgtaaaattgtgcaaccaagaattatgacctactgatattagaataaaatttgcagaagtttgactacatgaaa

SEQ ID NO: 730025 - DNA, 419 bp, Homo sapiens
attcaatcaccaatggccaatgatttaatcaaccatgcctgtgtcatggaacacaggaaacctaaacaacataaaaatccttaacaacagggtttggtgagcttctggattggtgaacacattgaggtggtagaaggctagagttcaggagatgacatgggaagacatggaagctttgtgtcccttcccatataccttgctctctgcatctcttccatttggctcctcctgagtttggcgtgcctctcaacatccagcagaatgtgggaattctctgagttcctgttttggtgctaatcttcagtgtgtgtttctgaaagtaaccatgatgacaggaagcatatttttctgtatgcctatgactggtgtctgactaccctactggtactagagattaaaagacactttcctgtaattaa

SEQ ID NO: 730026 - DNA, 490 bp, Homo sapiens
atctatgccttgataggtcttcagttactcatggtgaaacatgtaagccttgaaaaactttttgtatggagttgtgctgggaagcagttttcccaccagggacaacatcttctagtccttttacatctaagtagtaccatgagactggatcatgccaaagaaatgttttggaagtgagatgtttcactttggaaccaaggaactgaaaaaacagatagagggagcccaagccaagaagagaggtctggtatcaaagatttgctgaattcacaattgaagaggcttatgtcagtcccttagaaagaatttgaggactcctcggaaaattgctgagttgagtaaatatttccttccataaaggtaaataagcatctcaagagcaagtttctacattttgtatttccctgttttatttctgtaaaattgtgcaaccaagaattatgacctactgatattagaataaaatttgcagaagtttgactacatgaaa

SEQ ID NO: 730027 - DNA, 487 bp, Homo sapiens; identical to SEQ ID NO: 242984

SEQ ID NO: 730028 - DNA, 527 bp, Homo sapiens
agccagcacggcactggagactcccgtgagcatgttcactgctgcgatgaccccaattaacagtttaatgggggaaatgtacagaggggatctgaaaactgttgaagtcaccaaagcattacaagatgccaagagataatggtcaaaaacagcctaataacacacagtgcccatgtgcatgctccactatctcaagccactgtcaccctggatcttttgcagcactggctggaatcagtggtggatactgccgttgaggaatttttgatgcctttctcacctggggaaggtgaacactgcactgaatgaagggctttcaggtcttcctcaaagtcaagcaggaaatcttcaaggtcacgttcatctgcagcccaagaagtcctggaatgattagttctgactctcttttcaagggaccaaatcccagagtggagagtcctgggttattctggagacatgaactgtcacaaattccttgtgctctagctttcttgcaagttattataaagttgcctttggatgtttga

SEQ ID NO: 730029 - DNA, 516 bp, Homo sapiens
ggaaaaatcccatgggaccagatcctgccaaattcttccagctcactttattctcagcattcctaggacattggacattggttttctggagggttttttttccatctttgtatttttttaaatttgattcttttctttgcaatgctatctaaccagaatacataggggaactgtgggctaggcaaacaaaatagaaaaaagtgtgaaaaacagtaaagttgggagaggagcatctattttcttaaagaaataaaacacccaaaacaatataaagttgtccagaatgtatgtcaagaattttagataggcctttcagtaacacaggtgaagaaatttttaaaaatacattgattattatctaggttagacttaaagtgaatctcaaataaaagaatcaggaatacaacttaagtgatcatgaggtccttccatatttagattgggtaagcatgaatgtgtattttctacaaaagaccttgagaagagttcaataaaaaatgttagcattaaaaaaaa

SEQ ID NO: 730030 - DNA, 1291 bp, Homo sapiens; identical to SEQ ID NO: 30507

SEQ ID NO: 730031 - DNA, 1992 bp, Homo sapiens; identical to SEQ ID NO: 289229

SEQ ID NO: 730032 - DNA, 1756 bp, Homo sapiens; identical to SEQ ID NO: 245200

SEQ ID NO: 730033 - DNA, 1316 bp, Homo sapiens; identical to SEQ ID NO: 245154

SEQ ID NO: 730034 - DNA, 388 bp, Homo sapiens
cttgttttacaggttcacaggaagcacctggcacacagtaactattattaatttctgcactggaggcatcaggaaagccttcacgctatagggggcccttttaagttaagaagttggagagcaagcctcggggaaagcaaagagataacttagtagaatggagcaaccatacgggaacagtgagagtccatggatctccctgggctaagatcatgtatggatttggcaatctggggtggaagccacatgtgctgttattaagtggaaatgtctcgtgaacatgtggaaagtgatgactggaacttcagatgaaagtcaaagctggagataggagattcagaagtcaccccaccaaagaaggaatggttaaagctataagaactaatga

SEQ ID NO: 730035 - DNA, 872 bp, Homo sapiens
ttgatgatcattgtgggaaactttaatatctgtgtctcagccactgaaaaataaacaaacatcagtaagcacatagaatctttaaaggatgcatttaacacactggacctaactgagatacgtggtacactacgctcaacatgcagaatacatatccttttcaagtgcagaagcaatatttataaaaattaatcatattttcaatcattgagaagacacaaattccacagagttttagttatacaaatatttaatcacagtggaactataagtttggaaattaagcaaaacattttcagtatggtaaagggatgaataaaatcaaagtttgcttttttgaaacactaataaaattgatggcctccagcaagattgattaacaaaacagacaaaaggcacaaactctaaccggagactttataagtattaaaaagataaatgaataatagaataactttgaaattttcgataaaatgaacaaattgattcagcaaacacaggttaccaaaatgaatatttatatatatgtaattgaacctgtagttaaacaccttataaagaaaactacagtctcacatggcttaataagtgaattctttccaaatgcttaaggaagaaatagcacacatcttacataaactctgtcagaaataggagaagaaacattttccaaattgtctaaccagcatagctttaatacttcatattaaaacctcacaagtctgggcgtggtgtcatgcgcctgtattcctagctattagggaggctgaggcaggagaatcgcttgaaccatggaggcggacattgtgacagtgagccgagattgtgccactgtactccagcctggcaacagagcaagactgcgtttcaaa

SEQ ID NO: 730036 - DNA, 418 bp, Homo sapiens
gactttataagtattaaaaagataaatgaataatagaataactttgaaattttcgataaaatgaacaaattgattcagcaaacacaggttaccaaaatgaatatttatatatatgtaattgaacctgtagttaaacaccttataaagaaaactacagtctcacatggcttaataagtgaattctttccaaatgcttaaggaagaaatagcacacatcttacataaactctgtcagaaataggagaagaaacattttccaaattgtctaaccagcatagctttaatacttcatattaaaacctcacaagtctgggcgtggtggctcaagcctgtaatcccagcactttgggaggccgaggcgggtggatcacgaggtcaggagatcgagaccatcctggctaacaaggtgaaaccccgt

SEQ ID NO: 730037 - DNA, 2481 bp, Homo sapiens; identical to SEQ ID NO: 247170

SEQ ID NO: 730038 - DNA, 1228 bp, Homo sapiens; identical to SEQ ID NO: 247171

SEQ ID NO: 730039 - DNA, 2280 bp, Homo sapiens
aaccggtaaacgccgccgtttgaggagcaccggagccgcgaccgtggattgaacgcttccccagagacccagaagcagaaggagcggacccaggcagccggcaccatggagattgtgtacgtgtacgtcaagaagcgcagcgagttcgggaagcagtgcaatttctcggaccgccaggccgagctgaacatcgacatcatgcccaaccctgagctggccgagcagttcgtggagcggaacccagtggacacgggcatccagtgctcgatcagcatgtcggaacacgaggccaactcagagcggtttgagatggagacccggggagttaaccatgtcgaggggggctggcccaaggacgtgaaccccctggagctggagcagaccatccgtttccggaagaaagtggagaaagatgagaactacgttaacgccatcatgcagctcggctctatcatggagcactgcatcaagcagaacaatgccattgacatctatgaagagtatttcaatgacgaggaggccatggaagtgatggaggaggacccttcagctaaaaccatcaatgtgttcagggacccccaggaaatcaagagggctgccacacacctctcctggcaccccgatggcaacaggaagttggcagtggcatactcctgcttggattttcagcgggcacctgtgggcatgagcagcgattcatacatctgggacctggaaaaccccaacaagcctgaacttgctctgaagccatcgtctccactcgtgacgttggagttcaaccccaaagattcccacgtactcctgggtggctgctacaatggacagatagcctgctgggacacccgaaagggcagcctggtggcggagctatccaccattgagtccagccaccgagaccctgtgtatggcaccatctggctgcagtcgaagacgggcaccgagtgcttctcagcttccacggatgggcaggtcatgtggtgggacatccgaaagatgagcgagcccactgaagttgtgatcttggacatcaccaagaaggaacagttggaaaatgccttgggggccatctccctggagttcgaatctactttgcccaccaagttcatggtggggaccgagcagggcatcgtcatctcctgcaaccgcaaggccaagacgtcagctgaaaagattgtgtgcaccttcccgggccatcatggccccatctacgccctccagagaaaccccttctacccgaagaacttcctgacggttggcgactggacagcccgcatttggtctgaagacagccgggaatcgtccatcatgtggaccaagtaccacatggcttacctcactgatgctgcctggagccccgtgaggccgaccgttttctttaccaccaggatggacggaaccctggatatctgggacttcatgttcgagcagtgcgatcccaccctcagcttgaaggtgtgtgacgaggccctcttctgcctccgggtgcaggacaatgggtgtctcatcgcctgcggctcccagctggggacaaccaccctgctggaggtctcgcctgggctctctaccctccagaggaatgagaagaacgtagcctcttccatgtttgagcgtgagacccggcgagagaagatcctggaggccaggcaccgggagatgcggctgaaggagaagggtaaggcggagggcagggatgaggagcagaccgatgaggagctggccgtagacctggaggcgctggtcagcaaggccgaggaggagttcttcgacatcatcttcacagagctgaagaagaaggaggcagacgccataaagctgacgccagtgcctcagcaaccaagtccagaagaagaccaggtggtggaggagggagaggaagcagcgggggaagaaggggatgaagaagtggaagaagacttagcctagaagtcagccttcgactgcggcgctatccctgtgtgccttcctttcccacctcttgaccctcaaccagacttgcatggccatggcagggcctcgggaagaccttcaggagtggggaagggtttctcctccatgatcgaccctcctcgtccacctacaaatcaggaacagaaagtctgtccactttgaaaatacctttccaggcagctccctgaccatttggacacattgccacgacaggagcctccaagtatgtgggaggggacgggcgggacgagcttggctgttctgctgcacctgaatgctttctgttatcctaattcttgtaaaattaaatgaatcgtaacaatgccaaagtta

SEQ ID NO: 730040 - DNA, 970 bp, Homo sapiens
aaccggtaaacgccgccgtttgaggagcaccggagccgcgaccgtggattgaacgcttccccagagacccagaagcagaaggagcggacccaggcagccggcaccatggagattgtgtacgtgtacgtcaagaagcgcagcgagttcgggaagcagtgcaatttctcggaccgccaggccgagctgaacatcgacatcatgcccaaccctgagctggccgagcagttcgtggagcggaacccagtggacacgggcatccagtgctcgatcagcatgtcggaacacgaggccaactcagagcggtttgagatggagacccggggagttaaccatgtcgaggggggctggcccaaggacgtgaaccccctggagctggagcagaccatccgtttccggaagaaagtggagaaagatgagaactacgttaacgccatcatgcagctcggctctggacccccaggaaatcaagagggctgccacacacctctcctggcaccccgatggcaacaggaagttggcagtggcatactcctgcttggattttcagcgggcacctgtgggcatgagcagcgattcatacatctgggacctggaaaaccccaacaagcctgaacttgctctgaagccatcgtctccactcgtgacgttggagttcaaccccaaagattcccacgtactcctgggtggctgctacaatggacagatagcctgctgggacacccgaaagggcagcctggtggcggagctatccaccattgagtccagccaccgagaccctgtgtatggcaccatctggctgcagtcgaagacgggcaccgagtgcttctcagcttccacggatgggcaggtcatgtggtgggacatccgaaagatgagcgagcccactgaagttgtgatcttggacatcaccaagaaggaacagttggaaaatgccttgggggccatctccctggagttcgaatctactttg

SEQ ID NO: 730041 - DNA, 235 bp, Homo sapiens; identical to SEQ ID NO: 247174

SEQ ID NO: 730042 - DNA, 663 bp, Homo sapiens
attcggagcctccttccacatcacctttccccagcccagcagcacaaaaccaatcagctgacaaactcatttccacctctcaaggcctctcatattaatccctcctttccacacatatactgccctagctcagaccctctcatacttcttaaactgacacagacaacctcacttggaggctaactggtctccttatctttaatcccaaaatacacctatttaccacacagatccaaaacctcgtaactcctttctcaaaatcctgtaatgccctgtcaattgcattcagaagaaaaccaccttttcatcctttctccctttaagagcacattggtaagagtgtaaatcccagttctaccacttagtaggtttatttcatttgtaacctctatctcatttgtaaaaaaaaagaatcatagtactctcttctcaataaaactgttctaaggaaataattaatactaataaagcactgagaacaatgcctagcacatagaaaatgcccaaaaaaggttattattgttatccaaaccctatcctgcctcaccctacagactacttgtacttttataagtatttattctacagatttattgagtccttatgactaggagatgaagatacaaatatccattaaaaaatgttccgcattatctggccttc

SEQ ID NO: 730043 - DNA, 441 bp, Homo sapiens
gaaaaaggtaaaatgcattttaaatcaataataaatgtacagaatattaaaatcataagaatgcacagtgatgcatgcctctaatccaaactacttgggaggatgaggcaagaggatcacttgaggagcccagaagtttgagaccagcttgggaaacatagtaagactctaccttcataaaaaaattgtgcacacttgtgtgtatgctttagatcctgttttttgttgttgttgttgttgttgttttggtttggtttggttttttaaagcataagactgacgctttgttacaaagcattcctttgggagcatgcctgggacgttattagaattaacattcattatatgtattggtaggtaattaatgcagtaagaactcttccctctgtatttattagatgcaaagaagaatacatttattaaaatttggtatctacaagt

SEQ ID NO: 730044 - DNA, 940 bp, Homo sapiens
  misc_feature (899)..(899): n is a, c, g, or t
  misc_feature (912)..(912): n is a, c, g, or t
  misc_feature (932)..(933): n is a, c, g, or t
agcggatttttgacttcaactacaagagagatgccaagctgagaccagttaagccacagaactctttcagaaaagtcatatttttctcaaatgacctagcttttaccttcgttaactcaaacctgcacccatctgaagtgaaaccagcaaccatttaacagcaaacagtagcagcagcatgcaccaaaagagaatggaaagtgaaaagaacacaacagatcattttaaaagtagtgtgtcaattgcctggttctccactgacagctaaaattaaacaaaaaagtgaattccgttctacagtgtgaccatcttatgggaacactagaggatatccatagacagcagagaaaaaatagcaaaatagatattttgactcacagaaaatgaatgtttgcaaagattcaccaagaaataaagtcaaccaaaaaagcaaagtcatggaaaagaaatgcaaatctccacaaaaggcagcttttcagggctattcctgtctacacgccctctgaataaccatctcaaaatatgttcaagaagtatattttggaggtggcattgcagatgggatctcaaagccaagtctctacatatgatacaggcaaacagatgtttacatgacttgctcctccttgccttctgccatgattgtgaggcctctccagccacatggaatttttttcatccagtgactaccaaatggaggaattatcgtcttgaaggggaacgtatcaatcacttaaggaaactagatgggagactgaaggtggcaaaaggagaggcatagcaaatggaagaaggtgtcctagagtcactcttaaactttgagaagtttgagatattaggttggtgcaagagtaattgcaggttttaccattacttttaagagcacaaggaccaaacanatgaatatttacnctaaaaaataaactagagtnncttcaaa

SEQ ID NO: 730045 - DNA, 1276 bp, Homo sapiens; identical to SEQ ID NO: 244331

SEQ ID NO: 730046 - DNA, 524 bp, Homo sapiens
gtgtcttcagcaggctccagtccaaaagtggcctctatgggcaccacctcctgctctgctgccctgcctcgctttcctcctcggccttcccggatggatgacagatgtcattcccaggttccctaacactcaagcctagcccctcagtttctagcaagcatcaagcttcactgtgtgcctagcctctcaggagtcagacctgagaagtatagcttggtggaaattcagtggcagggaagaaagaaggaaggaaagaagaccctgagctggattcatacacatcatcgcaattcatccacaccacagtcctgtaagaaggctgcaaaacatacagcagaaaggatggcttgaaggcaattgatgtttgtaaaaaaatccacaacaggatccaagctgaagaggtgaacacgtcagcctggtgggacaattctcagcatgtgcaaacataggtaaattctagcctatgttacattaaaaacaatgtcactgcattttttcatgttaaagtttttttcaaagctaaa

SEQ ID NO: 730047 - DNA, 770 bp, Homo sapiens
gcaccggctgttggagtgccggtccagggtccaacatttagtaaccaacatcaaatgtacttgtctctcctaagctgcacagactgccaagtctctcgtcaggtcttcgccacaaatctctgtccagaggatcgtggctgaggcaccatggaatgctgctgttctactggagatgcaatttcatccaaaagaaaaagggaaaagtatccaaaagtctttctagtctccaggcatttagaaaagctttagaacaagatctgcactggcacaagaatttgagtggaaatcaccctgcccagctgtgagccccggggcgggtgagccacacacttggatctcactgcagttgtggcctctgggaagaaggctttgaatgcagattttaaacaggtactcaactcatactgagccacggctactttcaacttaacaatatgtgagaaacccatctgatcactgcagacctgctgaaatctgttacaactaatccttcaatcctcaccagaatgctggctgtcctgcctctgccgtcccgagagaagatgaaagctactgggtggccacagggcagttatgtccccttctctaggttctgtgattctggcagttagaatgggtttccagacttttacaagcagaaacccttatacatgtgattatatgctgtccgtcaacatgtaaaacaggccaagcgtggtggctcacacctgtaatctcagcgttttgggaggccaaggtgggaggaccacttgaggccaggcgtttgagac

SEQ ID NO: 730048 - DNA, 892 bp, Homo sapiens
tttttttttttgtatttagtagagacgcggcttcaccatgttggccaggctggtctcgaactcctgacctcaggtgatctacctgccttggccttccaaagtgctgggattacaggcgtgagccactgcacctggccaaagttttttttttcttcttttttttagtattaacaactttgaccaggaaaaacaaaccctgcttttcctttacagtctctcgtcaggtcttcgccacaaatctctgtccagaggatcgtggctgaggcaccatggaatgctgctgttctactggagatgcaatttcatccaaaagaaaaagggaaaagtatccaaaagtctttctagtctccaggcatttagaaaagctttagaacaagatctgcactggcacaagaatttgagtggaaatcaccctgcccagctgtgagccccggggcgggtgagccacacacttggatctcactgcagttgtggcctctgggaagaaggctttgaatgcagattttaaacaggtactcaactcatactgagccacggctactttcaacttaacaatatgtgagaaacccatctgatcactgcagacctgctgaaatctgttacaactaatccttcaatcctcaccagaatgctggctgtcctgcctctgccgtcccgagagaagatgaaagctactgggtggccacagggcagttatgtccccttctctaggttctgtgattctggcagttagaatgggtttccagacttttacaagcagaaacccttatacatgtgattatatgctgtccgtcaacatgtaaaacaggccaagcgtggtggctcacacctgtaatctcagcgttttgggaggccaaggtgggaggaccacttgaggccaggcgtttgagac

SEQ ID NO: 730049 - DNA, 796 bp, Homo sapiens
atgaactatatcttaagaattcataaagccctaaaaagtaaatatttacaaccagaaatctttctgacaaagaaacaagattactcaaagtaagtagtagtttgggctccctggaaagaacccagaacttaagtgtcaggaaatgtggatagttctgaatgtgcccctggctggttgatgactctgggcaacttatgcagtacctctaactcatggtttatttacctgaaaaataagtgggttggctatgtctgtggtttgaaaggtgctctatgatgtcccagatgtcttagcagtgtatcattggctgttttggaggctgtcaggggtccagatggctgctcccactgagcctgcttttaacagagcttttcagtttgtatttcttgtatacacaaagtaatattaaataaaaaaaatataatccagctaagaaagtttgagaatactggcttgagattcaaaataaaataaaccaaaaattttagaaattatattagtctagaaagatagtattgtgtctcttgtctttttagtacctagcacatatcaggtacttgatacatatttatcatatgaatgcaatggttgtatgaacaactgggaaggaaatgcaaagcagaaggcaccatatttgtgttgctatcctgggtgtcatttctatgttacttgtgataaccagtagtaaagaacaacatggactatgtttaatagacaacaactaattttattggatttgtgtacataatctgaaatttagtctaaggacaagccatattactataaattccaggaa

SEQ ID NO: 730050 - DNA, 520 bp, Homo sapiens
tctagaacaagcaaaaccaacctatagtgaaaaagagcagtggttgcctttgtaggggaggaggaaagtggaaactgactagaaagggtcgtgaggggactttctgaactgatgatgatatgccgcatcgtaataggattacacagttacatgcatttgtcaatgctcaggaaatagcccacttaagttgtgatttcattatatttaggttttacgtcacacacacaaaaagaattataggctggccatggtggctcacacctgtaaccccagaactttgggaggccaaggtgggtggatcactttagcccaggagttcgagaccagctgggcaacatgatgaaacgccatctctacaaaaaaaaaaaaatacaaaaattagctgggcatggttgtgcatgcctgtgatcccagatactcaggaggctgagatgggaggatcacttgatccccggaggttgagggtgcagtgagccttgattgcacaattgtattccaacctgagggaaagcctgcctca

SEQ ID NO: 730051 - DNA, 583 bp, Homo sapiens
aataaaaatctggaggattttgcatccggattgctcttttccttttccctgctcttcccagaaccccctcccaagtccatattggaaagtgggggcaatgtgctgagtggttccctaaaaaggaaaatatggaacccaagttagcagctcctggtcgaagaaaaggacagcaataggacagacccaaatggcaaaggcaaagacgggagaatgactgtgcagttgtgttttctgtaaaaacaaaaatttatgcacaaccatacatctttcagattctccgctgtaaccaacctccaggtcacagccacaggacttcccacggacttcccctgctcttaaagcaaactgcagaaccaagcgtggacttctgctcctgagggggacggaaggacagtcccctgcggtcatctctataggagatgggggccatgggtgggagagaaactccctgttgcactttgtagccctcagtatgattaaagtgtttaccatgtacataaattatgctttttaagttcacatgtcttatatacttttacgttactttttaaaattaaaagacagttaacttttaagaataaat

SEQ ID NO: 730052 - DNA, 466 bp, Homo sapiens
caccccatgcggtcaccagcagacagccgctttctgcacaagttccaagatggactcacagcagtccccgccagccatgacgctgagatgggtgtacacccagctctggaggaacccaaccgcctgtggtctctccacaacggctgcaaaatactattctccgctgtaaccaacctccaggtcacagccacaggacttcccacggacttcccctgctcttaaagcaaactgcagaaccaagcgtggacttctgctcctgagggggacggaaggacagtcccctgcggtcatctctataggagatgggggccatgggtgggagagaaactccctgttgcactttgtagccctcagtatgattaaagtgtttaccatgtacataaattatgctttttaagttcacatgtcttatatacttttacgttactttttaaaattaaaagacagttaacttttaagaataaat

SEQ ID NO: 730053 - DNA, 599 bp, Homo sapiens
aaattttggaaacaaaggctccttacagaatatttcaaactgatgctatcaaaagttttgttcgacagctcaacctttatggatttagtaaaattcaacagaattttcaaagatctgcctttctagccacctttctgtcagaagagaaagaatcgtctgtcttaagcaagatacgcttcaccaaaatgaaactttccagatcttcaacttatgaaaacaggtatttatgttgcaacttacatttaaaagatgagtcgaattactcataatccttagaagttagcttgtccgcatctgaaaattcacttttaccttgaagttcaatctgtctctgggaaagactagattggaagaataaaattcaagaatgtgatgttttagtaatggaaaagccaagagcgtcaggtggcaaaagtccttctgttactcaagaaaatgctctgaaaaattccttttctcttttttttttgtaaagattaactccacctcaccaccacaatgaggtatttttctcagcaattgacacctgtttactcagttactccctgtaactatgttatgctgtgaagtaggcaatacagttgttaaagaagaataaa

SEQ ID NO: 730054 - DNA, 560 bp, Homo sapiens
aaattttggaaacaaaggctccttacagaatatttcaaactgatgctatcaaaagttttgttcgacagctcaacctttatggatttagtaaaattcaacagaattttcaaagatctgcctttctagccacctttctgtcagaagagaaagaatcgtctgtcttaagcaaggtatttgacatatttgagttaccactttatgtaaagtatatatgtaattttactttgtacatcagtaaatatgttaatacatgcagtaagaccagcttttgaaaattatataaaatattaaggtagaaattttgttttgaaattattgtgttcagcttgagcgttaaccttttagtgttttaagaaattttgctaacaactttgaatcttaccagtgaattccaaataaatgtaccaaagccacttaatgaaatattactattaatatataacatgttttcacttgagggcttaacaacttgagtggtttttcacaataagcacattcttaaaaatagtaaacgatgtttatgagttatttgatgacattaaatttgtgtgatgaaagag

SEQ ID NO: 730055 - DNA, 716 bp, Homo sapiens
cacccccagttccaccaccagtttatcaagaataccccagtggaccagaaattacagaaatggatgatcctagtgtggaggaggagcaggctttcagggctgcacaagaagcagttctactcgcagctgagaatgaagaatctgaggaagatgaagatgaggaagatgattatgactaataaacataaaattagcctggttttatgtgacactgatacacacacaccccttatatgggactaattttacacttttctgtgttatgtgtgtatatacatacacatgtaagaaattattcaactgcaaaatctcaatcttgaaaatcaagcttgaaatttcataggtagaaatattagcatttttattgaaagatactcacaggattttccagaggctaaataacatgcaattgcataattgttctgagggttatggataatggaatatgtgtttgtacattcctgtttttaaaagggctcaggtttcacatggtccaggtgaggtaaaacaattaaaataaataaataaatggtctcaggtttaatttgtaatacgacaaacactggaagatataacccacaggaaattcttggaaacatcaatactttttaaagagtgtcaaggggtatgaagacaaaaaatattgatagtcactagagtaatgtattcttaacctttgtaagaactgatctcagcatgtattcttaaacctttgt

SEQ ID NO: 730056 - DNA, 514 bp, Homo sapiens; identical to SEQ ID NO: 728445

SEQ ID NO: 730057 - DNA, 695 bp, Homo sapiens; identical to SEQ ID NO: 252636

SEQ ID NO: 730058 - DNA, 477 bp, Homo sapiens
tagcaatgtctactaaagaaaccaactggcttcttcctgttcgcccacctttcctttgtttattgatatttccaccagaggaaggaccaggcaaaagggagaataaattcactttttaagataatgcttctgagttttagcacagcatcccacttcccgggaagctttattgccaaggcaataaggagaccatgtgagtaggagttaaatgcacagccatttgtgaagtgagactgcttgggttcagatcttgattctgccctttattctatgttgtggaatatattacattgtgctgtgcctcttttaccttatttgtaaaatagagcaagcacccaactcaagcagttgttgcaagaactgcctgctatgctgtttaatacagtatgtggcaaatagcaagtgggtagtaaatgttaataatactgtttggattctcattttacatatgagaaactgaggtttaatgaagttaaa

SEQ ID NO: 730059 - DNA, 452 bp, Homo sapiens
tagtgccacctgcctccccagtggcccaggaacctcctgactgtcctctccctctggttaccgttccctccttcacaagcaccgcttccacctccccggaccccgtgcccgagtcccccgccgtgctgtgctacttccccatctcctgccccactccggctgagacccctgtgctgtgccttcagggccccagaaggcccagtaggatttacctcatgtggtaagtcactcttgcaaggcacacagcacagcgcagtcggggagaggggacttcgggcttccggaaggcaggtggacaggagaggggccagaggccacaccaagaacaataccaggcggcgtggtgttcgggggagcaggaagatgggacagcgtggccactgcactggggctgcaccttctagcgccaaaggagcgagcgaccaataaaatcccatcctctctggaactca

SEQ ID NO: 730060 - DNA, 536 bp, Homo sapiens
agcagtgcttgggtatcgaggctctgagactccggcctcacctctccacggggtcgaagggaacctctcctgatgacagcagtcgcaaagggccgaccatgatgatgaaaccccaggcggagacgggggaagcagcacgggatcccagcctcaggcctgcacggacggtgttggttgggggtaccttgggacagagggagtgcagagcagagaaaacctacctgtgcaactgagaaggccgctcaggccacggggacagggcaggaatgctctcaggagtgtcccctgaacctgaacttgatttcacgccatcaccttccacctcttaaccagcatctcctggacagtcagccgagtgtttccatgataccagccatacctgatgccaggagactcgctacacttggaagctcttcaaggcatgcttatctttgtgaactgaatcttggagaagcaggattgaaaataagagctatctttgaggctctagcacctacaagagacaccctccctctccaccatggatcacctgtctc

SEQ ID NO: 730061 - DNA, 707 bp, Homo sapiens
agcagtgcttgggtatcgaggctctgagactccggcctcacctctccacggggtcgaagggaacctctcctgatgacagcagtcgcaaagggccgaccatgatgatgaaaccccaggcggagacgggggaagcagcacgggatcccagcctcaggcctgcacggacggtgttggttgggtcactgtcatggctaagaaagcaactccaacccacacactgcaaatatgaaggaccacgaaaggcacgcaggctctggtttgcatagtgaagatgagcgtctgtgttcctaagcatgaaggaggaccacatgagtatcctggacacctactgcatgaatgtattcgccctttcagatctagggacctgggtaccttgggacagagggagtgcagagcagagaaaacctacctgtgcaactgagaaggccgctcaggccacggggacagggcaggaatgctctcaggagtgtcccctgaacctgaacttgatttcacgccatcaccttccacctcttaaccagcatctcctggacagtcagccgagtgtttccatgataccagccatacctgatgccaggagactcgctacacttggaagctcttcaagatgtgtattgaatttgcagaaggcctcttttccaaatgatcaatgaatttcaacaccagagtcttggagtcagacaaggaaactttcagtacataggtag

SEQ ID NO: 730062 - DNA, 365 bp, Homo sapiens
ggtaccttgggacagagggagtgcagagcagagaaaacctacctgtgcaactgagaaggccgctcaggccacggggacagggcaggaatgctctcaggagtgtcccctgaacctgaacttgatttcacgccatcaccttccacctcttaaccagcatctcctggacagtcagccgagtgtttccatgataccagccatacctgatgccaggagactcgctacacttggaagctcttcaaggtgggactttctgtcttgttcagtttttcattctcagtagtcaacacaggaccttatacttaaaggaaataagtataatgtcctaacaagtgcttctggaataaatgatcatggctgaaatgaga

SEQ ID NO: 730063 - DNA, 197 bp, Homo sapiens
ccaggctctgaggctccggcctcacctttccacggggtcgaagggaacctctcctgatgacagcagtcgcaaagggccgaccatgatgatgaaaccccaggcggagacgggggaagcagcacgggatcccagcctcaggcctgcaccgacggttttggttggggtgagtctcaccaaaagtcgtgccgccgtccgtg

SEQ ID NO: 730064 - DNA, 465 bp, Homo sapiens; identical to SEQ ID NO: 208582

SEQ ID NO: 730065 - DNA, 1221 bp, Homo sapiens
aagtgaggagcgtctctgcccggccgcccatcgtctgagatgtggggagctcctctgccccgccgccctgtctgggatgtgaggagcgcctctgcccggccgcgaccccgtctgggaactgatgagtgtctctgcccgatcgccaccccatctgggagaggaaaggccatgtaaggacagagcaaacaggcaactgtctgcaaaccaggaagagaggcctcaccagatatcaaccttcatggcaccttgatcttgatctttccagactgtgagaaaattaacttctgttgttgtttaagctgccctccaactccgtctgtagtattttgttacggcagcccaaacagactaatacatcaagtaaccacacaaatgcatgtacaattaaaactgacctaactgttaagaagaggagatagggcaagagtatatttatcgagggtattctatctggtcagagatgagagagaaagatttttctgggtaaagttaacaaggtatatagggtggggtgaatatggagtggggaatggtcccagatagggccaattgcttgtgcaaaggccctggggtgagacagagcacagtttattagagaaaccaagtggcagctgtgtgattggggtgctaagagtgaagaggaaggtgatacaggtgagggtggagaagagggtgaggcctaacttcccaggaccatgcaggattttcactgctaacttgggccacttgcacaccagactggagctggaaatggtgggtatgggagacagagatcaaaataacctctagatgtccacttgcatagctggtaggtcacgggaccattcatgatagggaagcccaggagagaaccagatttcaaagagaaagtcatgaatttgcacgtgtcaagcttgttgtgcttttgagtcacttagaaagagacatttgtttgcggacctatctacaagtctagactcagacagagacctgagtcatgtcattacactgacaaggtgggagaggtgattcaggacagtcattctcagactttgagtttcaagacccctttacactcttaaaaaccatcaaggacctcaaagagcttctgtttatgtgggttatatctgtccatatttactgtattagaaatgtaaactgaaatattaatattaatttataataaacctgttttaccttaacataaaaaaaagaaataaaacatgcaaaaataaaaaacta

SEQ ID NO: 730066 - DNA, 360 bp, Homo sapiens
  misc_feature (261)..(261): n is a, c, g, or t
ttttttttttttgagagagtctctgtcgcccaggctggagtgcagtggcacaatctcggctcactgcaacctccacctctggggttcaagcagttctcctccctcagcctcccaagtagctgggattacaggtgtgcaccacccacacctggctaatttttgtatttttggtagagacggggtttcaccatgttggccaggctggcctgagactcctgacctcaggcgatccggccatctcgacctcccaaagtgctgggnttacaggcgtgagccaccacacccagcctcctcaccaacttttgatattactagtttttttcttttcagcccttctgtcgtcttctcgcccccgtatag

SEQ ID NO: 730067 - DNA, 589 bp, Homo sapiens
gttggaatgagtagaaaaaggggtgtatcatatacgatagtgtttcctttctcatggccagttaaatattatctctattatctctaccaggaatactttatggccaaccacaaattagagtaagctagtaaagaatgttgaattttattgactatattttctggggaacacaggctacagtgctagaggaagacagggaggaaagatggctgataaacaacatatttgtggactgtactgacagtaatttctatttatcagtaaaagttcccaaagtgataaagattccctttacctcttgggatctatgcttagatcctctactattgtttaaacagtctatgaattacttataggcaccctcttctttttcagagttgctttaaagctcatcttaacacaaaacacaggaaatgaagtaatagtcttcatataagactattaaaaaaaaagagagacaggcttaagaatttgtctagtttaattttctttttttctttttttttcttttttttttttgagacagggtcttgctttgttacccaggctggagtgcagtggcgagatcacagagagagaccttgatctc

SEQ ID NO: 730068 - DNA, 622 bp, Homo sapiens
ttccatgctctgcccctttcctggatgaggaaccggactcacaatttctatttccgggactacaggaagggcagagaatactgacggttaccagtattaacccttcatctgttcttgaaactggttggggaatgaggtgataagcaaggagggtgtaagtttaggggacaaagaagaaagaatgaataatacgagcagacattctctgtagaaggtaatggtctgagaatgaaaaggtgtttgatggacatgttgtgggggcaccaatgcagaacactgcactgagtcctaaaggaaggacaggagccttataggcaatgccccagactgacttgtgagtggggtttatggggaaagggagggactgagggcagagtctctgggtttcaggacagcattatgttatttccattcactattacttaagagtttgtgtgtaaacaggctcatctctgagttctcaggacccttgcccccacccccatttttttaatgaaaaaaaaacaaaaaaaacggatccaagaagaaaagagaatttatttccttctccactctctccatgccctggagaaaaaaaagtccagaagaaatcataaatatctctcatctacatggttgcttc

SEQ ID NO: 730069 - DNA, 254 bp, Homo sapiens
cgtgggcaggcaggagctctgtgccactctgcatcttcagtggtatccattttgtttacactatcaaccaaactttctatgctaagaaaagcaagatgcagaatgggtctgaaaaaagagattgaatgctgggctggaactcagaccaggattctagccccaagtgtgacatttgtgtgacttgaggcaaatcccttcatgccctgggtctggtttcttggctataaagtggggaagttggaagacaaaaaaaa

SEQ ID NO: 730070 - DNA, 594 bp, Homo sapiens
cacaaacctgcaactaccatatgacccagcattttcattcttgagtgtttatcccagagaaatgaaaacttaacgttcttgcaaaaatttgtgtatgaatgttcatggcatcttgttcatgatagtaacaacacagaagtgcccagatgtcctttaatgggtgaatggctaaacaaatggtggtgcattcataacataataccacacaggaatgaaaaacaaagctgatgcacaaaacaacctggatgaattcccagagaattatgctgaatgaaaaaagccaatctctgacgtatagttacatactatattatactatttacataatattctttttttttctttttttttttgagatggagtctcacctgtcgccaaggctggagtgcagtggcacgatctcggctcactgcatcctccacctcctgggtacaagtgattctctgcctcagcctccagagtactgggattacaggtgcccgccaccatgcccggctaatttgtgtattttcagtagagatgaggtttcactgttggcgaggctggtcttgaactcctgacctcgtgatccacccgccttggcctcccaaagtg

SEQ ID NO: 730071 - DNA, 696 bp, Homo sapiens
cacaaacctgcaactaccatatgacccagcattttcattcttgagtgtttatcccagagaaatgaaaacttaacgttcttgcaaaaatttgtgtatgaatgttcatggcatcttgttcatgatagtaacaacacagaagtgcccagatgtcctttaatgggtgaatggctaaacaaatggtggtgcattcataacataataccacacaggaatgaaaaacaaagctgatgcacaaaacaacctggatgaattcccagagaattatgctgaatgaaaaaagccaatctctgacgtatagttacatactatattatactatttacataatattctttttttttctttttttttttgagatggagtctcactccagcctgggtgacagagtaggactctctcaaaaaatgtctttgatgagcagtaaagttactagtttcattaaatatggacccttgagtacgtgtcttcttaatatggtgtgatgaaaagggaagtatgcgtgaagcagttctgcaaactgaattttaaattatcttgaggaaaatcacctgtaacattgtcagcaagctgtactgctcactttttaaaatttacaacattatacttagaagaataactaatagacaagctacagttttttacacttgggtattgaccagatatgtttttctaaataaaatgggcttatcctttcaa

SEQ ID NO: 730072 - DNA, 469 bp, Homo sapiens; identical to SEQ ID NO: 728450

SEQ ID NO: 730073 - DNA, 935 bp, Homo sapiens; identical to SEQ ID NO: 220280

SEQ ID NO: 730074 - DNA, 910 bp, Homo sapiens
gcctccgcgcgacccggcgggcccgcctccgccgccgggtgcacgcgcagcctgcgcctcgtgccggagcagagcagaggccaggatgcggagttgtgcactttgagccggccccatgaccctgagcacgttggcccgcaagaggaaggcgcccctcgcttgcacctgcagcctcggtggccccgacatgattccttacttctccgccaacgcggtcatctcgcagaacgccatcaaccagctcatcagcgagagctttctaactgtcaaaggtgctgccctttttctaccacggggaaatggctcatccacaccaagaatcagccacagacggaacaagcatgcaggcgatctccaacagcatctccaagcaatgttcattttactccgcccagaagacaacatcaggctggctgtaagactggaaagtacttaccagaatcgaacacgctatatggtagtggtttcaactaatggtagacaagacactgaagaaagcatcgtcctaggaatggatttctcctctaatgacagtagcacttgtaccatgggcttagttttgcctctctggagcgacacgctaattcatttggatggtgatggtgggttcagtgtatcgacggataacagagttcacatattcaaacctgtatctgtgcaggcaatgtgggttgacagggattcaaggaacaaacactgtgatgtactattggtggaagaatgaactggagcagcctttctggagagtgatttgccaatatgccttatcattttgcatgatctttgtcctagtaactctatttctatggatttactctaagtttgtaaacatggatgtgtgcaaagattttagctctaagaatgtttgtcagtgttctaataatagcaaaaaataaaaaacaaatgattg

SEQ ID NO: 730075 - DNA, 336 bp, Homo sapiens; identical to SEQ ID NO: 220282

SEQ ID NO: 730076 - DNA, 1177 bp, Homo sapiens
aaaaaaaaagaaaagaaaagaaaagaaaaggaaaaaaaatgaaaaagaagccattgaataccctattgaccataagaaaaagcagggcaaagctggtcaacggcaacccagacactgaaggaaaaagaacatggagaatgacaaaagcccagagggaggagtaaaaggacacaaacaccattctcagggaccaggactgggcgccgttttcagggaccaggactgggcactaatcacagaactgtaacaggcgccccatgggaatgaccaactgttagacggggcctgcagggcagcacttccctcttgcctcccaccaaagcttctaaagggaaatgtcgactgttttcacagcagtcccctcactgcggctgagtttgtgggctcagatgatagctcacaacaacctgattcagtccccactgtggctgtgtgtggggggtcagatgacaggccaccacaacctgattcagtcctcactgcagctgagtgtgtgtgggtgcagatgacaagccaccacaacctgattcaggattcagttgggctactagccagtgccataaggaaaaccattctggggctcttgagaggggcaaagcataatttgcatgtgggagaaacgttaatagtttgtggccagaggacaagctgtggtttattaaagactgctgcaggttcctactatgcttctcatcaagaggtggaatctaatcacctttcccccttgaatcatggctggtctcagtgatgagtacaactggacagtgtggcaggagagatgctctgggacttctgagggatgatcatgagagaccttacagcttctgcctgggcctcttggacacacaccctgggagaagccagacaaacctgactacctgatgctaccagactggaaggaagtccgtgctggccacaaagagagggctgggtgcctgctccgtgtccccagccactagagtccttctgggtgcctgcttcacatccccagccactagagtccttccagatgagaccagggacatcatgaagcaaccaacccacaccgctctgtccagtgtcttgacccagaaaattgtgacatgtaaaaagaataaattcctggtttaagccagtaaggttacgggtacattgttacatctcagataattaaaaccttgaaaaactcaaaaaaaaa

SEQ ID NO: 730077 - DNA, 520 bp, Homo sapiens
tgttggaacccaagcagaaaccaaagcccaggagaatgcttggatgccagccatatgaatcagccttgctaagcataggacaagatggagaaggatggagaataggtctgggtgggacaaatggatgacatccagtatacccaatctccataattcctccccagccacatgaaaggctctgactttactcctagggactcaagactggaatgggaagagcatgaaattgagctgtctatccccctggatctctcattgccacctgcccataggttggctgcacccctccaccaaagaaaggccatgactccttcctggcagccctgtcttacagctactctctggtgatctgggaaccactccctcccttaccccttgatgcctagggctagtgccagcaccttgttgttgttagcctcagaggcacttgcactgttccttgatggttttcccaaatcttgccctcatctttgtaaatactgtttgccgtttattacactgtcatcatattacccaaatt

SEQ ID NO: 730078 - DNA, 504 bp, Homo sapiens
atccatattttacagatggagaaacggaggcccagggaagggatgtgcccgaggtcatacaaagaagtttgtgggaatccaggtctgactcgcactcaatctagtgctctaataatgacttgagtgaattgtatgaatgtgctcagaggtggagcagcaatcataaaagtaataatggtaccatttatggaccatctaactactgtgttaaaacaatttacaggccatgcgcggtggctcacgcttgtaatcccagcactttgggaggccgaggcgggcagatcacgaagtcagaagatcgagaccatcctggctaacacggtgaaaccccgtctttactaaaaatacaaaaaattagccgggcttggtggcgggcgcctgtagttccagctactcgagaggctgaggcaggagaatggcgtgaacccgggaggcggagcttgcagtgagccgagatcgagccactgcactccagcctgggcaacagagcgatactctgtctga

SEQ ID NO: 730079 - DNA, 647 bp, Homo sapiens
atccatattttacagatggagaaacggaggcccagggaagggatgtgcccgaggtcatacaaagaagtttgtgggaatccaggtctgactcgcactcaatctagtgctctaataatgacttgagtgaattgtatgaatgtgctcagaggtggagcagcaatcataaaagtaataatggtaccatttatggaccatctaactactgtgttaaaacaatttacaggccatgcgcggtggctcacgcttgtaatcccagcactttgggaggccgaggcgggcagatcacgaagtcagaagatcgagaccatcctggctaacacgggactcaagactggaatgggaagagcatgaaattgagctgtctatccccctggatctctcattgccacctgcccataggttggctgcacccctccaccaaagaaaggccatgactccttcctggcagccctgtcttacagctactctctggtgatctgggaaccactccctcccttaccccttgatgcctagggctagtgccagcaccttgttgttgttagcctcagaggcacttgcactgttccttgatggttttcccaaatcttgccctcatctttgtaaatactgtttgccgtttattacactgtcatcatattacccaaatt

SEQ ID NO: 730080 - DNA, 890 bp, Homo sapiens; identical to SEQ ID NO: 227860

SEQ ID NO: 730081 - DNA, 490 bp, Homo sapiens; identical to SEQ ID NO: 227116

SEQ ID NO: 730082 - DNA, 493 bp, Homo sapiens; identical to SEQ ID NO: 232367

SEQ ID NO: 730083 - DNA, 2847 bp, Homo sapiens
acagaggagcacagagagactgcgaagagagatgacctgcctagggcccacaatcaccttcgtccctgctgactctgactttcaaggcatcctctccccaaaggccatgggcctgctggagaatgggcttgctgccgagatgaagagccccagtccccagccgccctatgtaaggctgtgggaggaagccgcctatgaccagagcctgcctgacttcagccacatccagatgaaagtcatgagctacagtgaggaccaccgctccttgctggcccctgagatggggcagccgaagctgggaaccagtgatggaggagaaggtggccctggcgacgttcaggcctggatggaggctgccgtggtcatccacaagggctcagacgagagtgaaggggaaagacgcctaactcagagctggcccggccccctggcctgtccccagggccctgcccccttggcttccttccaagatgacctggacatggactccagtgaaggcagcagccccaatgcatctccacatgacagggaggaagcttgttccccacaacaggaacctcagggctgcaggtgcccgctggaccgcttccaagactttgccctgattgatgccccaacgttggaggatgagccccaagaggggcagcagtgggaaatagccctgcccaacaactggcagcggtacccaaggacaaaggtggaggagaaggaggcttcggacacaggtggggaggaacctgagaaggaagaggaagacctgtactatgggctgccagatggagccggggacctcctcccggacaaggagctgggttttgagcctgacacccaaggctgagatgtttgtgctccgtagcttctagtctggaactgctgctgacccctgtgtgacatcacagggcctcagtttccctatctgcaaaatgggatgatatggaggttcaatgagatggtggcattttgagaatggtaaagaaatacacagggaggggatgatgactattagtggactcttgtttttccaatagttagtggtctttggccaacctttgaaggcaaaatatgatttgttgaggtttgcagcagctgaagccctcaaaagcattttccaccttcccccaaagctgacctctgagaggaaccttccttggtgctccctctgggcccctgatcctttgtgaaggccagtcagactatacttacagaaggcagtttatcatagcgttgatgatggtagatgaaatgtggaaagaatctcaatgttcagcaacaggagactggctaagacatcatgccacagctatgcaagggacagatacacggccattcaaaacagtgaccctcctgattgaatcaaatcccctatcaccactctcacagcaccacagatctctctcctttgtagcatttattaccatcataattttacatttctttgtgaatttctttgatgaatttctatctccttcattggacgctaagctctgtgaaggcaaggactctattacgttcattattgtgccctcagtgcttagttaagttcctggaacacagtatcctctcaataaattgttgttaaatgagtgagtgagtctatatattttgatgtggacagattttgtaatgtataattaagagaaagagagcagattataaaacagcatgcatgctgtaacagacattgttaattccctccttccttgattttgtttgtgagtgaggaccacatccccactttcagtcaatgaattgtgattggtccaaagccaatcatgacaatccttttctctgctgctggaggtggtcctgagatcgagttctggccagtaagacctaaagagaaatctgttgggggtcactttctgaagtttttgcttttataataaaaatgcagaagtgactgcctttgcaggcattgaaaacagatgtagtggctggagctgcagcagctgtcttgcagtcatgagggaaattccaagagattcacagagatgctggacctaacattgttgaaccagtgaaccacggccagccaccataggtagtctagctaggaagaaaaatgaatctctggttgttaaataattatacatgcagattaatgccctctcaatagatacagagtatgatcccatatatatatatatatgtatatccatatatgcgaatatgaatagaaaattaaagtgattatatctgggtgggtttgcctccttcactatgggcaaccttccaccctccattcctccttcttctcctttagcctgtgtccttaagaacttaaaacctcttcaactcacacctgacctaaaacctaaatgccttattttcttctgcaacaccacttggccccaatacaaacttgacaatggccctaaatggccagaaaacggcacttttgatttctgcatcctacaagacctaaataatttttgtcgaaaaatgggcaaatggtctgagatcttctcggcttagcggctgaagactgacactgcccgatcgcctcggaagcccccagaccatcacggacgccgagctttgggtaactctcacagtggaaggcttctaaacctcttaaaactccccaactctggtgccaacttagacaatactcttttaagcactcctttttagttatccccacctgcccagttcccttattaggctgagacactttaaattatctgcttccctgactattcctggactacagctatatctcattgccgcccttcttcccaatccaaagcctcctttgtgtcctcctcttgtaccccccaccttaacccacaagtataagatacctctactccctccttggtggccaatcatgcaccccttaccatc

SEQ ID NO: 730084 - DNA, 729 bp, Homo sapiens
gcctccctgcctaggttacatgcagtggtcatcccggtcgctcccacacccgtgtgggctctgggatcccctcttccagccagcccaggggacatctggctgtctcaggacccagccatctgtaaaaattaggcaggtcccttcagtatgctcctggtcaacaaagaaaaacttcaattttgagaatggcatctgtattccgaagtgttctctcagatgtttgagttccactaagtaggggaagaagatgctgcatacaggatggaatatccaggggaagacgtctaaggagagatgcccagctgggagtcctatgcaaggggaagaagatgctgcatacaggatgggatatccaggggaagatttctaagaagagatgcccagctgggagtcctatgcaaggggaagaagatgctgcatacaggatgggatatccaggggaagatttctaaggagagacacccggctggaagtcaagatatgtcagttgtttccattataataaaaccactcatgttagatgagctgaactttcccttttccccagttcttacgatcaaaaagtggctgtcctaaatttcatcactcaatatccttgctagagtcttcctttgtcagccaggctggagtgcaatgtgcaatggcacaatcttggctcactgcaacctctgtctcctgggctcaagcaattcttctgcctcagcctcctgagtagctgggattacaggt

SEQ ID NO: 730085 - DNA, 551 bp, Homo sapiens; identical to SEQ ID NO: 343907

SEQ ID NO: 730086 - DNA, 760 bp, Homo sapiens; identical to SEQ ID NO: 4494
  misc_feature (16)..(16): n is a, c, g, or t

SEQ ID NO: 730087 - DNA, 426 bp, Homo sapiens
ttcatcaccccacctggctaactttttcgtttttattttttatagagacaagttctccctaagttgcctaggtgagtcttgaactcttaggctgtagtcatcctctggccttgggctcccaaagtgctgagattacaggtgtgagccactgcacctggcagttgaagattatatgcggatcacctaggtcaggagttggagaccagcctgaccaacatggtgaaaccccaggggctctactaaaaatacaaaaaaaaaaaatagctgggcgtggtggtgggcacctgtaatccccccttctcgggggtctgaggcaggagaatcacttgaaccagggaggcagaggttgcagtgagccaagatcacaccactgcactccagcctgggcgacaagagcgagactccgtctcaaaaacaaaacaaaac

SEQ ID NO: 730088 - DNA, 455 bp, Homo sapiens; identical to SEQ ID NO: 415460

SEQ ID NO: 730089 - DNA, 615 bp, Homo sapiens
ctctgaggaccctgccctttcccaaaaggggtatcttaagaaggaaaatatggctgctctttgcggacagcagagtcccagaaccccatgcaggtgtttcagggctttatgtcattcaaggatgtggctgtgaacttcactaggaagaatggagagaactggaccttgctcagagagtcttgtacagggatgtaatgctggagaactataggaacctggtctccttggtaggatttccattttccaaacctggtatcatctcctagttggaagaagtggtaagcccacgaacacaaatgcaggagggagaggtgccaagaagcagcggtacacgagaaagacagggctggagaccagtttgctgatagtgaccccaaaccagaaagttcattgggcctgcacctccagtagaactggacctgaggcagctaggaataggatgcatgtttctgaccctggccaggatcagaaagaaggaaacctctcctgagggtcttcagcagtggaagagggcagtcaggacagggacagtgaggaaacgttacatcgctaaaaagggctacttatgcgtattctatgcgtggttgaaaataaacagcactgtgtctggaatga

SEQ ID NO: 730090 - DNA, 1009 bp, Homo sapiens; identical to SEQ ID NO: 240715

SEQ ID NO: 730091 - DNA, 1460 bp, Homo sapiens; identical to SEQ ID NO: 240714

SEQ ID NO: 730092 - DNA, 521 bp, Homo sapiens
ttttgaaaggtaaaggccattagcttggaggcagaagacagacctccctgactgctgaattcctgccggcctgaaattggagcattccaagctcctcagatgagtcataagccaccaagattgtgagcctctgggtctaaagtccaccaggtcagggagcaggcctgtctcgtcttctagtcttctactgtatctcaatacaatgcctgggacaggagaaacacccaatacgtatgggcagaataaataaatgacacagttctggggtggcagcagatcaatttcctggtctgtgtctcttcaatggacaagtcgatacatctctgctgctccacgtgtagtccatggaccaggccccttctcatcacctgggagctcatgagcaacgcagcatctcagtatcccaccccagacatctgcatggactgaatccagttcaccacttgcttgagggtaattgcacataagtctccaagtctcagtttcctcagctgaaaaataaaaggtaataaagcccatta

SEQ ID NO: 730093 - DNA, 2290 bp, Homo sapiens; identical to SEQ ID NO: 680766

SEQ ID NO: 730094 - DNA, 1226 bp, Homo sapiens
caataatataagattcctacatcagtttgcagtcctgactttacagtttgaaataagtagcaaaagaaaattatgataatcaagtaatttattattttgtaaaatagtataaaggaataaggaaattttaagtattgtttaggggccaaatttgaactcagctaatatgatttaagcgctctattaattgccctgatttttaaagaggtgcatgtaattttgaaatagcacacattttcatttgtaatcactctggataaatttgtatttttcagtgttcattgaacaggcttattgactctggtaaacttattttattgatgttttcatatggaaaataataagtggaatatgatacaattgttattttcagaacatatttctttagggctatttaatataacctttttaacgagcaaaaactttccatttgagagaaaaaattcttcctgctctgtgggaaaatatttgctgagattttgtatagaataagagacatgtatgtaacatatatgtatattcagcacaagtctactgcaattatgtacacattttggcaggaagaggggattttgtttagtctttgtttatgagttctagagtttcctgtatctagtgttaagttgtaaggaaaaactaaacatgccatttaaaggtaaacttggtaactatttatagagcatacaccaatgattatttctcacagttttcatgatcatttgtttattatttacttggattagactcattaaaaggtataatgctggtcacaattagaatgctaatatttggggaaactatgcagaaaatattttaaaatattaaaagagtgctggcttctattgttgatttatttttggatttaaaaacaaattagggctgggcccattagctcacacctgtaatcccagcactttgggaggctgagatgtgagaattgcttgagcccaggagtttgagaccagcctgggcaatatggtgagactccatctccatacaaaattaaaaaaaaaataattagccagatgtggtggtgtgcacttgtagtcctagctacttgggaggctaaggtgggaggatcgctggagcccaggacatcaaggttgcaaggagctatgttcattccactgcactccagcctgggctacagagtgagacctgtctaaaataaataaataaataaacaaactagctcatttacaatgtaaagcacttaatatcaaatg

SEQ ID NO: 730095 - DNA, 1052 bp, Homo sapiens
tagagctgtttttttttaaaaaaatcaatttgtgaatagagttcaaacaaaaatgccttttttaatttcagcagatgctcgaggatttcttaccttgaagtcaaggttgccaatagcaacaaacttccgcaataaatatggcaaaatgcaacgcacatctttattctaatgccttgtacttttatacagtctttcatccatagattttcttatttgacagttaatatttaatatttaaaatacccgtaaaaggcacacatgtcttatcaccccctctttttgccattgagagatcctagaactcagaggttccaacacctcaagatacttgggcatagagctaaacttggaatctagaatcctgaactcattgggactcatctgtgaagaataatgaaacaagatttgtaaaaactggctgggtagtgtactaagcatttactctatatcaggaatacagttaagtgccttgtttacatttgttcatttagttgattaattttacaaataagaaaattcaagttcacagaggtggtcacttgctcaaagccatattccaagaaaatggtagagctaagacttgagctcaggcccatctaactccaaaactcaggctcagaaccatctaagctgtaagttgtaagagctactgagaatcaaggagcttggctctgggagaagtttgtgattctttggtgctctcttcacgtcactctactacctcactttagccagtaaaagacacatcacagattggcacaataagaggcatattagtgggcagctgaaaactggaaaaagagaaaacaggcctgcgtttacaacccttaagagtgagagactgagaccacaagcaaaacaccaagaattatttggtcacacaaaaacccggctgagtcactggagacaaaagcttaattcccttattggttttgtgtgcttgccttaattccatactatcctttaaatattctacaaataagagcacggcatattctatcgctatttacaacagggctttgctgaagattttatccagggcaaggtcatca

SEQ ID NO: 730096 - DNA, 496 bp, Homo sapiens
tttgttcttcatgaaaaatgtctgggaccttttatatggacggggaataccaacgtagagatggtcaagaaaatttgcgctccgacctaaaccaagcacgttgtatggtagttggagagctaaatgtgggaggagccaagatggccgaataggaaaagctccggtctacagctcccagcgtgagcaacgcagaagacgggtgatttctgcatttccatctgagggtgtactccatctacttttaaaaacaaaaagttcactgtaaaacagcctcaggtaggccgttcagtaggtattccagaagaaggtattgtcatcataggagatggacagctccaagggtgtttattgcccctgaagactttctagtggaacaagatgtggaggtggaagacactgatgttggtgatcctgactcagtgcaggcctaagctaatgtgggtgtttgtgtcttagtttttaactaaaggtttaaaaagtaaaaataaaacattaa

SEQ ID NO: 730097 - DNA, 368 bp, Homo sapiens
cctcgccctccccaccgacatcatgctccagttcctggtgagtggagctgccgaagagcggggcccgctgcctggggcgtgcctcggaccccatttcccccttgaggattgccgaccccgccgacccggcctgggcgtgggtccagcggtcccttcgtcccccgcgcctggtcgtcgcctcgcagggcggccgttttcttcctgcctccccagaaaatccctttgccaatatttttctgcagccatccaagtccctaaaactttgaggtgtcagagagtgtgcgtttccagagcttcttattgtgtgccgcgccccgcgctcattgtgcaatctttgtattaaagcttgtgtggtccttgatgaaaaa

SEQ ID NO: 730098 - DNA, 2317 bp, Homo sapiens; identical to SEQ ID NO: 251197

SEQ ID NO: 730099 - DNA, 2139 bp, Homo sapiens; identical to SEQ ID NO: 223829
  misc_feature (1542)..(1542): n is a, c, g, or t
  misc_feature (1578)..(1578): n is a, c, g, or t
  misc_feature (1588)..(1588): n is a, c, g, or t
  misc_feature (1590)..(1590): n is a, c, g, or t
  misc_feature (1632)..(1632): n is a, c, g, or t
  misc_feature (1651)..(1651): n is a, c, g, or t

SEQ ID NO: 730100 - DNA, 347 bp, Homo sapiens; identical to SEQ ID NO: 728457

SEQ ID NO: 730101 - DNA, 836 bp, Homo sapiens
  misc_feature (773)..(774): n is a, c, g, or t
tgtcggagatgagatcagctaataacagactcaattcctgaccttcctagttttctgagactgcatccactttgatagtttctactgagtccaaattagaacatcccagctggtgggctgtctcccaggaagccctcggagaggagcggtgcatagggggcacctggacacagcccacctcccccgagtagcgtcaggtaggcttgtctatctacatcctttcgccctttctcaggaaactatcagatgatgtgctcccccagatgaagaagtagtgccaggaaaaaggagacacgggatacagggatcctgaagccggcggaggacaagggagctcctgggaggacagctgtgctccggcctagcaatagcgagcagctggtccagactcccgccgtgactcagaagatagacatgcggagggttatgatcacagagcaacgatggtccttgtacatgaagataaaaatgctcaggtgtgcccaggttgaagaagatgaaaggccctgcctcccagagcgcccggggacactggtgatctcttccaggtctgtttccacccactgcagctgtgatggagtcttgctctgttgcccaggctggaatgcagtggcgtgatcttggctcaccaaaaattctgcctcctgggttcaagtgcctccacacccagctaattttgtatttttagtagagacgagatttcaccacgttggccaggctagtcttgaactcctgacattgtgatccacccacctcagcctcccaaagtgctnngattacaggtgtgagccaccatgcccggcctacctggagcattattaaaaccttaaaccttt

SEQ ID NO: 730102 - DNA, 354 bp, Homo sapiens
  misc_feature (28)..(28): n is a, c, g, or t
agcttttaaaagattttttttttttctntcaaccccatgattcctttaacaacatgtttccagcattcccaggtaggccaaggtgtcctacaaaaaaaccttgggttaaacctacagggggtttggctggtgttaacaaaagggagggcaaaactggtgcggctggccatgaaaaaaacttacttgggtggtgtggtacaaaaaaaccagcttgtttacatgcttattccatgactgcttgccctaagcaaaaagtgcctttcaggatttatttttgggggtttattacgtatgtttggttttcaattcccccagtttaatgaagatttaaataaaatggtaggttttccctta

SEQ ID NO: 730103 - DNA, 566 bp, Homo sapiens
gggatctcaaagagatatttgtacacccatgttcatagcagcattattcacaatagccaagaggttctggaagcatcccaaatgtccatcaacagatgaatagataaaggaaatgtggtatatacagtcaatggaatattattcagcctttaaaaagaaggaaatcctgtcaaatgtacaatgtggatgaaccttgaaggcattatgccaagtgaaataagccagccaacaaaagaacaaatgctatatgattcctccatgtgaagtatgcaaagtagtcaaaatcatacaatagaaagtagaaaggtggttgccaagcaacgattgggggaaggggagagggtgaatttgtatttagtgggtacagagcttgtgttgcaagaattctagagatctgttgcaaaacaagtgtgattgtacttaacactactgaactgtatacgtataagtttgagaaatatctcttttaaaaagggggaaatgtgaaggcttttgcatgtatgccctaggaaatgcatagaattcttagaaaggtaaacatggtaaaaaaagaagtctttgttaaa

SEQ ID NO: 730104 - DNA, 709 bp, Homo sapiens
  misc_feature (53)..(53): n is a, c, g, or t
  misc_feature (56)..(56): n is a, c, g, or t
  misc_feature (65)..(65): n is a, c, g, or t
  misc_feature (69)..(69): n is a, c, g, or t
  misc_feature (72)..(72): n is a, c, g, or t
  misc_feature (75)..(75): n is a, c, g, or t
  misc_feature (78)..(78): n is a, c, g, or t
  misc_feature (80)..(80): n is a, c, g, or t
  misc_feature (108)..(108): n is a, c, g, or t
  misc_feature (115)..(115): n is a, c, g, or t
  misc_feature (124)..(124): n is a, c, g, or t
  misc_feature (132)..(133): n is a, c, g, or t
gttttcagaacttttcttgtcaccccagggcgaatacagagtggcaggtggtnatnttggggggnattnatnttntananaactgaaaatctgaactgggtgcctgtncccgtcnagggttacnggcagatnnccgtggacagcatcaccatgaacggagaggccatcgcctgcgctgagggctgccaggccattgttgacaccggcaccttctttgctgacgggcccaaccagccccattgccaacatccaagagggacatcggagccagcgagaactcagatggcgacatggtggtcagctgctcagccatcagcagcctgcccgacattgttttcaccatcaatggagtccagtaccccgtgccacccagtgcctacatcctgcagagcgaggggagctgcatcagtggctttcagggcatgaacctcccccccgaatttggagagctttggattctgggtgatgttttcatccgccagtactttaccgtttttgacagggcaaacaaccaggtcggcctggcccccgtgggttaagcctaagttttttcagccccctcccaggaagatttggcctttgtcctgggccccctttaaatggatttaattttcctgactgtttttcccaggggagtgtggaggttttggccctgttccctgtcctaccaataacgtagaataaaaacataaccccctgaaaaaaaaaa

SEQ ID NO: 730105 - DNA, 767 bp, Homo sapiens
  misc_feature (53)..(53): n is a, c, g, or t
  misc_feature (56)..(56): n is a, c, g, or t
  misc_feature (65)..(65): n is a, c, g, or t
  misc_feature (69)..(69): n is a, c, g, or t
  misc_feature (72)..(72): n is a, c, g, or t
  misc_feature (75)..(75): n is a, c, g, or t
  misc_feature (78)..(78): n is a, c, g, or t
  misc_feature (80)..(80): n is a, c, g, or t
  misc_feature (108)..(108): n is a, c, g, or t
  misc_feature (115)..(115): n is a, c, g, or t
  misc_feature (124)..(124): n is a, c, g, or t
  misc_feature (132)..(133): n is a, c, g, or t
gttttcagaacttttcttgtcaccccagggcgaatacagagtggcaggtggtnatnttggggggnattnatnttntananaactgaaaatctgaactgggtgcctgtncccgtcnagggttacnggcagatnnccgtggacagcatcaccatgaacggagaggccatcgcctgcgctgagggctgccaggccattgttgacaccggcaccttctttgctgacgggcccaaccagccccattgccaacatccaagagggacatcggagccagcgagaactcagatggcgacatggtggtcagctgctcagccatcagcagcctgcccgacattgttttcaccatcaatggagtccagtaccccgtgccacccagtgcctacatcctgcagagcgaggggagctgcatcagtggctttcagggcatgaacctcccccccgaaagtacttcccccagtgggatgctcccacactggcagatgacacagcccctggagataccacctggatatgagagtaattcgccaccatcggcatcgcaactcctacccaggattgtgcaccgtgcgtccttagacacccggctccgcccacctcgctagggtgccctcagtctacggctcctatcttgcctgcaccagccacgtccgcgtcaaccccgaggattcttccacgtaccagtccaccgtcgagacagtctccatcaccatacggcaccggcagcatgacacagcatcctcggatacgactctgtccagattggagccatg

SEQ ID NO: 730106 - DNA, 1531 bp, Homo sapiens
tttgatatgattctatttattataagtcaaatagatataattcattatgagaatgaaatgaattattgttaatagttatgagattaacataaacaatcatcgtcgtgtattgccagaaaagttattaagatggtagcagttgttctcgtgtctctagcacatcccccttcagagaaactttcaaatagaaaatgaaactgggcatctctgctatgcaaatattggtggctgttgtcatattcctgcaacagcccttgacagtgggctgggctgggtgctgttctcactttaaatccggggagctgaggcttggaggaataaagggaacagccccaggacttgaacagagcccttgggtcacccatgtctctactgtagcttctaggccgtttcccctggggatccaatgtgtttcctgttgtccccaatcttttaaatttttttccattattagagttagtaccagcagccagggtggaactgcaattcgtgaagattgcatggcttgctttaaaagaatggtatctgtacgggtcccttaaccattcgaggggcaccatcgggcttgtgggtcatgctgggaagtggcccggctgcctgtgacagtttctcagccaggcagggactcttttccacacgatgacactggaactgaatgccacactccttctccttggaagaaaaaattgtgtgtaggacaaggactcaggacatgggtgtggaagaatctctgtggtacgagcccagcctggaagaactcttaggctgcgtggacgctgcccggccacggtgacggagctgttccaatgcctgcttcccgagacaggcccatgaaatcatgcaggcttgagcccggcttctagaaggagcacgcctctggccagggtggctggtggaaaccagtcctggccaagggagccccggcaggctgccaggtaggcagcaggcggcagggggttaatgtggggagcgggcaggggtggggtgggaagccagctggggaaatgggggctgcagggcccagccgacaggcacagacacaggggctctgtctgcttgcccgctgcctggcactgtgactaaccgccccactatgtgagtctgaagtcagcccttgtgtcgtcccctggcgtctgggagcacagccgaagaaccctttccagcagcccccctcattctggaacctgcagccccaacatccattctttcagctctcagggttgctgggggctgatgagccagtggaagtatccctttccctggccaggaagggccaccagcaaaaaagaagcagaaaaccagtctcccctactctgggtggggaagtggggggcacaggagcctactaaacctacgtgaccgccgtggtagctgctccacacgcagcaaaggagccattgaaatggggagaggccaaatcgaatatggaaaaaatggcaaaatatcccgttcacagtttcatacgagcaacacactgaaataggattttggaaatttatattagattaaaatgaattttagtactaaagtg

SEQ ID NO: 730107 - DNA, 387 bp, Homo sapiens
ccaggctggagtgcagtggcacgatctcggctcaccgcaacctctgcctcccgggttcaagcgattctcctgcctcaacctcctgagtagctggaattaactggtgcccgccaccatgcccagctaattttttgtatttattagagaccaggtttcaccatgttggtcgggttggtcttgaactcctgacctcaggtgatccacctgcctcggcctcccaaaatgctgggattacagccgtgagccaccacgcccagtctgcagcttgcttttttaagttactatgccctgggctcccttccatctgggtacacaggtatctactgcttccttatttagagtctacatagcacttcatggttatgaacacccttctgtcgtcttctc

SEQ ID NO: 730108 - DNA, 709 bp, Homo sapiens; identical to SEQ ID NO: 400486

SEQ ID NO: 730109 - DNA, 1248 bp, Homo sapiens; identical to SEQ ID NO: 400484

SEQ ID NO: 730110 - DNA, 390 bp, Homo sapiens
aataatgaagcaggcgaggacggagccttgctcaggacgacagaaggcttgcagcctgcctcaaacgcaactctaatttcagccacttcacttcttccccccgcgctcagacttgcctcaaaggaagctccatctgcccgaagctgcgaggctgccagggaatgtaggcaagtcgggggagccccacaaagctggcgaggtcgggaatcaccccagggattcgtaaggctaggtgttattaagggttgacaccattctcgaagaaggcagccaaaaaaaaagacaaaaaagttagtggaatctatcaggattcaaatcaacttttgcaagcaatatgcccatcatccttcctgagacactaaataaatataatggattcatccaaggaat

SEQ ID NO: 730111 - DNA, 577 bp, Homo sapiens
gccgggcgcggtggctcacgcctgtaatctcggcactctgggaggccgaggcgggcagatagcttgaggtcaggagttcgagaccagcctggccaacatggcgaaaccctgtctctactaaaaatgcaaaaattagccaggctgtcttaaaaaaaaaaaagagtccaaaccccaccccctacccccgctaatccccactcttccatcccatttgggtctgaacaggtcatcgccgcctcatttcctcggcggccaattgggggcgccagagagcagcggacgcccctccaccgactttccagcgcttgggaggcggagtgagacgccctgtaatcccagccctgcctttcgctggttgtgagctcttggccatgttactgacctctcagagcctcagcgctgggttaaaatagaactggtgtcctgataatgggtcgacgtgatcagtgagctttctccgcccgtgttctcctgagtgtcctgagagcagcccgtttctgcccctcttgcgattacaaagtcaagcccagagcctgacccacagtagtgctcaataaaggcttagaaaaagctcgga

SEQ ID NO: 730112 - DNA, 800 bp, Homo sapiens
gccgggcgcggtggctcacgcctgtaatctcggcactctgggaggccgaggcgggcagatagcttgaggtcaggagttcgagaccagcctggccaacatggcgaaaccctgtctctactaaaaatgcaaaaattagccaggctgtcttaaaaaaaaaaaagagtccaaaccccaccccctacccccgctaatccccactcttccatcccatttgggtctgaacaggtcatcgccgcctcatttcctcggcggccaattgggggcgccagagagcagcggacgcccctccaccgactttccagcgcttgggaggcggagtgagacgccctgtaatcccagccctgcctttcgctggttgtgagctcttggccatgttactgacctctcagagcctcagcgctgggttaaaatagaactggtgtcctgataatgggtgaggccccagtggaataacgcacgtgaaatacacatactgggcgtccacttaattaaggccctatcctcattgcctgccaagttcccaaaagagggatgggtttgggtgggaggttgagaggggaggttcccggcctttccagcagtgccccctctgccgtctgggcctggcagatgcgtgttgatcccagcgttttctccagcgtgcgctcgcttgctaggtcgacgtgatcagtgagctttctccgcccgtgttctcctgagtgtcctgagagcagcccgtttctgcccctcttgcgattacaaagtcaagcccagagcctgacccacagtagtgctcaataaaggcttagaaaaagctcgga

SEQ ID NO: 730113 - DNA, 715 bp, Homo sapiens
tcttccgatggcactggggtggctgaaggaacagacatctttgggtttcgtcagcctcctccaagactgctgcagtgcctacactttagacttcagaaggagactaaagacttctagaatttagaaggagatctgaagtctcctttctggagttacaacccaaaggatgttagcatttctcaggtcatcccactgcaaagcccagaaggcttggggctcccaggctgctctgaagccccactgtctgaccgcctcagggcttgctacgagggactggggcacggccaagctgactaggaacagctctcgtgctcctgagggacctggaggatgggcctgcctcccagccattgagctggattctgggataattcttaactcgaaataaggggaagcatccatcagggaatgctggcctttctagagccacgtagaaaacaattttctggttcttcaaacctcaaagagtccttggtccaaaaaacagaatgttttggcttcgggtgtcaaaaaaaaaattttcacgatgtcagaaatagtatgtttttaacaatagtaatagctttgtaaaaaaataaaaagctttaacagcgaggccataaacaatgaaatgaataaaaacggtggtcattcagtcaacggaacttatttgttttggaacacactgtttttcaactctgctgagtgttttgaaaaaatgaactattgtttttcc

SEQ ID NO: 730114 - DNA, 634 bp, Homo sapiens
tcttccgatggcactggggtggctgaaggaacagacatctttgggtttcgtcagcctcctccaagactgctgcagtgcctacactttagacttcagaaggagactaaagacttctagaatttagaaggagatctgaagtctcctttctggagttacaacccaaaggatgttagcatttctcaggtcatcccactgcaaagcccagaaggcttggggctcccaggctgctctgaagccccactgtctgaccgcctcagggcttgctacgagggactggggcacggccaagctgactaggaacagctctcgtgctcctgagggacctggaggatgggcctgcctcccagccattgagctggattctgggataattcttaactcgaaataaggggaagcatccatcagggaatgctggcctttctagagccacgtagaaaacaattttctggttcttcaaacctcaaagagtccttggtccaaaaaacagaatgttttggcttcgggtgtcaaaaaaaaaattttcacgatgtcagaaatagtatgtttttaacaatagtaatagctttgtaaaaaaataaaaagctttaacagcgaggccataaacaatgaaatgaataaaaacggtggtcattca

SEQ ID NO: 730115 - DNA, 535 bp, Homo sapiens
gctttcagacgagttcgggcgcgttcgaggtggtatggccgtagatcatacccctaagcgttcaatacaatcttttacttacttacacagtctccaacaagtctgcattaaaagaaaacctacccaaagtgtaactggactttaatcaatataaaacagtgattgtcgtttctcgttaaacgtaaaaagcaaaatggagttgtaaagagtttctttcccatttcaactccgacagccacgcgcgctttcagcggccggctacactgcgcggtcgcggggcccggcccaaagcccccgccctgcccggcgctgctgggagaggaagctccggggaccgagggcgggcaggcgggcagcctgggctccaccaggcccggccgggcgggggaaggggcacaggagactaccgggcgcgcttccggggactgcgcgggcggggtcgccgcttggggcgcggggcccgggctgggagtcaggtcaagggtcaggggccaggggcggctcggccacgagcagccggtggggcgcggccgca

SEQ ID NO: 730116 - DNA, 492 bp, Homo sapiens
ccaccttgacaggagcaaactcgagggggagggaggggagggcactgaagcacccacagtcctgaccctgctctgggagaatagagaccgtgcttagctcctgcttagaccttgttaaatgcccacattaaggttagccactacagaaatagaaacaggaagagagaaaatgcaggcaacagcacagagactgcaggcaaggagaagatgaggaccctgtgttgaaatgtatcagtaatgagaacacaagtaagtggattagaaacagtgaaacattcataggcgaacatctaaagcatcaagaaacaacgattagaactggaggcttttcacacgtgggtcagccaggcccgagaagctggtgtggggatatgaatatcaaacaacatgggtttttggtcaaaagccactgtcaaagatagttattttcctaagatgcaaaatgcataagccataaagaataaaatagaaaagttgctatattaaaatctt

SEQ ID NO: 730117 - DNA, 1021 bp, Homo sapiens
ggtaggcccagagcgaggacgggcccggactgggtagtggggatgtaccagggccgggtgcggcgggagacggcccgggaggcggaaggtcgcggacctgcccgacagaagagtagatgaggggagaccgaggacgcccgggtccggggagcttacgaggaggccaggatcgcggggtcttaagatatgaagacaatgggataactgaggctgattttgctgtgtggccattagacctagaaatattggtgtgattctggagttgattgctccacacgtttatttatttattttcctttttttccctcctcttcctcctcctctattctttaaaaacgtatggaaatgtatccggcaatgtttactgtaaaaaataatgtatggaaatgactacaatttgctaaaataaaaatcattgagcacttatgtgtgtcagacactatgctaggtagaggcagctctaatggcttccatttggccttcccgcttaatagccctcaccctaccagtgaggcagccaatgtgggagttctgccagctcctaagtatatctatgccaatgatgcattctggcactggggaaatgaccacaggatgagtccaggggcccactggacccactacaaaggtggaaaggctgatggcagcatgggtcgaggagaggatgctgctactactggggatggggaagctgttccttctggcaaaaaacgttcatcagagtttacaaactcagtgtccccgacttcatcagggtcctcccacaaatccacattccaagtttcagggtcccagtcttttcccatgaatgccctcactttaacagtagacacctggcaaagctgtacatgtatctttcattggggagaagattgctagcttgtcgtgctccttggagacattttgtagcataagctcttatatttaggtctatgatgcatatcaaattaattttcacatatggtgtgagtagttctgcttactggttatagtattttctgtatattctataggattttct

SEQ ID NO: 730118 - DNA, 647 bp, Homo sapiens
cctgttatttgcaggaccctgtcacccttggctaggccaggtatgttctgcaccgaaaatggccctgccctctgcattggatggctagctcttaggttggtttattttagcaaataagcgttacagggtaggcgaactggctgcatcagaaccacaattacccctgtgtctctgggtgggataaatggcggatggcattctggcagctcagccccacttatctcagaggttatagatctgaggtggtttagatccacccccaaatcacgaacattttacataagccgtgctagagttagcataaaagtctcacagaaaaatttggaaactgagaaatcctaacctattcccacaatcctgtgttcccatttttaggtcttaagatatgaagacaatgggataactgaggctgattttgctgtgtggccattagacctagaaatattggtgtgattctggagttgattgctccacacgtttatttatttattttcctttttttccctcctcttcctcctcctctattctttaaaaacgtatggaaatgtatccggcaatgtttactgtaaaaaataatgtatggaaatgactacaatttgctaaaataaaaatcattgagcacttatgtgtgtcagacactatgctag

SEQ ID NO: 730119 - DNA, 277 bp, Homo sapiens
aacacttaaagacataaatcacaggtgcaaagccatacctgggctcaaaaacctccaagagaacgcagcctcagacccacccaggggccaggggccaggctgtttgcgagaccagcccaggcgggacccaggcttgcacgggcaggtacacgacattcttgggcatacgcagcccgcctggccggagctgtgggagtcctcagccccaagacccagcaggcgtctgaggcctgcccactaaggaggaggagtcattgctgccatcattatcaccccc

SEQ ID NO: 730120 - DNA, 487 bp, Homo sapiens; identical to SEQ ID NO: 238435

SEQ ID NO: 730121 - DNA, 1464 bp, Homo sapiens
  misc_feature (131)..(131): n is a, c, g, or t
  misc_feature (322)..(322): n is a, c, g, or t
  misc_feature (373)..(373): n is a, c, g, or t
  misc_feature (471)..(471): n is a, c, g, or t
  misc_feature (1152)..(1152): n is a, c, g, or t
  misc_feature (1222)..(1222): n is a, c, g, or t
  misc_feature (1383)..(1383): n is a, c, g, or t
ccctgccaggcccggaagtaccaccagcttctcctgtggggtcttgcccttgaagtgccacttcccccagccccacctctggtcccttccagagggcacccttagccttgtaggtccctgggaagctggcncagcatcaaccagaagtgatgcctcagccaggccaccagtcgctccccgcctgggagctcagctttcctcagaaccaccccccctgtctgaagctctgtcctgggtcccaccagacttctgcccaccaggcctacctacagcatccacatggggcctcaggaagggccccgggggcccaggatgggcaggngcagggtttccaagcgcctggggctccattctcctctgtccacccagccanaccccttggcctcagcctgccctgtacccaagcttccctccccctctcctggggatcttaacggccttgttctctctccctggcacccacccccaggncgggtgatgccgccaagagagagggaggccgttgctaggtgatggcgccgccatacacacaccctttgtgctggggagtgacacccacccgtttctcagcagaacctgttgccacggtgactgaagcccccagctctgtctgtagaaacttcagatgggtgggggagcaggttggagaggggaccaaaggcaggcctgtcgtgctgaagctcttggggaccgtttcctcggcatttccccaactccttctccacccccctgccaggcccggaagtaccaccagcttcctaagggatgcaggaaggggccgggtgaactgaggtgaagtccagggcaggggagtcagacccctcaacatcctgtttaggggtcctcctccacaaagggtgccctccacctctccctcctgctggttggccggctcagagatgaagggggagagatggtggctccaaggctctgccaccgccacctcccaagcctgccaacgtgaatggcttgcagaatcagtcagcaggccagcggccttgggaaagagccactgtcctcgcagcctgggccagctgggggaacaatgtagggtttgttgcttaggggtcccaggcttgcgggggggttggcacatggtgggcagtggacttgagctgggatggtctgagggggcactgacacgctcacccnagggcagacttcagaccagccctcagatcctgatgccaggttacagggctgaggggagcctgaaatccantgggtctccctgctccacttgggagtcaccttctcatcacctatcctggaactgaatgcaattacttaaactcagtctcagcttcctcatctgtaaaatgggaataatctgtccttcacagaggattatggtcatttaatgagacaagatcttaagcattngctggtgcccgacaaaacacaaaagggcgcggccaaaatatcccaagggccagtaagctaccaaatctgtaaagggcctaa

SEQ ID NO: 730122 - DNA, 905 bp, Homo sapiens
  misc_feature (351)..(351): n is a, c, g, or t
  misc_feature (421)..(421): n is a, c, g, or t
cccacgcgtccggagaggtggagggcaccctttgtggaggaggacccctaaacagggtgccctccacctctccctcctgctggttggccggctcagagatgaagggggagagatggtggctccaaggctctgccaccgccacctcccaagcctgccaacgtgaatggcttgcagaatcagtcagcaggccagcggccttgggaaagagccactgtcctcgcagcctgggccagctgggggaacaatgtagggtttgttgcttaggggtcccaggcttgcgggggggttggcacatggtgggcagtggacttgagctgggatggtctgagggggcactgacacgctcacccnagggcagacttcagaccagccctcagatcctgatgccaggttacagggctgaggggagcctgaaatccantgggtctccctgctccacttgggagtcaccttctcatcacctatcctggaactgaatgcaattacttaaactcagtctcagcttcctcatctgtaaaatgggaataatctgtccttcacagaggattatggtcatttaatgagacaagatacataaagcactttgcatggtgaaaaaaaaaaaaaaaaaaaaaaaaaaaaaaataaaaaaaacagaggggggagcagacaagagagaaatcccacgagggccacacatataacagacaccaagattactgaagccaagggcgccatagagagagcacaaaaaagagagaagaggccgcgatacaccagcacgcgcacggcgacaccgcgaccacgggacctggccgagcacaaacctgcggctacaatctggaccacccaccagaactacagccccggacaacacaaacgggaaggggcacacaggcatcgggcaaaaggcagacaaaggaaag

SEQ ID NO: 730123 - DNA, 265 bp, Homo sapiens
ttccccagccaggccccgcagctggaccccggctccgtccagcctgggaaaggactccacggtttatgctgaagtggtggtggggtgggtgaacgctgcgcaatggaagggcatggccctgtgctaattgccccggggtgtggggctgtggaggcactgcgggggggatgtgctgtgtcagttgggcaatggcggccaactgtggcgtgcaggccttggagctgcccctccatggagctttaataaaggcactagccctgcaaaa

SEQ ID NO: 730124 - DNA, 1661 bp, Homo sapiens
ctgcactcggagcagccggccggccctgccggacccgggcaatgaggggcttagcacccgggccagcggctgtggagggtgtactgggtcccccagcagtgccagcccaccggcgctgcgctcgatttctcgccgggcctcagctgccttcccgtggggcagggctcgggacctgcagcccgccatgcctgagcctcccactccctcagtgggctcctgtgcggcccgagcctcctcgaggagcgccatcccctgctccacggcgcccagtcccatcaaccacccaagggctgaggagtgcgggcgcacggcgcgggactggcaggcagctccatctgcagccccgctgcgggatccactgggtgaagccaactgggctcctgagtctggtggggacgtggagaacctttatgtctagcccggggattgtaaatacaccaatcggcactcagtatctagctcaaggtttctcagggattataaacgcaccaatcagcgccctgtcaaaacagaccactaggctctaccaatcagcaggatgtgggtgggggccagataagaaaataaaagcaggctgcctgagacagcagtggcaacccgctccggtgtccttccatgctgtggaggctctgttgtttcgctctttctactgcttactcttcgggtccacactgcttttatgagctgtaacactcaccctgaaggtttgcaacttgactcctgaagccagcaagaccacgagccccagggaggaacgaacaactccagacgcgctgccttaagagctgtaacactcaccgagaaggtctgcagcttcactcctgagccagcgaggccacgaacccaccagaaggaagaaactctgaacacatccgaacatcagaaggaacaaactccagacgtgccaccttaagagctgttaacactcaccgcgagggtccgcggcttcatttttgaagtcagtgagaccaagaaccaaccaattcgggacacaataccaactctttcatgccaggagaagcctccttaaaaaatttcggtgattaacagcagcacatgggtcaaaatctcctgaaagttgagcaggggagctgtagaagaattcctccttttctcgcagatgaaatcttatgatatagcaggggttacctggccaagaaggaacacagaggagaacaaagaaaattcaaggaactaaattccttctccacctcaaccaccagcattgatactccatcacttatgtactgcatcaagccgtcctcagaggtgaggaaggtgctgtcaagactagaagctgtgtccctctctccattgcaagatgggacatagagaggagaaaagtggcagacagaagtcttaggtatgtctttatcagcagcatgaaaatggactaatacagggaccaatgattgcatctacctcatggactttttatgagaattgactgatttaataaatgtaaaagacttagaacactgcctcatctattgtaaacagtcaataaatattagtatcaattttcattgaatcctaatcagtataactataatgttacattcatgaataagacaaaggctgggacaaaataaatgagacacttcactcagacctcttcattgttttcccagttgtcatcctttgcacctagttctgtaatt

SEQ ID NO: 730125 - DNA, 889 bp, Homo sapiens
aggccgcctctcggaagcttggcctcgcaggagcggctctctatcctgtggggagcttcggccagtgggcctcgtgagctggggtcccgcctggggaatccgcatggcaccggtggtctgggggagaggctgggcctggcgcgggacgaggcgaagcgccggtggccgacggcttctgaggaattatcttttacttggcgccacacggggcggggcctcctgctatgctgtggagcgcagtgtcttccatcgttgcctcacagacccgctgctccgggaagtcgccacacattctcagggaacacccacatctgtcgcctgcgccctccgccgctcagctgtttgcttttgtttacgcattccggagacctgacccaccggagcactgggctgagcacaggagaaggggctttggagcgctctttgtactcaactccaagagcgagtgggaaactcaggactgggttgggtggatccctgcgtctctccctagccttcgtcctcttcccccgtttttccactttatgaaagtattgcctagagatgagggctgtccaactcaacacttccaacttcaagttcctacttcacctctaactccctagagttagaaaacaacgtacagcttagaggttcctttccctttttttcttgagaaactttattcagctttatctcaagacatcaccgcttccctctcctgtcaaccttaaatagtgaggttctggaaatatgattaaggatagagtttattccagcgtaaggcttgagggtagccacccaggagacaccagctccaaatggggttagcattccaaagtgaagaagttagggtttcgcctaggtggccagagacaaattttaacaggatttcatttcccctaagaga

SEQ ID NO: 730126 - DNA, 5035 bp, Homo sapiens; identical to SEQ ID NO: 211647

SEQ ID NO: 730127 - DNA, 1352 bp, Homo sapiens; identical to SEQ ID NO: 211648

SEQ ID NO: 730128 - DNA, 533 bp, Homo sapiens; identical to SEQ ID NO: 243231

SEQ ID NO: 730129 - DNA, 783 bp, Homo sapiens; identical to SEQ ID NO: 140790

SEQ ID NO: 730130 - DNA, 619 bp, Homo sapiens
tccaaccagccgcaaccatgcccaggaagaaggcggcggtggcggcctgggaggagctgagctcgggcaacggcactgcccacgccagggcccaggaaacgtggcggccccgcagccggaagcgcgagcctcccgagcgctgcagtagcagcagtggtggcagcagcagcagcggcgacgaggacggcctggagctcgacggggcccccggcaggggcaagcgcgcggcgcagcctgtggcagcaggcaaggtgggcggtgcggctgtggtggtcgccgaacccgagcacaccaagaacacgtctctgcgacacagggttggggtagggttacagattaacagcatctcaaggcagaagaatttttcttagtacagaacaaaatagagtctcttatgtctacttctttctacatagacacagtaacagcctgatctctttcgtttccccacaaatccatatagtatttgagtgtgataatgtaaaaatcagtattcatttctaaatctaagtactgctttgagaattttgttggtaattccagttgctgctgcttcagcagaaggaagcttctccaaattaaaataaattaaaaacttgctaaaaactatgttgactca

SEQ ID NO: 730131 - DNA, 460 bp, Homo sapiens
aactgtcattgtccctgtgtaagcatttccagaaggtgctccctggtgaggctgtgtgggcagagaagcagggaggcctggctccccagaagcaggtcagctgtcaggcaggtggccaggactcagccagaagcttctgcagcaaactggataccgcctcagaggccaggtcctccacggcaaagtactccagctcagggccagggcctccacagcagagtactgccggcaaggggctcggacagcgcgtctactccctcgcggtcccggaggctggagtccaagatctcggtgccacagggctggtttatcccgagacctctctcctgcctggcagacgccagcttctcgctgtgtctgtgtcttcatctcttcttcatataaggacaccagtccatgggaccagggcccaccctaatggtctccatttaaataaatacctctttaaggaccccatctc

SEQ ID NO: 730132 - DNA, 791 bp, Homo sapiens
ttccctttcggccgtgggggagggggctcgtgtcccccccaacccagcccggaggccgcgtccgcccgcgcccgctctggcccccgcggagccgcgcaacttcccgggagcccgggccaaagtgagcgcaaagtgctgcccaagttgccgggatggagctgcagagccggcccgaggcgctcgccgtggaactcgcgcgccaccagaacggcgacctcaagaagcagctccacgaaaggcagccgcggatcgccgcgctcagcgacaaacaaatcgcgggcagaacctctcatctgtgcacaagggacccagcacggggctttgggaacgatcactgcagtgcctgtcacgggtcctcaggtcagctccttgcagaggttggccgggcaaggagcggcagtgctacctcaggttaggccaaagactctgattccagacagcctccccagtgccccgggccgggaccggccacccaagcagcccccaacattccagaaggccaccgtggtcagcgtcaagaaccccagcccagccctccccaccgccaacaacactgtcagccatgtgccagcgcccggcagccagccccaggccctcgccgagcccgccgccctcgcctctccgctgagcagtgcgggggtggcctacgccatcatctccacctcccccagcaatgccgccgccatggcccccagcaccgccgtgtctgtggtcagtgacagcatcaaagtccagcccctcctcatcagtgctgacaacaaggtgagtgcccaccagcaggctccggaaag

SEQ ID NO: 730133 - DNA, 745 bp, Homo sapiens
ttccctttcggccgtgggggagggggctcgtgtcccccccaacccagcccggaggccgcgtccgcccgcgcccgctctggcccccgcggagccgcgcaacttcccgggagcccgggccaaagtgagcgcaaagtgctgcccaagttgccgggatggagctgcagagccggcccgaggcgctcgccgtggaactcgcgcgccaccagaacggcgacctcaagaagcagctccacgaaaggcagccgcggatcgccgcgctcagcgacaaacaagctttgggaacgatcactgcagtgcctgtcacgggtcctcaggtcagctccttgcagaggttggccgggcaaggagcggcagtgctacctcaggttaggccaaagactctgattccagacagcctccccagtgccccgggccgggaccggccacccaagcagcccccaacattccagaaggccaccgtggtcagcgtcaagaaccccagcccagccctccccaccgccaacaacactgtcagccatgtgccagcgcccggcagccagccccaggccctcgccgagcccgccgccctcgcctctccgctgagcagtgcgggggtggcctacgccatcatctccacctcccccagcaatgccgccgccatggcccccagcaccgccgtgtctgtggtcagtgacagcatcaaagtccagcccctcctcatcagtgctgacaacaaggtgagtgcccaccagcaggctccggaaag

SEQ ID NO: 730134 - DNA, 1150 bp, Homo sapiens; identical to SEQ ID NO: 443687

SEQ ID NO: 730135 - DNA, 920 bp, Homo sapiens
gctcttggctttcggcttggaggaggccaaggtgcaacttccttcggtcgtcccgaatccgggttcatccgacaccagccgcctccaccatgccgccgaagttcgaccccaacgagatcaaagtcgtatacctgaggtgcaccggaggtgaagtcggtgccacttctgccctggcccccaagatcggccccctgggtctgtctccaaaaaaagttggtgatgacattgccaaggcaacgggtgactggaagggcctgaggattacagtgaaactgaccattcagaacagacaggcccagattgaggtggtgccttctgcctctgccctgatcatcaaagccctcaaggaaccaccaagagacagaaagaaacagaaaaacattaaacacagtgggaatatcacttttgatgagattgtcaacattgctcgacagatgcggcaccgatccttagccagagaactctctggaaccattaaagagatcctggggactgcccagtcagtgggctgtaatgttgatggccgccatcctcatgacatcatcgatgacatcaacagtggtgctgtggaatgcccagccagttaagcacaaaggaaaacatttcaataaaggatcatttgacaactggaaaaaaaaaaaaaaaaaaaaaaaaaaaaaaaaaaaacaacccgcagcggaaaaagctgccggcgccaccacaaatgactgataacatcggcccacggcgcaacagagtcgacggcaccccactttgtttacaagggagcaacgcgccggccccaaagagagcgagaaaaatcgaaaccggaacctgaaagaccaaggccacagcagagaccgaacgtagcccaacagccgttgcagcgaacaacacaggaaaaccacgcaaagcacagacagaacaacgaacacgacagc

SEQ ID NO: 730136 - DNA, 1869 bp, Homo sapiens
ggacccgcagcgactccacagggactgcgctcccttgcccctagcgctcccgcgctgctgctccagccgcccggcagctctgaggatggagaggagggcgcggagctcctccagggagtcccgcgggcgaggcggcaggactccgcacaaggagaacaagagggcaaaggccgagaggagcggcgggggccgcgggcgccaggaggctgggcccgagccgtcgggctccggacgggcggggaccccgggggagccccgagcgcccgccgccacggtggtggacgtggatgaggtccgaggctccggcgaggagggcaccgaggtggtggcgctgttggagagcgagcggcccgaggaaggtaccaaatcctccggcttaggggcctgtgagtggcttcttgtcctcatttccctgctcttcatcatcatgaccttccctttttccatctggttctgcgtaaaggttgtacaagagtatgaaagagtaattatattccgactgggacatctgcttcctggaagagccaaaggccctggtcttttcttttttttgccctgcctggatacctaccacaaggttgaccttcgtctccaaactctggagataccttttcatgagatcgtgaccaaagacatgtttataatggagatagatgccatttgctactaccgaatggaaaatgcctctcttctcctaagcagtcttgctcatgtatctaaagctgtgcaattccttgtgcaaaccactatgaagcgtctcctagcacatcgatccctcactgaaattcttctagagaggaagagcatcgcccaagatgcaaaggttgccttggattcagtgacctgtatttggggaatcaaagtggagagaatagaaattaaagatgtgaggttgccagctgggcttcagcactcactggctgtggaggctgaagcgcaaagacaagccaaagtgcggatgattgctgcagaagcggaaaaggctgcttctgagtccctgaggatggcagctgagattctgtcaggcacccctgctgctgttcagcttcgatacctccacacccttcagtctctgtccacagagaagccttccactgtggttttacctttgccatttgacctactgaattgcctgtcttctcccagcaacagaactcagggaagcctccccttcccaagtccttccaaacctgttgagccactaaatcctaaaaagaaagactctcccatgttataggaaggatggggcataatgtgactgtaaaggggcctgccatagaaaagtcacatccctgagggagacactctgtcctcattccctgcccttcctttggttgccatatggaatggccatggaatgcacgaagtcacaatgcaccatccatgagaagacagtgaaatgatgtaatgacagagaaggcagacaacatgtttccgtgactcatctagtcagagcaattatgggaaacagctttggtcaacattctactttggaaagaattttgagtctagatgtggttaaattttgacttctgggaacttggttcagatgtccctttcactgtatgtcctctgacccctttggcaaggttgccacagctcccacagcccttcctacaagcacctatcattgggcttgtcacactctattgctcttctgtcccgaagatgcagtcttctctccaatgatactaccaagtcttagttttcctcaaccacactcaatctttttgctccaccctgaattcctcacacctaaccctgatagttacctaaagtgacacttaaatgtttcagagtgaatgcaaaaaagagagatgtacttggagtcggatatacaatttatccctaattaaagcatttaaaagg

SEQ ID NO: 730137 - DNA, 603 bp, Homo sapiens
ggacccgcagcgactccacagggactgcgctcccttgcccctagcgctcccgcgctgctgctccagccgcccggcagctctgaggatggagaggagggcgcggagctcctccagggagtcccgcgggcgaggcggcaggactccgcacaaggagaacaagagggcaaaggccgagaggagcggcgggggccgcgggcgccaggaggctgggcccgagccgtcgggctccggacgggcggggaccccgggggagccccgagcgcccgccgccacggtggtggacgtggatgaggtccgaggctccggcgaggagggcaccgaggtggtggcgctgttggagagcgagcggcccgaggaaggtaccaaatcctccggcttaggggcctgtgagtggcttcttgtcctcatttccctgctcttcatcatcatgaccttccctttttccatctggttctgcgtaaaggttgtacaagagtatgaaagagtaattatattccgactgggacatctgcttcctggaagagccaaaggccctggctggcctcgaactcctgacttcaagtgatccacccgccttggcctcccaaagtgctgggattacag

SEQ ID NO: 730138 - DNA, 1926 bp, Homo sapiens
ggacccgcagcgactccacagggactgcgctcccttgcccctagcgctcccgcgctgctgctccagccgcccggcagctctgaggatggagaggagggcgcggagctcctccagggagtcccgcgggcgaggcggcaggactccgcacaaggagaacaagagggcaaaggccgagaggagcggcgggggccgcgggcgccaggaggctgggcccgagccgtcgggctccggacgggcggggaccccgggggagccccgagcgcccgccgccacggtggtggacgtggatgaggtccgaggctccggcgaggagggcaccgaggtggtggcgctgttggagagcgagcggcccgaggaaggtaccaaatcctccggcttaggggcctgtgagtggcttcttgtcctcatttccctgctcttcatcatcatgaccttccctttttccatctggttctgcgtaaaggttgtacaagagtatgaaagagtaattatattccgactgggacatctgcttcctggaagagccaaaggccctggtcttttcttttttttgccctgcctggatacctaccacaaggttgaccttcgtctccaaactctggagataccttttcatgagatcgtgaccaaagacatgtttataatggagatagatgccatttgctactaccgaatggaaaatgcctctcttctcctaagcagtcttgctcatgtatctaaagctgtgcaattccttgtgcaaaccactatgaagcgtctcctagcacatcgatccctcactgaaattcttctagagaggaagagcatcgcccaagatgcaaaggttgccttggattcagtgacctgtatttggggaatcaaagtggagagaatagaaattaaagatgtgaggttgccagctgggcttcagcactcactggctgtggaggctgaagcgcaaagacaagccaaagtgcggatgattgctgcagaagcggaaaaggctgcttctgagtccctgaggatggcagctgagattctgtcaggcacccctgctgctgttcagcttcgatacctccacacccttcagtctctgtccacagagaagccttccactgtggttttacctttgccatttgacctactgaattgcctgtcttctcccagcaacagaactcagggaagcctccccttcccaagtccttccaaacctgttgagccactaaatcctaaaaagaaagactctcccatgttataggaaggatggggcataatgtgactgtaaaggggcctgccatagaaaagtcacatccctgagggagacactctgtcctcattccctgcccttcctttggttgccatatggaatggccatggaatgcacgaagtcacaatgcaccatccatgagaagacagtgaaatgatgtaatgacagagaaggcagacaacatgtttccgtgactcatctagtcagagcaattatgggaaacagctttggtcaacattctactttggaaagaattttgagtctagatgtggttaaattttgacttctgggaacttggttcagatgtccctttcactgtatgtcctctgacccctttggcaaggttgccacagctcccacagcccttcctacaagcacctatcattgggcttgtcacactctattgctcttctgtcccgaagatgcagtcttctctccaatgatactaccaagtcttagttttcctcaaccacactcaatctttttgctccaccctgaattcctcacacctaaccctgatagttacctaaagtgacacttaaatgtttcagagtgaatgcaaaaaagagagatgtacttggagtcggatatacaatttatccctaattaaagcatttaaaaggaattctttttgtggagattccttttttaaataaagaaataaataaaaggacaaaaac

SEQ ID NO: 730139 - DNA, 659 bp, Homo sapiens
cagtgaagaaatatatatgagatactccagccaaaaatgcacacaagtcaaatcaaaatgaaaagactcagaaccatcatcaacaccaagatcaaaagggcaagaatccttcaagaaacaggaaaaaactgctaaaacaccgaaaggacctagttctgtagaagatgttagagcagaaatgcaagcaaatatagaaaaaggtgattcttttcccagagaggaagcaaagttcatcaattatgtgaagaattgcttctggatgactgaccaggaggctattcccgatctctggcagtggaggaagtctctttaagaaaatcatttaaacaatttgttaaaaattttccatcttatttcattcctgtaacaggtgatatctggctgtcctttttataatgcagagtgagaactttccctaccgtgtttgataaatgttgtccaggttctattgccaagaatgtgttgtccaaaatgcctgtttagtttttaaagatggaactccaccctttgcttggttttaagtatgtatggaatgttatgataggacatagtagtagcggtggtcagacatggaaatggtggggagacaaaaatatacatgtgaaataaaactcagtattttaataaagtagcacggtttctattgacttaaaaaaaaa

SEQ ID NO: 730140 - DNA, 262 bp, Homo sapiens
gaatcaaggttttctaattatttttctgtcatacataagtagcataggagacaaaagcccagagttaacttcctccaggtgcatttgatagatgtttgaatatctgatcattgctatcctaatttttaaaaatgcacataagtgttgcaaatactaatttcgtgtagttaaaatgtaacccttctcctacacgcatatcttaatgtgcctaaagtgaatttttaaactctaattattaaactcagggcatcttctggaattg

SEQ ID NO: 730141 - DNA, 627 bp, Homo sapiens
cctgtctgggagcacttatagggctcacagctggcgttctgcggctggtagagtttgtgcacctctagtgcctcacagactttgataagcaggaactacgtggagagctagtgaaaatgcagattctgattcagaagttctggagtggggcctgagactcagcatttctagacagctccagggagacgctgatgctactgatccaagacacactgtgagtagccagaaagtaatgaggggttttctgctctggaattcctgcttatttgagttgccactgctccccaggaacttctgcttgtctttgtaccccacagtgcctagattcctcaactctaaccaaagcttttggtttttgtttttttttttttggcagagtgttagctctggcctcctcctcttcctgcgagcctcaggccttttccccaggtccgccagcgctgcctccgctgttgcctccgctccccgcagcctcggcgcccccaggccccggcgcctcccggcgcacaggccgctactcagtcgtcgcctcctccccggaggccgccccgcgtctggtcgactggctccccggttgcccttcgaccatctctcccagcacacgcggggatgacaaggagcggccgc

SEQ ID NO: 730142 - DNA, 899 bp, Homo sapiens
gcggccgccggcaactcgtccgtcttgataaccatggtggcgggagcgggcgtccgcctcggctgtccgcgccgcccgccgcgccactaacccaagtgccctgcgcgccgcggctgctgagggaaggacggagtcaccggcccacgtggtgcgcgccgtggcctttgaccccgccgccgtttccctgccccaccctcgcgcccggcccagcccacggcggcccgcgagggacaaaacgcgccgcgcctggttccccgcccacggacgcggtgactttccagaacgtcttaaaggcaacgcactctgactcaaggcccagggaggctgggcgccctcgcggggcggggcctcggggagactccctgctgctcgctgcccgtcgggcgggcactgtgaccttgggtggagactggtctggttctgccatggctaatcctcccctctccaaggatcccctgttttctcttgcagatttgctaaatgaccgcgcagtctgtcatctgcggtgttcgcgtgaccctcagcgccctccccacccggcaggccctttcccgccgaatgggtgcggctggattattgagggagtggagggtcgcttagggcacgggcacgagaggcgagggcgagacgtggctaatggggatcaagagtcagaatggacccgccaaactttgccccgagccagaacgggctccctacccgcgtcctcgacccatgggtcctcacctccaggctggtgtcctcattttacagtggaggaggccgagaccaaggggcttggcggggacggaacggtgaggtcagagaatgctgcagaggggacattgggaccaggtcttgcagtgagttgaagtgctccaggcagagagcgccggtgggtctttcctggccaggccgca

SEQ ID NO: 730143 - DNA, 492 bp, Homo sapiens
agcacgaaaagcgggccaacgccgcctctggggacgccatccgggcgagggtgggatgccgcgccaccgcccgagcgtgcccgggggctcccagcgccatcaccacgcaggtgcccgggggcccctccgcggagccggctgccgcccggctgcaatactcagcctccgagggactgggcgctcctgaggagcgggaggacgacggagcagcgcccggtcctggagcacaacaggaatcccaggaccaaacccatgtgacgcggccacgccccaacgcccggcgggggccctctgctgcccaatccccggatccctggttctcatggcaaccctgaagaaccccttgttccctccactgcctcctctcctcccccacagcccccccgcctgatgggcaaggacgcgcacactggccactctgacgatgccgaaagccctccatgtctacccgctacgccgcattcgcagacaggcgggggacatcgcggccgc

SEQ ID NO: 730144 - DNA, 1016 bp, Homo sapiens
gctttcataagcccttcaggcgatactgatgtaaactaaagcttaaaaaccaccgttttactgtgacttcatgaagaatataattgcaatatcacctaaatttttatcctggctgggatggggcagattcttactatggacaatttctggaacttacagtatgaagagcagatgaggagtttgagacaaagaaaaaattgtacagggagtttagtgaattttccatcaggttggccattactttctttctctaaagtctcaggatgtctggaagcaaggaaagacaaaagacttgaagcaccgggtgcatgctgtgtgtcacaagtgaggtggagagttggctgtggaaggtacagcaattcctctggaattaaatgaccgaccaacacagtaccaagaggatgaagagaagatgttttgcgttgctacgtgaatcagtggatgactcatatttcacttgcatatgaaatataaggcagttaacatcttgtttgtggcttaagcaaggacattaatcctactagatgaaggggaagttggttctgttgtcttaagggatgcccccttgtgattttggtcaactgaatgaaaaagaaaagatagccttggacttttttttcatgggaggtttggaggtcaagcatgtagaaggaaaaggctgtagtcatgaatatagaactgtctgctctccaccttttcctcactctacatttagtcatcacactgaacaggatgtggcctgctgacagtgagtagctgaagtgcctgtttggtaagtaggttagcattcatcatgaactctgaaagccatttcagagtttggctgctgctctgaccctgctgtggtacaaaaaacatggatttttttttttttaactggagtaataccaaattccctttagaagcttgaagtttgatactattgctttccccattataaggattatacagtattaattaattataaggcccaaagtttgttttggcaaataaagtattattctctatcatcatct

SEQ ID NO: 730145 - DNA, 2174 bp, Homo sapiens
  misc_feature (512)..(512): n is a, c, g, or t
  misc_feature (656)..(656): n is a, c, g, or t
gccgaccagttccgcccgggcgcgaggaccggccgcaggaagcttgctgcaacaactttatttggaggggttgcatgccctgtcgccaccccgacgctgcctgggtgcctgaagtgctgctgcctgctgtagtgtgtccccctgtgtgcctgatgatgggtgtgccctggagtggaagatgcgctggtgtggtggctgcccctggcccctgatgccctgtggtgctatgtgccatgtgttgacctgtgctgtgcgttgtgtgtgctgtgcccctgtgctgtgctgacactgacactgtgctgtgtgacaatggctggtgctgtgcgtaccctgctgctgctggcctgagggacgactcggcctcgccccccggtgccgccagcgacgccgagcctgggctgacgaggagcggcctggggcttgcaggtgtgacttgcgtggtgttgcggggacaagtcgagctggcaagcattactggtgtcttcacctgcgatgggctgcaagagcttttncaagcgaagcatccgccgcaacctcagctacacctgccggtccaaccgtgactgccagatcgaccagcaccaccggaaccagtgccagtactgccgtctcaagaagtgcttccgggtgggcatgaggaaggaggcggtgcagcngcggccgcatcccgcactcgctgcctggtgcctgtggccgcctcctcgggcagaccccctgggctcggcagctggcggcatgtggcagagctggctggagacctcttccctggtggcagccgtgtgtccgaacttgatcgcggcagcgtgctgcgcgctgagccctaccctgcggcgtgccggacgctatcgcggcgcagggggcgggacgcgcgcagtggacgcgggatgacttgtggcacttcggagcaaccgatgtagccgaggactagagcagagagacagggattgcatcgtttcaggcacacccatgggaagttggagacagacagcacaacgacagacaccctttacttttccccccagagaccttggcccggtgtttgggacgacgaaagcgcaaagaggttgagactgcccttgtacattgcacagaccacattgtaaggacttttgaggaaaggacaggaaggacattcatataccagatggccattggaaaacacagaccgaggagagaccgagtaggctggtagctgactattggagacccccacatttgagcaaaacacgccgaaggagtggacccaggtcattaacatatgaggaccccaggacacagagacactggggatacattatccccaaacaggaccagcgggaagtggcaggcagttaaatgtagagagcaccaggcagcaggacaggacaagtacacggccgctggatggaggactgtttttgtccaagattgggggcgaaccacaagagggggagttgacggagcaagggccaccattagtccacccaagaggggacacgacacgacagcggattaggggaacacacaagcggtcacatttggtgggggcaccagggccgccatatggccaacggagggtcacgaaccattgcagtagtagcacggaaaggcttacgttagcggaattggccacatcgaacaggtggcaccaaaatccggcaaggcagattcattatgcaaacaggacccgcccgggaaacaggagcccaaagatgtggggccgccgttccggttcaaaggaagacccacgagggcgcaccaagcagagaattttagaaaggcaaagcaccattgacacaggacggaagcgagaacagggcagggcgaagagggagttggagaagcccaataacagaccacaggacagagattaatactgtatagcaagtagagagacatgcaaacaggaatcaccacactggagtcacaccaaaagaagccgacccgacagacgggcaaataaaccagaagtagctaggacacgtaggcggatagcaatggcaagagagaatagtacaccacaggtgacacaccatgtaagcgaacagcacagagagatatacacacagtatgaagcaattacaccaattagcagaatacatataccacgcacagcgaaggtgagaacaaataagaagacaggagcggagccataggcaattggagagaggacaatcgaacagggcacaccaaaa

SEQ ID NO: 730146 - DNA, 1270 bp, Homo sapiens; identical to SEQ ID NO: 722412

SEQ ID NO: 730147 - DNA, 518 bp, Homo sapiens; identical to SEQ ID NO: 202322

SEQ ID NO: 730148 - DNA, 922 bp, Homo sapiens
gcacgagctgacaattcccttttgaatgtcaactccctgataacagctatcttgtttgtcttgttctgattgtatccgtcataccttagcatctggcatattgtaagctctcatatattcagtgaataattaaaccatgccctgatatgatcaggctctggccttgctatcctctcaacttcccctctaaatcctataaactagtgttactcaaagtgtggcccatgggcctgtagcatcagcagcacctagaagcttgttagaagtaggttcttgggccccatactagacttcctgaatcagagtttctggatgtatggcctaggaacatggatttaagcaacctgtattggccattcttatgtatgctgaggtccgaggaccactgccatgatcatggaaatctcatccacatcaatttttgccttctaaaaaagcctgatctttgttgcagtgtggagtttgctacacatgcttggctgcatggggccctggattatccacaggaacttgattctagaaataccaaagcactgttgtttcacagcagcccgacgagtaggccctgcatggaatgaggcttttgctatgtcttcctgcatggtcacctctagtcatttgagagcttccattgcatgcagatcacacatagtaggagatgccatcaatttatcaattatttcaagcacactttaaattcatcttccttctgtctacctgagaattgctaatgttatattattcactgaccacaaggaaaatgagaaaattggttgctatcatttcactatctatagaagacaaagcactgtctttatttttacagtagaagtgctctaaagaatttctgtgtcaacttgagatacttttcacaaagacaagaagcattttacttttctgagagaaaagagaataatttaaa

SEQ ID NO: 730149 - DNA, 975 bp, Homo sapiens
gcacgagctgacaattcccttttgaatgtcaactccctgataacagctatcttgtttgtcttgttctgattgtatccgtcataccttagcatctggcatattgtaagctctcatatattcagtgaataattaaaccatgccctgatatgatcaggctctggccttgctatcctctcaacttcccctctaaatcctataaactagtgttactcaaagtgtggcccatgggcctgtagcatcagcagcacctagaagcttgttagaagtaggttcttgggccccatactagacttcctgaatcagagtttctggatgtatggcctaggaacatggatttaagcaacctgtattggccattcttatgtatgctgaggtccgaggaccactgccatgatcatggaaatctcatccacatcaatttttgccttctaaaaaagcgtgtacgtttatgggacaagaatgtcatgtcatctgtgtagctccccctgaacctgatctttgttgcagtgtggagtttgctacacatgcttggctgcatggggccctggattatccacaggaacttgattctagaaataccaaagcactgttgtttcacagcagcccgacgagtaggccctgcatggaatgaggcttttgctatgtcttcctgcatggtcacctctagtcatttgagagcttccattgcatgcagatcacacatagtaggagatgccatcaatttatcaattatttcaagcacactttaaattcatcttccttctgtctacctgagaattgctaatgttatattattcactgaccacaaggaaaatgagaaaattggttgctatcatttcactatctatagaagacaaagcactgtctttatttttacagtagaagtgctctaaagaatttctgtgtcaacttgagatacttttcacaaagacaagaagcattttacttttctgagagaaaagagaataatttaaa

SEQ ID NO: 730150 - DNA, 924 bp, Homo sapiens
gcacgagctgacaattcccttttgaatgtcaactccctgataacagctatcttgtttgtcttgttctgattgtatccgtcataccatgccctgatatgatcaggctctggccttgctatcctctcaacttcccctctaaatcctataaactagtgttactcaaagtgtggcccatgggcctgtagcatcagcagcacctagaagcttgttagaagtaggttcttgggccccatactagacttcctgaatcagagtttctggatgtatggcctaggaacatggatttaagcaacctgtattggccattcttatgtatgctgaggtccgaggaccactgccatgatcatggaaatctcatccacatcaatttttgccttctaaaaaagcgtgtacgtttatgggacaagaatgtcatgtcatctgtgtagctccccctgaacctgatctttgttgcagtgtggagtttgctacacatgcttggctgcatggggccctggattatccacaggaacttgattctagaaataccaaagcactgttgtttcacagcagcccgacgagtaggccctgcatggaatgaggcttttgctatgtcttcctgcatggtcacctctagtcatttgagagcttccattgcatgcagatcacacatagtaggagatgccatcaatttatcaattatttcaagcacactttaaattcatcttccttctgtctacctgagaattgctaatgttatattattcactgaccacaaggaaaatgagaaaattggttgctatcatttcactatctatagaagacaaagcactgtctttatttttacagtagaagtgctctaaagaatttctgtgtcaacttgagatacttttcacaaagacaagaagcattttacttttctgagagaaaagagaataatttaaa

SEQ ID NO: 730151 - DNA, 501 bp, Homo sapiens
tggcacctgcagttaaaaccctaacaatatacattgtcattttacaaaataaaattaatagcttcacttctacttcattttaaaataagatcatctgcactctgaggcagcattcgtctgcccttgcaacgtgtaactgtcagagtggggtactacagaggactacctgcattatattccctcaaaaacggttttccactcaggaaagttattttcaattgggaaatctgttctgcccattcaaaaagtcttacagccactgatccatggccacagactgcactggaataacctcagaaataataatattagcagcttctatctattgtctactatgtgccaagaaataaacagatagtaaacaactgaattcttaacagcaatccttaaaagtaagtgatattatttctgtcatttctctcaggggtctacaaattatggcgtggacctaatctgaccagcctcctgatttataaataaagctttattggaacagtaaaa

SEQ ID NO: 730152 - DNA, 1010 bp, Homo sapiens
gggcgggatgagaaaggtgctggagctgttggagggacgccaggaggtggcaactaccaggggtgtgaggggctgacctgggatggaatcctgccacccggactcaggaagaaaatcctgaggtggcgacctgcagactgggctgggagatggagagcccgctcacgcccacccgaccgcctaccaccagtgttcccggatgcatgggctccagcgcctgccctttcgccatttcctcccaactggcattaaatcctggtgtggtagatatcagtgattaagagtctaggcagccacgtgttctattgccgccagtccgcaggaaacgcaagtgatcgttttgctgcgttaactctatgggcgcccaaatcttaggaatccattccacgccaccccgaaaacagcgcttgacccttctggactgccacgcaggaggcgatcaatgtttttctttctttatttttttaagagacaaggtctcgccctgtcacctaggctggagcacaatgaggctcactacagcctggaactcccggacgcaagtgatcctcctcagcctccggagtagctgagaacctcaggcgtgcgccaccatgcctggcatcaatcaatgtctttcaaaataaaggctgttaaacgtagtataggaaagaagctttttaatggtaggttctaccagacgtgtttgtttgatttttaggtttggttaatgcattgtttcccgtacaatctcaacccgcggaaaccccgaaactctagaattcgtgccggtctctttcgcttccaggtcatccccggggcaacggccgccgctctaattcttgtcagaacctccaggccagtttcagcaacgtgcaggcagaagctggcccctcggtgggatgcgagggcgtgtggagcgcggggaggagagccccacaggcctttcctgggcacccgcggtggatgggaaggctccttcgggcgcctttcagggaagttgtttggctgagggaaggtggtccgtcacg

SEQ ID NO: 730153 - DNA, 537 bp, Homo sapiens
gtcatttttagaatgttcctagtccatccaagaaaggctaaaaaatgttctgtgtgattctggacttaagaagtctttttcactgaattctggccctagatgctcactcaactagtaaccataatgccctgtttttcccaaatgctgaaatggaacatttactgcattggcaatgttttctagtgggattggttacagaaactgtcattcattcttactgtgcaatattacacagccataattaatgatgtagttaaaaacatttgatggcatataatatatatatacattgaatacattgtaagtaagaaaatatacaggttagaaaactgtaggtatagcatattgtaaaaagaaaatatatatacacgcatagcgaaaaatgtcaggaagaatataccaaaatgttaacgattatctttaagtagtatcatcttttttacttcttgtctttctgtttctcctaaaacttctaaaataaaaaggtattatttttcatgtaaaagtttaataaacttatgtgtccatttaaaaata

SEQ ID NO: 730154 - DNA, 1160 bp, Homo sapiens
  misc_feature (151)..(151): n is a, c, g, or t
  misc_feature (153)..(153): n is a, c, g, or t
  misc_feature (155)..(155): n is a, c, g, or t
  misc_feature (157)..(157): n is a, c, g, or t
  misc_feature (159)..(159): n is a, c, g, or t
  misc_feature (161)..(161): n is a, c, g, or t
  misc_feature (164)..(165): n is a, c, g, or t
  misc_feature (258)..(258): n is a, c, g, or t
  misc_feature (535)..(537): n is a, c, g, or t
  misc_feature (540)..(540): n is a, c, g, or t
  misc_feature (542)..(542): n is a, c, g, or t
cccactcgaatgggtaaaatattggcaaggatgttgatagtaagaaaaataaatgtaaacatgccccgatttacggttttccttgtcaaacatacccatattttcatggctttgtggactttggtctctatcatttaagaatgtcatagantnanantntntgnnataggaagggatattagagttcatctataataatgtttctcaaactgcttccttccagttttgttacctcaaagacttattttttctctctgncctctttcattatgtgtaaatgagtaaaatgggtatgatgccaaaagtttagtattgttacaggtattatatctggaaataaatgttttataaaactgtaaaaactctagtagttgggagctgtggcttatacctgtaatcccagagctttgagaggccaaggcaggaggattgcttgaggccaggactgagagatcagcctgggcaacatagtgagacccccatctctacaaaaaatttagaaaattagccagtcttagtggcatgggccaatagnnntancnactccataggccgaggcaggaggatcctttaagctcaagggtaagcagctgtagtgagctttgattgtgccactggcactccagcctgagcagaccgtgagacttcatctcttttttttttttaaaaaggttctggtaattacctatgacctcccagggtgatatttcaacccgtttgccttcacccttattccagaaatactaaactttagaatgatttggagggcaattcatctggatttcctctcctacaggtaaatatttttaagttgtaaaggtgggagctttatattatgaatatttcgcagggttttttccactcgcgctcctttaatggccaaccaatggaagtggtagtatctcctcttcctgtaataagggaggggattaggccatgattattttacctaggatttctctaattaggacctgggggtgactctaggccattgctaccaaatgagtttctttaccattattaatttgttgagaggcggggaaagcataagaattgaaaggaaacattaccaaggctcaaaatgaacttgcattggcttgaaaagggaccacaagaagattgggagcggcaaaattcggttacagccaaaattgaccgca

SEQ ID NO: 730155 - DNA, 565 bp, Homo sapiens
gggttgggcaggcagccgcaggccccatcctcagcggcccctgaggcgctggcggttgcagccccgggggtccgttccgaacctcgactcctagtggtgccggcgcccaggccgcctctcagcggcggcagcgtgaagcccggcggcgagggcggaggtggcggccctgcgggcggcgagctggcggccaacatgttccccatggtcgctggcggtggcacctgctcccggcctggtctccgctcccacccggtgcgccacgcgcaaccgaactcgctgccgccgccgccacccccgtcgccagcatggtgtatcttttggacatgtccattttggaagaaacttttgtgttaaaataaactaatatattatgggctagaacataaaattcaccaagaatttcaagataaaaatactaatgttttgcttgtttgggttatttcaaacaataactttgtctataattttttcaccaccgaccctctacctccttgcatgctcattctcctgtgtggctagatgcatttcgggtgttttgaatattatttcagagcgtatcattccg

SEQ ID NO: 730156 - DNA, 782 bp, Homo sapiens
cacaaaaaccctgactatcacctgatagattgcttgtgctgcctgataattactcgcacttttcccaggctagtgcaaatcttcaggggccgtccaggactacagagctgtttcaccctaccttggcttcaatctcttcccccatgctcgaaggtgcggagctgtacttcaacgtggaccatggctacctggagggcctggttcgaggatgcaaggccagcctcctgacccagcaagactatatcaacctggtccagtgtgagaccctagaagacctgaaaattcatctccagactactgattatggtaactttttggctaatcacacaaatcctcttactgtttccaaaattgacactgagatgaggaaaagactatgtggagaatttgagtatttccggaatcattccctggagcccctcagcacatttctcacctatatgacgtgcagttatatgatagacaatgtgattctgctgatgaatggtgcattgcagaaaaaatctgtgaaagaaattctggggaagtgccaccccttgggccgtttcacagaaatggaagctgtcaacattgcagagacaccttcagatctctttaatgccattctgatcgaaacgccattagctccattcttccaagactgcatgtctgaaaatgctctagatgaactgaatattgaattgctacgcaataaactatacaagtcttaccttgaggcattctataaattctgtaagaatcatggtgatgtcacagcagaagttatgtgtcccattcttgag

SEQ ID NO: 730157 - DNA, 934 bp, Homo sapiens
tgaatgtgggaaattttttagccaaagctcaagcctcatgcaacatcgaaaagttcacactggagaaaaaccttttaagtgcaatgaatgtgggagattctttagtgagaattccagccttgttaaacatcagagggttcacactggagcaaagccttatgagtgcagggaatgtgggaaattttttcgccacagctccagtcttgttaaacatcgaaggattcacactggagaaatacaatgattgtgagaaatcctttagctggtgtttcaacctcattcaacaccagaaagttcacggtgtaaaaaagtcttgaaggttactaatggaaatccattagctatacctccaaactcattcaacactggacagttcacagagtggacaatgtagtgaatatggtaaaaggcctcagccaaaggcctaaccgtattcaacaccagaaagtttagactggagaaaggccttagactgtcgctgaatcaatatgacctgacttaaagcagaaacagccaggcgtggtggctgacacctgttattctcaccactttgggaggctgaagcgggcggatcacaaggtcaggacatcgaaaccatcctggttaacacaatgaaaccacatctctactaaaaatacaaaaatttactgggcatggtggtgggcgcctgtagtcccagctactcaggaggctgaggcagaagaatggcatgaacctaggaggcagagtttgcggtgagctgagatcacgccactgcactccagactgggtgacagagtgagactctgtctaaaaaaaaaaaaaaaaaaaattagcccggcgtggtggcaggcaactgtagtcccagctacttggggggctgaggcaggagatttgcttgaacccgggaggcggaggttgcattgagccgagatcacgccactgcactccagct

SEQ ID NO: 730158 - DNA, 539 bp, Homo sapiens
ccagtgttactaactgtaattctatcctgttcttcactggggaaaagcttttccagtgtgctgagacagttttggttatgtaactgttaaaatgatgacagtcgtgtggcctgcggatagcactatgattttctcacagtgagttgaacctggcaggtgttgccactcacatctgaccacatttataacactttctgtactcgtatcttgtgccagtagtctgctagtccagattcatgttcctttttctcttttgaaattaaactcatagcctccaaaaatttgcatttgccctgttttgaggggggagaagtggagactattcatgatgctcaatatatcatagtattaaaatatacattgcaaattcctttgtatttatgcccttttgaaataaaaatgaatgttcttagcaaactcaaagttcttgaactctgtagtttacacatccttagaacagcactaccttgtatgtgatattcaagagactgactttctaaagagtcttagagccaagcttttacacatctaaaaaaata

SEQ ID NO: 730159 - DNA, 412 bp, Homo sapiens; identical to SEQ ID NO: 601597

SEQ ID NO: 730160 - DNA, 486 bp, Homo sapiens; identical to SEQ ID NO: 601598

SEQ ID NO: 730161 - DNA, 689 bp, Homo sapiens
cttctggccttgtttttgtttttctgttttgttttgttttgttttagcacaaccctttttcttcttcttcacttcccttcttggtgctcagcctgttccagccaccgtgtcaacatgccttggtccatagctctggaaggcacacaccaagcaggaccagtgaacagaagatgagaagggtacattttgacaccaaactgcctgggttggaaacccagctctgtgacctaggaccagtcacttaacttctgtgcctcggtttccccatctgtcgactggggatgatgagagtatctctcactgggttgttgtgaggaatggatgaggaagtacaaatgccgtgcctaaagcagcgcctggtgcacactgatatgataagttttattattatcatcatccaattatcatgatttctggcaagtgggcacttccgttcagaaatctcggtgaggagacagggccatccaccgtataagaatgcaggctcagcgtttggccacttccattgagaatcaacggtgacttatttgcaagtccccatcccctcaattgtctcccatcgaaatgggctcacggcttggtctgtgtgtccgtgggccccatgcttagcctagaaatgatgcacgaaatagcacctcttaggctcacatcaattgcgtattttggggttccccctttggggtgggggg

SEQ ID NO: 730162 - DNA, 574 bp, Homo sapiens; identical to SEQ ID NO: 601605

SEQ ID NO: 730163 - DNA, 645 bp, Homo sapiens
gcattaaactgagaagaaccactgaggaaagcatgccacagtctttcccaaaatccctgtgtcttaaggaacaaccaagaaagttaactggtcagggaaaagatttcttttggaacacagagaatgatgggagttgtgatccatacctccgtgtgcataatggttgtacctgctccaggaaggcgctggatcctcccaactccatgggaagagattaggacacaaacaacagacagaaggtgaccacaggaggacacagtgagaagctggccatctgcaagccaaggagagagacctcaggagaaaccaaacctgccagcaccttaatcttagacttctagccctcagaacgaaatgttcctcaccccccaagaaggaaaccctgtacgcatcaagcagtcattcctcattctcctctcccccagcccctggagacctttcatctgctttctgtctctatagatttgcctgtactagacatttcatatgactggaagcatataatatgtggtcttttgtgtttgacttgttttacttagtctaatgttttcaaggttcgccatgttgtaacatgtacactttacacaattttaagcctaatattctttaagccatatattcaaaataaacagcttacaaaaatga

SEQ ID NO: 730164 - DNA, 767 bp, Homo sapiens
tttcccaagttgtatagtgtaatcggcagctggtcagctgacatgatgtcaataacgacagcataacagatgaacacagatgcacacaccactgtcagtctcagcacataagaggtcaatttttgagatggagtcttgctctgtcaccaggctggagtgcagtggtacgatctcagctcactgcaacctccgcctcccgggttcaaggattctcctgtctcagcctcccgatgtagctgggattacaggcctgacccaccatccctgacccaactattgtttcttaaaaaaaactctttttaaccttgcctttttgttagggtagaaggatagctcagagcttcaaagagcaggactagcctaagaactgtctgtgatatttgaccagaggtgcagcctagctgccattcttcctcaccctgtggaagacattaaagggagaatgaaagtagctgtagaattacctttgggggaagaagccacttggtgaacttggcaaacacccgtgtttgaggggaaaagaccctgggtgtcatgagctgggccggaggggatggattgattacttgtcttgtttgcttgtttctgttgtaagtcagggcccctcagcagaaggcagaacagaaccgagttcctttagaatgctggtttttgtgtggagtgaggaaggaccgtgagtgtggtcagtttccaacctgacaggacctgctcccgttggccaggactgcagcttgttactttgaccctgggaagaaggtaagtgttcc

SEQ ID NO: 730165 - DNA, 430 bp, Homo sapiens
ggatccccttacaaccccacgatcacctttccaagatacaggtcttccccaccccgagtttttgagatggagtcttgctctgtcaccaggctggagtgcagtggtacgatctcagctcactgcaacctccgcctcccgggttcaaggattctcctgtctcagcctcccgatgtagctgggattacaggtgtgtgccaccacacctggctaatttttgtatttctagtagagatgggattttgccatcttggccaggctggtcttgaactcctggcctcaaggaatctgcctgccttggcctcccaaagtgctgggattacaggcctgacccaccatccctgacccaactattgtttcttaaaaaaaactctttttaaccttgccttttgagcatgcctgtgttgggttgacagtgagggtgtcgtgggta

SEQ ID NO: 730166 - DNA, 783 bp, Homo sapiens
tttttgagatggagtcttgctctgtcaccaggctggagtgcagtggtacgatctcagctcactgcaacctccgcctcccgggttcaaggattctcctgtctcagcctcccgatgtagctgggattacaggtgtgtgccaccacacctggctaatttttgtatttctagtagagatgggattttgccatcttggccaggctggtcttgaactcctggcctcaaggaatctgcctgccttggcctcccaaagtgctgggattacaggcctgacccaccatccctgacccaactattgtttcttaaaaaaaactctttttaaccttgcctttttgttagggtagaaggatagctcagagcttcaaagagcaggactagcctaagaactgtctgtgatatttgaccagaggtgcagcctagctgccattcttcctcaccctgtggaagacattaaagggagaatgaaagtagctgtagaattacctttgggggaagaagccacttggtgaacttggcaaacacccgtgtttgaggggaaaagaccctgggtgtcatgagctgggccggaggggatggattgattacttgtcttgtttgcttgtttctgttgtaagtcagggcccctcagcagaaggcagaacagaaccgagttcctttagaatgctggtttttgtgtggagtgaggaaggaccgtgagtgtggtcagtttccaacctgacaggacctgctcccgttggccaggactgcagcttgttactttgaccctgggaagaaggtaagtgttcc

SEQ ID NO: 730167 - DNA, 967 bp, Homo sapiens
  misc_feature (24)..(24): n is a, c, g, or t
  misc_feature (39)..(39): n is a, c, g, or t
  misc_feature (42)..(42): n is a, c, g, or t
  misc_feature (46)..(46): n is a, c, g, or t
  misc_feature (48)..(49): n is a, c, g, or t
  misc_feature (53)..(54): n is a, c, g, or t
  misc_feature (74)..(75): n is a, c, g, or t
  misc_feature (88)..(88): n is a, c, g, or t
  misc_feature (93)..(93): n is a, c, g, or t
  misc_feature (102)..(102): n is a, c, g, or t
  misc_feature (104)..(104): n is a, c, g, or t
  misc_feature (108)..(108): n is a, c, g, or t
  misc_feature (123)..(123): n is a, c, g, or t
  misc_feature (144)..(144): n is a, c, g, or t
  misc_feature (153)..(153): n is a, c, g, or t
  misc_feature (159)..(159): n is a, c, g, or t
  misc_feature (168)..(168): n is a, c, g, or t
  misc_feature (181)..(182): n is a, c, g, or t
  misc_feature (185)..(185): n is a, c, g, or t
  misc_feature (188)..(188): n is a, c, g, or t
  misc_feature (198)..(198): n is a, c, g, or t
  misc_feature (200)..(200): n is a, c, g, or t
gccaggcggagacccggaggaccnaagcttccggacgangangaancnnccannatggcctcggagagtgggannctttggggtggcnggttngtgggtgcngnggancccatcatgaaagtncaacgcgtccattgctacgancggcacctntgggangtggatgtnaaggcagtaaagnntanagnaggggcctgnanaaggcagggctcctaaccaaggccgagatggaccagatactccatggcctagacaaggtggctgaggagtgggcccagggcaccttcaaactgaactccaatgatgaggacatccacacagccaatgagcgccgcctgaaggagctcattggtgcaacggcagggaagctgcacacgggacggagccggaatgaccaggtggtcacagacctcaggctgtggatgcggcagacctgctccacgctctcgggcctcctctgggagctcattaggaccatggtggatcgggcagaggcggaacgtgatgttctcttcccggggtacacccatttgcagagggcccagcccatccgctggagccactggattctgagccacgccgtggcactgacccgagactctgagcggctgctggaggtgcggaagcggatcaatgtcctgcccctggggagtggggccattgcaggcaatcccctgggtgtggaccgagagctgctccgagcagaactcaactttggggccatcactctcaacagcatggatgccactagtgagcgggactttgtggccgagttcctgttctgggcttcgctgtgcatgacccatctcagcaggatggccgaggacctcatcctctactgcaccaaggaattcagcttcgtgcagctctcagatgcctacagggggaagcagcctgatgccccagaagaaaaaccccgacagtttggagctgatccggagcaaggctgggcgtgtgtttgggcggg

SEQ ID NO: 730168 - DNA, 529 bp, Homo sapiens; identical to SEQ ID NO: 232065

SEQ ID NO: 730169 - DNA, 578 bp, Homo sapiens
agagcaagcattttaaaagttgaagtgcacgtcgggggtgaaagaaacccacgtactcgaatactgtcctcctggagttagaaattacgcgttttccttttctaaggctgtaaagaaactatagttttctgtcgtatttttttctgatgtgtctaaatcactcagggtattgaaatcccagttatatcgttcaaaattgggacctctaattgaataactgagaggactactgtagagcgtcccctactacctgttttcattagctccacgggctcttgggccaggctccctccccagatctgaggaagacttccatggtttcatcctatgttccttcaactcgttggaagcccaggattcctagagcttttccaagagaactctgacgtgcagttctcgatcttccagatgcgaaccttgattgagagtgataatcaactttgttttgattgaactgacatttttttctgtggttttatcactttttattttttatgggtgtatagtaggtgtatatatttatgggttacatgagatattttgatagcgtacattaaaatgtataattaacattttta

SEQ ID NO: 730170 - DNA, 800 bp, Homo sapiens
gtccttgtacaagccatcaaggaggcaaaggagcagcacccagacatgtcagtgaccaaggtggtcgtccaccaggagaccgagattgctgatgagtgagctcaggaactaacctaccccaactctgcccttctcccatccaagagaaaccagcaaaatgataaagaagctaacctgccatagtcagacttcagactttcaagattattctaaatcaccagaaaattaatttcagtttctattgggagtttataccaagagattcttctagatctcattgatccttttgaagagctttttctatattaggatatcagaattgttcaacttttcactctatagactgttttaagagttttggggtttttttaattgggtggtttgtaaccccttcagcctagcctctctgcccatttatttccaaccccaacagacactgacagggtccatggaattcttcgggaaatcctccaaggactcttgtcagctgtgttggaagccaaagccagcttagtgggacttccgcgtctctccctagtcttatcccctttggatgatggcagaaacttcatgaaccagccctttctcagagccagtgatgtgagtgtatcagaatgccagggagggcaccagccctgatccacagacctcggaaagatgcccctgttcctttgttgcgggtggttttggtaaggcagagccctctgctgagaatgtagtattgtttttcccctctccctcctgctttctttttggagcttctttgggtcaaagacatggaagttgcttcagatatctga

SEQ ID NO: 730171 - DNA, 1251 bp, Homo sapiens
agccaagtccttctggctgcagttaaaagggctcaccggcctctccctgaagtcttggcccgggagcctgtgtcctccaggtagctgtgctgtggggagctggagaggactgaagagctgaggaggcgaaatgcagaaatgataatgcctcacaagctggttgtacagattgaataacaatgtgaacagagcaccgagtataatccctgaaacagcaaaccagaggtcccgtctggctggcatgaatggaagggcaaacgctccgaccaaattgctctgggaatgtcattctaattattggatcctgacccagcggcatgctgataagctctgggttggagacgccctatctcagaggagctccaaacctgctcaaggccttttcttgccctctgcaactttcctgccaagcaattagcctccagggaagaagaggaaattggaacacggacacgcacagaggaaagaccaagtgaagatacagtgagaagatggccaacgacaagccgaggaacagggtctcagaggaccccaaccctgctgacaccttgatctcgggctttcagcttccagcactgtggcaaaattcatttctactgtttaggcctcccggtctgtgacatgttgtcacggtggccactgaagactcagacagcttccttctagctctggttcttctacgggtgtgctttcaggtgctccggagggcccggtggcagggaaagccaggtctccaggctcctggcccagggcgtgtttaggaggcagggccttctctgacacaagtatgaggagcagagaggtttctcttcttcagtctccactaggtcctggcctccatggcttctataggcagggacctggccagggcattcaccagagactttgacagggagtccaggcccagaccccataggcagagccaggagccctgtgccagcttcccagggagcaccggggcccaacgtagagtcaagagctggcatcagcacaggtgcaaggtggggttgggaagggcatggcagcttgggggtctgcagtgcacaggtggcctggcatgaggtaggtgggccggcttgaaggtctagaagatggatagacaccagagacttgtagtctatgtctccttcttgctgtcccctggatgtcacctcccctctgcccccagtgctgaactaacccccttcatcttttacttgggactccatcagtgactcatcattgcttttggtgtgacttaccagcggccgc

SEQ ID NO: 730172 - DNA, 1580 bp, Homo sapiens
  misc_feature (496)..(496): n is a, c, g, or t
  misc_feature (563)..(563): n is a, c, g, or t
  misc_feature (573)..(573): n is a, c, g, or t
  misc_feature (653)..(653): n is a, c, g, or t
  misc_feature (692)..(692): n is a, c, g, or t
  misc_feature (1113)..(1113): n is a, c, g, or t
  misc_feature (1162)..(1162): n is a, c, g, or t
  misc_feature (1173)..(1173): n is a, c, g, or t
  misc_feature (1176)..(1176): n is a, c, g, or t
  misc_feature (1302)..(1304): n is a, c, g, or t
  misc_feature (1308)..(1311): n is a, c, g, or t
  misc_feature (1313)..(1313): n is a, c, g, or t
  misc_feature (1317)..(1317): n is a, c, g, or t
  misc_feature (1319)..(1320): n is a, c, g, or t
  misc_feature (1322)..(1322): n is a, c, g, or t
  misc_feature (1326)..(1327): n is a, c, g, or t
  misc_feature (1342)..(1345): n is a, c, g, or t
  misc_feature (1347)..(1348): n is a, c, g, or t
  misc_feature (1351)..(1354): n is a, c, g, or t
  misc_feature (1361)..(1362): n is a, c, g, or t
  misc_feature (1379)..(1379): n is a, c, g, or t
  misc_feature (1381)..(1381): n is a, c, g, or t
  misc_feature (1416)..(1416): n is a, c, g, or t
attcccattgctgtgcctacaccttcgccacccactatggaccagcagccccgggctcagctcctggttcccagtatggcacaatgaccaggcagatatctcgacacaactctactacttcttcgacatcttctggtggatacagacgaactccctctgtgactgctcaattttctgctcagcctcatgttaatggaggtccactttattctcaaaattcaatttctattgctccaccccctccccctatgcctcagttgactccacagatacctctcacaggcttcgtggccagggtgcaggaaaacattgctgatagtccaactccaccgccaccacctccaccagatgacattcccatgtttgatgactctccacctcccccaccacaccaccagtggattatgaagatgaggaggctgcagtagttcagtataatgatccatatgcagatggggatcctgcttgggcccccaagaattatattgagaaagtngttgcaatatatgattatacaaaagacaaggatgatgagctgtcatttatggagggtgcaatcattnatgttataangaagaatgatgatggctggtatgaaggagtctgcaatcgagtgactggtctgttccctgggaactatgttgaatcaatcntgcactatactgattaattttttttttcttttgaagtanattcttattactcagtcatactgtgggactattatggttacagaactgtcttaatatgttttaaaatgtgcccatattttcagaacatgctgttttattggtaaattgaatgtctacctgtaagcataaatctttgaggcagtttatgtattgctgaatagcaatttatacaagaagctgtccataactgattatgcttatgtacttacttacacatttttaactttatgaccagcctaaatattctgggggaagtggggtataatatttaacgaatcatgattcagattgtaccattacatgtttcagtgcagcatggttactaacgctatgtcagactaatattaaaatcagaaaatttaaatgctggtgctggtcagacttttttgttagattctctcatttaaaaaaaatactgttngtttaaagcatgcataaaaatttatgtattgaaatatacttaaaaatcnagtgcttcccnttngtgtaatatttacctggaggactcgtacttaggtgtcttaacgtgaattgagtctccaaggtctccatgtgaaacaagcaaaaagagaattatctgtaatgttgtaatttgtacctaagttttttnnnagtnnnntntgcntnntnaacnntttccattcataaannnntnngtnnnncaaaggnntttgtcctttccttcantnatttgctttaaaaaaaataaaagataatgatttantgcagaattatgattctattttctcaatatgttaacttggaaaaaaattttagccttatcttaatctgtcccaacagcaatgtgacggatttttgcagattcaaaatctgcaatggttatttacaagtcaatctactgaattccttttttaaataatcttttcg

SEQ ID NO: 730173 - DNA, 1493 bp, Homo sapiens
  misc_feature (409)..(409): n is a, c, g, or t
  misc_feature (476)..(476): n is a, c, g, or t
  misc_feature (486)..(486): n is a, c, g, or t
  misc_feature (566)..(566): n is a, c, g, or t
  misc_feature (605)..(605): n is a, c, g, or t
  misc_feature (1026)..(1026): n is a, c, g, or t
  misc_feature (1075)..(1075): n is a, c, g, or t
  misc_feature (1086)..(1086): n is a, c, g, or t
  misc_feature (1089)..(1089): n is a, c, g, or t
  misc_feature (1215)..(1217): n is a, c, g, or t
  misc_feature (1221)..(1224): n is a, c, g, or t
  misc_feature (1226)..(1226): n is a, c, g, or t
  misc_feature (1230)..(1230): n is a, c, g, or t
  misc_feature (1232)..(1233): n is a, c, g, or t
  misc_feature (1235)..(1235): n is a, c, g, or t
  misc_feature (1239)..(1240): n is a, c, g, or t
  misc_feature (1255)..(1258): n is a, c, g, or t
  misc_feature (1260)..(1261): n is a, c, g, or t
  misc_feature (1264)..(1267): n is a, c, g, or t
  misc_feature (1274)..(1275): n is a, c, g, or t
  misc_feature (1292)..(1292): n is a, c, g, or t
  misc_feature (1294)..(1294): n is a, c, g, or t
  misc_feature (1329)..(1329): n is a, c, g, or t
attcccattgctgtgcctacaccttcgccacccactatggaccagcagccccgggctcagctcctggttcccagtatggcacaatgaccaggcagatatctcgacacaactctactacttcttcgacatcttctggtggatacagacgaactccctctgtgactgctcaattttctgctcagcctcatgttaatggaggtccactttattctcaaaattcaattgctgatagtccaactccaccgccaccacctccaccagatgacattcccatgtttgatgactctccacctcccccaccacaccaccagtggattatgaagatgaggaggctgcagtagttcagtataatgatccatatgcagatggggatcctgcttgggcccccaagaattatattgagaaagtngttgcaatatatgattatacaaaagacaaggatgatgagctgtcatttatggagggtgcaatcattnatgttataangaagaatgatgatggctggtatgaaggagtctgcaatcgagtgactggtctgttccctgggaactatgttgaatcaatcntgcactatactgattaattttttttttcttttgaagtanattcttattactcagtcatactgtgggactattatggttacagaactgtcttaatatgttttaaaatgtgcccatattttcagaacatgctgttttattggtaaattgaatgtctacctgtaagcataaatctttgaggcagtttatgtattgctgaatagcaatttatacaagaagctgtccataactgattatgcttatgtacttacttacacatttttaactttatgaccagcctaaatattctgggggaagtggggtataatatttaacgaatcatgattcagattgtaccattacatgtttcagtgcagcatggttactaacgctatgtcagactaatattaaaatcagaaaatttaaatgctggtgctggtcagacttttttgttagattctctcatttaaaaaaaatactgttngtttaaagcatgcataaaaatttatgtattgaaatatacttaaaaatcnagtgcttcccnttngtgtaatatttacctggaggactcgtacttaggtgtcttaacgtgaattgagtctccaaggtctccatgtgaaacaagcaaaaagagaattatctgtaatgttgtaatttgtacctaagttttttnnnagtnnnntntgcntnntnaacnntttccattcataaannnntnngtnnnncaaaggnntttgtcctttccttcantnatttgctttaaaaaaaataaaagataatgatttantgcagaattatgattctattttctcaatatgttaacttggaaaaaaattttagccttatcttaatctgtcccaacagcaatgtgacggatttttgcagattcaaaatctgcaatggttatttacaagtcaatctactgaattccttttttaaataatcttttcg

SEQ ID NO: 730174 - DNA, 796 bp, Homo sapiens
cccattctgccagggaggacccaccagagttggctcccaaggcttccggcctggtgtgcatgtccgttccgaggaatgggatttaatgacctttgatgccaacccatatgacagcgtgaaaaaaatcaaagaacatgtccggtctaagaccaaggttcctgtgcaggaccaggttcttttgctgggctccaagatcttaaagccacggagaagcctctcatcttatggcactgacaaagagaagaccatccaccttaccctgaaagtggtgaagcccagtgatgaggagctgcccttgtttcttgtggagtcaggtgatgaggcaaagaggcacctcctccaggtgcgaaggtccagctcagtggcacaagtgaaagcaatgatcgagactaagacgggtataatccctgagacccagattgtgacttgcaatggaaagagactggaagatgggaagatgatggcagattacggcatcagaaagggcaacttactcttcctggcatcttattgtattggagggtgaccaccctggggatggggtgttggcaggggtcaaaaagcttatttcttttaatctcttactcaacgaacacatcttctgatgatttcccaaaattaatgagaatgagatgagtagagtaagatttgggtgggatgggtaggatgaagtatattgcccaactctatgtttctttgattctaacacaattaattaagtgacatgatttttactaatgtattactgagactagtaaataaatttttaaggcaaaatagagcattcaaagccagc

SEQ ID NO: 730175 - DNA, 687 bp, Homo sapiens
gtgcatgtccgttccgaggaatgggatttaatgacctttgatgccaacccatatgacagcgtgaaacttttgctgggctccaagatcttaaagccacggagaagcctctcatcttatggcactgacaaagagaagaccatccaccttaccctgaaagtggtgaagcccagtgatgaggagctgcccttgtttcttgtggagtcaggtgatgaggcaaagaggcacctcctccaggtgcgaaggtccagctcagtggcacaagtgaaagcaatgatcgagactaagacgggtataatccctgagacccagattgtgacttgcaatggaaagagactggaagatgggaagatgatggcagattacggcatcagaaagggcaacttactcttcctggcatcttattgtattggagggtgaccaccctggggatggggtgttggcaggggtcaaaaagcttatttcttttaatctcttactcaacgaacacatcttctgatgatttcccaaaattaatgagaatgagatgagtagagtaagatttgggtgggatgggtaggatgaagtatattgcccaactctatgtttctttgattctaacacaattaattaagtgacatgatttttactaatgtattactgagactagtaaataaatttttaaggcaaaatagagcattcaaagccagc

SEQ ID NO: 730176 - DNA, 916 bp, Homo sapiens; identical to SEQ ID NO: 728469

SEQ ID NO: 730177 - DNA, 962 bp, Homo sapiens
ctacaggcatgcgccccacaccctagcttcctagcttttctttctttctttctttcttttctttgtttcttcctttctttctttctttctttcttttctttctttcctttctttttctttctctctctttcttttctttctttctttctttctctttctttctttctttccttccttccttccttcctttctctttcttcttcttctttttcttttttttttttttttgcagagaccgggtctcactatgttgcccaggctagtctcgaactcctggtttcaagcgatccttgcaacttggcttccctaagcactgggattacaggtgtgagccacacactgcctggccacatagcctggttttgtttatacacacatgtccccaaatgattaggaaaccctggcacataacccatagtaggtatccaataaagagtttccattttgttctatttttctatgcatgtgtcttttttttttaattaatgaatcttagagagattacatgcttcctgaacctgagagaactgaccccatgtattctggagatttgcccgtcaaagactggtcccactgaacaacccaagattatctttccaaagaagttttcaaataataagtaacatccctggtttgatggtttgaactgacctcaggactctatgttgatcctatggacaataagccagataacaacagtacccgagtgtaacctgaagagcctcttcttagggaaggggtgtacctgggtgatggccatactgcgtgccgccatagctcaagccatgtgcctgaggctgtgcatgagggagagaaagaatgtccactcccaaaagaactgattcaggcatgaacagaaccattgcacatcctcaggaggttctagcaaacctgcacatccatgtctgcacttagacaacataaacagagtgagaatgccttcccagagcacagcagaagtt

SEQ ID NO: 730178 - DNA, 565 bp, Homo sapiens
agctcggtaccctgattaagctcattctgcaaagtctagtcaccaccctggtagaatccatgtctcattaccacccttgcccatgctgtactctcttccaactctatcagagcaactgtaacattgcattgcccttatttataaactctttctgctagtgaataagcacctcgaaggcagcttagcacatagcaagtgctcaatacacactcaaaaatcaaactagtagagtaagtggagtgtgcgaagtacagaagagacagggaaaaggagcttcaaggttatgggttaattgcagaatgggaataaagaacagaaagagcaagggagaccaaagcaagtcaggccggccaaacacagtggctcacgcctcgtattccatcctttactgggaaggctgaggtggggcatatcacttgaggtccgagagttaaccaccagcctccgtctctactaaaaatacaaaaaaaattagctgggcatggtggtgcacacctgtaatcccagctacttgggaggctgaggcacaagaatcacttgaacctgagggttggatgttgattgg

SEQ ID NO: 730179 - DNA, 563 bp, Homo sapiens
gcaaatcagctcggacccatctattgtgaaagtctagtcaccaccctggtagaatccatgtctcattaccacccttgcccatgctgtactctcttccaactctatcagagcaactgtaacattgcattgcccttatttataaactctttctgctagtgaataagcacctcgaaggcagcttagcacatagcaagtgctcaatacacactcaaaaatcaaactagtagagtaagtggagtgtgcgaagtacagaagagacagggaaaaggagcttcaaggttatgggttaattgcagaatgggaataaagaacagaaagagcaagggagaccaaagcaagtcaggccggccaaacacagtggctcacgcctcgtattccatcctttactgggaaggctgaggtggggcatatcacttgaggtccgagagttaaccaccagcctccgtctctactaaaaatacaaaaaaaattagctgggcatggtggtgcacacctgtaatcccagctacttgggaggctgaggcacaagaatcacttgaacctgagggttggatgttgattgg

SEQ ID NO: 730180 - DNA, 217 bp, Homo sapiens
caacgcctagtcagtcatcaaaaccattcaattgtcacctcctctacaaagtctagtcaccaccctggtagaatccatgtctcattaccacccttgcccatgctgtactctcttccaactctatcagagcaactgtaacattgcattgcccttatttataaactctttctgctagtgaataagcacctcgaaggcagcttagcacatagcaagtgct

SEQ ID NO: 730181 - DNA, 239 bp, Homo sapiens
  misc_feature (6)..(6): n is a, c, g, or t
  misc_feature (20)..(21): n is a, c, g, or t
tttaanccgtttgaaaaccnnctcggatcctgtattggtggtgctctcatataccctcgggttcatgtaacggcataactggaaccaaagctcactgagcaagggtatatgagagcgggtctcctcgtacaggaagtagaagatgttttgtttgggggcctcgtcgtcctcctccatgtcattggccagatagctgaggacagaaatcaggttgctgctcagagagcaccaccaataca

SEQ ID NO: 730182 - DNA, 283 bp, Homo sapiens
tgtattggtggtgctctctgattggtggtgctttggtaatgtaggcgggctttggcgataaaacctttgttgtttgtattggtggtgctctcatataccctcgggttcatgtaacggcataactggaaccaaagctcactgagcaagggtatatgagagcgggtctcctcgtacaggaagtagaagatgttttgtttgggggcctcgtcgtcctcctccatgtcattggccagatagctgaggacagaaatcaggttgctgctcagagagcaccaccaataca

SEQ ID NO: 730183 - DNA, 889 bp, Homo sapiens
tgctgaggggccgggcgggctaggggccggctagccgccgttcgcccctgctttgcatattcatgaagtctagcgaggccggtcgcccaggctagccgtggacgggtcatgaattattcatgaggaaacctctggtcccgcccagaaaggcctcgttgactattcatgagccgaggagcgggtttgggccggaaaaggccgttgacccccggtgggagggaagcgtcgacgagctgaggttggacttgttgaaataatcctgatacattcctacaatggccactgctcagctttctcactgcatcacaatacacaaggcttctaaggaaacagttttcccatcccaaatcactaatgagcatgagtcattgaaaatggtgaagaaactttttgctacttccatctcatgtataacatacctaaggggcctgtttccagagagctcttatggagaacgccatttggatgacctcagtttaaaaatcctccgagaagataaaaaatgtcccgggtcactgcatattatcagatggattcaaggttgttttgatgctttggaaaagagatacgtaagaatgtttttacacttacatttacacagatcccatgggatctgagaaggtgactgagatgtaccagttcaaattcaaatacacgaaagaaggagccactatggattttgacagtcatagcagcagtacaagctttgaaagtggaacaaacaatgaagatattaagaaagccagtgttctactgatccgtaaattgtatatactgatgcaggaccttgagccacttcctaataatgttgtacttactatgaaactccactactataatgcagtgaccccacatgattaccaacccctcggttttaaagaaggggtaa

SEQ ID NO: 730184 - DNA, 714 bp, Homo sapiens; identical to SEQ ID NO: 346123

SEQ ID NO: 730185 - DNA, 658 bp, Homo sapiens; identical to SEQ ID NO: 218394

SEQ ID NO: 730186 - DNA, 1142 bp, Homo sapiens
gtattgctgtctctaagccagacctgatcacctgtctagagcaaaggaatgagccctggaatgtgaagaaacatgagacagtagccagacacccaggaacaccttctgtcccatgctctgaaattcttttacggctctactttcccttcagtgatctttcttcaagatgacagtgacagccaaaggctttttcatagcttggaacagaccgtatgatctgattgttcttccattgctttggggacacaggaatatctgtgtatttttgagaaactgtttgttaagctattttttaagttccctttttgcattatgtctaaggcgtgtaagagcagtgggatttggctcagaatcccaggaacaccagaacagatgttacatgttttctgctttgtgatttcccattctatagaggttttaaatgtcattctatagaaatttatactcagtaattttataagaacactagacatctccctaaatgtaagaaactgttattttttattaaacatttattgttttagtataaacagagactggtaatttaaactctgccccaaattctcaactgtagtgtggtttagtgtatctgttcacttctgtattagtcagttttcacactgctaacaaagacgtacctgagactgggaagaaaaagaggtttaactggacttaactatttccacatggctggggaggcctcagcagcaagagaaaatgaggaagaagcaacagcagaaacccttgagaaagccatcagatcccatgagacttatttactatcatgagaatagcacgggaaagactggcccccatgattcaattacctccctctgggtccctcccacagcacgtgggaattctgggagatgcaatttaagttgagatttgggtgggggcacagccaaaccgtatcagcttcctagatttcttaaatatgctgtgtatttgggtagcttagagcagtgctcagcatatgtttaacttccacttgctaccttagtttataataactgtaattttataattttgtttggaatgaccggaactgttattcatatatatgttggtgtgtatacatttgtgtatatatgtacatgtgtgtaacatggattttttcacaaataaaaagtgtgtaagta

SEQ ID NO: 730187 - DNA, 1273 bp, Homo sapiens
ccttgcatgcacaataaataataattaggataataatggataatcccgggcgaaggcggcgtggtgccggaggggtctgagcggcggctgcagcggggcggccgaagggaggggaaagaggagaaaagagttgtaagttatatttaccttgctcgcgaggagtgtgctggctgaatctcttccctctctgagtcacccagagtacagaaacagagggagagaggactagattatgaatatgacttcattgatgacagccgtcccctcctcttcctaaactcgggctccgcccagcgtcccaccctcgcctcctccgcgggcgccggaagacgcgccgcagttggccccgcgcgccgctcctccctgcccgtccgggcgcgggttggcgggacgcgcctgtcactcgctcagctcagcgactccgggagcgcggggggaggagggggcggtgtgcaagaatgtggatctagacagctctactgtatgcgtggatccgtgtgtgactgcaaggcgccggctctcgggccgcgtttgtgcctggagcagagaaactgcgcgggatgcagaaagccccaagccctgctggagctgggcgcccgctgtcccttccctggcagtcctcttcctcgggcgccgcggggctcctccagggagactgcggaaggggaggaggcgaagcgaaaacggagggcagccgtagtaatagcgcgtagtagttcgggggtatgtggagaaggtgctggaatttaactgtgcctccgcctgccagtgcgagcctgcagagagagagggaggggacgggggacgggctccgagtggcaccaaagctgtttgtggcacagtgtggactgtggaaaaaacgggcattgtcgtgccggctgaaactttttctcccccttccctaaggctgtcattataaatctgccccctattccaggtaaaaaaataaaaaatagaaaagggaggcgggcacaaagaacgttcctgccaaatctgtctcttccctgaaggactgcaagcttccaaatgccaacgagggagaaacagctgagaggctgaacgccttataaataagtaaacccaccctaacctctctgtttacttcgtggactaggtacagcactataaccttccctcacctgccatcttcgctaaaatatatacaaaaatatggaaaaacaaaccctgggggcggggctggcgggttagggggcggctgaagcatggaatctggttttgatttaaaaaggggaataaatctcttattttctac

SEQ ID NO: 730188 - DNA, 436 bp, Homo sapiens
acggcagttgctggggctaacagaactggctgttgggagagagaggcgaggcaacgccgcccggccctgccattccattttactgcttaactcaacctggagtgtcaggacctattctcctgcattctcgctgcactatacgggggagccaagtcactctgtactcactggacagccaggctgggtggaatagggttctagagtggagcaggggctctgccctttatggcgactttctaaaagattagcatcagtgtcttttgacagtatagcatctggggtgggacgcggagaggaggctttgcttgctaaacggcttctttctccgccggtgatctggatttgtttcctcggccccctccccccgctcctttctttctcccctcccgcctttagcaaagtgacacaggcgacacctgctcgcttgtgttcgatg

SEQ ID NO: 730189 - DNA, 374 bp, Homo sapiens
ggcctgttattcagctctccgctccgctgggacccgcacagcgccagtggctcgggggtcggcgctcgcctcctccccggcccgggcctagagccacccctaaccagaggccggagacagctggagcggctgccgcatcccggcccagcctcccctaccatccctcccccttccactggacatctggaccctaggcccccgcaccgacagggttccggaaaccctccccgcccagcccggcggccgggccccgcgcctctctctctctagagcccccagccctcctcaagactagacttccgcctacccctggacacctcctcccggtcccctccctccccccctcccacagcctggaccggggtaggagggag

SEQ ID NO: 730190 - DNA, 997 bp, Homo sapiens
ccctgcggcggccccgaggacgtggccctggcgccctgcaccgccgccgccgcctgcgaacgggcccctccccggtctacgtcaaggtcaagagcgcggagccggctgactgcgccgaggggccggtgcagtgcaagaacggcctcttggtgagaacagatgcaaaaactattgctcaaggaaaataaagtgaaaacgaggaaaagcaaaagaagatctggagagggctctcacctgaccacaagcatcctggagcaatgagtttcaggcaggaagactcatcctgagctgagctgcttttcttgaagttgtgcaagaacgtcctgttggctggggcaaattcagtatttcttttcctggccactgtgctggagcgtgaggaaagactctccaccctcactcccagatcctgcaggaggcgtgagagcggatggagatggtgaggatgtctattaatatggtgtttcctgcaaaacggtgcccatctcaaccatgggttgtcaaccatcctcggtgtctacaactgcaatttacctttgagggcccatgaactctgattacctgaaagtccttaggccagaaagagaaacccctgtcccccacctctcactttcacctatttctagaccttttcttacagcaatgccttggccctcaggaagcatcagatctcaaactgcagggtctggggctgaagctgatgctggcatgggtgactcagagttcctctattagttcaaatatgtaatatcttttagagcctaggactcaggctggaggcaattccttggtgccagttggttaatactttatgaatagtggtgggggagggaatgccttggactattaatgtccccatggatctggatcctggagaacttccagtgtcctggatggaatgttctgcttggctcatcttgcccagagaagagccaggatatgagaagatgggagagggaagggggaggtgtgaaacgtgctggtgcttcctgtcctc

SEQ ID NO: 730191 - DNA, 1263 bp, Homo sapiens
ccctgcggcggccccgaggacgtggccctggcgccctgcaccgccgccgccgcctgcgaacgggcccctccccggtctacgtcaaggtcaagagcgcggagccggctgactgcgccgaggggccggtgcagtgcaagaacggcctcttggtctccagcccacactgtgaagagccttgtgcccacagctgtgcacatcctgggcttcctccacaccttgtccataaactgcccctcagctaccttcagacccaggatacagacgcagcctccagaagaataaatgctccattagcagctggctggagctggctgaggctctggctggtgactctggcctctggtgtagacttccctcaggtgagtgcatggatgagagctctaccttctcctgactgcccaggcctcaggacaacaggagaacagatgcaaaaactattgctcaaggaaaataaagtgaaaacgaggaaaagcaaaagaagatctggagagggctctcacctgaccacaagcatcctggagcaatgagtttcaggcaggaagactcatcctgagctgagctgcttttcttgaagttgtgcaagaacgtcctgttggctggggcaaattcagtatttcttttcctggccactgtgctggagcgtgaggaaagactctccaccctcactcccagatcctgcaggaggcgtgagagcggatggagatggtgaggatgtctattaatatggtgtttcctgcaaaacggtgcccatctcaaccatgggttgtcaaccatcctcggtgtctacaactgcaatttacctttgagggcccatgaactctgattacctgaaagtccttaggccagaaagagaaacccctgtcccccacctctcactttcacctatttctagaccttttcttacagcaatgccttggccctcaggaagcatcagatctcaaactgcagggtctggggctgaagctgatgctggcatgggtgactcagagttcctctattagttcaaatatgtaatatcttttagagcctaggactcaggctggaggcaattccttggtgccagttggttaatactttatgaatagtggtgggggagggaatgccttggactattaatgtccccatggatctggatcctggagaacttccagtgtcctggatggaatgttctgcttggctcatcttgcccagagaagagccaggatatgagaagatgggagagggaagggggaggtgtgaaacgtgctggtgcttcctgtcctc

SEQ ID NO: 730192 - DNA, 1107 bp, Homo sapiens
ccctgcggcggccccgaggacgtggccctggcgccctgcaccgccgccgccgcctgcgaacgggcccctccccggtctacgtcaaggtcaagagcgcggagccggctgactgcgccgaggggccggtgcagtgcaagaacggcctcttggtctccagcccacactgtgaagagccttgtgcccacagctgtgcacatcctgggcttcctccacaccttgtccataaactgcccctcagctaccttcagacccaggatacaggagaacagatgcaaaaactattgctcaaggaaaataaagtgaaaacgaggaaaagcaaaagaagatctggagagggctctcacctgaccacaagcatcctggagcaatgagtttcaggcaggaagactcatcctgagctgagctgcttttcttgaagttgtgcaagaacgtcctgttggctggggcaaattcagtatttcttttcctggccactgtgctggagcgtgaggaaagactctccaccctcactcccagatcctgcaggaggcgtgagagcggatggagatggtgaggatgtctattaatatggtgtttcctgcaaaacggtgcccatctcaaccatgggttgtcaaccatcctcggtgtctacaactgcaatttacctttgagggcccatgaactctgattacctgaaagtccttaggccagaaagagaaacccctgtcccccacctctcactttcacctatttctagaccttttcttacagcaatgccttggccctcaggaagcatcagatctcaaactgcagggtctggggctgaagctgatgctggcatgggtgactcagagttcctctattagttcaaatatgtaatatcttttagagcctaggactcaggctggaggcaattccttggtgccagttggttaatactttatgaatagtggtgggggagggaatgccttggactattaatgtccccatggatctggatcctggagaacttccagtgtcctggatggaatgttctgcttggctcatcttgcccagagaagagccaggatatgagaagatgggagagggaagggggaggtgtgaaacgtgctggtgcttcctgtcctc

SEQ ID NO: 730193 - DNA, 495 bp, Homo sapiens
tgctgctatttgtgaaataggaaatttagaagaatttgtgagattatgatgtaacaaagataacagattccattttagatgtttagggtgcttttagataatcccggtggaaattttcagtaagtttttggatgtactggactggccttcaggagaaataggcaagcaagagagagacagactgagattatcagtgtgcaggtagaagttgaagctcaggagtagctgagattagttagggcacgtgtagagtgaaaggggagattggtggttagaagcttaagaaacaacaggctgggagtggtggttcacacctgcaatcccaacactttgggaggcccaggtgggaggatcacttgagcccagaagttgaagaccagcctgggcaacatatggaaaccctgtctcaaatatatatgtgtgtgtgtatatatatatacacacacacacacacacacacatacacatttgaaaaagaaaaagaaacaacaaata

SEQ ID NO: 730194 - DNA, 1109 bp, Homo sapiens
tgagatggaatctctctctgttgcccaggctggagtgtagtggtgcgatctcagctcactgcaacctccgcctcccaggttcaagcgattctcctgcctcagcctcctgagtagctgggattacaggcgcacgccaccacgcctggctaatttttgtatttttagtacagagggggtttcaccatgtttgtcaggctggtctcgaactcctgacctcgtgatccgcctgcctcgacttcccagagtgctgggattacaggcgtgagccaccacaccctcccgagatctttaaagtttaccaaaataaaggaaaccacctttgtagtctgtcagtgtctcttataaattgctactgttttcttaaagttaacttcagggtccaccttatgttgcacacatatcacatcgtttaaattgcatactatggtttgacttgctttggaattttcaagtcaaagtcccaaccctttgcctctccccctttaatttgccttttctcttttgatttaatgtttttttattccagcattttatactaatgtaaaatgtttttatgtttgtttacttaacattttcataaaatagtaggtagtctcaccaacttccaatatatacaacaacattataagtaaaatttgatttgtgagtgcctatcagtggccagatgaactaatggcttgtcagaagggggcctgtgacctcctgcttgctgcatgcaggcttataatcatcaattgctgctgttgtttttttaagaatggcagaaatcacagatacaactataaaatctttgtatttctgttaaccattttttttaaagcttaaatgtatcataagccagcaaaaaccctttgtagaccagatttacttaccagtttgcaatttgtgatatagaatcttgttttattataagagggtggtatttaacaaattcaaaattagtcatcactttttaactgtgaaacattgtaactaattctttgaacaggtatacttaaagtatggtatacccttctgttataaagatgaagcaggtctcttatgactgttcctgccaacgagttatggaggtaaatgactgtgacctggagtggagaacaaaaagatgg

SEQ ID NO: 730195 - DNA, 566 bp, Homo sapiens; identical to SEQ ID NO: 224732

SEQ ID NO: 730196 - DNA, 480 bp, Homo sapiens
gactgcaaaagaaacatctgagaaatttgcatggccagcaaaagaaagacctaggaagatcacatgggaggaaaaagaaacatctgtaaagactgaatgcgtggcaggagtaatacctaataaaactgaagttttggaaaaaggaacatctgagatgctcacgtgtcctacaaaagaaacatctacaaaagcaagtacaaatgataagatgcccacatcagagtcaggacaaaaagaagatacgaaatcaccttcagtttctgaggtcacagctatggatgtggaagagataggaaaggcctcaccacttaagatagaagcagcagctgcatagtggtaacagcaatgagtggatgtcaaaagacagattcaactagcctatcaatattcttgggtgcagttccttctcatgaaagagcaagggaacttaaaaaatatcactgtgaacaacttacagcaaaaataaaacaaatgaaaaat

SEQ ID NO: 730197 - DNA, 426 bp, Homo sapiens; identical to SEQ ID NO: 231254

SEQ ID NO: 730198 - DNA, 694 bp, Homo sapiens
agtactagtacttcatgattaccaaaagatgctggcaacataatacaagaaaaggaataaaataaaggagcacccagagccttctgcctggagagattatcagttattttttgtctgtcttagaaaaccttctgcctgggcattccaatctttttagcaaatctggtattcattatccacacttgttggtattctctcatacaattctaaggttgccctggggccacccctctgaaaacagatttgccctgtgatgtacaatcccaagcaactggccatatctttcattggtaatgggtgaggagaaaggagcagagctcctgcaagtgaagcagggaactgtacaacataaacatttcaggatcactgacatccacatcatggctaacgtgcctatgtactgcaagatgagactgtcagcagatcattttcaaattttaacagactacttggtcatgtttgattcctaaatacgcctttggcttatttattatctgtagtataattttatagtcatagagtttataaagtaaaaagtactaatccaaaagctagaagaagacaagaaataactaagatcagagaagaattgaaggagacagagacaagaaaaactctccaaaaaaatcaatgaatccagaagctggttttttgaaaaaattaaaatagaccactagctagacttataaagacg

SEQ ID NO: 730199 - DNA, 2778 bp, Homo sapiens; identical to SEQ ID NO: 236595
  misc_feature (2504)..(2504): n is a, c, g, or t

SEQ ID NO: 730200 - DNA, 978 bp, Homo sapiens; identical to SEQ ID NO: 236593
  misc_feature (569)..(569): n is a, c, g, or t
  misc_feature (688)..(688): n is a, c, g, or t
  misc_feature (697)..(697): n is a, c, g, or t
  misc_feature (700)..(700): n is a, c, g, or t
  misc_feature (710)..(710): n is a, c, g, or t
  misc_feature (731)..(731): n is a, c, g, or t
  misc_feature (752)..(752): n is a, c, g, or t
  misc_feature (755)..(755): n is a, c, g, or t
  misc_feature (772)..(772): n is a, c, g, or t
  misc_feature (781)..(781): n is a, c, g, or t
  misc_feature (785)..(785): n is a, c, g, or t
  misc_feature (814)..(814): n is a, c, g, or t
  misc_feature (831)..(832): n is a, c, g, or t
  misc_feature (844)..(844): n is a, c, g, or t

SEQ ID NO: 730201 - DNA, 2005 bp, Homo sapiens; identical to SEQ ID NO: 501798

SEQ ID NO: 730202 - DNA, 1406 bp, Homo sapiens; identical to SEQ ID NO: 485369

SEQ ID NO: 730203 - DNA, 1636 bp, Homo sapiens; identical to SEQ ID NO: 235753

SEQ ID NO: 730204 - DNA, 2134 bp, Homo sapiens; identical to SEQ ID NO: 526668

SEQ ID NO: 730205 - DNA, 1776 bp, Homo sapiens
ctttctccatttgccagcccatggcattgctgccaccctgatggagcgccctctcatctggcaccttcctggcctctttcccaggccccagttctgtccatgcagctgtgggtgcttcctgcattgcgggtctcacggggaggagacgagagtgcccctggttgagtcaggaaagaattctatcttcacgtcgctgccagcaaatgaccacagcagcttcacgacctctgcaggaacctatcttggtaaagaaacggggcctatgtggtggccgagcctcaggtgtggccgagcttcaggtgtggcccttatgcacagcacagcccaagcctgtgggcaccactcgccctgggctgcctggcacctggactccttcccatccttggccgaggtctgcgtggcccttcagggccgaatctgacactgtcttcctcctgagtctgccccccgggcttcctgcccacccccaggctgtttcatggcctctgcagggagcttcgtagaggtgaggctggtgccatctgtctgcttcagaccacctcaggctctgcgtgccctcacagtcccctctgcacttctctgtggggcagggaagcccttcccatcaggtctgctccagcctggctaccttgttcctgctgtcccctccccttcaggcccccggacaagacttcagtgtacttgctggtgccgggcagaatgggggaccttgcctctcacacacacctgctagtatctccgcaacctccaggcatcatctcagctgacagtgacgccatcctggggaagctcccctgactcctggctctcctggaagcctgtggtgctccttcacaatggcccgtggcccttcataggtcccgtaagccagtgtcacagggattcggcttttctcttctgtgtttgcctgctgcgggactgtgagcagcttcagggccaagacagtgcctttccatccgtgaatctcctgatccatcagaatactcgaaagagaaataccgactgagtgtattcattaaagaattaatgttccttacaggatcattgttgttgaactgacctgacatgtgtatagtaatctcatgaacaagaaagaatgtgttcacacgtttgcttaaattgaatttagcaatcgcattaggatactgatatttccacaatgtatatacactatccttttaaatttaacttatttgctttttagacggaagctcctcagtcttagagagttctgaaggtggatttctcagccacgttcaacctgatgagttcactgcttcttccccaaacattgcagagctgcaggaaatttgggctgtgaacttacgtgtgatgtttactattatgcaaatgctcagacgacacacacgacctaccctgatggtttggaagttgtgcagtttcttaacaagcagacagatcagaccctctagttgcaggaaaaaaagctcagggcggtcgagtgcagtggctcgcgcctgtaatcccagcactttgggaggccaaggtgggcagatcacgaggtgaggagttcgagaccaacctggtaaacatagggaaaccctatctcttctaaaaaaaaaaaaatacaaaaaattagttgggcgtggtggatggcacctgtagtcttagctactcaggaggctgaggcaggagaatcgtttgaacctgggaggtggaggttgcagtgagccaagatcatgccattgcactccagcccgggttacagtgtgaggctttctaaaaacaaaaacaaaacaacaacaacaacaaaac

SEQ ID NO: 730206 - DNA, 1921 bp, Homo sapiens; identical to SEQ ID NO: 284227

SEQ ID NO: 730207 - DNA, 4434 bp, Homo sapiens
  misc_feature (1357)..(1357): n is a, c, g, or t
  misc_feature (2241)..(2241): n is a, c, g, or t
  misc_feature (2245)..(2245): n is a, c, g, or t
  misc_feature (2576)..(2576): n is a, c, g, or t
  misc_feature (2913)..(2913): n is a, c, g, or t
  misc_feature (2990)..(2990): n is a, c, g, or t
  misc_feature (3701)..(3701): n is a, c, g, or t
  misc_feature (3780)..(3780): n is a, c, g, or t
  misc_feature (3883)..(3883): n is a, c, g, or t
  misc_feature (4215)..(4215): n is a, c, g, or t
agcaatgcacacgagcagacagagaagcaacatctttaaggtactgagggcaggagaagttaatgtagaatactatgccagaaaaaataaattcccaaaagtggaagtgaaataaggacatttagagatgtacaaaagctgaccgaattcactaccagtcaacccacactacaagaaacatcaaatgagtcctccaagcagaaggaatccaataccagatgaaaatccagatctccacgaggaaatgaagaacaccagaaatggatcggccctttcttcaaataagagcagttggaataacaaagctgttcagttgtacccttggaatccactgaaatcctgggtagggaagctccagtaccaccaactggaaagactgggaatgcctaatagctggtactggccattgtcgtaggctttgtccactctgacaaactgaagatggggactcgactcaccttcgccagccacaggaggacctccagacgaggttaggtcgacttcccgataactttagatcctgaaacctcacgggatttttcttctcttccctttgatctctcttccgcttgctcaacaggacaggactcgctgcctttctttcccgtcagaaagggatcccttgcggacaggacctaagtgagtagctggtttcccctacttgtccttccgggcctgggtgtctcgggggctcaggctgacgggagacctaactaccggcgagtgagaccagcaggagcctggaggggcgcgcaccagggtggaggtttggtgccgggggttgagaacaacagtcaaaccctcttcttcccctggcaccacgcacctgccccccgggatgccgaacgaagtggtccctaaagctcctctgcaggcccaaccgaaacaggcctgaagctccaggatgggcgagaggatcctctttgagcgaaaccagccttctgcctggctggccctggtcaacaccctgggaagaggccgatttggcggacagaacggaagaaaagacctaaaggtagaatctcatgatgtcgagatgttaaaacactcaaattttaaggttcgactgtgagggggagatagggggtctcgagctggatcgacccctgagccttcatctgcagagtcctgtgcaccagctcagaggacaggactatgtgcaccaatggttctcatcaggcggcaacttcaccctcacatgcctcccccatccctgctggtacacaagaccacgactaggggaagcccggagggagaatgttaacccctggcatctatctagtcagcagaggtgagggatgctgctaaacaccttacaatccaccggaggacacccgcccccaccgaccccgaagtngccattccctggaggtggggaaactcgcctgtagatcaatgcccacgcacttggcggacaggaaatcacgaattggccactaactggatcttggatctgaggaaaaaattccagcgtcagagggaactctcggagatttgcccagagcataaggaacgtactccttccctcagtgatggatcctcacatctgggggaaatcatagacaatttcttttgtagggcgaactctgctatacagtttatgatgtcagagtgaatactttctttgagttgcagtcagaaactgtagatttttaaaaatttaaaattcattattctctgtcagtattccaaagtgtatacagaaagctattgcactgttcaggagatggcgcttaacattttggaaattcaaggtgatgaatgtccagataagactatctctcctggtacaaagtttgacaatgctgaacatttttaaaggttctttttgatatacaaagtgcaccaatgagtgctttttaattcttacaataattctgggtgaggtaggtatttttccaattcccattttatgcttcggtagccctttgtatttatacttcaaaacacttggctctcttgtaattatttaagaaattagttgtgattatttgtttaatgtgcaggagttacaaaaggcaagctttagaacaagacagacctggttatgattcctggctctgaaagctgtacaccctgtgaccctagacaggtgttttaatgcctcgctgcctctgtttcttgctctgtaaaatgtgaacaataacagtattggcctcatgctttttttgggttttaaaagtaataatgtggacaaagatcagtggagtgcctggcatgctgaacccattccatgactgntagntatagttgttatgatttgtatcaatccattttcacactgctataaggaactacctgagactgggtaatctatgaagaaaagaggtttaattgactcacagttctgcatggctgggagtcctcaggaacttacaatcatggcagaaggggaagcaagacatttcttatatggcagcaggacagaaagagagagagtgaagggggaagtgccacacacttccaaacaaccatatcttgtggttaattaaaaagtactcattggtgtgccttgtatagaaaaaaatatacactcactatcatgagaacagcaaggagggagtctgcccccaagnttcaatcacctcccagtagacccctcccctgacatgtggggattacaattcaagatgagatttgggtggggaaacagagtcaaaccatatcgtgattgttctataataaagagatgcccacatgtgtttcatcagggacagtgctcattaaccagttgtcctgccgtaattattaatagtatcccctttgctttcaaaagtgtcctagtttacaaaaagtatagaaatggaggacagaatagtggttgcccaagattggaaaagggtaagggtaaagggtgcagaggtggatgtggttataaaaggcaacatgggagatcctcgtagtgaaggaacngtttagtatctccactgtggtggtagatacccgaacctaaacatgtgaaaaattgcatgaaactaaacacacacacnaacaagtacaagttaagttaggaaaatccaaataagatttctacattgtatcaataggtatatcttgattatgatattgcaagatggtactattcaaggaaactgggtagaggctacatgagactcccctgtattatttcctataactccatgtgaatctacaaggatctcaggattaaggaagatatcctagtttggaagataaaaaatatatcccagtagtaatatccactgtcccaccagggcctgactaccttctataaaaagaagtgcctttgttcccctcaagttcctttatttggttttattcttcttcacagtacctacctccacttggcagattacatttattttttcatctttcaacagctatttactgaatgcctactagatgccaggcttgagatctagcaatgaacaagatctctgtgaaacttacattccaggaggagaaataaataataaaccaaaaatataatcagtaaattatttaatatgctgggaaacaatatgtgtaatggaagaaatatgtaaagtgatggattagggttctccagagaaacagaaccaacaattgactcatgtgattatggaggctgagaagtctcaagatcacagttggcaagcttgagacacaggagagcccatggtgtgtttctgatttgagtccaaaggcctgagaaccaggagagatgatggtgtgattacagntcaaaagctggcaggcttgaggcccaggaagagccagtgttgcagttcaattccaaaggcaggaaaaggctgatatctnagctgaagcaatcaggcagaaggagctctctcttactcatgggcaggtcagacttttggttctattcaggcctttaagtgattggatgaggatcatctactgnggaaagaaataagctttattcagtgtactgattcaaatgttaatctcatccaaaaccatgctcacagacacacccagcataatgtttgaccaagtatctgggcacctgtggttcagtcaaattaacacatattaactaccttagcaagatgaaaagcagtgaatgcaggatggtggttgaaattttaaatacgttggttatatagtctcattgaaaaaggaacatttgagtgaagacttgaaggggtggtggaataaaccatttatttgcttattgcctgtctccctctatcagaatgaaagcttcatgaagcgagagacttaatttttatntgttatatccctagtgcctggtgcagggtaagtactcaaaaatatttgttgagtgaataagtaatgattgaggatggggactggtttgtatctggttatatctcttgtccttagcacagtacctggcacatcctaagccatccaaaagagttggttatatgattgtctttgaattctatgactgtttataatatacagtaaacttcactgaagacactg

SEQ ID NO: 730208 - DNA, 4168 bp, Homo sapiens
  misc_feature (1091)..(1091): n is a, c, g, or t
  misc_feature (1975)..(1975): n is a, c, g, or t
  misc_feature (1979)..(1979): n is a, c, g, or t
  misc_feature (2310)..(2310): n is a, c, g, or t
  misc_feature (2647)..(2647): n is a, c, g, or t
  misc_feature (2724)..(2724): n is a, c, g, or t
  misc_feature (3435)..(3435): n is a, c, g, or t
  misc_feature (3514)..(3514): n is a, c, g, or t
  misc_feature (3617)..(3617): n is a, c, g, or t
  misc_feature (3949)..(3949): n is a, c, g, or t
agcaatgcacacgagcagacagagaagcaacatctttaaggtactgagggcaggagaagttaatgtagaatactatgccagaaaaaataaattcccaaaagtggaagtgaaataaggacatttagagatgtacaaaagctgaccgaattcactaccagtcaacccacactacaagaaacatcaaatgagtcctccaagcagaaggaatccaataccagatgaaaatccagatctccacgaggaaatgaagaacaccagaaatggatcggccctttcttcaaataagagcagttggaataacaaagctgttcagttgtacccttggaatccactgaaatcctgggtagggaagctccagtaccaccaactggaaagactgggaatgcctaatagctggtactggccattgtcgtaggctttgtccactctgacaaactgaagatggggactcgactcaccttcgccagccacaggaggacctccagacgaggacaggactcgctgcctttctttcccgtcagaaagggatcccttgcggacaggacctaagcaccacgcacctgccccccgggatgccgaacgaagtggtccctaaagctcctctgcaggcccaaccgaaacaggcctgaagctccaggatgggcgagaggatcctctttgagcgaaaccagccttctgcctggctggccctggtcaacaccctgggaagaggccgatttggcggacagaacggaagaaaagacctaaaggtagaatctcatgatgtcgagatgttaaaacactcaaattttaaggttcgactgtgagggggagatagggggtctcgagctggatcgacccctgagccttcatctgcagagtcctgtgcaccagctcagaggacaggactatgtgcaccaatggttctcatcaggcggcaacttcaccctcacatgcctcccccatccctgctggtacacaagaccacgactaggggaagcccggagggagaatgttaacccctggcatctatctagtcagcagaggtgagggatgctgctaaacaccttacaatccaccggaggacacccgcccccaccgaccccgaagtngccattccctggaggtggggaaactcgcctgtagatcaatgcccacgcacttggcggacaggaaatcacgaattggccactaactggatcttggatctgaggaaaaaattccagcgtcagagggaactctcggagatttgcccagagcataaggaacgtactccttccctcagtgatggatcctcacatctgggggaaatcatagacaatttcttttgtagggcgaactctgctatacagtttatgatgtcagagtgaatactttctttgagttgcagtcagaaactgtagatttttaaaaatttaaaattcattattctctgtcagtattccaaagtgtatacagaaagctattgcactgttcaggagatggcgcttaacattttggaaattcaaggtgatgaatgtccagataagactatctctcctggtacaaagtttgacaatgctgaacatttttaaaggttctttttgatatacaaagtgcaccaatgagtgctttttaattcttacaataattctgggtgaggtaggtatttttccaattcccattttatgcttcggtagccctttgtatttatacttcaaaacacttggctctcttgtaattatttaagaaattagttgtgattatttgtttaatgtgcaggagttacaaaaggcaagctttagaacaagacagacctggttatgattcctggctctgaaagctgtacaccctgtgaccctagacaggtgttttaatgcctcgctgcctctgtttcttgctctgtaaaatgtgaacaataacagtattggcctcatgctttttttgggttttaaaagtaataatgtggacaaagatcagtggagtgcctggcatgctgaacccattccatgactgntagntatagttgttatgatttgtatcaatccattttcacactgctataaggaactacctgagactgggtaatctatgaagaaaagaggtttaattgactcacagttctgcatggctgggagtcctcaggaacttacaatcatggcagaaggggaagcaagacatttcttatatggcagcaggacagaaagagagagagtgaagggggaagtgccacacacttccaaacaaccatatcttgtggttaattaaaaagtactcattggtgtgccttgtatagaaaaaaatatacactcactatcatgagaacagcaaggagggagtctgcccccaagnttcaatcacctcccagtagacccctcccctgacatgtggggattacaattcaagatgagatttgggtggggaaacagagtcaaaccatatcgtgattgttctataataaagagatgcccacatgtgtttcatcagggacagtgctcattaaccagttgtcctgccgtaattattaatagtatcccctttgctttcaaaagtgtcctagtttacaaaaagtatagaaatggaggacagaatagtggttgcccaagattggaaaagggtaagggtaaagggtgcagaggtggatgtggttataaaaggcaacatgggagatcctcgtagtgaaggaacngtttagtatctccactgtggtggtagatacccgaacctaaacatgtgaaaaattgcatgaaactaaacacacacacnaacaagtacaagttaagttaggaaaatccaaataagatttctacattgtatcaataggtatatcttgattatgatattgcaagatggtactattcaaggaaactgggtagaggctacatgagactcccctgtattatttcctataactccatgtgaatctacaaggatctcaggattaaggaagatatcctagtttggaagataaaaaatatatcccagtagtaatatccactgtcccaccagggcctgactaccttctataaaaagaagtgcctttgttcccctcaagttcctttatttggttttattcttcttcacagtacctacctccacttggcagattacatttattttttcatctttcaacagctatttactgaatgcctactagatgccaggcttgagatctagcaatgaacaagatctctgtgaaacttacattccaggaggagaaataaataataaaccaaaaatataatcagtaaattatttaatatgctgggaaacaatatgtgtaatggaagaaatatgtaaagtgatggattagggttctccagagaaacagaaccaacaattgactcatgtgattatggaggctgagaagtctcaagatcacagttggcaagcttgagacacaggagagcccatggtgtgtttctgatttgagtccaaaggcctgagaaccaggagagatgatggtgtgattacagntcaaaagctggcaggcttgaggcccaggaagagccagtgttgcagttcaattccaaaggcaggaaaaggctgatatctnagctgaagcaatcaggcagaaggagctctctcttactcatgggcaggtcagacttttggttctattcaggcctttaagtgattggatgaggatcatctactgnggaaagaaataagctttattcagtgtactgattcaaatgttaatctcatccaaaaccatgctcacagacacacccagcataatgtttgaccaagtatctgggcacctgtggttcagtcaaattaacacatattaactaccttagcaagatgaaaagcagtgaatgcaggatggtggttgaaattttaaatacgttggttatatagtctcattgaaaaaggaacatttgagtgaagacttgaaggggtggtggaataaaccatttatttgcttattgcctgtctccctctatcagaatgaaagcttcatgaagcgagagacttaatttttatntgttatatccctagtgcctggtgcagggtaagtactcaaaaatatttgttgagtgaataagtaatgattgaggatggggactggtttgtatctggttatatctcttgtccttagcacagtacctggcacatcctaagccatccaaaagagttggttatatgattgtctttgaattctatgactgtttataatatacagtaaacttcactgaagacactg

SEQ ID NO: 730209 - DNA, 1562 bp, Homo sapiens; identical to SEQ ID NO: 237170

SEQ ID NO: 730210 - DNA, 2601 bp, Homo sapiens; identical to SEQ ID NO: 234632

SEQ ID NO: 730211 - DNA, 2294 bp, Homo sapiens; identical to SEQ ID NO: 238080

SEQ ID NO: 730212 - DNA, 2274 bp, Homo sapiens; identical to SEQ ID NO: 231862

SEQ ID NO: 730213 - DNA, 1832 bp, Homo sapiens; identical to SEQ ID NO: 400049

SEQ ID NO: 730214 - DNA, 1799 bp, Homo sapiens; identical to SEQ ID NO: 237299

SEQ ID NO: 730215 - DNA, 1910 bp, Homo sapiens
  misc_feature (837)..(837): n is a, c, g, or t
  misc_feature (991)..(991): n is a, c, g, or t
agaaactatgtagtgaaattacatagtgatttttcattctcgcagtaaaaatttcctgggatttttttctttttaatgggtgggaaactacctggaaatagtggatgccagagtcttaaacagaaggaatgaaataataaagatcagagcagaaataaatgaaatagaggccaggaatacaacagaaaagttcaacaaaacagagttggtttttgaaaaggtaaacaaaattgacagacctttagttggactaaccaagagaaaaaaaagtcaaaatacatgaaggagacattacaactgataccatagaaataataagatcataaaagactactctgagtaaatatatgccaaaaaattgaacaaactagaagaaatggataaattcctaaaacatacaacctatcaggaccacatcatgaaggaacagaaagtctgaacagacctataatgagtgaggagattgaatcactaagtcaaaacctcccaacaaatagaagcccaagagcagacagcttcacgggcaaattcctctgaacatctaaagacgaattaccaccaacccttctcaaacttccaaaaaaactgagcaggagagaacacttcccagattcattttatgaggccagcattacccttaaccaaagccagataaggacattgtaagaaaataaagttacaggccaatatccttgatgaacagttgcaaaaatcctcaacaaaatactagcaaactgaattgaatagcacattaaaaggagcgtacaccatgatcaagtgagatttttcctctgaatgtaaaaatggttcaacatatgcaaatcattaactgagctncaccaaattaacagaatgaaaaataaaaaccataagatcatcttaaaagatgcaaaaaaggcatttgacaaaatgtaacatcctttcacaatgaaaattctcaacaagtaaggtatagaacagtatgccacaacataataaaggctatgtgtgncaggcccacagctgacatcatacttaatggtgaaaagctgaaagcttttcctctgaggtcaggaagaagacccttgctacttccattaaatatggtaagttctagccagaacagttaggccaagaaaaagaaataaaggcagccaggagtggtggctcatggctctgattcccagcactttgggaggctgaggtgggcggatcacttgaggtcaagagttggagaccagcctggccaacatgaaaccctgtctctactaaaaaatacaaaaattcaccaggcatggtgatgcatgcctgtaatcccagcttgctcgggaggctgaggcaggagaatcacttgagcccaagaggtggaggtcgcagtgagctgagattgcaccattgcactccagcctgggcaacagggcaagactgtctcaaaaaaaaaaaaaaaagtaaaagacacctaaatcataaaggaagaaataaaattatctttatttgcagtggcataatcttgtatgtagaaaaacccaagacttcatcaagaaatctgttcacttagtcaagttctgggatacaaaaatcaacatacaaaaatcagttttctgtctatacactaacaacaaactattcaaaaaagagattaagaggtcaggtatggtggttaacacctgtaatcccagaactttgggaggccgaagcgggcggatcacctgaggtcaggagtttgagaccagcctggccaacatggtgaaaccctgtctctacaaaaaatacaaaaaaaacaactgggtgtggtggtgcaggctgtaatcccagctacttggaaagctgaggcaggagaattgcttgagcctgggagagacggaggctgcagtgagccgagatcacatcactgcactccagcctgggtgacaagagcgaaactccatctc

SEQ ID NO: 730216 - DNA, 977 bp, Homo sapiens
gatttccttaattaagatgatcagaggagacttccaagtggagatggtatttgacatgagcagaattttgaaatcaggaaagggctatcatcaaggtgatttttttaaaaaacttgctttaaatatttattgtaaaaagcaaagctgtaaaaactatttaagctgatacttctgcctcttaatttgttttcatgtgaataatttttaagtaattaaatggcattttagtcgggaaaaatagaaaatatgaaacatttataattcttaatattctgaaaactcttcaagttttcagcatggtagaagtagattattttagctatttatttaaactcaattttcttcttgttttaaaaaaccatagcctttcgttgttgtttctcttctttttgacaactattgccaaataagttttatggaatacttgggtttttcttccccatgtaatgctgggcagttagcaatagttctgaattcaggtcacttctctgttgataagtgtaaaatgcatatctataggtcagtgctaacaaggggtctagttagcttcttagctatctgcagaatatattttcttttcatcacaaaacaagtaagactagatttggcatccttcattatcccaaaatgaagcaaaactacttgagtcatttggattatgcccaggaaaacatattgactcagaaagataaacaaggctgggcgcagtggctcacgcctgtaatcccagcactctgggacgccaaggcggacagctcacctgaggtcaggagttcgagacccgcctagccaacagggcgaaacctcgtctccagtaaaaatacaaaaattagccgggcgtggtggtgggcgcctgtaaccccaggccctcaggaggttgaggcaggagaattgcttgaaccaggaagtggaggttgcggtgagccaagattgtgccactgcattccagcctgggtgacagaataagactccatctc

SEQ ID NO: 730217 - DNA, 3170 bp, Homo sapiens; identical to SEQ ID NO: 238061

SEQ ID NO: 730218 - DNA, 1646 bp, Homo sapiens
agatggtactacgtgtgcatgtgccaccatgcctggctaatttatttttaagatggagtcttgctatgttgcccaggctggttttgagctcctggcctcaagcaatcttcctgagacaggaatcccaaagtgctgggattacaggtgtgagccactgtgcccagccaaatattagaacttttaaattcatttagtatgtaagcttactgccaagcatgaaagaatcactttgaaggccagtaatgttttaaaggtctggaagattctcttgagggctaggaagcattatgtgctaggttcttgaaccaggagaaaaggggtatcactaagaagaagggaaggaatcctggtatgcaaaatagcttgggcgctatccttgcacatttgacaagtttagtgaagtactattgaactgttcagtaaagtatctgttgcctatagataaaatgtcttttgtagatacttatatatctacctacctatagatatctatatatctgtatctatatatcccttaaagctaagctaatttccttaaccttttctctgttgatatttgtttggtagcctttatctgattctagttaataactcgtaccctgtcatttttttaaaaataccctttgtttttgtaatgtgttctttcattcttcttcccaattcagttttggtacgttcctgttacgtaaatctaatctggtgagcagagactttcttaggattatgccacttggtgaggcaatcacagggtcttagccctgaaggcgcccatactgactttatcagtttattctagggagatcaggtttggggcactaacttaatactaacaaactcctaagattaatttaattttatttatttgtttgagacggagtcacccagggtggagtgcagtggcgtgatcttggctcactgcaacctctgcctccctggttcaaacgattcttgtgcctcagcctcctgaggctgggactacaggcgcatgtcaccacgtctggcttatttttgtagttttagtagagacaaggtttcaccatgttggccgggctggtcttgaactacctcaggtcccaccttggcctcctaaaatgctagaattacacagacgggagctaccatgcctagccaaaactcctaagatttacttacttacttactttatttatttatttgagacggagtctcgctctgtcccctaggctggaatgcagtggtgtaatctcagctcactgcaacatctgcctcctgggttcacctgtctctgcctctcagatagctgggattgcaggtgcatgccaccatgcccgactaatttttgtatttttagtagagatggggtttcaccatgttggccaggctggtctcgcactcctgacctcaagtgatccacccgcctcggccccccagaatgctgggattacaggtgtgagccactgtgcccggccctaagattaattttcaaacaatgtgcatcagtatgttagaaatacctagtgttagccgggtgtggttgtgtgtgcctatagtcccaactactctggaggctgacttgggaggattgcttgaggccaggagttcaggggcgcagtgaactatgattacaccactgccccaacctgggtgacagtgggagaccctgtctt

SEQ ID NO: 730219 - DNA, 3156 bp, Homo sapiens; identical to SEQ ID NO: 234290

SEQ ID NO: 730220 - DNA, 2376 bp, Homo sapiens; identical to SEQ ID NO: 236589

SEQ ID NO: 730221 - DNA, 2178 bp, Homo sapiens; identical to SEQ ID NO: 229536
  misc_feature (1)..(1): n is a, c, g, or t
  misc_feature (1513)..(1513): n is a, c, g, or t

SEQ ID NO: 730222 - DNA, 1559 bp, Homo sapiens
cagagagcgttgagctgggaacagtgacaagtgcttatcaagttccttcactctcaacacggttgacaagaactgatggcattatggaacacatcacaaaaatacccaatgaagcagcacacagaggtaccataagaccagtcaaaggccctcagacatccacttcgcctgccagtcctaaaggactacacacaggagggacaaaaagaatggagaccaccaccacagctctgaagaccaccaccacagctctgaagaccacttccagagccaccttgaccaccagtgtctatactcccactttgggaacactgactcccctcaatgcatcaatgcaaatggccagcacaatccccacagaaatgatgatcacaaccccatatgttttccctgatgttccagaaacgacatcctcattggctaccagcctggggggaggtgggctgggctggctctgggagttctggaagctcccaagctttgtagctcaggccaacagagcccagggacagaggcagagccccagaggggtgacaccccctctgagtcccattcgcttcacctatcttctatggccgccccatagccatactgcccattagcgtggccgccagcattacagctcagaggcatcgccgctacaaagctttggtggcatcagagccgctcagtgtgcggctctatcgtctgggcttggcttaccttgctttcacaggcccactggcatacagtgccctctgcaacacagctgccaccctcagctatgtggcagaaacctttggctccttcttgaattggttcagcttcttcccccttcttggccgcctcatggagtttgtcctccttctgccttaccggatctggaggctactgatgggggagactggcttcaacagcagctgctttcaggagtgggcgaagctctatgagtttgttcacagttttcaggatgagaagcgtcagctggcttaccaggttttgggcctctcagaaggggcaacaaatgaagaaatacatcggagttaccaggagctagtgaaggtctggcacccagaccacaacctggaccagacagaggaggcacagaggcacttcctggagatccaggctgcgtatgaagtcctgagtcaacccaggaagccctggggatcccggaggtgaaaagaaacttccccctgaggactgactcttcctagcagagctgggcaacttgtcccaaatctagctttgcccacgaatggcatcccaacagagttaaagaaactgcttgcaggggctgggcgtggtggctcatgcctgtaatcccagcactttgggaggccgaggcgggcagatcacgaggtcaggagttcgagaccagcagcctggccaatatagtgaaacttcgtctctactaaaaatacaaaaaattagccaggagtggtggcaggcacctgtagtcccagctacttgggaggctgaggcaggagaatcacctgaacctgagaggcggaggttgcagtgagccgagatcacgccactgcactccagcctgggcaacaagagtgaaactccgtctc

SEQ ID NO: 730223 - DNA, 873 bp, Homo sapiens
gaactgatggcattatggaacacatcacaaaaatacccaatgaagcagcacacagaggtaccataagaccagtcaaaggccctcagacatccacttcgcctgccagtcctaaaggactacacacaggagggacaaaaagaatggagaccaccaccacagctctgaagaccaccaccacagctctgaagaccacttccagagccaccttgaccaccagtgtctatactcccactttgggaacactgactcccctcaatgcatcaatgcaaatggccagcacaatccccacagaaatgatgatcacaaccccatatgttttccctgatgttccagaaacgacatcctcattggctaccagcctgggagcagaaaccagcacagctcttcccaggacaaccccatctgttttcaatagagaatcagagaccacagcctcactggtctctcgttctggggcagagagaagtccggttattcaaactctagatgtttcttctagtgagccagatacaacagcttcatgggttatccatcctgcagagaccatcccaactgtttccaagacaacccccaattttttccacagtgaattagacactgtatcttccacagccaccagtcatggggcagacgtcagctcagccattccaacaaatatctcacctagtgaactagatgcactgaccccactggtcactatttcggggacagatactagtacaacattcccaacactgactaagtccccacatgaaacagagacaagaaccacatggctcactcatcctgcagagaccagctcaactattcccagaacaatccccaatttttctcatcatgaatcagatgccacaccttcaatagccaccagtc

SEQ ID NO: 730224 - DNA, 1563 bp, Homo sapiens; identical to SEQ ID NO: 284118

SEQ ID NO: 730225 - DNA, 1741 bp, Homo sapiens; identical to SEQ ID NO: 236625

SEQ ID NO: 730226 - DNA, 2008 bp, Homo sapiens; identical to SEQ ID NO: 481649

SEQ ID NO: 730227 - DNA, 1540 bp, Homo sapiens
ttctctcttcccaaaactcagacactgagagaggttctcgtcagagtccaaaatgcacattaagttgtggggatcttattaacaatgatgattctgatgctgtaggtttgaagacgactcaagattccctggagacatcaatgctgctggtccatgggccacggcttggatagaaagggtttagggagaggttgacaagtaataatgcagggtgggtgagtactgctctactggcattctaaaagcagagtgagacagagaggggtatggggagtggggaggaggcaggcaaagcctcctagaagtgagtgacttggaccctgaataggtgagtcaatttaccaagcagaaaagtaggaaaggcctttggtcagagggagcaccatggatgtggaccccggctggctcctgcatagagtgaagaatgcagaggaaggtgatgggacgatggccagagaggaggctggaaagctcaccagggtctggatggtgaagggtcagctctgtttgccatggtaagacctaagactccagtcagcagggagtcttgaggtttcacagaggtctggttatagtggacatgacaaactgctttgaaaatagccaatactacatcatgttagagaatttgcataacccagcagggcgcggtggctcacgcctgtaatcctagcactttgggaggccgaggcgggcggatcatgaggtcaggagatagagaccatcctggctaacacggtgaaaccgtctctactaaaaatacaaaaagaaattagccgggcgtgggggcgggcacctgtagttccagctacacgggaggctgaggtaggagaatggcgtgaacccgggaggcggggcttgcagtgagccgagatcgcgccactgcactccagcctgggcgacagagggagacgccgtctcaaaaaaagaaaaaaaaaaaaaaaaaaaagagaatttgcataacccaaaggagattgtgcttgaacactcccaggcagtgaataatctgcaaaggagtaagactgtagttgagaggcaggtttttagacttccacaggcttgggggacaaacagaacagaaattgatttctggttccctgctttctagctatataacctcaagaaaattaattaactttctgaatcttagttttctcacctgtagaaaggatgcaataaatcctgtctcatcaaagaattgtgaagaggaagtcattcatttaattaattgaagcactacattttggcaaagcatgcagtttgttgataacaggaggtatttgttaacttattattaatgttgatttggagctcccatgaatttttgcctaggaaatgacctggtagatcggatagttaccatgttgatagattgccaagtgccttttctcatgtgtggggttctgatgccatcatcagctggaagctcagttggtcttgtgggtggcatgctgcaccagttgtctgattcagcaatgctgtgagagaattgagagggcgttcattcagtaaagggtgggaaggattttcttaaatgttt

SEQ ID NO: 730228 - DNA, 1761 bp, Homo sapiens
gagctgatgtccactaatagaaagaatagaaagatctgattatttcctttttgccagtgtgtagtcaccttggtaaaaggccataggtccctttggaaaaggctgggagaaagatttaccttataaatgtttggcggtggagtggagttcttccacaatagtacctactctccccttcattcaaagagttctgggtctgtaaaccagctcaggtctggtaattgattgaggggatatgactctatttttatgtttcaagttagacttgttcatttgacctacaactcttccacttctacaaagcaagtcagaatttgctagacttcccagctgtttcacttccaggaacaccatgatcaactagtcagcataggtctctgagtcagactattttgactgctgtttcaactccattgtccattatggtaaccacacccgccttgcttttggtggtttattgccaccacttggctgccaccaacctggggcccaattacccccattgcacttaggttttccaacttgatggcagcagtttccacatccttgacatctattctcacagatattcctcaaattgctgtctgtctgtttaaattggaaaaatcatttagttcttttgaagtgtagcgcaccttctcatgggtcatactttgtacttcacctttcagggcttgctgggatttgagtccagttatcagttgataaggaaagtgggatgggggtgggtcctgaagagaatcagtggggtcttccatgacagctgcctcaggggaggccattacagttttctcgggcaaagcagggttaacctgctcaaacatgggttggggggtgcagttgcttcttctgacaaagaagactcgttggaatttaggggttcagtgtccccatcttcgtcatgatcttcccatatgtccccaaagcaattttcaaagtcctattccttcccaatctatgcccccactttaacagcagatactctgcaaggtttggaatttaacttgcattgcaattcagacctcgcaggatgaagattcttggtttggttttctgcagtctcagctctgaggctgtaggagataaggatttctttctaggaaggcatagaaactttcaggtcatttatgctgcatctgagtgggaattcaaatccctcaactccttttctttcccactttgtccagcccaattaggagcaaccagccaagttcattatgcccattagtttgacggaaatgttctacgttatcaaatacgtggtcacccagaaccttgcctatcataattatttgattaggagtatctaatagtgatatttttgtgtatctctattaccacatcacaccgatgactatcagtgctttattcactattggaactagagtcattagtgcttctaaatctagtcatttagagaaccaattccagaaacccccaaaccaattcagagaatttattcttaaaattctgttcctggctgggcattgtcttatgcctataattccagcactttgggaggccaaggtgggtggatcacttgaggtcaggagttcaagacaagcctggccaacatggtgaaaccctgtctctactaaaaaaatacaaaaattagccaggcatcgtggtgcatgcctgtatttccagcttcttgggaggctgaggtgggaaaatcgcttgaatctgagaggcagagtttgcagtgggctgagatcgcaccactggactccagcctgaacatcacagactgagaatttgtct

SEQ ID NO: 730229 - DNA, 492 bp, Homo sapiens
tggcgtcccccagctgactggcctacctgctccccactccttctccaagaaggggcagtttggagaaggttgtgccagtcgctgtgactgtgaccactctgatggctgtgaccctgttcatggacgctgtcagtgccaggctggctggatgggtgcccgctgccacctgtcctgccctgagggcttatggggagtcaactgtagcaacacctgcacctgcaagaatgggggcacctgtctccctgagaatggcaactgcgtgtgtgcacccggattccggggcccctcctgccagagatgtgaggctccctactgccccttccacctgccaccagcagggggcagtgtagtgtcagctgccagagcacccctccccccgcgcccgccgcccacctctcccaccttacccccggtctcttcctctgacccgtcttcagactagttactgcagtgggaaggtgggagggagacggtggggtaagggctgattga

SEQ ID NO: 730230 - DNA, 1118 bp, Homo sapiens
aggtgccgggaggagtgcccggtgggccgctttgggcaggactgtgctgagacgtgcgactgcgccccggacgcccgttgcttcccggccaacggcgcatgtctgtgcgaacacggcttcactggggaccgctgcacggatcgcctctgccccgacggcttctacggtctcagctgccaggccccctgcacctgcgaccgggagcacagcctcagctgccacccgatgaacggggagtgctcctgcctgccgggctgggcgggcctccactgcaacgagagctgcccgcaggacacgcatgggccagggtgccaggagcactgtctctgcctgcacggtggcgtctgccaggctaccagcggcctctgtcagtgcgcgccgggttacacgggccctcactgtgctagtctttgtcctcctgacacctacggtgtcaactgttctgcacgctgctcatgtgaaaatgccatcgcctgctcacccatcgacggcgagtgcgtctgcaaggaaggttggcagcgtggtaactgctctgtgccctgcccacccggaacctggggcttcagttgcaatgccagctgccagtgtgcccatgaggcagtctgcagcccccaaactggagcctgtacctgcacccctgggtggcatggggcccactgccagctgccctgtccgaaggggcagtttggagaaggttgtgccagtcgctgtgactgtgaccactctgatggctgtgaccctgttcatggacgctgtcagtgccaggctggctggatgggtgcccgctgccacctgtcctgccctgagggcttatggggagtcaactgtagcaacacctgcacctgcaagaatgggggcacctgtctccctgagaatggcaactgcgtgtgtgcacccggattccggggcccctcctgccagagatgtgaggctccctactgccccttccacctgccaccagcagggggcagtgtagtgtcagctgccagagcacccctccccccgcgcccgccgcccacctctcccaccttacccccggtctcttcctctgacccgtcttcagactagttactgcagtgggaaggtgggagggagacggtggggtaagggctgattga

SEQ ID NO: 730231 - DNA, 870 bp, Homo sapiens
aggtgccgggaggagtgcccggtgggccgctttgggcaggactgtgctgagacgtgcgactgcgccccggacgcccgttgcttcccggccaacggcgcatgtctgtgcgaacacggcttcactggggaccgctgcacggatcgcctctgccccgacggcttctacggtctcagctgccaggccccctgcacctgcgaccgggagcacagcctcagctgccacccgatgaacggggagtgctcctgcctgccgggctgggcgggcctccactgcaacgagagctgcccgcaggacacgcatgggccagggtgccaggagcactgtctctgcctgcacggtggcgtctgccaggctaccagcggcctctgtcagtgcgcgccgggttacacgggccctcactgtgctagtctttgtcctcctgacacctacggtgtcaactgttctgcacgctgctcatgtgaaaatgccatcgcctgctcacccatcgacggcgagtgcgtctgcaaggaaggtaatagggtggagtttcccagagagaagacttgggggatggccaagggaagaagggagagtccaagagtatgggtgggccaagggcaggggagcggctgcagggtaagggtggaggggcagcagctggacacagggaaagtatccaggctactttcttcctggaatatccactttgcttttcttcaaccacaaagatcctacctgtccttaaaggctgaggccaaaagccacctcactggcgaacgtccctcaccctcagtcatacggaaacacaattaccatgctgggaagggcctcacatctgccagagtgacacattgcgaacctttaggctggactcggatacagttgacacta

SEQ ID NO: 730232 - DNA, 493 bp, Homo sapiens
  misc_feature (492)..(492): n is a, c, g, or t
caatatcgaattgaagccttaccccttactgaaagacctttgatagattctgagggtagaatgttgaccaggatggagctgggccttggagagtggggaaggcaggcagtaacacagcaggcagtagatcaacgaggccatatcatggattgtgctgtgggatgtgaaggaaatgaacagacggaggacgcagagcagggcacctcgagctaccacggtcactaaaagctgctatgaccaagtgttctgtgagctgaaacctgaaggccaggaaggagtcactcttgtgaggggctgaaaggaacatcacagagaggggaggagctagcacaaaagctctccagatgggagaggctggtgcactgggcaagggaaagccagcaccatggtgcccagaagggaaggcagctggggggccagtctacgcagggccttgcagagtgtctgggtttactctaagggcaggtgaaatgggaagggtaccgagctcgnt

SEQ ID NO: 730233 - DNA, 379 bp, Homo sapiens
ggagctagcacaaaagctctccagatgggagaggctggtgcactgggcaagggaaagccagcaccatggtgcccagaagggaaggcagctggggggccagtctacgcagggccttgcagagtgtctgggtttactctaagggcagaggggaaggttttgatcatgacgcactgcagtctgaaactcctgggctcaggcaatcctgtctcagcttcctgggtagttgggactgtaggcaggcaccaccacctctgcctaattattattatcattttttttggagagacagggtctcaatatgttgctgtgtctcagaggggaaggttttaagtcagggaatgattctgtgagcttaaaaaatcacttggaaattgccata

SEQ ID NO: 730234 - DNA, 1151 bp, Homo sapiens; identical to SEQ ID NO: 728494

SEQ ID NO: 730235 - DNA, 337 bp, Homo sapiens
  misc_feature (33)..(33): n is a, c, g, or t
  misc_feature (188)..(188): n is a, c, g, or t
  misc_feature (208)..(208): n is a, c, g, or t
  misc_feature (298)..(298): n is a, c, g, or t
  misc_feature (312)..(312): n is a, c, g, or t
  misc_feature (316)..(316): n is a, c, g, or t
  misc_feature (321)..(321): n is a, c, g, or t
  misc_feature (323)..(323): n is a, c, g, or t
cggtacctgcgtactgggggtatggagcagcanccacacccacaggtgagcatctgacatcgtggagcagcaccccacacccacaggtgagcatctgacagcctggagcagcacccacacccccaggtgagcatctgacagcctggaacagcacccacacccccaggtgagaatctgacagcctggancagcacccacacccccaggngagcatctgacagcctggagcagcacccacacccccaggtgagcatctgacagcctggaacagcacccacacccccaggtgagcatctgncagctgctcagccngccngctcnanccggaccagctcat

SEQ ID NO: 730236 - DNA, 515 bp, Homo sapiens
  misc_feature (25)..(25): n is a, c, g, or t
  misc_feature (46)..(46): n is a, c, g, or t
  misc_feature (50)..(50): n is a, c, g, or t
cctgtggcattcagctggaacacangctgaccaccaggtgcgcatntganagcctgggtcggcacccacacccccaggtgagcatctgatggtttgcagcaacaccgacacccacaggtgagcatctgacagcctggaacagaacccacacgcccaggtgagcatctgacagcctggaacaacagcctgcaccaccaggtgcgcatgtgacagcctggaacggcaccaacacccccaggcgagcatctgacggcctggaacagcacccacacccccaggtgagcatcagacagcctggaacaacacccatcacatcaccgggtgagcatctgacagaaaattaacaaagatattcaggacctgaactcagctctggatcaagtggacctgatagatatctacagaactctccatcccaaaacaacagaatatacattcttctcatcacatggcactctaaaatgatcacataattggaagtaaacacccccgcataagtgggaccgagctcgatt

SEQ ID NO: 730237 - DNA, 759 bp, Homo sapiens
  misc_feature (47)..(47): n is a, c, g, or t
  misc_feature (55)..(55): n is a, c, g, or t
  misc_feature (290)..(290): n is a, c, g, or t
  misc_feature (353)..(353): n is a, c, g, or t
  misc_feature (376)..(376): n is a, c, g, or t
  misc_feature (404)..(404): n is a, c, g, or t
  misc_feature (424)..(424): n is a, c, g, or t
  misc_feature (720)..(720): n is a, c, g, or t
  misc_feature (734)..(734): n is a, c, g, or t
  misc_feature (738)..(738): n is a, c, g, or t
  misc_feature (743)..(743): n is a, c, g, or t
  misc_feature (745)..(745): n is a, c, g, or t
cccccactgcttccaggggagcatctgacaacctagaacatgcaccntcaccccnaggtgggcatctggcagcataaaacagcacccctactggcagatgagcatatgacagcctggaacagcacccacacccccaggcgagcatctgacagcctggagcagcacccacacccccaggtgagcatctgacagcctggagcagcacccacacccccaggtgagcatcttgacagcctggaacagcacccacacccccaggtgagcatctgacagcctggaacagcaccctncacccccaggtgagcatctgacagcctggagcagcaccccacacccccaggtgagcatctganagcctggaacagcacccacaccnccaggtgagcatctgagacagcctggancagcacccacacccccaggngagcatctgacagcctttgtctggagcatcacacacaaccacaggtgagcatcggagagtctggagcagcacccacatcccaaggtgagcatctgacaacctggagcagcacccacacctcgaggtgagcatctgtcctcccggagcaggacccatacctccaggcgagcatctgaacccatggagcagcacacacgcccccaggcgagcatctgaccgaacggagcagcacccacacccccaggtgagcatctgacagcctggaacagcacccacacccccaggtgagcatctgncagctgctcagccngccngctcnanccggaccagctcat

SEQ ID NO: 730238 - DNA, 770 bp, Homo sapiens
  misc_feature (25)..(25): n is a, c, g, or t
  misc_feature (46)..(46): n is a, c, g, or t
  misc_feature (50)..(50): n is a, c, g, or t
  misc_feature (731)..(731): n is a, c, g, or t
  misc_feature (745)..(745): n is a, c, g, or t
  misc_feature (749)..(749): n is a, c, g, or t
  misc_feature (754)..(754): n is a, c, g, or t
  misc_feature (756)..(756): n is a, c, g, or t
cctgtggcattcagctggaacacangctgaccaccaggtgcgcatntganagcctgggtcggcacccacacccccaggtgagcatctgatggtttgcagcaacaccgacacccacaggtgagcatctgacagcctggaacagaacccacacgcccaggtgagcatctgacagcctggaacaacagcctgcaccaccaggtgcgcatgtgacagcctggaacggcaccaacacccccaggcgagcatctgacggcctggaacagcacccacacccccaggtgagcatcagacagcctggaacaacacccatacccacaggtgagcatctgacatcgtggagcagcaccccacacccacaggtgagcatctgacagcctggagcagcacccacacccccaggtgagcatctgacagcctggaacagcacccacacccccaggtgagaatctgattgtctggagcatcacacacaaccacaggtgagcatcggagagtctggagcagcacccacatcccaaggtgagcatctgacaacctggagcagcacccacacctcgaggtgagcatctgtcctcccggagcaggacccatacctccaggcgagcatctgaacccatggagcagcacacacgcccccaggcgagcatctgaccgaacggagcagcacccacacccccaggtgagcatctgacagcctggaacagcacccacacccccaggtgagcatctgncagctgctcagccngccngctcnanccggaccagctcat

SEQ ID NO: 730239 - DNA, 507 bp, Homo sapiens
  misc_feature (47)..(47): n is a, c, g, or t
  misc_feature (55)..(55): n is a, c, g, or t
  misc_feature (290)..(290): n is a, c, g, or t
  misc_feature (353)..(353): n is a, c, g, or t
  misc_feature (376)..(376): n is a, c, g, or t
  misc_feature (468)..(468): n is a, c, g, or t
  misc_feature (482)..(482): n is a, c, g, or t
  misc_feature (486)..(486): n is a, c, g, or t
  misc_feature (491)..(491): n is a, c, g, or t
  misc_feature (493)..(493): n is a, c, g, or t
cccccactgcttccaggggagcatctgacaacctagaacatgcaccntcaccccnaggtgggcatctggcagcataaaacagcacccctactggcagatgagcatatgacagcctggaacagcacccacacccccaggcgagcatctgacagcctggagcagcacccacacccccaggtgagcatctgacagcctggagcagcacccacacccccaggtgagcatcttgacagcctggaacagcacccacacccccaggtgagcatctgacagcctggaacagcaccctncacccccaggtgagcatctgacagcctggagcagcaccccacacccccaggtgagcatctganagcctggaacagcacccacaccnccaggtgagcatctgagaggagcagcacccacacccccaggtgagcatctgacagcctggaacagcacccacacccccaggtgagcatctgncagctgctcagccngccngctcnanccggaccagctcat

SEQ ID NO: 730240 - DNA, 579 bp, Homo sapiens
  misc_feature (362)..(362): n is a, c, g, or t
  misc_feature (425)..(425): n is a, c, g, or t
  misc_feature (448)..(448): n is a, c, g, or t
  misc_feature (540)..(540): n is a, c, g, or t
  misc_feature (554)..(554): n is a, c, g, or t
  misc_feature (558)..(558): n is a, c, g, or t
  misc_feature (563)..(563): n is a, c, g, or t
  misc_feature (565)..(565): n is a, c, g, or t
acccacaggtgagcatctgacatcgtggagcagcaccccacacccacaggtgagcatctgacagcctggagcagcacccacacccccaggtgagcatctgacagcctggaacagcacccacacccccaggtgagaatctgacagcctggaagagcaagcgcaccccgaggtgagcatatgacagcctggaacagcacccacacccccaggcgagcatctgacagcctggagcagcacccacacccccaggtgagcatctgacagcctggagcagcacccacacccccaggtgagcatcttgacagcctggaacagcacccacacccccaggtgagcatctgacagcctggaacagcaccctncacccccaggtgagcatctgacagcctggagcagcaccccacacccccaggtgagcatctganagcctggaacagcacccacaccnccaggtgagcatctgagaggagcagcacccacacccccaggtgagcatctgacagcctggaacagcacccacacccccaggtgagcatctgncagctgctcagccngccngctcnanccggaccagctcat

SEQ ID NO: 730241 - DNA, 798 bp, Homo sapiens
caaaatgtggcacatatacaccatggactatcacatagccataaaaagaatgaaatcatgtcctttgcagcaacatggatgcagctggaggccattatccaaagcaaattaacacaggaacagacaagctaataccacatgttctctcttataagtgggagataagcattgggtactcatggcaaaaagatggcaacaatagacactggggaatactagaaaggcagggggcaagggttaaaaaactaactattgggtgctatgttcactacctgagtgacaggatcaatcataccccaaacctcaacatcacacaatgcgcccacataacaaacctgcacatatattccctgaatctaaaataaaagttgaaatgataaaaaacgtgggcggagggggaggaattatttaaaaaaaaaaaaaaaagcaaattgtggtatacccacataatagaatactacttggcaataaaaaggaattaaatatggatactcacaacatgaccaaaagaatccagaccaaaaaatagtacattactgtatgattccacttatataaaaacctataaaatgtaaacaaatctatactgatagaaagtagctcgacagttgcctgagaattagggaggttagggaagggtggaaggaagggattaacaaagaagcagaaaggcactttggggaataatagatacgttaaccatcttaattgtggtgatggtttcatggtgtgtacatatgctggaatgtatcaaactatacagtttaaatacatgcagttttttttgtaggtcaatca

SEQ ID NO: 730242 - DNA, 803 bp, Homo sapiens; identical to SEQ ID NO: 728495

SEQ ID NO: 730243 - DNA, 717 bp, Homo sapiens; identical to SEQ ID NO: 728496

SEQ ID NO: 730244 - DNA, 721 bp, Homo sapiens; identical to SEQ ID NO: 728497

SEQ ID NO: 730245 - DNA, 1152 bp, Homo sapiens; identical to SEQ ID NO: 45738

SEQ ID NO: 730246 - DNA, 984 bp, Homo sapiens; identical to SEQ ID NO: 728499

SEQ ID NO: 730247 - DNA, 847 bp, Homo sapiens; identical to SEQ ID NO: 728507

SEQ ID NO: 730248 - DNA, 1358 bp, Homo sapiens
aaaaagcaggaggaagaggcgacggcggcctgtggacgtcttgcaggggtccccgaagccaagcagggtcccaaggccgattcagactccgacctagagacggaaggtgctcggggcaggggccaggcccgtctcctccccttgggggcttctcccgcaggggttgtgggaggtgggctggcgccgccgaggaggcaggagacctctgtccagcagggcacgtagccctctgcggggcgtctccagccccctgccctctcctcggcgctcctggcggcatcaggaactttaccatgagaaggcgcttctagaaggaggttaaaatggaaaatcccgccagacagtgcaccaaaggctgtcccgccctgaaatgcaatcagagctgggttttcccaatccacagatgtggacctgttggagaaccagctgggagtggcaggagcccaggccctctgtgccgccctcacagtgaaccaggccatgcggaagatgcagctgtcagggaatggcctggaggagcaggcggcccagcaccttgccgaactcctgctggcccacacagacctgaagtccctggacctgagctacaaccagctgaatgaccaagcaggcagatctgtgcatgggactgcagggcttcctcatcttccacagctttgggggcggcactggctctgggttcgtgtctctgctcatgaagcggctctcggtggactacgggaagaagtccaagctggagtttgccatttgcccagccccccaggtctccatggccatgacggagccctacaactccatcctgaccacctacacgaccctggaacattctgactgtgccttcatagtcgacagcaaagccacctatgacatgtcagcacaacctggacatcgagtgtcccatgtacaccaacctcagtcgtctgggcagatcgtgtcctccatcacggcctccctgtgattcgatggggccctgaatgtgtacttgacagaattccaaaccaacttggtgccatacccccacatccacctccccctggccacctacgccctggtcatctcagccaagaaggcctaccatgagcagctgtccgtggccaagatcgccagtgcccgcttcgagccagccaatcagatggtcaagtgtgaccctcaccatggcaagtacatggcctgctgcatgttgtacagaggggatgtggtcctgaaagatgtcagtgcggctgtcgccaccatcaagagcaagcacaccaaccagtttgtggactggtgtccgattggatttaaggtaggactgggtgatgtggagtccttgtgccatcaggaagcaggagacctgcagaataatgctgcccctgaag

SEQ ID NO: 730249 - DNA, 753 bp, Homo sapiens
aaaaagcaggaggaagaggcgacggcggcctgtggacgtcttgcaggggtccccgaagccaagcagggtcccaaggccgattcagactccgacctagagacggaaggtgctcggggcaggggccaggcccgtctcctccccttgggggcttctcccgcaggggttgtgggaggtgggctggcgccgccgaggaggcaggagacctctgtccagcagggcacgtagccctctgcggggcgtctccagccccctgccctctcctcggcgctcctggcggcatcaggaactttaccatgagaaggcgcttctagaaggaggttaaaatggaaaatcccgccagacagtgcaccaaaggctgtcccgccctgaaatgcaatcagagctgggttttcccaatccacaggcacccatggacttggagaactggtcggggacaccctgtacctgaggtcttgctggatccatagcattgtgcccatcttctgctttctgtgccaagggagtgccccagagctgaacctgctgcacggtggcctggggccccagatgtggacctgttggagaaccagctgggagtggcaggagcccaggccctctgtgccgccctcacagtgaaccaggccatgcggaagatgcagctgtcagggaatggcctggaggagcaggcggcccagcaccttgccgaactcctgctggcccacacagacctgaagtccctggacctgagctacaaccagctgaatgaccaagcag

SEQ ID NO: 730250 - DNA, 840 bp, Homo sapiens
  misc_feature (13)..(13): n is a, c, g, or t
  misc_feature (65)..(65): n is a, c, g, or t
  misc_feature (539)..(539): n is a, c, g, or t
  misc_feature (552)..(552): n is a, c, g, or t
  misc_feature (559)..(559): n is a, c, g, or t
  misc_feature (621)..(621): n is a, c, g, or t
  misc_feature (704)..(704): n is a, c, g, or t
  misc_feature (775)..(775): n is a, c, g, or t
  misc_feature (813)..(813): n is a, c, g, or t
ccttggtataccngagggacaaactagagatcagttgacaaaggagaagtgacaaaagataagcngcagaaggacctcagaagggcagagcaaagggtgagcctacagtaagacacttctatcagcagtgttaatggaagaaattcctaccaatgggcaatcaaaaaagccagtgtgagaagaaaactgatgagctgtcaactgtcaaaaatcagggggaagggggaagcattagtttggatgtaggcccttgttcagtcattttctctaaggccttggaagcaaacatcttctggcatatggcttgttaatgttgtgtttacactaactgccaaaatgtgcctgttgtaagtttggttaaaacttttatcttagtattgaaaatatatagcaagttttaagtcattactgagttacttgttacccttacagaattaagaaaaatagcacagtatgacattttaaaattcatgtacaggtgcattctagttacatgaacatgctagttaaataaaagtcacaattaagtcattatgacncagagtactttanaataaancagatgccctgaggccctgttgaggaagtagaatcccaatgggactccagacagtaaatctntttcgctgttttcagctctgtcacatgctcagtttgtgacccagggaaaagactattgctttgccatgcctgttttcctaaanaaaacagttgctggcatttgcacatccacaacgtgttgattaacaaagggattggtggagataaacagatnccaaacctgacctatttcttaaactttatggaataaancaaatttaggatttctcatcaatcata

SEQ ID NO: 730251 - DNA, 995 bp, Homo sapiens
  misc_feature (715)..(715): n is a, c, g, or t
  misc_feature (750)..(750): n is a, c, g, or t
  misc_feature (780)..(780): n is a, c, g, or t
  misc_feature (796)..(797): n is a, c, g, or t
  misc_feature (804)..(804): n is a, c, g, or t
  misc_feature (826)..(826): n is a, c, g, or t
  misc_feature (906)..(906): n is a, c, g, or t
  misc_feature (908)..(908): n is a, c, g, or t
  misc_feature (985)..(985): n is a, c, g, or t
agcgggccgcgctcgtggctcgagctccgcgcactccctccgcggccgctgagccgagcggacgcccccgggggccgcgtcgcagccctccgtgctcccccctatcatgcccggtgcccaggctggggccgcccaagcagccaggacaccatgcccgaggacggcgctggcgacggcggggaggtgcccgcgctcatcccggacggcgagccgctgcgggaagagcagcggcccctgaaacagtccctgggaagctccctgtgccgcgagtcgcactggaagtcctgctcctcacgctgctcatccacgcctgcggggccgtggtggcctggtgtcgcctggccacagtgccgcggctggtcctggggcccgaggccgccttggcccggggagccgggggcccgccaccgacctacccggccagcccctgctccgatggctacctgtacatcccgctggccttcgtctccctcctctacctcctctacctggctgagtgctggcactgtcacgtgcggtcctgccaggcgccacgcaccgacagcccacacggtgctggcgctgatccgccggctgcagcaggcgccgccgtgcgtctggtggaaggccaccagctatcactacgtgcggcgcacacgccagatcacgcgctaccgcaacggcgacgcctacaccaccacgcaggtgtaccatgagcgcgctgacagccgcacgncccgcggcgagtttgactactcggcgcacggcgtncgcgacgtctccaaggagctggtggggctngcggacacgcggccannggctgcncttcaacaagtgcttcacttcngcagcgcggaggccgaggcctcgtacctcacgcagcgggcgcgcttcttcagcgccaacgaaggcctggacgactatctngnatgcgcgcgagggcatgcacctgaaggacgtagacttccgcgagtcgctcatggtcttcgccgaccccgcagccgcnctgcgtacgc

SEQ ID NO: 730252 - DNA, 1136 bp, Homo sapiens
  misc_feature (1)..(1): n is a, c, g, or t
  misc_feature (14)..(14): n is a, c, g, or t
  misc_feature (37)..(37): n is a, c, g, or t
  misc_feature (947)..(947): n is a, c, g, or t
  misc_feature (951)..(951): n is a, c, g, or t
  misc_feature (1128)..(1128): n is a, c, g, or t
naactgtgattggntcaattttaccataccgaaagantaaattcatttgagcttttacctacgcctttgctttttgttaaaggaagaattcaatgcaatgtgttcagaaagttacatttaaatcgttaataaagagaaaaaggaagagaaagagaggacaccattccgacacaaacgtttatgtgattttagccattacaacagtaattcagaaatatctcaaatgttacattgatgtcatcaatattacaaaaaaggaaaaaaaagtgacaggcaacagtgaagagcaccagagacccagcgcacacctaaagtagaccatgcttctttccttccactgccaggttatcgtcccgggaagccccccaccccctcgctttcctcctccgctttccctaacccgtctcgcgggggcatctacgcctcgtcctcgccctcctcctcctcgaactccccttgttcgtcggccgtggcgtcctggtactgctggtactcggacaccaggtcgttcatgttgctctcggcctcggtgaactccatctcgtccatgccctcgcccgtgtaccagtgcaggaaggccttgcgccggaacatggccgtgaactgctcggagatgcgcttgaacagctcctggatggccgtgctgttgccgatgaaggtggccgacatcttcaggccgcggggcgggatgtcgcacacggccgtcttcacgttgttggggatccactccacgaagtagctgctgttcttgttctgcacgttgagcatctgctcgtccacctccttcatggacatgcggccccggaagatggcagccaccgtcagtagcggccgtggcgcgggtcgcaggcggccatcatgttcttggagtcgaacatctgctgggtgagctcgggcacgtgagcgcccggtactgctggctgccccggctggtcaggggcgcgaancggngcatgaagaagtgcaggcgagggaagggcaccatgttcaccgccagcttgcgcaggtctgcgttcagctggcccgggaagcgcaggcaggtggtgaccccgctcatggtggccgacaccaggtggttgaggtccccgtagtggggggtggtcagcttcagggtgcggaagagatgtnatacaggg

SEQ ID NO: 730253 - DNA, 1136 bp, Homo sapiens
  misc_feature (1)..(1): n is a, c, g, or t
  misc_feature (14)..(14): n is a, c, g, or t
  misc_feature (37)..(37): n is a, c, g, or t
  misc_feature (420)..(420): n is a, c, g, or t
  misc_feature (445)..(445): n is a, c, g, or t
  misc_feature (462)..(462): n is a, c, g, or t
  misc_feature (465)..(465): n is a, c, g, or t
  misc_feature (468)..(469): n is a, c, g, or t
  misc_feature (477)..(478): n is a, c, g, or t
  misc_feature (484)..(484): n is a, c, g, or t
  misc_feature (487)..(487): n is a, c, g, or t
  misc_feature (493)..(493): n is a, c, g, or t
  misc_feature (501)..(501): n is a, c, g, or t
  misc_feature (503)..(503): n is a, c, g, or t
  misc_feature (507)..(507): n is a, c, g, or t
  misc_feature (547)..(547): n is a, c, g, or t
  misc_feature (558)..(559): n is a, c, g, or t
  misc_feature (566)..(566): n is a, c, g, or t
  misc_feature (580)..(580): n is a, c, g, or t
  misc_feature (586)..(587): n is a, c, g, or t
  misc_feature (947)..(947): n is a, c, g, or t
  misc_feature (951)..(951): n is a, c, g, or t
  misc_feature (1128)..(1128): n is a, c, g, or t
naactgtgattggntcaattttaccataccgaaagantaaattcatttgagcttttacctacgcctttgctttttgttaaaggaagaattcaatgcaatgtgttcagaaagttacatttaaatcgttaataaagagaaaaaggaagagaaagagaggacaccattccgacacaaacgtttatgtgattttagccattacaacagtaattcagaaatatctcaaatgttacattgatgtcatcaatattacaaaaaaggaaaaaaaagtgacaggcaacagtgaagagcaccagagacccagcgcacacctaaagtagaccatgcttctttccttccactgccaggttatcgtcccgggaagccccccaccccctcgctttcctcctccgctttccctaacccgtctcgcggggggatgtnggggtcgtggtgggggtcgtggtgntggggctccccttgttngtnggnngtggggtnntggtgntgntggtgntcgggcancnggtngttggtgttggtgtgggggtgggtggagtgggtgtggtgngtgggctgggnngtgtggnggtggggggggggnttgggnnggggcgtgggggtggggtggtggggggtggggttgggggggtgctgggtgggggtggtgttgggggtgcgggtggccgacatcttcaggccgcggggcgggatgtcgcacacggccgtcttcacgttgttggggatccactccacgaagtagctgctgttcttgttctgcacgttgagcatctgctcgtccacctccttcatggacatgcggccccggaagatggcagccaccgtcagtagcggccgtggcgcgggtcgcaggcggccatcatgttcttggagtcgaacatctgctgggtgagctcgggcacgtgagcgcccggtactgctggctgccccggctggtcaggggcgcgaancggngcatgaagaagtgcaggcgagggaagggcaccatgttcaccgccagcttgcgcaggtctgcgttcagctggcccgggaagcgcaggcaggtggtgaccccgctcatggtggccgacaccaggtggttgaggtccccgtagtggggggtggtcagcttcagggtgcggaagagatgtnatacaggg

SEQ ID NO: 730254 - DNA, 738 bp, Homo sapiens; identical to SEQ ID NO: 582345
  misc_feature (1)..(1): n is a, c, g, or t
  misc_feature (14)..(14): n is a, c, g, or t
  misc_feature (37)..(37): n is a, c, g, or t
  misc_feature (423)..(423): n is a, c, g, or t
  misc_feature (434)..(434): n is a, c, g, or t
  misc_feature (438)..(439): n is a, c, g, or t
  misc_feature (442)..(442): n is a, c, g, or t
  misc_feature (444)..(444): n is a, c, g, or t
  misc_feature (447)..(447): n is a, c, g, or t
  misc_feature (454)..(454): n is a, c, g, or t
  misc_feature (457)..(457): n is a, c, g, or t
  misc_feature (463)..(463): n is a, c, g, or t
  misc_feature (466)..(466): n is a, c, g, or t
  misc_feature (499)..(499): n is a, c, g, or t
  misc_feature (515)..(515): n is a, c, g, or t
  misc_feature (573)..(573): n is a, c, g, or t
  misc_feature (577)..(577): n is a, c, g, or t
  misc_feature (591)..(592): n is a, c, g, or t
  misc_feature (596)..(596): n is a, c, g, or t
  misc_feature (602)..(602): n is a, c, g, or t
  misc_feature (615)..(615): n is a, c, g, or t
  misc_feature (617)..(617): n is a, c, g, or t
  misc_feature (692)..(692): n is a, c, g, or t

SEQ ID NO: 730255 - DNA, 1403 bp, Homo sapiens
  misc_feature (20)..(20): n is a, c, g, or t
  misc_feature (70)..(71): n is a, c, g, or t
  misc_feature (73)..(73): n is a, c, g, or t
  misc_feature (94)..(95): n is a, c, g, or t
  misc_feature (101)..(102): n is a, c, g, or t
  misc_feature (104)..(104): n is a, c, g, or t
  misc_feature (137)..(137): n is a, c, g, or t
  misc_feature (143)..(143): n is a, c, g, or t
  misc_feature (192)..(192): n is a, c, g, or t
  misc_feature (199)..(199): n is a, c, g, or t
  misc_feature (229)..(229): n is a, c, g, or t
  misc_feature (232)..(232): n is a, c, g, or t
  misc_feature (235)..(235): n is a, c, g, or t
  misc_feature (243)..(243): n is a, c, g, or t
  misc_feature (276)..(276): n is a, c, g, or t
  misc_feature (293)..(294): n is a, c, g, or t
  misc_feature (301)..(301): n is a, c, g, or t
  misc_feature (305)..(305): n is a, c, g, or t
  misc_feature (320)..(320): n is a, c, g, or t
  misc_feature (330)..(330): n is a, c, g, or t
  misc_feature (371)..(371): n is a, c, g, or t
  misc_feature (376)..(376): n is a, c, g, or t
  misc_feature (390)..(390): n is a, c, g, or t
  misc_feature (612)..(612): n is a, c, g, or t
  misc_feature (666)..(666): n is a, c, g, or t
  misc_feature (679)..(681): n is a, c, g, or t
  misc_feature (684)..(684): n is a, c, g, or t
  misc_feature (690)..(690): n is a, c, g, or t
  misc_feature (703)..(703): n is a, c, g, or t
  misc_feature (720)..(720): n is a, c, g, or t
  misc_feature (729)..(730): n is a, c, g, or t
  misc_feature (739)..(740): n is a, c, g, or t
acggtcagagcctccccatnagtcccggggtaaagcgacccattgaaaacagaaaactaattctacccanngncacgagaaatgaaacagaacnntataanngnaaaatacgggaccagaaatggtggcctccgcantaaccnaatcatcctaaatgtcctctaagagaccagacctccccagaaataaccnataaaanacctattaccagaatcaggagaaaacctcnacntgncctgcttnacggaatctaacccaccggcagagtatttttgnacaattaatgggaagtnncagcaancagnacaaaagctctttancccccaaatnactagaaatcatggcgggctctagctgctctgttcataacncagcnactggcaaggaaanctccaaatccatgacagtcaaagtctctggtccctgccatggagacctgacagagtctcagtcatgactgcaacaactgagacactgagaaaaagaacaggctgataccttcatgaaattcaagacaaagaagaaaaaaactcaatgttattggactaaataatcaaaaggataatgttttcataattttttattggaaaatgtgctgattctttgaatgtnttattctccagatttatgaactttttttcttcagcaattggtaaagtatacttntgtaaacaaaaannnganatattngctttgctgctanctgaatgccccagaatngtgaaacanncatgagtanncatattcatggtactacagttatttgcacatgttccgtacaaccacaacaaccaccaccccccccccaacccaccgcacacacccacaccccaaaccaccaccccaacaacccaacacccccacgcacacacgcacagcaccgcccaaagcacgcagaacgaacaagcgagcacaacagtggcgcggcagccgggcgcgcacaggtcgagccgagcgaacgagcgaggacaccgacgaccagggcgagggcgacgcgacgcgcccccagcaccaacgccgcaacagcaccatgcacccacccacacgacacacacgaaaggagagacaacgaaaaccaacagaagggacgcgacgggcgagcaacactaacgagcgggggggcggaccaagagagaatgagacgacgaggaagaacaacaaaacgaaggaaggagaaggacagcagcaggcgccgcaaccggcaccagcagacagggaggaacgagacgcgcgaggcagcagacgagaccccggcgcgcgccgaggcggaagaaggagcgacccacccgacagaccgacacagaactaacgacagcacacagcagaacgcccgaccacgacgcccaacacggacgcacccgacaacgcagaaccccaggccgaggcgacgacacagcgagccc

SEQ ID NO: 730256 - DNA, 941 bp, Homo sapiens
  misc_feature (876)..(876): n is a, c, g, or t
  misc_feature (892)..(892): n is a, c, g, or t
  misc_feature (895)..(895): n is a, c, g, or t
gggcacatcaaaacacaccaaacctcgctgcaaagaatgtgtttccaccaccctctcagacatgggcaagaaggcataaaagagagaccctcaaggcaactaagtatgtggagctggtgatcgtggcagacaaccgagagtttcagaggcaaggaaaagatctggaaaaagttaagcagcgattaatagagattgctaatcacgttgacaagttttacagaccactgaacattcggatcgtgttggtaggcgtggaagtgtggaatgacatggacaaatgctctgtaagtcaggacccattcaccagcctccatgaatttctggactggaggaagatgaagcttctacctcgcaaatcccatgacaatgcgcagcttgtcagtggggtttatttccaagggaccaccatcggcatggccccaatcatgagcatgtgcacggcagaccagtctgggggaattgtcatggaccattcagacaatccccttggtgcagccgtgaccctggcacatgagctgggccacaatttcgggatgaatcatgacacactggacaggggctgtagctgtcaaatggcggttgagaaaggaggctgcatcatgaacgcttccaccgggtacccatttcccatggtgttcagcagttgcagcaggaaggacttggagaccagcctggagaaaggaatgggggtgtgcctgtttaacctgccggaagtcagggagtctttcgggggccaaaagtgtgggaacagatttgtggaaaagaaggagaggagtgttgactgtggggaagccagaggaatgtattgaatccctgctgcaatgccaccacctgtaccctgaaagccggacgctgtgtgcgcacatgggctgtgcngtaaagactgcaactnaanctgcaggaacacgtgcagggactccagaaactcctgtgacctccca

SEQ ID NO: 730257 - DNA, 570 bp, Homo sapiens
acagtttatgatgtcagagtgaatactttctttgagttgcagtcagaaactgtagatttttaaaaatttaaaattcattattctctgtcagtattccaaagtgtatacagaaagctattgcactgttcaggagatggcgcttaacattttggaaattcaaggtgatgaatgtccagataagactatctctcctggtacaaagtttgacaatgctgaacatttttaaaggttctttttgatatacaaagtgcaccaatgagtgctttttaattcttacaataattctgggtgaggtaggtatttttccaattcccattttatgcttcggtagccctttgtatttatacttcaaaacacttggctctcttgtaattatttaagaaattagttgtgattatttgtttaatgtgcaggagttacaaaaggcaagctttagaacaagacagacctggttatgattcctggctctgaaagctgtacaccctgtgaccctagacaggtgttttaatgcctcgctgcctctgtttcttgctctgtaaaatgtgaacaataacagtattggcctcatgc

SEQ ID NO: 730258 - DNA, 976 bp, Homo sapiens
  misc_feature (18)..(18): n is a, c, g, or t
aaaaatgaaaatggggcnccagaagatgaagagaattttgaagaagctattaaaaatgtgaacacagcactaaatacaactcagatcccaagcagtattgaagatatatttaatgatgatcgctgcataaatatcaccaaacagactccatcatttggattttagctcgtgccttaaaggaattgtggccaaagagggtcaaggaaatttacctgttcgaggcacaattcctgatatgattgcagattcaggcaaatatataaaactgcaaaacgtttaccgtgaaaaagcaaagaaagatgctgccgctgtgggtaatcatgttgccaaattgctgcagtccattggccaggcaccagagtccatttcagagaaagaattaaaattactctgcagcaattctgcatttcttcgagtggtaagatgtcgatccttagctgaagaatatggtttggatacaattaacaaggatgaaattatttctagcatggacaatccagataatgaaatagtgttgtacttaatgttacgggctgttgatagatttcataaacaacagggtagatatccaggagtatctaactatcaagttgaagaagatataggaaagttgaagtcttgtctcactggcttccttcaggaatatggtttatctgtaatggtgaaagatgattatgtccacgaattttgccgatatggagctgctgagccacataccattgctgcattcttggggggagctgctgctcaagaggtcatcaaaataatcaccaaacaatttgtaatttttaataatacttacatttacagtggcatgtcacaaacttcagcaactttccagttgtagagtaagcaagcaccttaagtagtgtgttaatgattgaaactgtaattgccttcgggttgtgctttagtctgtaaaattctaaaggagagctgctaaattgttttcttaataaacatttttctcatttgt

SEQ ID NO: 730259 - DNA, 399 bp, Homo sapiens
cacaaagggagactagcaattatttggtcttcgaggcaagttagcaccacacagagactcttctggatataaaggaaagactgtaaagaatttgcagagagaataactctcgctatgtgacccgaggtgattttatgctttgcctgtgcagcctataaaataatcttgtgtggtccccatgatgcacatcaaccaggagatgctggagagtctgagacagcgtgctggcagcactctgccgggggaaggacacggaggtgtccaggctcggctccaaaagcagacaagcctgcactgcgctggagcaggtgagaagtagctgggttccaccgtgcccttttcgtctgtgtcccttgccacccaacacgagctcagcacacagttgatcttcactaacta

SEQ ID NO: 730260 - DNA, 673 bp, Homo sapiens
  misc_feature (37)..(37): n is a, c, g, or t
  misc_feature (44)..(44): n is a, c, g, or t
  misc_feature (51)..(51): n is a, c, g, or t
  misc_feature (62)..(62): n is a, c, g, or t
  misc_feature (67)..(67): n is a, c, g, or t
  misc_feature (70)..(70): n is a, c, g, or t
  misc_feature (72)..(73): n is a, c, g, or t
  misc_feature (85)..(85): n is a, c, g, or t
  misc_feature (94)..(94): n is a, c, g, or t
  misc_feature (115)..(115): n is a, c, g, or t
  misc_feature (117)..(117): n is a, c, g, or t
  misc_feature (121)..(121): n is a, c, g, or t
  misc_feature (123)..(124): n is a, c, g, or t
  misc_feature (170)..(170): n is a, c, g, or t
  misc_feature (172)..(172): n is a, c, g, or t
  misc_feature (195)..(195): n is a, c, g, or t
  misc_feature (201)..(202): n is a, c, g, or t
  misc_feature (218)..(218): n is a, c, g, or t
  misc_feature (226)..(226): n is a, c, g, or t
  misc_feature (238)..(239): n is a, c, g, or t
  misc_feature (244)..(244): n is a, c, g, or t
  misc_feature (248)..(248): n is a, c, g, or t
  misc_feature (259)..(259): n is a, c, g, or t
  misc_feature (319)..(319): n is a, c, g, or t
tattacccgccataaaattcacattaaaaatttaatncccctcnttaaaantgtctttaganaaatnatncnncaaaaaatttcntttacagtncataccatcatgaatgtattnantttncnncaaatctgaatatgctgctgctgcttaaaaagggtacctcatttcntnattattattttaaaacgcagacntctttnnagaatgccgctaagcntgagatcntcattttcaatnnaagcnagcntagaacttttntatttttttttccctaaccactcttaagtggaaaccaattctggactataaatgcagaancagctataggagaagcagttattaatatagattctctagtgccacacagaagataccagtcagcttttaactgagcacttcacctttttcatttttttaaatatatttgatcatgtttttatgttctagtcataaaacaataccccaatacattatataaagctttagtgttacaaaacagaataaatcatttccctatctcctaaacaacaaaattttctcctatatctaggataattttttttcatattttaaatttgtcaggtcagaatgtctcctgtagttggtgatttctcagcaccattttctcagcatatttcttcagtaagttacataaaataatgatgtatctca

SEQ ID NO: 730261 - DNA, 717 bp, Homo sapiens
  misc_feature (50)..(50): n is a, c, g, or t
  misc_feature (244)..(244): n is a, c, g, or t
  misc_feature (253)..(253): n is a, c, g, or t
  misc_feature (265)..(265): n is a, c, g, or t
  misc_feature (397)..(397): n is a, c, g, or t
  misc_feature (407)..(407): n is a, c, g, or t
  misc_feature (706)..(706): n is a, c, g, or t
ttgttttagtaggtctatacataccaccataagacatatatgcttataantagtttgcacgtctaggacatatactcagtggagaaacagtgaatcaccatatgcaaaggcatgtgtatagtacttgacttgcactgtgacgagcaccaggtgccagacatttggccaacatgatctgggtgtgtcagagagtcttcagatcgattacatttggatggcagactaagtaagcagattgcctccnttatagggntgggcctcatcnatccatcaagggccaggagagaattaagaggcctaatgggaaacaaatgctttcctgggtatccagctttccttccatcttgggaatttcagcctccataatctcagaagcaaattcatgtatatatatacncacacatatncatttcataggtatgtggctaagattgtatttttacaagttcagccatgagattggtgaagccagccaatgaataagggtgtgttctattatacgattcagtcttcttttgtaaacgattgaagttctgcatttgaagtaggaggataggagggagcaagtccacctaggatgataacagctgaatttctcaacatacacttcagagccgtaggggtcaacttagagactcaaaaatctcacccataatcctgcccctaaacaccagggctagggaacactgtggccctcaggtgattntctctcgtgcc

SEQ ID NO: 730262 - DNA, 664 bp, Homo sapiens
  misc_feature (1)..(1): n is a, c, g, or t
  misc_feature (29)..(29): n is a, c, g, or t
  misc_feature (40)..(40): n is a, c, g, or t
  misc_feature (80)..(80): n is a, c, g, or t
  misc_feature (245)..(245): n is a, c, g, or t
  misc_feature (254)..(254): n is a, c, g, or t
  misc_feature (266)..(266): n is a, c, g, or t
  misc_feature (653)..(653): n is a, c, g, or t
ntattataccaccccataagaacatgatnatcgcttatanattagtttgctcacagtctagagacaatatagctgcagtntggagaaacagtgaatcaccatatgcaaaggcatgtgtatagtacttgacttgcactgtgacgagcaccaggtgccagacatttggccaacatgatctgggtgtgtcagagagtcttcagatcgattacatttggatggcagactaagtaagcagattgcctccnttatagggntgggcctcatcnatccatcaagggccaggagagaattaagaggcctaatgggaaacaaatgctttcctgggtatccagctttccttccatcttgggaatttcagcctccataatctcagaagcaaattcatgttacaagttcagccatgagattggtgaagccagccaatgaataagggtgtgttctattatacgattcagtcttcttttgtaaacgattgaagttctgcatttgaagtaggaggataggagggagcaagtccacctaggatgataacagctgaatttctcaacatacacttcagagccgtaggggtcaacttagagactcaaaaatctcacccataatcctgcccctaaacaccagggctagggaacactgtggccctcaggtgattntctctcgtgcc

SEQ ID NO: 730263 - DNA, 638 bp, Homo sapiens
acatggagaggaccccatgtgaacagaaccctgaatctgctcattttctgtgctcctgaatgtgtagctacagactctaatttcgaaaacaaacctgataagtgggacggagccaaggcctaggaagctggagccctctctaatgctctggagcctgcccacctcctgagatctggaccagtctctgcctcttctggggcctcagtttcccaattgtaatgtaatgagaaattaaatgtaaaactgcataaacatatgctctgtgagaatttggtgtcagagttctcaatactggatgataatttggagtggggtgggtttgggacccatgggttctcaggcctcctttcacacccagtgcagtaggtgtagagctctggacagccaggtgttctttcctgagccagctgattacaacacaatggaccaagggctctgatcttaaatatggggggagcagatgacaaaccccattatagtgaagaagagcaagaaactagacttgtgggcctggggaaaagaaaaaaacacttctatttctcccaaactgtagaatctcttgtcaaatatttaattttgattatatctgagcttgataatacattcatgtgttaacagctgcttaaatttgttttttc

SEQ ID NO: 730264 - DNA, 631 bp, Homo sapiens
  misc_feature (585)..(585): n is a, c, g, or t
ctcggagatttccactggtgaagtacttgaatgccttttctggaactggcactaccgcccaacttgttggctccagcatccaaagattgtttccaccggacacgaaacacggtgtcacgtttgcgtcagcaacaactgtcactggtacaatagagcattttcgctgcaataaaaatagttctcaccacaatggtgtcaaggtgacattgattgcaatgatgtcagaaatcggggcaacctcaagtttggctgctactctgggcaaaaggttctttccgaaggcagatgctccagcacagatgtgtgtgtaattgaactgcttctgagttgccaaaatcaatggtgtcgctatgcctgctactttacagagatcttgtgccaccttgtcacatttggttccagctactaagcaggacacttcacctccaaggcgtgtggctgcagtaatggtatttaaagtaatgggtgctagggaatcatttgcatgctcagctattaccagggtactctgaaatcgtagcaatgaggccgcccgccggagctgccccggagccgccgctcggaacatggtctccgcttccgccncaacctcggccttacagcagccccgtgcccggccaactggcgccgc

SEQ ID NO: 730265 - DNA, 695 bp, Homo sapiens
  misc_feature (649)..(649): n is a, c, g, or t
ctcggagatttccactggtgaagtacttgaatgccttttctggaactggcactaccgcccaacttgttggctccagcatccaaagattgtttccaccggacacgaaacacggtgtcacgtttgcgtcagcaacaactgtcactggtacaatagagcattttcgctgcaataaaaatagttctcaccacaatggtgtcaaggtgacattgattgcaatgatgtcagaaatcggggcaacctcaagtttggctgctactctgggcaaaaggttctttccgaaggcagatgctccagcacagatgtgtgtgtaattgaactgcttctgagttgccaaaatcaatggtgtccaggttcctctggaagtaggcctgttgtacacaatcatgctgagccacccaggaactttttgctgctatgcctgctactttacagagatcttgtgccaccttgtcacatttggttccagctactaagcaggacacttcacctccaaggcgtgtggctgcagtaatggtatttaaagtaatgggtgctagggaatcatttgcatgctcagctattaccagggtactctgaaatcgtagcaatgaggccgcccgccggagctgccccggagccgccgctcggaacatggtctccgcttccgccncaacctcggccttacagcagccccgtgcccggccaactggcgccgc

SEQ ID NO: 730266 - DNA, 639 bp, Homo sapiens
caactacaatctaatatcagctatacaaaatgtataaggtctaataaactagaaggagatatattaaagtctacagctctgaataacaggattgtggatgattttatgcttatattttatgattatatatactttggctctactaaaaacagaaaaaattagctgggcatggtggtgcacacgtgtggtcccagctacttggagggctgacgtgggaggatcacttgagcctgggaagttgaggctgcagtgagccaagatagcaccactgtactctaccctgggcaacgggagtgagagcgtgtgtcgaaaaacaaataaaaataaaaataattgaatattttagaatgacttgagacacatttaatatgttaagtaaaaacaacaggatgcaagtatctcatatttttaaaaaaggcaattgcaacttttacatgcaaatctcacacacacaaaccccccaaaacaattactaaactatgattcaccaaaatactaacagtggttatctctaattagtcaaataatttaatattcttgatatttttcaaattataatatgcaagaatataatttaatattgacatttttcaaattataatatgcacatactacctatataatcagaagatttaaaaa

SEQ ID NO: 730267 - DNA, 625 bp, Homo sapiens
  misc_feature (63)..(63): n is a, c, g, or t
tttaattcggtaatcaaaatgaaaagggtttaataaatagaggaagatataatgataaaatanactgtggaggcaggccaatcacttgaggttaggagcctgagcaacatggtgaaatcttctctctactaaaaacagaaaaaattagctgggcatggtggtgcacacgtgtggtcccagctacttggagggctgacgtgggaggatcacttgagcctgggaagttgaggctgcagtgagccaagatagcaccactgtactctaccctgggcaacgggagtgagagcgtgtgtcgaaaaacaaataaaaataaaaataattgaatattttagaatgacttgagacacatttaatatgttaagtaaaaacaacaggatgcaagtatctcatatttttaaaaaaggcaattgcaacttttacatgcaaatctcacacacacaaaccccccaaaacaattactaaactatgattcaccaaaatactaacagtggttatctctaattagtcaaataatttaatattcttgatatttttcaaattataatatgcaagaatataatttaatattgacatttttcaaattataatatgcacatactacctatataatcagaagatttaaaaa

SEQ ID NO: 730268 - DNA, 693 bp, Homo sapiens
caactacaatctaatatcagctatacaaaatgtataaggtctaataaactagaaggagatatattaaagtctacagctctgaataacaggattgtggatgattttatgcttatattttatgattatatatactttgggaggcaggccaatcacttgaggttaggagcctgagcaacatggtgaaatcttctctctactaaaaacagaaaaaattagctgggcatggtggtgcacacgtgtggtcccagctacttggagggctgacgtgggaggatcacttgagcctgggaagttgaggctgcagtgagccaagatagcaccactgtactctaccctgggcaacgggagtgagagcgtgtgtcgaaaaacaaataaaaataaaaataattgaatattttagaatgacttgagacacatttaatatgttaagtaaaaacaacaggatgcaagtatctcatatttttaaaaaaggcaattgcaacttttacatgcaaatctcacacacacaaaccccccaaaacaattactaaactatgattcaccaaaatactaacagtggttatctctaattagtcaaataatttaatattcttgatatttttcaaattataatatgcaagaatataatttaatattgacatttttcaaattataatatgcacatactacctatataatcagaagatttaaaaa

SEQ ID NO: 730269 - DNA, 449 bp, Homo sapiens
ctctactaaaaacagaaaaaattagctgggcatggtggtgcacacgtgtggtcccagctacttggagggctgacgtgggaggatcacttgagcctgggaagttgaggctgcagtgagccaagatagcaccactgtactctaccctgggcaacgggaaatgacttgagacacatttaatatgttaagtaaaaacaacaggatgcaagtatctcatatttttaaaaaaggcaattgcaacttttacatgcaaatctcacacacacaaaccccccaaaacaattactaaactatgattcaccaaaatactaacagtggttatctctaattagtcaaataatttaatattcttgatatttttcaaattataatatgcaagaatataatttaatattgacatttttcaaattataatatgcacatactacctatataatcagaagatttaaaaa

SEQ ID NO: 730270 - DNA, 372 bp, Homo sapiens
gccgaggtggggggatcgcctgaagtcaggagtttgagaccagcctgatcaacatggtgaaaccctgtctctactaaaaaatacaaaaatcagtcaggcatggtggcaggcacctgcagtcccagctacttggaaggctgagccaggagaatcttgcttgaacccaggatactgtagaggttccagtgagccgagatcacgccattgcattccagcctgggcaccaagagtaagactccatcttggagaagggctccatttctcttgaagaaggtactgcccggccagatgggtggacctgatgtgctttgatatgcctgagtcaaagcctgaattagattttgtctatactctgggtctatgcaccacaac

SEQ ID NO: 730271 - DNA, 812 bp, Homo sapiens
ttttttttaaaaagagacaggtcttactctgttatccatgctggagtgcagtggtgccatcatagctcattgcagctttgaacaccatggctcaagtgagcctcctgcctcagcctcctgagaagttgggattatgggcgtgagccactacataccaaattttctctgtcctctcacctgtcgataggcacttaggttgattccctatctgggctactgtataattctgcagtgagcatggagcgcaggcatctctctgagatcccgatttcaattcctttggatacatacccagaatgggggactgttagatcatatggtagctccatttttaactttttcgggcacctccatgttttccataatggctgtattaatttacattcccaccaacagtgcacaagggtccctttctccacaccctcaccaactcttgctgtctccagagttttcggttaacagccatgatatctcattgtgattttgatttgcatttccctgataattagtgctgtttctagttctttgacttaaacagagatccttctgagagaaatacaattagtcattttctatggtagggagaaatccaccataagacaaagaggccagaactaaggcaaagaggacctgtgttctggcactggctctacagtgttgtggctgcattatctagggtaaacacgcccatgggactctgcctggatctctattgagccacaggacactgaaattatccatttgcaggtctgccttcccgtgtataggccgtctgtcctggtctgggctggcgggtaggcattacaccttcc

SEQ ID NO: 730272 - DNA, 759 bp, Homo sapiens
ttttttttaaaaagagacaggtcttactctgttatccatgctggagtgcagtggtgccatcatagctcattgcagctttgaacaccatggctcaagtgagcctcctgcctcagcctcctgagaagttgggattatgggcgtgagccactacataccaaattttctctgtcctctcacctgtcgataggcacttaggttgattccctatctgggctactgtataattctgcagtgagcatggagcgcaggcatctctctgagatcccgatttcaattcctttggatacatacccagaatgggggactgttagatcatatggtagctccatttttaactttttcgggcacctccatgttttccataatggctgtattaatttacattcccaccaacagtgcacaagggtccctttctccacaccctcaccaactgatttgcatttccctgataattagtgctgtttctagttctttgacttaaacagagatccttctgagagaaatacaattagtcattttctatggtagggagaaatccaccataagacaaagaggccagaactaaggcaaagaggacctgtgttctggcactggctctacagtgttgtggctgcattatctagggtaaacacgcccatgggactctgcctggatctctattgagccacaggacactgaaattatccatttgcaggtctgccttcccgtgtataggccgtctgtcctggtctgggctggcgggtaggcattacaccttcc

SEQ ID NO: 730273 - DNA, 609 bp, Homo sapiens
  misc_feature (497)..(497): n is a, c, g, or t
tcccccgggctgcaggattcggcacgagcttttgacagataacatttaatagtaataaataagtggtaataagtaataaataataattgagtgcttttcacattccaggtgctgagctgttttgcatttcacgcccctcatcttcatttatattgttgttcttaattatccccattttaccgatgaggaaagggagattgtaaccaccccgaggctgcacagctaatacccagagagcagaatttcgccacatgcgaagattctagctaatcctgcattatctggtacccaccatttgtatcccggcatcatttatcttctccctaccttgttgccaaggcacgtgtgggtccctaacggctggcaccaattattcaagacaccctaagggagaccagaaggaaagcgatatttaagaaatgcaggcacagaaaatttaagcattttagactcattctccatcagaacagggaggtctttgaagaggctgcttttgnccagcaattagtcaatgactctagaatttcagcgcagatccgatgagtatagaaggacgccgtgtacgccctgtgttgcccatgcaacgcaggcatgcctcttctcctttgg

SEQ ID NO: 730274 - DNA, 663 bp, Homo sapiens
  misc_feature (551)..(551): n is a, c, g, or t
tcccccgggctgcaggattcggcacgagcttttgacagataacatttaatagtaataaataagtggtaataagtaataaataataattgagtgcttttcacattccaggtgctgagctgttttgcatttcacgcccctcatcttcatttatattgttgttcttaattatccccattttaccgatgaggaaagggagattgtaaccaccccgaggctgcacagctaatacccagagagcagaatttcgccacatgcgaagattctagctaatcctaaaatctgtttttcaccagacgacgccggcccttccggcttgtcgtgcagcacggcattatctggtacccaccatttgtatcccggcatcatttatcttctccctaccttgttgccaaggcacgtgtgggtccctaacggctggcaccaattattcaagacaccctaagggagaccagaaggaaagcgatatttaagaaatgcaggcacagaaaatttaagcattttagactcattctccatcagaacagggaggtctttgaagaggctgcttttgnccagcaattagtcaatgactctagaatttcagcgcagatccgatgagtatagaaggacgccgtgtacgccctgtgttgcccatgcaacgcaggcatgcctcttctcctttgg

SEQ ID NO: 730275 - DNA, 1207 bp, Homo sapiens
actttggaaggccgaggtaggcggatcacctgagctcaggagtttgagaccagcctgtctctactaacaatataaaaattagctgggagtcacggtgggcgcctgtaatcccagctactcgggaggctgaggcaggagaattgcttgaacccaggagacagaggttgtagtgagctgagatcgcaccactgcactctagccttggcaacagtgcaagactgtctcaaaaacagcaacagagagcaggacgtgagacttctacctgctcactcagaatcatttctgcaccaaccatggccacgtttgtggagctcagtaccaaagccaagatgcccattgtgggcctgggcacttggaagtctcctcttggcaaagtgaaagaagcagtgaaggtggccattgatgcaggatatcggcacattgactgtgcctatgtctatcagaatgaacatgaagtgggggaagccatccaagagaagatccaagagaaggctgtgaagcgggaggacctgttcatcgtcagcaagttgtggcccactttctttgagagaccccttgtgaggaaagcctttgagaagaccctcaaggacctgaagctgagctatctggacgtctatcttattcactggccacagggattcaagtctggggatgaccttttccccaaagatgataaaggtaatgccatcggtggaaaagcaacgttcttggatgcctgggaggccatggaggagctggtggatgaggggctggtgaaagcccttggggtctccaatttcagccacttccagatcgagaagctcttgaacaaacctggactgaaatataaaccagtgactaaccaggttgagtgtcacccatacctcacgcaggagaaactgatccagtactgccactccaagggcatcaccgttacggcctacagccccctgggctctccggatagaccttgggccaagccagaagacccttccctgctggaggatcccaagattaaggagattgctgcaaagcactccccaagtctgtgacaccagcacgcattgttgagaacattcaggtctttgactttaaattgagtgatgaggagatggcaaccatactcagcttcaacagctggagggcctgtaacgtgttgcaatcctctcatttggaagactatcccttcgatgcagaatattgaggttgtctcctggtgagattatac

SEQ ID NO: 730276 - DNA, 1244 bp, Homo sapiens
attagtattagtaaatcattaaaattaatatagtattattttctgttactttattgtcctgcctcagtgcctcataagaactttgagcccagaattattatctcaggattctttggcaaactactgtaatcagcagattaatgtagtttctaatggtctccatctcctgggattccaacccttgtctaataccctccccatgggtgtcagctggatccataggcttgctgctgttgcacagaatacagcaaacatgatgagaggttgattctgtgattagttgacaaaagatgtgacttctgtcttggactcttttcaatggcttttttttttggcttcgcacattttgatgaagaaaccttcccatactgaagaggctcacattatatggaattctggacaacagctgtcaaagtactgaatataccatcaagcatgtgagtgagattgattataacttgtgagagtctctgaatagaagacccagttaagccatgcccagattcctgcaccacagaaacttcgagataataaaggttgtttttttttttttgtggtgaagaatatgtttctcatctttttttataatataaatacttttgaaatgtaacttttttatcttaataaacatttaacaaatcatttgaagatggataatcacagatatcaatttttaccaacataaccaggactttccttgtaactttgactaatagatgatcttttgaacattaccactttgtaactgcatttcagactatgatttagttgaatcacccaaagtgtgtaatgtcttttaatgtgcactatcaattctgttctgccataatgacctcattttgggttcttaaatatattcatctcagtcttgtggggtgactctctcaagaagaatgactgctgctaataccaagaacttctgttgtttccataaataacagccagattacagccagaacctcaaggctgagcacagccgctcatgtttggaatcccagccctttgggattaataggcctagacaggaggatcacttgaggacaggagtttgagaccagattgggcaacaatgcaagattttgtctctgaaaaaaataaaataaaataagctgggcatggtgttacatgcctttaatctcagctactcagaggctgagcctggaggattgcttgagtccagcagttcaaggtagtaagctacgataacaccaccacatcccagtctgggtaacagaacgagaccc

SEQ ID NO: 730277 - DNA, 1299 bp, Homo sapiens
attagtattagtaaatcattaaaattaatatagtattattttctgttactttattgtcctgcctcagtgcctcataagaactttgagcccagaattattatctcaggattctttggcaaactactgtaatcagcagattaatgtagtttctaatggtctccatctcctgggattccaacccttgtctaataccctccccatgggtgtcagctggatccataggcttgctgctgttgcacagaatacagcaaacatgatgagaggttgattctgtgattagttgacaaaagatgtgacttctgtcttggactcttttcaatggcttttttttttggcttcgcacattttgatgaagaaaccttcccatactgaagaggctcacattatatggaattctggacaacagctgtcaaagtactgaatataccatcaagcatgtgagtgagattgattataacttgtgagagtctctgaatagaagacccagttaagccatgcccagattcctgcaccacagaaacttcgagataataaaggttgtttttttttttttgtggtgaagaatatgtttctcatctttttttaaattttattattatactttattttgggataatttgttatggaggaatttgacaaataatataaatacttttgaaatgtaacttttttatcttaataaacatttaacaaatcatttgaagatggataatcacagatatcaatttttaccaacataaccaggactttccttgtaactttgactaatagatgatcttttgaacattaccactttgtaactgcatttcagactatgatttagttgaatcacccaaagtgtgtaatgtcttttaatgtgcactatcaattctgttctgccataatgacctcattttgggttcttaaatatattcatctcagtcttgtggggtgactctctcaagaagaatgactgctgctaataccaagaacttctgttgtttccataaataacagccagattacagccagaacctcaaggctgagcacagccgctcatgtttggaatcccagccctttgggattaataggcctagacaggaggatcacttgaggacaggagtttgagaccagattgggcaacaatgcaagattttgtctctgaaaaaaataaaataaaataagctgggcatggtgttacatgcctttaatctcagctactcagaggctgagcctggaggattgcttgagtccagcagttcaaggtagtaagctacgataacaccaccacatcccagtctgggtaacagaacgagaccc

SEQ ID NO: 730278 - DNA, 528 bp, Homo sapiens
attagtattagtaaatcattaaaattaatatagtattattttctgttactttattgtcctgcctcagtgcctcataagaactttgagcccagaattattatctcaggattctttggcaaactactgtaatcagcagattaatgtagtttctaatggtctccatctcctgggattccaacccttgtctaataccctccccatgggtgtcagctggatccataggcttgctgctgttgcacagaatacagcaaacatgatgagaggttgattctgtgattagttcgcacattttgatgaagaaaccttcccatactgaagaggctcacattatatggaattctggacaacagctgtcaaagtactgaatataccatcaagcatgtgagtgagattgattataacttgtgagagtctctgaatagaagacccagttaagccatgcccagattcctgcaccacagaaacttcgagataataaaggttgtttttttttttttgtggtgaagaatatgtttctcatcttttttt

SEQ ID NO: 730279 - DNA, 682 bp, Homo sapiens
cttagtattctggggaatggtccagattccccaaaagggaatgagctctgttgcaggaggctcactgtttataaagttaataatactctttcctttttgttttttagcttttattttttcccctggaaaatataaaatatgggtttaaaagaaacatcaaccttgagcccattttttggggttctctatggaaaggaagaggagagattatggttcttgatatggccaggtacactaagaaaacttttttttttcattctttaaaaatctaagtaaatattaacactagaactcatcatttgcatatttatttgttattaaagccccagaaaatgtatcttactgacttatgatgatgatgtatttgatgaatatgagtcaaaaattttgctaagccttatctcctcttctgctctaagaaaagagattgttgaaagacctgtgctggaagtagttgaaagcatatttttattgcaattaaattctcagtttttataaacaagggataatgttcaaacacagtggacagtgcattatggactatttttttaagtctcagtatgatattcttttctttcagaacaagaatgtttcacttacccgtgacgtttctggttggccatattttttcttaaacacaaagggaccctgcagtagacttatgcagatggcagactatttt

SEQ ID NO: 730280 - DNA, 628 bp, Homo sapiens
cttagtattctggggaatggtccagattccccaaaagggaatgagctctgttgcaggaggctcactgtttataaagttaataatactctttcctttttgttttttagcttttattttttcccctggaaaatataaaatatgggtttaaaagaaacatcaaccttgagcccattttttggggttctctatggaaaggaagaggagagattatggttcttgatatggccaggtacactaagaaaacttttttttttcattctttaaaaatctaagtaaatattaacactagaactcatcatttgcatatttatttgttattaaagccccagaaaatgtatcttactgacttatgatgatgatgtatttgatgaatatgagtcaaaaattttgctaagccttatctcctcttctgctctaagaaaagagattgttgaaagacctgtgctggaagtaaatgttcaaacacagtggacagtgcattatggactatttttttaagtctcagtatgatattcttttctttcagaacaagaatgtttcacttacccgtgacgtttctggttggccatattttttcttaaacacaaagggaccctgcagtagacttatgcagatggcagactatttt

SEQ ID NO: 730281 - DNA, 1347 bp, Homo sapiens
ggaccgctgagggggccgacccaactgctgccgcactctcttgaacgcggatagctgaagtcggggtgcacgacttttttggggagcggggacgtgaagtacagcgctagagaggccgcccagagggctgtggagctccggaaggagccttaggagtttgttgtcgtggtagacagactcccccgggagctttctctgactccgaaccctgccttgctctgacttcctgttggagatgatcgattcgagagagggaaagagccgagaacgccctgaatctcaaatcacctcgtttcacccaccggcagcgtcaagcggggttttgtccagtcgtcgagttacgtatatgggaccgattctcatctcttccggggcttaatgttctgtggctggtttctcttttgtctgccctccccggcaaatctctttggtgcctcatgatatatttcactgctgaattttctcaattaccaagtggactgtttaatgtacagcttttacttcccctcctcttccagttatccgaaagaaataatgaatatcgcatcagtcttggaatgtgtattaagactgtaaggtgaaaataagcggcataaaccaggcagtatttacttgctggttaaatgaatgacccccttattttattttgtatatagccagaaccgaaaaactttgaaaaccttcattagtctctacacaaaacacactcggtcaatacatttcataatggttcctctttcaacatagttctccatttgtgcttacttaaactactttgatggacttatcaattatttctcccaaacaaaatgagagattttccaattgggtattatgaccagttaactctttgcttaaggcaccatatctttacccaagattactttataataaatgtattaacgttttggaatcacagacctttctgcatgatttccaatccccagcagaatgtattcaggtaagctctggtctctaagagtcagagttaggaaattgaaagctttttgcagcttttctcagccccgtctttctgcccctacttctcatacacacccttcttgggtcacatggtacctttattctctgttagtcatactcgatagtagcattttataatgtaggggaagaaagtactatgctttctatttcacaagaagattgcacctgccatttaaagttatctgatgggcggtttttaaaagatattgttttcctcagcctttggctttctaacaatgttcttttagcttgaattgtctgccttagagaaagttgcatatttcatttttattttagttttttcttttgaactcaggctaaatctaaactaaataaaatgccttt

SEQ ID NO: 730282 - DNA, 964 bp, Homo sapiens; identical to SEQ ID NO: 232859

SEQ ID NO: 730283 - DNA, 911 bp, Homo sapiens
gtccggggaaacagagggaagcaaacagatccaagaaatgtgttcaagattgattttgcaggacagaaaatgggaggtgtataaagagacttccaagctcctgatctaagcttaggagggaatggccagctactgagatggggaagctgaagtgtgagggagttcaccattgcaagtaagtcgcatttaaaatatacatgaagatgaaagtctatgagagtggtggtcattcatccataaaagtgagagagagggtttctgttcatttccaggtgggtttgtgcccttcgtgatgaccccttggactcacctcaagcagaggtctaaattacttgagagtgtgttcatgtaaattcactagtcagatatgaatgccactcaggcatcacaaaacaatcacagaagacaggagtgagcgcattctcaagaatgttttctgaaatgagcagaagagctttgataccagaagactttgtgttggaatttggctttctattattagaaaacgttatcatccggagtatttaaaagatagatatttggtttagtttcctgagtgactttccaccagctgtaaagcaaactgcatcaagcattgtagaagcctcagttgagatttataacaaaatgagtgttgacctcctgccaacacccgccaagtcccattatgtctttaacttgagggacttatccaaatgtgtgcaaggtagtgtactgaaccctcgttttctgatctgcaccctccctacttttccattggcccccaaatatctcagtaacattgtatgtatgcaggtgttggtgactcacccagaaatcccatcacctgttcctattcaggctgagtgcttcacaactatttcacatggccaacactgcctcccatttctcactcccagctgattacttgt

SEQ ID NO: 730284 - DNA, 910 bp, Homo sapiens; identical to SEQ ID NO: 232858

SEQ ID NO: 730285 - DNA, 532 bp, Homo sapiens
  misc_feature (452)..(452): n is a, c, g, or t
  misc_feature (463)..(463): n is a, c, g, or t
  misc_feature (466)..(466): n is a, c, g, or t
  misc_feature (484)..(484): n is a, c, g, or t
tggagagcaggcagctgctcttgatgaaaacggcagtggctctgaaaagatcctttagatcgaccacttaaaaatataccttaggccctctccccgcggatgcggctgaccaactggatgtccttgggcatgatggtcacgcgcttggcatggatggcgcacagataagatgcaggccacagtctgccagctgcccaaccattcaggcttttcattattataggaagcatctggccaaggaccaccaacatcttcctgtcctgcccctgaagctgtgcctagaggaggtctctcatagatgcccacgttctcttgacaagatatttggggaggacccctggctactgtcactgctgccatgcttgccaggaggaggcaccttcctgacacttcactgctgctgctcagcaggcctgccaagtggttctgctgtgttctaggagaaacagganaaatgcctctnctnccactttgcactgtgctntgtcacctgggcccttaaacaccattgcctgcccctgacgccccaaca

SEQ ID NO: 730286 - DNA, 573 bp, Homo sapiens
  misc_feature (493)..(493): n is a, c, g, or t
  misc_feature (504)..(504): n is a, c, g, or t
  misc_feature (507)..(507): n is a, c, g, or t
  misc_feature (525)..(525): n is a, c, g, or t
tggagagcaggcagctgctcttgatgaaaacggcagtggctctgaaaagatcctttagatcgaccacttaaaaatataccttaggccctctccccgcggatgcggctgaccaactggatgtccttgggcatgatggtcacgcgcttggcatggatggcgcacagataagaaaactgagtctcagagaaattatggcttgtcctggataagatgcaggccacagtctgccagctgcccaaccattcaggcttttcattattataggaagcatctggccaaggaccaccaacatcttcctgtcctgcccctgaagctgtgcctagaggaggtctctcatagatgcccacgttctcttgacaagatatttggggaggacccctggctactgtcactgctgccatgcttgccaggaggaggcaccttcctgacacttcactgctgctgctcagcaggcctgccaagtggttctgctgtgttctaggagaaacagganaaatgcctctnctnccactttgcactgtgctntgtcacctgggcccttaaacaccattgcctgcccctgacgccccaaca

SEQ ID NO: 730287 - DNA, 478 bp, Homo sapiens
attcagatttcactagtttttacatatacaatttttgagagtgtgtatgtagctctttgacattttattgcatgtatagattcctgtaattgccatcacaatcagaatacagagctgatccattaacactaagaaacaatttccttcctcttgagagtcctaccctcctcccagccctaagccctggcaaccacttattggcttttatcacaataattttgttaccctacatatatattttaatgttttttagtatctatttaatttttttcttttttttgagacagtctcactctgtctcaaaaaaaaaaagaataactaggaccacctaatttagactaaggcatgttaaggaagactaaggtatgtcagggaaggcttcttggaagtaggagtgagccaggttacagaaagatagctaagccagagagaagaatatgtttaaaggtacggggtcactggaaacttggataactta

SEQ ID NO: 730288 - DNA, 487 bp, Homo sapiens; identical to SEQ ID NO: 247404

SEQ ID NO: 730289 - DNA, 604 bp, Homo sapiens
actatgcttattacctgggtgatgaaataatctgtacaccaaacccccatgacatgcaatttacctacataacaaatctgtacacataccccgaacctaaaataaaagttaaaaaaaaaatcttacttgatccctcatggaatctcatatcaacaaaggagaggatcttttataataacaaaatcaggtaacacttttataatttcctttatgtctgtacttattgaaatagttgattgtcagaagatagttttctccttgcaatgattagccatacccttgagaaaaactcctaaaagggtataaaacacagtttggatatgtaaggtttgagatatctattaaactttgatgaggaagtatattggaaatcagtacttggagctagagaaaaggatagatctggagataaatatttgggagtcattaatgtatagatgacatttaaattcaaaggactaaatgaactcacctagggagactgaacagataaagagaagagatagagacctccaacattcagaggccagtcaaacagaggaaagtaggcaaaggagaatgagaaagaataggcagagaggtaggaggaaaatcaggaaagtgt

SEQ ID NO: 730290 - DNA, 999 bp, Homo sapiens
aggcagtgctttgagctctaatggatgaacattgctaaccagcgaaggtggagagagggcacccgtctgagaagatgaagaggcagcaaagcacagctggcctcggggaaccggaagccacagggacatcaggctgtgtgctgctgtctgtcggccaccagctgggggactatcctggacctggaagggcatccctgacactccccaccagatgccaggggcacccccagccccaggtgagaaccacggatcccatggcgaatgaggtcagcctgtgggaagtggggctgggactgctctgcacagcttaataggaaagttgggttctatttggtggggttttggtcatgccaatggctggtcagggctgtccgtgaggaactgatttgaggacaagttagagaaggggctgccgaggccagtggggcactcgctgtctgggtctaagaaaaagaaaataaaggctggtgatgtgacagttggtgggagcacagacggaaggaactggcggtggagacacacggttggccctgcacagggctacggtagctacctgggggtcatcctattaattctcctcatggtcccaagaggcggctgtgaggatccctctcctgaggacaaaactgctccagagccacacagaaccaagatccgggccaactccaaagcgggcgatcttgacccctcacccgtggtcctgaggcagggatcggagccccctggacacacagacactcccaccttgctgaagataattcgctttctcatccgtgaaagaataaagtcggactaactcatctccacactcacttccaactctaacaacctgtgttaggaaatcaaaggtaaggactctgaccacaaacccaagaagcaaaacccgagactcacggaacgacgccaccattgcagttcccagcttgactagttgtttttcttttctggtctgttctgctcttttggtttaaataattaaagatccttgttgacaagtaa

SEQ ID NO: 730291 - DNA, 556 bp, Homo sapiens; identical to SEQ ID NO: 460457

SEQ ID NO: 730292 - DNA, 733 bp, Homo sapiens
aaaaacatcctctgaagcctctctaacccagggatcctcctcactcttcccctacccattccccccaccctccgttatactggggccagttatctagtagatactgccaattacccttggcagaggtgccctgctcactaatttcatttgaaggagagccctggaacctggttttaatgtctggcacacgccactccaggatctcccagtttgtgtttctacatctgcaggctgatgctgatttctaaccaccccatgtcaatcattttagtttgtgggcatcacctatgccctgaccgttgtgtggctcctggtgtttgcctgctctgctgtgcctgtgtacatttacttcaacacctggaccacctgccagtctattgccttccccagcaagacctctgccagtataggcagtctctgtgctgatgccagaatgtatggtgttctcccatggaatgctttccctggcaaggtttgtggctccaaccttctgtccatctgcaaaacagctgagttccaaatgaccttccacctgtttattgctgcatttgtgggggctgcagctacactggtttcccctgctcaccttcatgattgctgccaacttacaactttgccgtccttaaactcatgggccgaggcaccaagttctgatcccccgtagaaatcccccctattctctaaatatgcgagtgctctaaaccacgacaggctcacactgctgcgtctacca

SEQ ID NO: 730293 - DNA, 723 bp, Homo sapiens
  misc_feature (504)..(504): n is a, c, g, or t
  misc_feature (521)..(521): n is a, c, g, or t
  misc_feature (523)..(523): n is a, c, g, or t
  misc_feature (541)..(541): n is a, c, g, or t
  misc_feature (555)..(555): n is a, c, g, or t
  misc_feature (557)..(557): n is a, c, g, or t
  misc_feature (575)..(575): n is a, c, g, or t
  misc_feature (578)..(579): n is a, c, g, or t
  misc_feature (686)..(686): n is a, c, g, or t
  misc_feature (689)..(689): n is a, c, g, or t
gccaacatcaagctcattctttggagcgggtgtgtcattgtttgggaaaatggctaggacatcccgacaagtttgtgggcatcacctatgccctgaccgttgtgtggctcctggtgtttgcctgctctgctgtgcctgtgtacatttacttcaacacctggaccacctgccagtctattgccttccccagcaagacctctgccagtataggcagtctctgtgctgatgccagaatgtatggtgttctcccatggaatgctttccctggcaaggtttgtggctccaaccttctgtccatctgcaaaacagctgagttccaaatgaccttccacctgtttattgctgcatttgtgggggctgcagctacactggtttcccctgctcaccttcatgattgctgccaacttacaactttgccgtccttaaactcatgggccgaggcaccaagttctgatcccccgtagaaatcccccttctctaatagcgaggctctaaccacacagnctacaatgctgcgtctncnatcttactctttgccttnccacaactgccctntnttacttgatgagtgaacnggnnaggagagtcttgcagtgattaaggtctctctttggactctcccctcttatgtacctctttagtcattttgcttcatagctggttcctgctagaaatgggaaatgccntangagatgacttcccaactgcaagtcacaaaggaat

SEQ ID NO: 730294 - DNA, 588 bp, Homo sapiens
  misc_feature (369)..(369): n is a, c, g, or t
  misc_feature (386)..(386): n is a, c, g, or t
  misc_feature (388)..(388): n is a, c, g, or t
  misc_feature (406)..(406): n is a, c, g, or t
  misc_feature (420)..(420): n is a, c, g, or t
  misc_feature (422)..(422): n is a, c, g, or t
  misc_feature (440)..(440): n is a, c, g, or t
  misc_feature (443)..(444): n is a, c, g, or t
  misc_feature (551)..(551): n is a, c, g, or t
  misc_feature (554)..(554): n is a, c, g, or t
tttgtgggcatcacctatgccctgaccgttgtgtggctcctggtgtttgcctgctctgctgtgcctgtgtacatttacttcaacacctggaccacctgccagtctattgccttccccagcaagacctctgccagtataggcagtctctgtgctgatgccagaatgtatggtgttctcccatggaatgctttccctggcaaggtttgtggctccaaccttctgtccatctgcaaaacagctgagctgctcaccttcatgattgctgccaacttacaactttgccgtccttaaactcatgggccgaggcaccaagttctgatcccccgtagaaatcccccttctctaatagcgaggctctaaccacacagnctacaatgctgcgtctncnatcttactctttgccttnccacaactgccctntnttacttgatgagtgaacnggnnaggagagtcttgcagtgattaaggtctctctttggactctcccctcttatgtacctctttagtcattttgcttcatagctggttcctgctagaaatgggaaatgccntangagatgacttcccaactgcaagtcacaaaggaat

SEQ ID NO: 730295 - DNA, 921 bp, Homo sapiens
gtaaaagaccgaagaaggaggctggagagaccaggatccttccagctgaacaaagtcagccacaaagcagactagccagccggctacaattggagtcagagtcccaaagacatgggcttgttagagtgctgtgcaagatgtctggtaggggccccctttgcttccctggtggccactggattgtgtttctttggggtggcactgttctgtggctgtggacatgaagccctcactggcacagaaaagctaattgagacctatttctccaaaaactaccaagactatgagtatctcatcaatgtgatccatgccttccagtatgtcatctatggaactgcctctttcttcttcctttatggggccctcctgctggctgagggcttctacaccaccggcgcagtcaggcagatctttggcgactacaagaccaccatctgcggcaagggcctgagcgcaacgtttgtgggcatcacctatgccctgaccgttgtgtggctcctggtgtttgcctgctctgctgtgcctgtgtacatttacttcaacacctggaccacctgccagtctattgccttccccagcaagacctctgccagtataggcagtctctgtgctgatgccagaatgtatggtgttctcccatggaatgctttccctggcaaggtttgtggctccaaccttctgtccatctgcaaaacagctgagttccaaatgaccttccacctgtttattgctgcatttgtgggggctgcagctacactggtttcccctgctcaccttcatgattgctgccaacttacaactttgccgtccttaaactcatgggccgaggcaccaagttctgatcccccgtagaaatcccccctattctctaaatatgcgagtgctctaaaccacgacaggctcacactgctgcgtctacca

SEQ ID NO: 730296 - DNA, 1558 bp, Homo sapiens
gcctgtttcccctttgctttctgccatgattataagtttcctgaggccttcccagccatgcttcccgtacagccttcggaactatggaacgttagcagctggggacctttctgccaccacaaaagcctagattatcctgatggacgatggaagacacatggctgttgttccagctgacatcaagccaaccactggacaagataggaaagctctcctagaacacgaaggcccgaatgaactggcccagagcagagaaactgctcagccaaactgccaagctgtgattaacaaaggcttcatcttaatccaccagattttggggtggtttgttacacagcgaatgctaactgatacagtcattatcattaggtctttcttgagctgatcatacttcccagcatagaatacgccaatgtcctgctccttattcctggctgccagcattgtaagagctgagtggaaggctggggttttcagcactcaatatgcactagacaatccaaaagatctacaaaaactttacatctacaagccaaggcactgaatctcagccccagaaagagactgtgaccttccttcctcatcaggatcccaagaagccgtagaacaagaggctaagaggttcgaaggacactggaaaggcttcatgctgctgtaggttgtggatggacaagctttgtgtctggagctgctgtagtgggccactcagttagttcacccaggctcccacattctccatgctctgtttcaggaaacaaccagaactgtggacagtcttaccaaagacactaacatcatcaccagagaattaaagaaatccagtgagtggcccacaacaattggctggcataggacatgatcctagcttcccacagggcacttgggattgtgcagtcagaagtgattgatgtgcatatgtttccacagacctctctgatgtctatgccgtcaccaaaaatattcagactgcaaaccaggaaatgcattgaattgccaccattgtccttatacttccgtttaaggacactccaggcccaacgtctcaaggccttttaggctagcttccttcaaacctcaaatcttggttgctgtctaatttaacctttaacccttttaccatttgccctgagaacacttgccggcagcacttccagctgcagcgtttacccaaagatacctctgccaggaaagaccttgcttttattattacttttgcatttctctagcatattgacattggaaacaaaagacatcattctatatatagcattctggttttagtggtggtagttccatttacaaaatatagtaattcttgatcactgaaaatgtcagagcctagaaaacggagcattcctatgcgtgatgttaacatcattaaacagttgttggccaaagactcatgtgatgaatccaatttttctaaaataaatagctcagatgattcagatgattctgatattaggtctgtttagaaataaaacttcaaaaacagtttttatattttacttccacattgaaaatcagtcagatttgctttggcctcaaagaatgtgtt

SEQ ID NO: 730297 - DNA, 708 bp, Homo sapiens
tgttctctgactcctcctcctccccgctctttcttgcctgaagatcaagggcttcgctagtgatgtgctcacccttaaccaacatgtacattatgaatctcctgaaagggtgtcgggaacgtgggaaacagctccctctgtccggtgaggactgaagaagtagtatttatacttatgtttttaaaagatgcagaaaaacatgctcctgcttttttccagagcaaagacataaagcaatgggtgtcatagaaacagtactggaatcagagacagattcctacttcgggctctatcacagactagctatgtggcatcttgggctagtatgggatgttcagtgctttatctttatctataactctgcttcattcgttcattcatataaaaaacatatgtggcgaacctagactgttctaggtgctatgctggcttctggggaatgtgaaggtaaaaacatcctaccttgatagagcaaagagtggatgggggggagggctcccacagggtcgataaatccagagataagcaaatttactatgatagtgggatgatatatatgctatgagacaggaggacgtgagtatctacaaaaacaaggaggagtgtctcctaacagggactggagaaccaaggttgcagtcagggaagtttttataagggaagagatgttggatggacaacatagaatgagactctgtttcaaaaaac

SEQ ID NO: 730298 - DNA, 693 bp, Homo sapiens
aggccaaggcaagggtcatgaccagggtccagcctcagtaatgcactcaccccctcaccctggggcactgctgcaggcccaccataagcagcctacattgctcccctcctgccctctcttcccagaaagcccctcacctgtcacttcctgaagaatatggaagccaaggaggtcttcttcaggcattcctctccacccatgcacttcctccctccctgcaagcttcaaaggaattgatttccagagagacccttcccagttgccccacctttccgtcagcctcttccaggaactgtcctctgacatctctctgtctaggtctccttgtcactcttgtgcacaccaagactgttctccccctgtcagccactgagtccactcagatatcttctgcttcccaaaattaaaattacaaaccaaaacagagacagcttccatgaccttacacattgtagacacttggctacagcagtgaatgacataaacaaagtccctttcctcatgtagccctcatgctagtagagtgaaacagataataaataaactagtcaaatgttcagcatgtgagttggtgatgacagcacggtgcttcatgcctgtaatcctagtgctttgggaggccgagatgtgaggatggctaaggtcaggaatttgagaccagtctgggtaacatagtgagaccctgtatctacc

SEQ ID NO: 730299 - DNA, 647 bp, Homo sapiens
aaagaacaccctaacaatgaggcattattaaaggcccacataaaaaacctaatagacaccagctgccctctcttcccagaaagcccctcacctgtcacttcctgaagaatatggaagccaaggaggtcttcttcaggcattcctctccacccatgcacttcctccctccctgcaagcttcaaaggaattgatttccagagagacccttcccagttgccccacctttccgtcagcctcttccaggaactgtcctctgacatctctctgtctaggtctccttgtcactcttgtgcacaccaagactgttctccccctgtcagccactgagtccactcagatatcttctgcttcccaaaattaaaattacaaaccaaaacagagacagcttccatgaccttacacattgtagacacttggctacagcagtgaatgacataaacaaagtccctttcctcatgtagccctcatgctagtagagtgaaacagataataaataaactagtcaaatgttcagcatgtgagttggtgatgacagcacggtgcttcatgcctgtaatcctagtgctttgggaggccgagatgtgaggatggctaaggtcaggaatttgagaccagtctgggtaacatagtgagaccctgtatctacc

SEQ ID NO: 730300 - DNA, 492 bp, Homo sapiens; identical to SEQ ID NO: 497408
  misc_feature (17)..(17): n is a, c, g, or t
  misc_feature (50)..(50): n is a, c, g, or t
  misc_feature (54)..(54): n is a, c, g, or t

SEQ ID NO: 730301 - DNA, 663 bp, Homo sapiens
gatacttacctggcaggggagataccatgatcacgaaggtggttttcccagggcgaggcttatccattgcactccggatgtgctgacccctgcgatttccccaaatgtgggaaactcgactgcataatttgtggtagtgggggactgcgttcgcgctttcccctgccttactggaagttgaaaggtagttgttgttatgatcggcgctgggtctggatgtgtggtgtttaaaacacgggctgctgggcagttcgctttcgttttcacgtttttgtgggggtagggcgattgctgctttttttctcaccccgcgggggatcctttagtaacgcgccaattatactgtgggtttatgttctccagggtattgtcgtgaaaacgtcacgatctcgtgctttctccaggccaaagccgcgtttttcctgcaagtttggggtgtgtagaggaaaaagccagaactgctttctcttccctggggtatcccagggtcttggtaaccgctggcagaaacgacagaatacgtacggggcgggcaattaatcctggtccagggaagtatccggcttagaggtttaggaaggacctgtcggggttgagttccccacccagggggagatcgagtccgcgggagctgctgatcccacccaggcagctgctgggctt

SEQ ID NO: 730302 - DNA, 639 bp, Homo sapiens; identical to SEQ ID NO: 216989

SEQ ID NO: 730303 - DNA, 1719 bp, Homo sapiens; identical to SEQ ID NO: 398250

SEQ ID NO: 730304 - DNA, 273 bp, Homo sapiens
gagcacgaggcgtgagtcactgtgcccagcctgttgtatttatttttctagattacagttaattttgttttcatttcttgaaacctagtagaatatgtatctgcctataattcaagggcaattgaaagaaagaaaaataactcaaggccaggcatggtggctcacatctgttatcccagaactttgggaggctgaggcaggaggatcatttgagcccaggagttcaagaccagcgtgggcaacataatgagactctgatgctacaaaaaactt

SEQ ID NO: 730305 - DNA, 403 bp, Homo sapiens
cacgagaatggactaaaagccccaattaaaaagcaacaatgatcggattaggtttataaagctctactgagttacatgttgcctatgagaaacccaatttaggccagatgtggtggctcacacctgtaatttcagcactttgggaggctgaggcagcaggatcacttaaccccaggagtttgagaccagcctgggcaacatggtgaaaccccgtcactacaaaaaaataaaaataaaaaattagccaggcatggtggcagtgcacctgtggtctcagctgcccactactcaggaggctcaggtgggaggatcacttgagcccaggaggttgaggctaccatgaacagtgtttgtgcccctgtaccccagcctgggcaacagagtgagactctgtctcaggacc

SEQ ID NO: 730306 - DNA, 511 bp, Homo sapiens
gcacgagtagtgttagagttctgttgccaggcataaacatatgctcagatgatcagaacattgctgacttaaagttttatgaatttatttgctggttaatatttcttatattttacatggtacaaaatgacttttcttctttctgaataatatctgacaatgtagttcaacagattttgcaggtgaaatactccttgaaatagtgaagtctattgtgtgcctaccttataacgttttctggcactgtacttgtgtgaacaacatgaggataaattcagatgcaaaaagtcaagcgttctgtattctcaggttaggaagggtgcgggggtggagatattcacttgttcagcattaaggctgaagaagaccttggcatctgtagatcctagggagctgctaagttcaacttaaagaatatttcctttaacaaaggcaaatcattaaaggcatagagacgaacaacaagacagctttgtcagctttgctacaggccttaatgtcgtttgaacag

SEQ ID NO: 730307 - DNA, 534 bp, Homo sapiens
ctcagaagcgaggcagccgtgaggcggaggacaggctgggtggatcccaaagggtgcgctccagcccccaacccaggcactgggactctggtggcaccctgggtggcaggcaagccttgaaatcaagtgcacgagccttggaaaggaggaccgggagagttatggcatttatgaatgaagaagagaaagagaatcactcggatgggaaaagttaactggattgttcccacctgcatggatcaccgggatgaagctgtgccaccctgtaggaattagaagaccatgtccaggaattgagcactgggtgcaggatccagtcttctgaggccctgaaaccacatgtggtcctaatatgctatttagaaaatacaaagtggaaagaagaaaaatgaaagtcacgcatcgtccttcaacccggggacaactcctgctaacactcggatggatgaatttcacatatacatataaatattctcatctacagtcaaatttaataatgtgaatgccttaataaaccactaattcttcaatttc

SEQ ID NO: 730308 - DNA, 839 bp, Homo sapiens
ctcagaagcgaggcagccgtgaggcggaggacaggctgggtggatcccaaagggtgcgctccagcccccaacccaggcactgggactctggtggcaccctgggtggcaggcaagccttgaaatcaagtgcacgagccttggaaaggaggaccgggagagttatggcatttatgaatgaagaagagaaagagaatcactcggatgggaaaagttaactggattgttcccacctgcatggatcaccgggatgaagctgtgccaccctgtaggaattagaagaccatgtccaggaattgagcactgggtgcaggatccagtcttctgaggccctgaaaccacatggtgagaagttgaaggtcacacagctgaagcaacttagccgtctcgccttgcggcctggaacccctggcaatttccggagcaccggcaagagacttttgcacagtttctgcttggagtctaccgactgtctgtctcagaggtctggacagctgcttgttacatttggctcacgctagcttaaaaaaggaatttatggaccttactgcagaacgtcccaattcttcaggccaaggtgcctgtgttcctgctcggtttctggattgcttggtacttaaatgaaacatcttattaatcatttcccgggaatgctgtgcaggcaaaaggaaaacaaaggcattcaggagccacagaaaagtgtactggctcctgtcctggatcaactcagaaaatgaaacacatcggattctgtccaggccgggcacagcaacctggcccatccatgtggagcctgcagtgaccacttccgctgtctgcacaaaactggagggaggctgggg

SEQ ID NO: 730309 - DNA, 494 bp, Homo sapiens
gagatgcaacccaaaggagtaaggcagtgccgggagcggcagaagcggagcgggggcgagggcaaggtagccgcggccacgctggctgcggcatggagacacgggaggaacgggacccgcgggcggcacgggaaagggctgcggctcagaccactgcggcgggacgggcggatcagcggggatctaagtctcctgaggcaagggcgccccgaccgcagcgactcctgacacacccaggccgcaggacgaagcgctaccgcctggggctgccagctcccgcctcccgcccgcagagcccgggccccacgtagaggatccggcgccgccgacactcgcacactcaccgcgcgcgcgccacccttgcgcggcagcccgccgccctcggcgcgacctccgccccaccccgcgcgccgcggcgcctgggctacgtcacgggcgcgtgcgctctccgcgcgccgtcagcggcgcgggtggggcattgccagctcggcgtc

SEQ ID NO: 730310 - DNA, 831 bp, Homo sapiens; identical to SEQ ID NO: 229710

SEQ ID NO: 730311 - DNA, 1549 bp, Homo sapiens
tgaggactaaagttgtaggtcacacttttgttagctctttaaccctgagcaagttagttaagttttgtctcaaaaccttaagaattctctggctccttagggtgggtgtgagggtggactggaacagcagcagcctgcagtgagggagctggctacacttcagggcgtggggccatttccctcggttttgaagctttgctttagaggttaaccagttgcccaggtaaaaaccaaagttcaggttttcttggtgatgtatatcatgattctgtcaaactcagcagcctgtgtttattgatgaggttgcaatggggtcagaatctatcctagagaatgaaattttgttgtatgcgacaacatggatgaaccttacaaacagtatgctcagtgcaataagacagatacagaacaaatattgtacgattccacttatctgaggcacctagaagaggcagatgcatacaggcagaaagtagcaaaagctgtcagatgctgggggaaggaggagtattgtttaatgggtacagagttgttggggatgatgaaatgttttggatatggatggtggtgatggttacacaacattgtgaatgtatgtaatgtcattgaattgtgtacttacaagtggttaaatgataaatattatgtatattttagccacaataaaagaaaaatgaaggaaaaaaatgcattttaaagaaccgctagggctatgcatggtggttcacgcctgtaatcccagtgctttgagaggcttaggcaggagtactgcttgaggccaggagattgagatctgtctgggcaatatagccagacaccacctctaccaaaacaaaaaaaaaagtattttaaattagcctagtgtggcacattcctatagtcccagctgttctagaggctaaggagggaggctcactcctcccaggagatcgaggctgtagtgtgctacagttaacaccactgtaacccagcctggataacaagtccagcccaggtaacagtgtgtatggtgtgtttattggaaggcaaaattactatttttcatcttttatctataaggcttattcatttttataaccattttgatcaaatctcaaattggatgcatttaacagttaagaatgcagttcaggccgggcatggtggctcacgcctgtaatcccagcactttgggaggcagaggcgggtggatcacaaggtcaggagttcgagaccagcctggccaatgtggtgaaaccctgtctctactaaaaatacaaaaattagccgggtgtggtgacgcgtgcctgtagtcccagctactcgggaggctgaggcaggagaatggcgtgaacctgggaggcggtgcttgcagtgagcgtagatggtgccactgtactccagcctgggcgacagagcaagactctgtctcaaaaaaaaagaaaaaaaaaagaacgcagttcaaccacagtattattcctaaaagggaaaaatgtcctttattatatcatttccaggaatgcactataataaaaactaagttgcgtgttaaaaaaaaatgtgtcctggg

SEQ ID NO: 730312 - DNA, 779 bp, Homo sapiens
  misc_feature (178)..(178): n is a, c, g, or t
  misc_feature (181)..(181): n is a, c, g, or t
  misc_feature (578)..(578): n is a, c, g, or t
ggggtgggcccccatacccccaggggcaagagatccttgcattgtaaggtggcgcattggcaataccaaacccggcaacttgctgggcaagcgccccagcatagtaccccagggagatgaaacctttgggggggattccctcaggccccattaggccccccagtgtataccccaggangtnacacccatgccaagatcagggtgcaacccatcttggaaggcgagaagccattatcatccatgaagttcacgccagggtcctgtacactgacggcctacaagctgaccccccgtggctacgaatggggccgccagaacacagacaagggcaaccaccccaaagggctacctgccttcacactatgagagggggcagatgctgctgtcggaccgtttccttggctttttcatggtccctgcccagtcctcgtggaactacaacttcatgggtgttcggcatgacccccacatgaaatatgagctacagctggcgaaccccaaaaagttttaccccgaggtgcacaggccctctcacttcctcaactttgctttcctgcaggagggggaggtttactctncggatcgggaggacctgtatgcctggcccgtttccctgcctcctgcttcagcctcccgaggccgaagcctcagcccctccagacaggccgctgacattcagcagtttggcctctttccctctgtttgggcttgtgttgttgacctcctgatggcttgtcatcctgaataaaaaataataataaattttgtataaataggga

SEQ ID NO: 730313 - DNA, 534 bp, Homo sapiens
cgcagggccttccagaagcgccagcagcagcagagcgccctgagggtgatgcagcggaactgcgcggcctacctcaagctgagacactggcagtggtggcggctgtttaccaaggtgaagccactgctgcaggtgacgcggcaggatgaggtgctgcaggcacgggcccaggagctgcagaaagtgcaggagctacagcagcagagcgcccgcgaagttggggagctccagggccgagtggcacagctggaagaggagcgcgcccgcctggcagagcaattgcgagcagaggcagaactgtgtgcagaggccgaggagacgcgggggaggctggcagcccgcaagcaggagctggagctggtggtgtcagagctggaggctcgcgtgggcgaggaggaggagtgcagccgtcaaatgcaaaccgagaagaagaggctgcagcagcacatacaggagctagaggcccaccttgaggctgaggagggtgcgcggcagaagctgcagctggagaaggtgacgacagaggcaaaaatg

SEQ ID NO: 730314 - DNA, 1643 bp, Homo sapiens
  misc_feature (276)..(276): n is a, c, g, or t
  misc_feature (322)..(322): n is a, c, g, or t
  misc_feature (1014)..(1014): n is a, c, g, or t
cccagccgtcttggcgttgtcctctccaacccccgccgctccgcgtagaacgccgctctcaggctgccgtcaagctcccgcggcactctcctaggtggcccgacgagacccagagtgacccgcgggacgcctgtatcgaccgcgtcctcttcccaccagcgtgggattcggttgaacgtggagtccccagcaatcttcagtctctcaccagggccagggactcgtctggggcgcgggggaaagaagcgtggcggggctgtagatgccgcgtgagtnggatgcagattgcaccgctggagcgcttgacaaccaaccgagcgtnggcttagtttgttttcccgcacagcaagctctctgtctttcagaggaaggtaaaggtggtgaaagctctaaactaaaattgtatcgaaatggctgcagaaatcgactttctgagagagcaaaatcgaagactaaatgaagattttaggcggtatcaaatggaaagtttttccaaatattcatctgtacagaaagctgtctgccaaggagaaggagacgacacatttgaaaacctagtatttgaccaaagctttttagctcctcttgttactgagtatgataaacacctaggagaactaaatgggcagctgaaatattaccaggcataacgaggaccttggaaaagttcacctttcaaaccaaatttatagttagaatttgctattctgatctcctagaccaagcttccttgatcttctcggttgaaagagagagaaaaaggctggcagaactgcctgttccacctggcccttgcgaaagtgtactccaggataagcttctctcctttagcctaggaagcacaatcaagactaatacacaatcatgaattagttaccgttttaagtgagattttgcatgcttttacatgtaaattcagggtttgtgtgtgtgtgtgtgtgtgtgtgtgtgtgcgcgcgcgcacactctccatttgctcattcacacttactgagagttgactacttatttttngctattttgcttttactcatattttgcgccaactttaaagtgctttcttttcttttgaaatcctaacatctttttactccttcagagaacgttaatcagaccttcatttaattccctttctggtgtgcattatattctgccttgtattttagttaggattttttttaaccatctttcctactatttttcaatgagcatgtctgtttaccttagcgccttgtatggtacggagagtttagatagttaatgaaggtggtgaatcagaaactgaatgaatgactgctaaaaaagacctccattttcttctttactgttagcattttaccttttgaaatactagaaaaatatacatacttatatgggcttcacctaaactgaggtgaattaactaagatatacattcaagatacaggaaccatctggtatttgttatagtgacatactccagaatatctttcatctgtttttcacaactacaagtcataggaattacatttataaacatttctcaccatgttacataaaatatttctattttatttatattctacttaaaatgaatgttttattgtgttctgtttattagtaaattatccatattaattatccctttgttataaataaagaat

SEQ ID NO: 730315 - DNA, 1570 bp, Homo sapiens
  misc_feature (276)..(276): n is a, c, g, or t
  misc_feature (322)..(322): n is a, c, g, or t
  misc_feature (941)..(941): n is a, c, g, or t
cccagccgtcttggcgttgtcctctccaacccccgccgctccgcgtagaacgccgctctcaggctgccgtcaagctcccgcggcactctcctaggtggcccgacgagacccagagtgacccgcgggacgcctgtatcgaccgcgtcctcttcccaccagcgtgggattcggttgaacgtggagtccccagcaatcttcagtctctcaccagggccagggactcgtctggggcgcgggggaaagaagcgtggcggggctgtagatgccgcgtgagtnggatgcagattgcaccgctggagcgcttgacaaccaaccgagcgtnggcttagtttgttttcccgcacagcaagctctctgtctttcagaggaagatcgaagactaaatgaagattttaggcggtatcaaatggaaagtttttccaaatattcatctgtacagaaagctgtctgccaaggagaaggagacgacacatttgaaaacctagtatttgaccaaagctttttagctcctcttgttactgagtatgataaacacctaggagaactaaatgggcagctgaaatattaccaggcataacgaggaccttggaaaagttcacctttcaaaccaaatttatagttagaatttgctattctgatctcctagaccaagcttccttgatcttctcggttgaaagagagagaaaaaggctggcagaactgcctgttccacctggcccttgcgaaagtgtactccaggataagcttctctcctttagcctaggaagcacaatcaagactaatacacaatcatgaattagttaccgttttaagtgagattttgcatgcttttacatgtaaattcagggtttgtgtgtgtgtgtgtgtgtgtgtgtgtgtgcgcgcgcgcacactctccatttgctcattcacacttactgagagttgactacttatttttngctattttgcttttactcatattttgcgccaactttaaagtgctttcttttcttttgaaatcctaacatctttttactccttcagagaacgttaatcagaccttcatttaattccctttctggtgtgcattatattctgccttgtattttagttaggattttttttaaccatctttcctactatttttcaatgagcatgtctgtttaccttagcgccttgtatggtacggagagtttagatagttaatgaaggtggtgaatcagaaactgaatgaatgactgctaaaaaagacctccattttcttctttactgttagcattttaccttttgaaatactagaaaaatatacatacttatatgggcttcacctaaactgaggtgaattaactaagatatacattcaagatacaggaaccatctggtatttgttatagtgacatactccagaatatctttcatctgtttttcacaactacaagtcataggaattacatttataaacatttctcaccatgttacataaaatatttctattttatttatattctacttaaaatgaatgttttattgtgttctgtttattagtaaattatccatattaattatccctttgttataaataaagaat

SEQ ID NO: 730316 - DNA, 888 bp, Homo sapiens
agaatgcacgatgtccgtgattgtaccactgcactccagcctgggtgagaccctgtctcaaagaaaaaaaacaaaaaaggtagcttttgtggaatgtgaattatatctcaattttaaataaaggttatgcccatctattgacacaaaatgatgtccctgagattttattcaatgaaaaaagaacagccttgataaaaccacacgtatagaaaaaagtgggcaacatggcctgaactctccccaggcacccccaacagaaaacgcagtctgggagcctgcagcctcagatgaagggctgggttgaggccccagacctgcagagggcggctctgggctgcctggcttcaccctctgcagagaaacctgaaatctctagcctgtagaggagcttctccctgcttttctccactgctagaccctcatgctcagggccagggcccagagtgggaatgagagaggtggggtgatgacagcctcaggatactccgctcaagctggccttggttctagctcccaagctgcagccacctcttagggggttcctgctgcctggacgcctctccctgtcactcaatgtcacgtcctcagagaagccctccctgaccccagtctcattcaggccccgtcatctgccctcccagatttcagcatgtgtcactgcagatctcaggacgtgtacagggttccagctcataagggtacacatttggggaccaagtttcccctctcttgctgtcctccaactttccaggaaccagtccctgagctcctcctgcaggacgaggccccacacattgcttctgatcacagccatcctttccccgctcacttttctcactttatctccccaaaccgggacagtcaagaaccacagaggaccgaagtgca

SEQ ID NO: 730317 - DNA, 963 bp, Homo sapiens
gagatggagtctcactctgtcgcccaggctggagtgaagtggctcgatcttggctctctgcaacctccacctcccaggttcaagtgattctcctgcctgagcctcctgagtagctgggagtacaggtgcccgccaccacacctggctgatttttgtagcttttgtggaatgtgaattatatctcaattttaaataaaggttatgcccatctattgacacaaaatgatgtccctgagattttattcaatgaaaaaagaacagccttgataaaaccacacgtatagaaaaaagtgggcaacatggcctgaactctccccaggcacccccaacagaaaacgcagtctgggagcctgcagcctcagatgaagggctgggttgaggccccagacctgcagagggcggctctgggctgcctggcttcaccctctgcagagaaacctgaaatctctagcctgtagaggagcttctccctgcttttctccactgctagaccctcatgctcagggccagggcccagagtgggaatgagagaggtggggtgatgacagcctcaggatactccgctcaagctggccttggttctagctcccaagctgcagccacctcttagggggttcctgctgcctggacgcctctccctgtcactcaatgtcacgtcctcagagaagccctccctgaccccagtctcattcaggccccgtcatctgccctcccagatttcagcatgtgtcactgcagatctcaggacgtgtacagggttccagctcataagggtacacatttggggaccaagtttcccctctcttgctgtcctccaactttccaggaaccagtccctgagctcctcctgcaggacgaggccccacacattgcttctgatcacagccatcctttccccgctcacttttctcactttatctccccaaaccgggacagtcaagaaccacagaggaccgaagtgca

SEQ ID NO: 730318 - DNA, 557 bp, Homo sapiens
tcaagctgcagctccggggcacatcccgctgcgctcccacgacggccccgcggatggcaaagtcagcggcatcgcctatgcaggcaatcaaaggatgttgatggataagtgtttcaggcagaataatggccctcaaagatgttgacaccagaatcttcagaacctttgcatatgttacctaacatgacaaaagggactttgctgatgtgattaaggttaagaactttgagaagggaagattatcctggattatacaggtcgacgtttatttctttctgaactttcctggaggatcatcggccatactccagcagaagggtggatttgaaaaaataacgtttccacggcaacagtggcagcaattcaaaggaagacgttggagaattcacatgctattttagctggctctgtgattgcaatcacacaaatcattacattccagcgagatcccatcaacagaaggtttttccatttcagtctgtcaagtttttcaggcatgaatactgtaagcaagaagagaaaagttacaataaattgacatttatagtaaaaaaaaa

SEQ ID NO: 730319 - DNA, 460 bp, Homo sapiens
gcatcgcctatgcaggcaatcaaaggatgttgatggataagtgtttcaggcagaataatggccctcaaagatgttgacaccagaatcttcagaacctttgcatatgttacctaacatgacaaaagggactttgctgatgtgattaaggttaagaactttgagaagggaagattatcctggattatacaggtcgacgtttatttctttctgaactttcctggaggatcatcggccatactccagcagaagggtggatttgaaaaaataacaaggaagacgttggagaattcacatgctattttagctggctctgtgattgcaatcacacaaatcattacattccagcgagatcccatcaacagaaggtttttccatttcagtctgtcaagtttttcaggcatgaatactgtaagcaagaagagaaaagttacaataaattgacatttatagtaaaaaaaaa

SEQ ID NO: 730320 - DNA, 420 bp, Homo sapiens
tgtctcctgcctgcccctgggaactgaacgtcttggtataaaacccgattgtacatttgttcaattctgagataggagaaaaaccgccctatggtgggaggtgagacatgttggcagcaatgctgccttgttattctttactccgctgagatgtttgggtggagagaaacataaatctggcctacgtgcccatccaggcatagtactttcccttgaacttaattatgatatagattcttttgctcacatggttttttgctgaccttctccttattatcaccctgctctcctactacattcctttctgctgaaatcatgaaaataataatcaataaaaactgagggaactcagagaccggtgccggtgcaggtccttggtgtaccgagtgccgctctcctgggcccaatgatgtttataaa

SEQ ID NO: 730321 - DNA, 715 bp, Homo sapiens
  misc_feature (685)..(685): n is a, c, g, or t
aggcaggggcggcctctctgacgagaaggaggccactgggctgaggccaatgaatgggaaagagccagccacatggtgagctgggagagggcatcccaggcagtgcaaccagcgcttgcaaaggccctggggctggacagttcttggcggagtctgagggcttgagtctgggggagcctggctgcccagaggtggcagatgacatgaagaaataaccatgtaagggctggctgtgtatgagagcaagcattgggaaggatgaatgccaactatgttccaggaacttccactgttctcacacacccaggtgagtggtgttcaggtgggtggcacccaggtgagtgacatcccagttgagtggcacccaggtgagtagcatccaggtgagtgacacctaggtgagtgacattcaggttagtggcgtctgtgtgagtggcatcatccaggtgagtagcttccaggtgagtggcacccaggtgagtggcattcgggtgagtggcattatccaggtgacacctgggtgagtggcatccaggtgagtgatatcatccaggtaagtggcacctaggtgacatccaggtgagtgacgacatccaggtgagtgacatcatccaggtaaatggcacccaggtgagtagcattcaggtgagtgacacccaggcgagtggcatccacgtgactagcntgtccaggtgcataacacccaggtgagtga

SEQ ID NO: 730322 - DNA, 430 bp, Homo sapiens
aggcaggggcggcctctctgacgagaaggaggccactgggctgaggccaatgaatgggaaagagccagccacatggtgagctgggagagggcatcccaggcagtgcaaccagcgcttgcaaaggccctggggctggacagttcttggcggagtctgaggtacaggatgatccctggatgagcgcctgagtgcacgaagcatgggtggagagggtcagctcccagcgtggctgcaggagggggtcgtgtaatgaatactaagtgccagttctgcaggatggaaacagttttgaaattggacggtggcgatggtggtgcgataatgcgaatggacccaatgccactgaaatattcactttaaaaaagttaaaatggcaaggtttacattaactagactttgccataataaaaggaaaaggaaaaaatataaa

SEQ ID NO: 730323 - DNA, 1716 bp, Homo sapiens; identical to SEQ ID NO: 245489

SEQ ID NO: 730324 - DNA, 1102 bp, Homo sapiens
tgagacaaagtctcgctctgttgcccaggctggagtgcagtggcgcgatctctgctccctgcaagctccacctcccgggttcacgccattctcctgccccagcctcccgggtagctgggactacaggtgcacaccaccacacctggcctatttttttgtatttttagtagagtcggggtatcaccatgttcgccaggatggtctcaatctcctgacctcatgatccacccgcctcagcctcccaaagtgctgggattacaggcgtgaggcactacgcccagcctcatgctgtttcaaaattgtacttaagtgtggttcagtctgaacattcctttgtacaaatgtggaaacacggggctgtagatgctgttaactactgaaggcaaaagtgtgacttcatggtataggtgtgattgattaaattattggctattggtgaccagctcaatcttcagtccctctccactctgggaaaattggagggtggggctgaaaccctctaatcctgccttggccctgtgactagccctaccctgaagtttcgtaggggctgcccatcactggagccaggaaatgggaggcaggccagatatgtattttgcaatccacaactatagacttctaacttcctgaaatgttcatggactgaatcaactctcctgtccacttcatgctgtacaccagcagtgagccctgggcctcaagggtgtgggagaatgtctgccttctaaacagaatcattttcaattgctgtgcctgtgaaaatctgcctgccttttatgctttccctgtctcttctcttgtcatttaggcttctcctgttatcagggcctgtaagaagcaccacccttcccagtctgttggctgacaaccggctgcaagcccttgttaccactgtgtgagaaccaggaaaccaggattagtcaaggactttatggcttatcagccagcctcactgtctccccatccctgtaggtggctgagtgacaggaccctgggggaggacctgagagcctcctgggaacaaagagcatccaggacatgtctgtcaagtcgctaacaaggtcatctgacccacctgagaatgtgaaactacctatct

SEQ ID NO: 730325 - DNA, 591 bp, Homo sapiens
tttgagacaaagtctcgctctgttgcccaggctggagtgcagtggcgcgatctctgctccctgcaagctccacctcccgggttcacgccattctcctgccccagcctcccgggtagctgggactacaggtgcacaccaccacacctggcctatttttttgtatttttagtagagtcggggtatcaccatgttcgccaggatggtctcaatctcctgacctcatgatccacccgcctcagcctcccaaagtgctgggattacaggcgtgaggcactacgcccagcctcatgctgtttcaaaattgtacttaagtgtggttcagtctgaacattcctttgtacaaatgtggaaacacggggctgtagatgctgttaactactgaaggcaaaagtgtgacttcatggtataggtgtgattgattaaattattggctattggtgaccagctcaatcttcagtccctctccactctgggaaaattggagggtggggctgaaaccctctaatcctgccttggccctgtgactagccctaccctgaagtttcgtaggggctgcccatcactggtcaactcattagggtacaaaaagac

SEQ ID NO: 730326 - DNA, 435 bp, Homo sapiens
cagcaggatggacctgcccagtttggaacacatgatgaaagctccaccccaggaggctctggagccttccacagagcccctcctgaccactgtggaggagcgagagccagaaaatcacgcagagaccctgccagagaaaccacgcgaagccagagcaccactgaaatcttggagtcaggaagacaagaacttcgctcaatcttactttgacttcagcaagccggggatcaagagggccaccatcaaagggcaaatccagcttctccagccaccagccacgtcccctctgctgcagggaagcaaggaagactcagtgccgccaggaaaagagaaagagaatccattattggtgaaaatccattttaagctgtcagcccccacaatcccagagaaatgactagacagaaccaataaagcctccagtgctggcaaaag

SEQ ID NO: 730327 - DNA, 456 bp, Homo sapiens
cactggcattaggcggctttccaccctgggggtcgggcctcaccaaggttgggaatgctcaggctggggtctgccctgttgaaagcctgttggccccaaccctggggtccaggacacttttcttgaggggagaatgagggtgcagggctctccagtacaccttgctttctggtagtgaatggacacagaatgtaatctcagctgcccagacgcgggcagcagcagaagaccccttacccccagcgacctcttcagaggggcctctgggctcacccctctccttcaaccaccctctggggcccaagtgacactctctcttttgtgttgcagctcagtgccgccaggaaaagagaaagagaatccattattggtgaaaatccattttaagctgtcagcccccacaatcccagagaaatgactagacagaaccaataaagcctccagtgctggcaaaag

SEQ ID NO: 730328 - DNA, 526 bp, Homo sapiens
cggcctcccaactaaatttacttttaaaatgggatattcatcacctgagtattgtcaggcttgttactcttatctctgtttacagatcacttataagtcaaaggtattgtgtaagaacaaagtggtattttaaatgacaaaagggctttcatccttagtgcagccttatataattgagcacagtgattctgtctttggtcatctgtaatccacacaggtggatggttttatagattgatgtgtaatttgtgggggttatagaaacgattatattcatatagcaaagtctatatgtattatttgtagttcagagctaggaaaactcaatgcagtccttcctgatcttgactcaggaaatcagtagttccaaggatgattcagtcttgtctagttccacaaatggaaggagggtgtctgcataaaaagataaggggaatcagtcaggaagcccattttgaatagcttcatgaatcccttaaattgttgctcacttcagcagaactcattaaagctatcacaattttta

SEQ ID NO: 730329 - DNA, 472 bp, Homo sapiens
cggcctcccaactaaatttacttttaaaatgggatattcatcacctgagtattgtcaggcttgttactcttatctctgtttacagatcacttataagtcaaaggtattgtgtaagaacaaagtggtattttaaatgacaaaagggctttcatccttagtgcagccttatataattgagcacagtgattctgtctttggtcatctgtaatccacacaggtggatggttttatagattgatgtgtaatttgtgggggttatagaaacgattatattcatatagcaaagtctatatgtattatttgtagttcagagctaggatgattcagtcttgtctagttccacaaatggaaggagggtgtctgcataaaaagataaggggaatcagtcaggaagcccattttgaatagcttcatgaatcccttaaattgttgctcacttcagcagaactcattaaagctatcacaattttta

SEQ ID NO: 730330 - DNA, 1169 bp, Homo sapiens
ttgtgtaatatttatggcttaaaatggactaaaggtcctgttcttgccttgtctgaacttgccgcttttgcattctttgagttcagtttaaagacagttactttaagcccattttaaaccctcaggctagaaatcgtaccactgttaattagccacattatttggtctaacagtttatcattctgaaactgagcttacctaatacattgataaattatttcaaaggtatttttatagttcaaatcgcttcacttttaccctgacacgtataaatgactaggaatgaccttcagatagcgtttagcaactgtaaccaatctgacaataatgtgttcatcaggtacctgtggattaaatcacatactggcatatttaagctgaatgtcagtctgaaaaataaatgtactatattaactcaaataccactctctgtgtaggtattttgtcatatgtttaagaaaaagctaaagagaatggaaatcctatgacaataactatgacaataactatgacaagtctttcttcaaagtgcatgcagtcttttgcagtacctcattcagccaagtatttgttctctacctcattcagtataaggcagcctttaatttgcttagaaggcaacattagaaggttagagttcagcaggaacatagaattttaaaatgtgacttcaactgaataaatttgaatttctgtagggagtaaagaatcaaaacacctatttaaagactgcaaaatatgataattatttttaaagtaattgattaaacctggtaggttttcccaaaatgaaaaacaatcagttctaaaaccaaagctgatttttagaaaatgtgaaaatgtaaatcaaccctatccataatagattctctaaaactttatcttacagtcactttcaaataactattcaaaaatgtaactgctatattaacgtcttaaaataatttaaaacattttaaaatatgaatactgtagtttaaaacaaagaatctaggggaaggaaaagtagacaaagaaatgccaattccagtccaaagctgtatttgccaagttttcttagaatgacttttaccgatttatgaattcttatacacagaatgcataatggaaatactgatttttgtctaaagtggcattattgactgctgctgtgatgctactataatgta

SEQ ID NO: 730331 - DNA, 440 bp, Homo sapiens
gttatatctaatgacttgatcagatgcaggtgcaagttaaattttatgaggaggaacacctgggtcatgttgaatttggttgcttaataggaaatgcttctgtttgatactaagcggaggtcaccgactactagagaggcaggaggtattttcctagctggaatttaatgagggtccaggatgagttttctgatagagtcctctgccctttctctttcctcacattttccctcttctgggtgtgtgccaaaacaagtgggatgggaatggtcttcttacatgagcttgccagtctggaggccccctcagtcttctgcagcccacgtgtctccctccacctgcactgcaaggtccacctgcactgaagcgggatgatgcccacttcagatccttgtttccagctgttcaggtggcagagatttcaaaagaaaaagaaaaaa

SEQ ID NO: 730332 - DNA, 100 bp, Homo sapiens; identical to SEQ ID NO: 554332
  misc_feature (85)..(87): n is a, c, g, or t

SEQ ID NO: 730333 - DNA, 415 bp, Homo sapiens
  misc_feature (142)..(142): n is a, c, g, or t
  misc_feature (149)..(149): n is a, c, g, or t
  misc_feature (156)..(156): n is a, c, g, or t
  misc_feature (201)..(202): n is a, c, g, or t
  misc_feature (226)..(227): n is a, c, g, or t
  misc_feature (241)..(241): n is a, c, g, or t
  misc_feature (243)..(243): n is a, c, g, or t
  misc_feature (245)..(245): n is a, c, g, or t
  misc_feature (249)..(249): n is a, c, g, or t
  misc_feature (257)..(258): n is a, c, g, or t
  misc_feature (263)..(263): n is a, c, g, or t
  misc_feature (296)..(296): n is a, c, g, or t
  misc_feature (299)..(299): n is a, c, g, or t
  misc_feature (400)..(402): n is a, c, g, or t
ggtcaaaggtagatatcaagccaagagggttagggaggtggggtacatttctctgagcagtcagggtgggaaaaaagaatgcaagagtggactgaatgtgcctaatggagaagacccacgtggtaggggatgaggggcttcntgggtcntgttccntaccccatttgtggtcacagccatgaagtcaccgggatgaaccannccttccagtggctcgctccctganntttgcctcccctcncnanatcnccttcccnnacacntccctccccacacctcccactcccctgggcatnttntggcttgactggatggaaggagacttaggaacctaccagttggccatgatgtcttttcttctttttcttttttttaacaaaacagaacaaaaccaaaaaannnccagaaaaaaaaa

SEQ ID NO: 730334 - DNA, 348 bp, Homo sapiens
gtaagagccgcggagggagcgagcgagccggctagaggccagcgccgccgccgccgccgcctccgagccgggcagcaacagccccggcagcggcgcaggctccagcgcgccgggcccggccggccgcagcccccgacgcctgggtgcgcctgcctgccggcctccgcaccgtccgccgccgctcccggggctgttgtgtctgcgactgctcccggccggaggtgcagggagctcagccgagccgccgctgccatcccggagcgagcaagcgagcgagcgcgcgggagggaggaaggcggcggcggaggaggaggaggagcgggaggagcgcgggcgggggcgggggcc

SEQ ID NO: 730335 - DNA, 481 bp, Homo sapiens
ttagcaacctgagcgccccgcccaggtgccttactattggtctcgtggagcgggatgggcagctctgccgtgcaatcccagctcgcagcccttgccccgcgtgtactcacgggaggactcgcagacgttactgccctcttgcgtgccccggccacccccgggcggcttgtagccggtgcgcggggtggctggggctacgtgcagagctgtcgcggagccggaacagcagcggtgaagcccctcggctcggccgagaccgccgtgcccattgctcgcctcggttgccgccgctttagccgcagccgctgctgccgccgccgggggagaggcagcctattgtctttctccgcggcgaaggtgaggagctgtctcggctcggcccgcgggggagccccgggagccgcacggtgagagcgcaacttagttggcggagttgggggaagttttgtgatttgaggaggggtcggggtgcggagcgcgg

SEQ ID NO: 730336 - DNA, 846 bp, Homo sapiens
ttagcaacctgagcgccccgcccaggtgccttactattggtctcgtggagcgggatgggcagctctgccgtgcaatcccagctcgcagcccttgccccgcgtgtactcacgggaggactcgcagacgttactgccctcttgcgtgccccggccacccccgggcggcttgtagccggtgcgcggggtggctggggctacgtgcagagctgtcgcggagccggaacagcagcggtgaagcccctcggctcggccgagaccgccgtgcccattgctcgcctcggttgccgccgctttagccgcagccgctgctgccgccgccgggggagaggcagcctattgtctttctccgcggcgaaggtgaggagctgtctcggctcggcccgcgggggagccccgggagccgcacgaatgggacaacagaagaagtgacttcaaaagaagacgaagaggaagagatggatgaagatatagaagacttagatcactatgagatgaaagaagagcctattagtgagaagaagttggaggatgaaggaactgaaaaagaaaattgggcaatattagagaaaattaggaagactgaaaggcaaggccatttaaatgtgttgaccctgatagtcctttgcacagtgatctttagatcttaaaaagaagcgataggagacattttgcttatctttcaagtgttcctgacagcatctcagaggatggtgtcctctggcttactctctgggaaatgctgctctgttggaaatccggagttctgagtgatccccatgcgttttctgctgcagagcaggacatgctgaagtgattccttcgtgagcagatgttagaggtctccct

SEQ ID NO: 730337 - DNA, 686 bp, Homo sapiens
aaaggagattatattcccatttggtggactctgttatacttcctttgaagtagggaggagagaggattggggattgttgagtactttctgttctccccaattttttttgttagtaatccacatttatttgagtaattcatactgtagggtgtccagtttttagacacttctatatttatatgtatcatttgatcctcacattagccttgggttttagaaacaattatccacattttacaaatacaaagactgttgctcaggaggttttgtaggtaggtcaaggagctaggaagtggcagtgctgagatttgtgctcatgtctctgactgcaagctcagagctcttacagagcaccatgccagctttattccccctgtcgtccttgggacagctttgccaattggggccatagtctggtttaactccctgctttgtctaactatttatttggatttcgggggacgtggaaattttctttgacaatcttgattttttgtgtggtgtttggtgaattttttttattactatactttaagttctagggtacatgtgcacaatgtgcaggtttgttgcataggttttcatgtgccttgttggtttggtgtgcccttaactcgtcatttacattaggtatttctcctaatgctatccctcccccagccccacacctcatgataggccctggt

SEQ ID NO: 730338 - DNA, 176 bp, Homo sapiens
  misc_feature (18)..(18): n is a, c, g, or t
  misc_feature (31)..(31): n is a, c, g, or t
  misc_feature (33)..(33): n is a, c, g, or t
  misc_feature (36)..(36): n is a, c, g, or t
ctaggtgactctgagganccccatacagcananagnggcctgcacactgtgcttggtgagttcacaaatctgttgtaacctgtagcttccctgtcacttctctggctctcctctcctgctaagctttgtttcctaattaaaatcttctgccactgccatagctactggtgctactg

SEQ ID NO: 730339 - DNA, 1152 bp, Homo sapiens
caggcaggagtgtgctgctgagacgctaaaggggtcacctccctatccgcacacagtgtatggggtgttaggcctgagcagatgaaaggaagaaagggatcctcaaggagaacccgttggcagtgagcgagccccacataccaaacttgaggccccaggctttagccaaccaatgacccagggtcagtctggtctcccaggggagggtgggccagggatcagcactgtggcttccagtggccccacagatgcccttagctgcagtcccagcatgcctatatatggcaaagccagggacatgcatgccagggcttccgtacagccccttgcttaactcttgggctttgtgagtcactcagacctaggcttaaatcccaagatggccatttactgctctgtgatattggacaagttattcagtctccctgagcaagttcccctccctctaaagtgggaagatgataccacctcccttggagggcaactgtgaagagccaatgaacgaacacttaacacagcacccggctcctcgtgaatactgtgtaatattatggtatttcttggcttctgcaggccacatgccattggctttctatctaagctgcttgctctctacagggcctaatggagtgcccagggcctgggaaggcattggtgagcttcactgggactagattctccaaagcctggagtatgaagggtgcatgggctgcgtccagctacctgtgagcccctgtaggccctcacagtctgaaatgcccatggaggtgcctacaggttctcttcttaaagttgtcaggagatggggacattgcaacttgaaggcaagcctggccctgggtttgcttatcttggtggatctttcttacatctgatctttttacattcggtccattcactttggctggccatcaccaaagacaaagacagtggccaccatctttctcatcagtaatccaataatgaggttgctctgctacttaccaagccaagcaagcccattcctttagcctttctgcgtaggatcttatttcccatggggacctggggtcaaaccctgcctctgctgttcactcatcatgggaacacaaacacacacttcccctttgtctgtgcaatggacaggttgggtgacgtggtctcagtgaggct

SEQ ID NO: 730340 - DNA, 433 bp, Homo sapiens
ggggttggggatgtgagcagtgttgtgaaattcctgagccccctgagggccactaccttctggggataggtgaagtggaaacaaagttctctaactctggaggggtgccctggtctcggggagggggagcactggctcctttaaggccttgagggaatatatcttcccctcccttagagccgtgtcccaaaatcaaagtggaatgcgaagtggaagaaatagaccagtgtaccaaacccagagattgcccagaaaacatgaagtgttgcccgttcagccgtggaaagaaatgtttagacttcagaaaggtgaattggataaaacatgtacctgaatgcttgaagccatgcttgatgtctgcagttctgttacaggtttgtgtcctagaaacacaggaattttaataaattatcttttgtacaactctattaaa

SEQ ID NO: 730341 - DNA, 430 bp, Homo sapiens
aaaatcaaagtggaatgcgaagtggaagaaatagaccagtgtaccaaacccagagattgcccagaaaacatgaagtgttgcccgttcagccgtggaaagaaatgtttagacttcagaaaggtcagccttactttataccataaggaggagcttgaataacctccaggatttggctcataatccaggcctctctccacgtgtgcctgattgatgctccaaattggcttccacgggccaaaccttggctgttccagaaactgaaccccaggaattgcttacacactttcttccagcgtagcatctcttcaaacacaatgctcttccccttgaccacttctcagtatgaaactctatgtcttcaactttcagaccccccatttatttgtatgaaggcttcagttgccttaataaagtgctctgtggggtccga

SEQ ID NO: 730342 - DNA, 679 bp, Homo sapiens
  misc_feature (25)..(25): n is a, c, g, or t
  misc_feature (29)..(29): n is a, c, g, or t
  misc_feature (358)..(358): n is a, c, g, or t
  misc_feature (679)..(679): n is a, c, g, or t
agcggggaccagaaggagcttactngggncctgacgtgtcaggaggccctgggggatcctgctgaagctgcgattggcgcagagctgagatgtctgagctctagacacagggacctcagtgtcaaaagatttgggaagatgaattgggtcggggggtcccggtccaggttctgatcaagcaggaaagaagaaagcaaaaggaatattttgaaaaacacaggttaaaatcaaaaatgaaatcactgggagttttatctcctgtcaaaaattctgctgtcagcttagacattcttaacctatatatggtaaatcagatatcttgcaagaagaaaattcctgaaactgtgagaaaaccaanccatgtgaacatgaatagagacataaaaatgcccctaagaaagcataatttagaacttacaatgtcgcctcactgtgtaccttctaaactctgccttgatgatacagaaaccaatgtaaactgtcaaagactaagtagcaaggaagatcttggcccagtccagtcacaaggcatggactcatatagtatgcttcaccctcagtttcagcaaaatagagaactgcagtggcactccatcatctttttcagtggagttacttctaacagacatatttcaaaactaaatttcacatctggaataggcgcttactcctccggaan

SEQ ID NO: 730343 - DNA, 502 bp, Homo sapiens
  misc_feature (25)..(25): n is a, c, g, or t
  misc_feature (29)..(29): n is a, c, g, or t
agcggggaccagaaggagcttactngggncctgacgtgtcaggaggccctgggggatcctgctgaagctgcgattggcgcagagctgagatgtctgagctctagacacagggacctcagtgtcaaaagatttgggaagatgaattgggtcggggggtcccggtccaggttctgatcaagcaggaaagaagaaagcaaaaggaatattttgaaaaacacaggttaaaatcaaaaatgaaatcactgggagttttatctcctgtcaaaaattctgctgtcagcttagacattcttaacctatatatggtaaatcagatatcttgcaagaagaaaattcctgggtatgtctgaaaggaagatctgcaaagatttttgcttcaatgactagtttcctatgtcatcacttgaattatttattacactttcctgggatgttaatcatagaagtctaatactgcaaaataaagtccattttgtcatataaaaaaatttacagtgaaaaa

SEQ ID NO: 730344 - DNA, 804 bp, Homo sapiens
  misc_feature (25)..(25): n is a, c, g, or t
  misc_feature (29)..(29): n is a, c, g, or t
  misc_feature (483)..(483): n is a, c, g, or t
  misc_feature (804)..(804): n is a, c, g, or t
agcggggaccagaaggagcttactngggncctgacgtgtcaggaggccctgggggatcctgctgaagctgcgattggcgcagagctgagatgtctgagctctagacacagggacctcagtgtcaaaagatttgggaagatgaattgggtcggggggtcccggagcttggaaggttcttccatttgtttgtgtcctcttttatttcgttgagcagtggtttgtagttctccttgaagaggtccttcacatcccttgtcgacctgctttagttttgtggaaagccaatgtccaggttctgatcaagcaggaaagaagaaagcaaaaggaatattttgaaaaacacaggttaaaatcaaaaatgaaatcactgggagttttatctcctgtcaaaaattctgctgtcagcttagacattcttaacctatatatggtaaatcagatatcttgcaagaagaaaattcctgaaactgtgagaaaaccaanccatgtgaacatgaatagagacataaaaatgcccctaagaaagcataatttagaacttacaatgtcgcctcactgtgtaccttctaaactctgccttgatgatacagaaaccaatgtaaactgtcaaagactaagtagcaaggaagatcttggcccagtccagtcacaaggcatggactcatatagtatgcttcaccctcagtttcagcaaaatagagaactgcagtggcactccatcatctttttcagtggagttacttctaacagacatatttcaaaactaaatttcacatctggaataggcgcttactcctccggaan

SEQ ID NO: 730345 - DNA, 1232 bp, Homo sapiens
cacagggcagccccgacaacagtgcggccagggactcaggcggccagacgtccgccgggtgtccctctggctggctgggcacgagacggcggggcctggtgatggaggccccccagggcagcgaggccacactgcctggccctgcccctggcgagccctgggaagcaggcggcccccacgcggggccacccccggctttcttttcggcatgtccagtctgtggaggactcaaggtaaacccccctccttgagagccgcagatcccgccccgcggctgcaaaggggctgaatttgcccccagatggcagaggaagtggcgccagcctccttgcagactggtgctctgtgttctgtgggagggaccgggggtctcccggagaggggagctggagggcgcgccctgtggctgccaccggaggaaggggctgacttggggaggtgagttctggaaggcaggggctctgggtctggcaggtcggggtcaccagagccccaatgcccagctgcttcactccgtgtcccccacccctgaggatcaggtgagtgctgcacctctgttggctcgtgccttgcactggggtgccaagggctggaggccctgccgctggccttgtcctccttgggcctcacgcccccttcgggggtggccggttctccccatcacctctctggggcagtcacaccacctgttaagcatcaagctaccacagaggctccggcacctgggctccaccagcccagccccccgggctccgtgtgcgctgggcctcatccccatctatgggaggaaactgaagctcaggaggctgtgtggcttgcggggtctctgggttctgggccccactgttccccagtgaagcccttgtgggaaggttccgggagcaggtggtgtcctcagagcagcctcgcctgctgaccccactgggagaggcgccgtgcctcgggcccctggtgggagctccgctggctcctgtctgaacctcctcgcagggccaaaggctggcttggcctgtgtttcccctggcccaggcctcagcccctgcgtcggaggtggggctgtgttgggcccattgtcccccgccctgggtggcttcctcttgcacagcctggagcctgccctgaccacagcccagcagctccctgtgaacacctctttgtcccttcactgtcggctgtttctaaacccagacactgtttgtaatagactggaaataaaatgttcttttcttacc

SEQ ID NO: 730346 - DNA, 486 bp, Homo sapiens
cgtggttgtacttctgactccatccatgacaggcaaactgtcatgtgggagttcagtcagggtggtggggaaaattacagaggagaagttttaagataaagttataggaaatagacacaaaccttcttggaaggctggtacccacaggatccccattccttgtaaaggtcgtgcactgacacgcatcctgagggccagttccacgtccagtgcctctcgcctttacttccacgtcaggctactgtttccctatcgagggccttccttcctattctgtgatcaaatggttcactgcagttctagagatggagaagccaggagagagaagctgagccatttgttccaagttaagctagagccagggttggaatccagaaccctatcatgaaaaatacagcgttagattaacatttttgaactgcttaattgcccatttttgaactgcttaattgccaaataaattttgagatctcgtaaggctgggtc

SEQ ID NO: 730347 - DNA, 487 bp, Homo sapiens; identical to SEQ ID NO: 58243

SEQ ID NO: 730348 - DNA, 1319 bp, Homo sapiens
agctctcacccctccagtgccgacggtagcgaaagactttcctccaggggcttcctcactggggaattgccggaaagagcaaacaaaaaaggcgctggtgtaggctccaaaataaacacatctgaattcatgatggcatcgacagaggctcttattggattaaaagtttcaaaacaaacaataacgctttggaaaaagggttgaatgcaccctcaggcacgaccatggagaaaggtgggaacatacaattggagattcctgacttcagcaactctgtcctgagccatctaaaccagttgcgcatgcagggccgtctctgtgatattgtggtcaatgtgcaaggacaagcttttcgggctcacaaagtggtgctggctgccagctccccctatttccgggatcacatgtccttgaatgagatgagtacagtctccatttcagtcatcaagaaccctactgtttttgaacagctcctttctttctgttacacagggcggatatgcctgcaactggcagatatcatcagctacctaacagctgccagttttctgcaaatgcagcatattatagacaaatgtacacagatcctggagggcattcatttcaaaattaatgtggctgaggttgaagcagaattaagtcaaacaaggacaaagcatcaagagagacctccagagtctcacagggttacaccaaatctcaaccgctcccttagcccacgacataataccccaaagggaaaccggcgaggtcaggttagtgctgtgctggatatcagagagctaagtcctcctgaggagtccaccagccctcagatcattgaaccaagttctgatgtagagagccgggagcccattcttcggatcaaccgagcaggacagtggtatgtggagacaggagtggcggaccgtgggggtcggagtgatgatgaagttagagttcttggagcagtacacatcaaaactgaaaatctggaggagtggcttgggcctgagaatcagccttctggagaagatgggagtagtgcagaggaagtaacagccatggtgattgataccacaggccatggttctgtaggacaggaaaattatactttagggtcttcaggagccaaggtggctcggccaacaagcagtgaagttgacagatttagcccctccggcagtgttgttcccttgacagagagacacagagccagaagtgagtctcctgggagaatggatgagcctaagcaacccagctcccaggtatggagttgtggatttagaactgctttggtggttggaggaattgctactgtgtatgaatagaaaataatg

SEQ ID NO: 730349 - DNA, 2166 bp, Homo sapiens; identical to SEQ ID NO: 215339

SEQ ID NO: 730350 - DNA, 794 bp, Homo sapiens
aaatgtttaaaagttagctatatttatacaaggaaaaccaaaagaaatacttaaatgagacttttaaaattcgaggctctccactgagacttgttccctggcgccacgccgggagttccgcagagcctcgccccctgccagggcgcccgggggcaaggaccgcacgggcatgccgctcctccagcagtccctttccccttcttccccaagatccagcgcgtgctcggttgcccttctccgttccttgcaggcccttgggtcaggacccaccacctgccggaccatcattttccgagtccctccggcctagtcggagtgctcgctcgcgcctcctaaagctctcagccgagcgcgccgagacccctcagggcggccgcaattaatggatgcctcgaagttgacgtacatatatattcagaaatgttttgccacctgagacctatgaggaggttatgtctagagaagatatttccacactggtttcccttttcaagagctttatcgggagctgaagcagtcaatgccttgaggcctttctattttgcagtacatccagatttctttggacagcaccccgtagaaagggaaatcaatgaaaattctcttaaaaggttaagtgtctacctagaaaacctccagaaaccaggcttcaagtctttgaaaccaactcagcttacattttatgtaagagaaacagaccagagttcctccgatggccaggaaccttttagtacttccgtttatctgttgaacatatccaaagcttgaatactaatatgcatacccagcctctc

SEQ ID NO: 730351 - DNA, 1033 bp, Homo sapiens; identical to SEQ ID NO: 216792

SEQ ID NO: 730352 - DNA, 821 bp, Homo sapiens; identical to SEQ ID NO: 286747

SEQ ID NO: 730353 - DNA, 864 bp, Homo sapiens
  misc_feature (679)..(680): n is a, c, g, or t
  misc_feature (690)..(690): n is a, c, g, or t
  misc_feature (722)..(723): n is a, c, g, or t
  misc_feature (746)..(746): n is a, c, g, or t
  misc_feature (763)..(764): n is a, c, g, or t
  misc_feature (771)..(771): n is a, c, g, or t
  misc_feature (858)..(858): n is a, c, g, or t
ggcacgaggccacctgcccaagaaacttgttggttgttgccctcaggtcgctcccgggcgcggacacggaacccggccatggaagatccgtcgggggctcgcgagccccgggcccggccgagagagcgggacccgggacggcgcccccacccagaccaaggccgcacccacgatcgaccgcgggaccgacccggggacccgcgcaggaagcgaagcagcgacgggaaccggcgaagggacggggaccgggacccgaagagagaccaggagagggacgggaaccgcgaccggaaccgggaccgggagagggagagagagagggaaagagacccggaccgaggcccccgccgggacacacacagggacgcgggccctcgcgcaggtgaacacggagtttgggaaaaaccgcgccaaagccggacgcgggacggagcccggggactgacctgggacgcagccgcgcctcctgggcccgcgccctgggaagccccggagccgccgcagccgcagaggaagggagaccccgggcgccgcagacccgaaagtgaacccccttcggagagatatctgccctcgacccccaggcctggacgagaggaggtggaatattaccagtcagaggcggaaggactcctggaatgccacaaatgcaaatacttgtgcactgggagacctgctnncaaatgctgnaggttctcctgaacttgctgatcctggcctgnngctctgtgtcttacagttcacanggggctacacgggcatnncagctgnggggctttactactatcagttccggaggggcttacagtgggtttgatggtgctgacgggggaaaaggccagaagtggatgtcaggtntaccag

SEQ ID NO: 730354 - DNA, 944 bp, Homo sapiens
  misc_feature (759)..(760): n is a, c, g, or t
  misc_feature (770)..(770): n is a, c, g, or t
  misc_feature (802)..(803): n is a, c, g, or t
  misc_feature (826)..(826): n is a, c, g, or t
  misc_feature (843)..(844): n is a, c, g, or t
  misc_feature (851)..(851): n is a, c, g, or t
  misc_feature (938)..(938): n is a, c, g, or t
ctagtagaggcctcgttttaattcggacgaggtgttgccctcatgtgttgctccctgggctgcggacacggaacccggccatggaagagtcgtcgtgtggtgctcgctgatgcccctgtgtgtccctgtgctcgatgatgatgctggtgaccctgggatcgtgcgcctcccacctcatgacctaatgtgcctgctactccactgtattctgacctgctgtgtgacctgatccctggtgtgaccactgactgcagtgtgatatgctgatatgctatgcttgacggtgtgaacgctgtgcgtgaatgtgtgactgtggtgacctggtgactccgatagatgatgaccaggagagggacgggaaccgcgaccggaaccgggaccgggagagggagagagagagggaaagagacccggaccgaggcccccgccgggacacacacagggacgcgggccctcgcgcaggtgaacacggagtttgggaaaaaccgcgccaaagccggacgcgggacggagcccggggactgacctgggacgcagccgcgcctcctgggcccgcgccctgggaagccccggagccgccgcagccgcagaggaagggagaccccgggcgccgcagacccgaaagtgaacccccttcggagagatatctgccctcgacccccaggcctggacgagaggaggtggaatattaccagtcagaggcggaaggactcctggaatgccacaaatgcaaatacttgtgcactgggagacctgctnncaaatgctgnaggttctcctgaacttgctgatcctggcctgnngctctgtgtcttacagttcacanggggctacacgggcatnncagctgnggggctttactactatcagttccggaggggcttacagtgggtttgatggtgctgacgggggaaaaggccagaagtggatgtcaggtntaccag

SEQ ID NO: 730355 - DNA, 2188 bp, Homo sapiens
ccaggcggtgcgcttcggacccagccagggcatgtgctcggaggcccgcctggctcgcaggttgcgggatgcgctgcgggaggaggagccgtgggcagtagaggagctgctgcgctgcggcgcggaccctaatttggtgctagaggacggcgcagcggctgtgcacttggcggccggagcccggcacccgcgcggcctgcgttgcctcggggccctactgcgccaaggcggggaccccaacgctcgatctgtcgaggcactgacgccgctgcatgtggccgccgcgtggggctgccgccgcggcctggagctgctgctgagccaaggagcggacccggcgctgcgcgaccaggacggactccggccgctggacctggccctgcagcagggacacctggagtgcgcgcgagtcctgcaggatctcgacacgcggaccaggacccggacccggatcggggcagagactcaggagcccgagcctgcacctggcaccccaggcctctctggacctaccgatgagacgctggactccatagcactccaaaagcagccatgcagaggtgacaacagggacattggcttggaggctgacccaggaccccccagcctccctgttccccttgaaactgtggacaaacatgggagctcggcgtcccctccagggcactgggattacagctcagacgcctctttcgtcacagcggttgaggtctctggagctgaggacccagcctcggacactcccccctgggctgggtcattgccaccgaccaggcagggacttctgcatgttgtccatgccaaccagagggtacctaggtctcagggcacggaggcagaactgaatgcccgtctgcaggccctgactctgaccccaccaaatgctgctggcttccagtcctccccttcctccatgcctctcctggacaggagtccagctcatagccccccacggacaccaacccctggagcttctgactgccactgcctgtgggagcaccagacatccattgatagtgacatggccacgctctggctgacagaggatgaggcaagctctacaggtggcagggaacctgtcggcccttgccggcacctgccagtctccactgtgtctgacttggagttgctgaagggactccgagcacttggtgagaatcctcaccccatcacacccttcaccaggcagttgtaccaccagcagctggaagaagcccagattgctcctggcccagagttttcagggcacagcctagaactggctgcagccctgcggacgggctgtattccagatgtccaggcagatgaagacgcgctggcccagcagtttgagcagccagatcctgccaggaggtggcgggagggggtcgtgaagtctagcttcacctatctgctgctggaccccagggagactcaggacctgccagcccgagccttctcactgaccccagctgagcgccttcagactttcatccgtgccatcttctacgtgggcaaagggacgagggcccggccatatgtccacctctgggaggcccttggtcaccatgggcggtcaagaaaacaggcctgccccaaggtgcgtcagatcttggacatctgggccagtggttgcggtgttgtgtccctacattgcttccagcacgtggtcgctgtggaggcttatacacgggaggcgtgtattgtggaagccctagggatccagacgctcaccaaccagaagcaagggcactgctatggagtggtggcaggctggccacctgctcgtcgccggcgcttgggggtgcacctgctgcaccgtgccctccttgtcttcctggctgaaggcgagcgacagcttcatccccaggacatccaggcccggggctgagtgctggggagttggccatccagcctggggagaaatgtttgaatgttccagctgccccatgctgacagcagcccccatctctggtttcagaaggggtgtgtgtgtgtgtgtgtgtgtgtgtgtgtgtgtgtgtgtgtgtttgtgtgtgtgtgtgtgtgtgtagggagcacccaggcagatctcccccaggctgagagaggactttgttacagatggtactgctggagaggtagtaagtagtgagctccccatcgtgggaggaggacaagaagggaagcagaaggtgctttggaacagtccggtgcttctgtaagaggc

SEQ ID NO: 730356 - DNA, 1416 bp, Homo sapiens
cagcggctgccacggagctcgcagctgcggcttctgaggagtaagcggcgcggtagcgaaggccgccgaacctgcctggctagccggcgacttgagtgacgaggcagtagaggagctgctgcgctgcggcgcggaccctaatttggtgctagaggacggcgcagcggctgtgcacttggcggccggagcccggcacccgcgcggcctgcgttgcctcggggccctactgcgccaaggcggggaccccaacgctcgatctgtcgaggcactgacgccgctgcatgtggccgccgcgtggggctgccgccgcggcctggagctgctgctgagccaaggagcggacccggcgctgcgcgaccaggacggactccggccgctggacctggccctgcagcagggacacctggagtgcgcgcgagtcctgcaggatctcgacacgcggaccaggacccggacccggatcggggcagagactcaggagcccgagcctgcacctggcaccccaggcctctctggacctaccgatgagacgctggactccatagcactccaaaagcagccatgcagaggtgacaacagggacattggcttggaggctgacccaggaccccccagcctccctgttccccttgaaactgtggacaaacatgggagctcggcgtcccctccagggcactgggattacagctcagacgcctctttcgtcacagcggttgaggtctctggagctgaggacccagcctcggacactcccccctgggctgggtcattgccaccgaccaggcagggacttctgcatgttgtccatgccaaccagagggtacctaggtctcagggcacggaggcagaactgaatgcccgtctgcaggccctgactctgaccccaccaaatgctgctggcttccagtcctccccttcctccatgcctctcctggacaggagtccagctcatagccccccacggacaccaacccctggagcttctgactgccactgcctgtgggagcaccagacatccattgatagtgacatggccacgctctggctgacagaggatgaggcaagctctacaggtggcagggaacctgtcggcccttgccggcacctgccagtctccactgtgtctgacttggagttgctgaagggactccgagcacttggtgagaatcctcaccccatcacacccttcaccaggcagttgtaccaccagcagctggaagaagcccagattgctcctggcccagagttttcagggcacagcctagaactggctgcagccctgcggacgggctgtattccagatgtccaggcagatgaagacgcgctggcccagcagtttgagcagccagatcctgccaggaggtggcgggagggggtcgtgaagtctagcttcacctatctgctgctggaccccag

SEQ ID NO: 730357 - DNA, 882 bp, Homo sapiens
aaaaagagacgggccttgaccagaggacccagtgtcagcactgatgtaccaggtgagcttagggcaagacccagcgacatcactggatgacagtggattctgactatgtggctgttgtgatcactacttggaaataaacacaagacagtgaagcaggcctcaatcccacatagttttgaaggttccttgtcattttctgggagcccctgatgtgtcctattcctcagagagcttactcttccccactcttctctgccctaccaggccaaagggtctttctcttcctttatccctccaccccatttccttccaccaccacttcagtcaaggagtttttgtatcagaaagttatcacaggccagttatggtggtgcacgcctgtaatcccagcactttgggaggccaagctgggtggatcacttgagctcaggagtttgagaccagcctgagcaatatggtgaagcctggtctctacagaaaacacaaaaagcagccagacgtggtggtgcttgcctggagtctcagctccttgggaggttgaagtgggaggattgcttgagtcctggaggtcaaggctacagggagatgagatggcatcactgtaccctgacctgggggacagagcgagacccttttcatgccccgggacatttgctggtgctgtttcttctggttggcataccctttctgaggactggccaacttgtgctctgagccaagggtagaaggagatgtggccttatccattcctccagcttttcccctaccctcagagctcttaggcagtgggtatggcaccttggaagctgcagcagggtcagggcacattgagtgactaagcatagcaagtacaggtggacggggcagaaatgccagaggtgg

SEQ ID NO: 730358 - DNA, 875 bp, Homo sapiens
ggccagccgcgggcaggctcccaccttctccagggccaggaagctcttctgcaggaagccgtcacagcttggcctccctcttcaggaagcgcaggctcacctcttcgccgagcttggtcacctgggcctggggcggaggcacattgtcccgtgtgcagcctctgctggacacgcagccggtccccctcctgcccatggtctccatcagagttggagtcccctgctgtccccaagccctgagcccggctgagctgggcctgccacaccctcagccggaagaaagccacggcgggcaggaccactctgtacccagacgaccaaccaggcatgggtttgtgaagcatgagaaggccacgctcaggtggggtccagacacacttggcacccaccaccgaggctgcccagggaaggccccccagccgccaccaggcccggcagggaagcaggagtgtcgtgcaggtgtccccatgcacggggagccaggtgggctgggcagagccttggggccttgtctccacaccaacagctgctttcctgccgccctgaaggggaggggaggggggaggcgcagccggccccatccctgcatctcatacacgcaaagggtaggcaggcggcacaggcccttcatcagccacggagaggcgcctcccgggaaacttcccctccacccaagcccctgctggcctcctgccccccaggaggtcaccttagagtagatatttttctgtaaaaagccagatggtacatgttcccacctcatgggatctctgttgtaaccctctcagcatggcggttacagcccccacagtagacattgacaacatgtaaaaaatgttcctgtgtgccaataaaactttatttacaaaaacaaa

SEQ ID NO: 730359 - DNA, 417 bp, Homo sapiens
cagaaataattgatttttgttatctgaatgcatttcccttgagaaaggctgtaggaggtattcagatacctgttgaataagtgaatacaggaatgaatgagtgagagaccttgtctattgtacttatgctgactcatctaagttttatgacttttagcaagttactttacatactgacggctctatttccttgtctgtaaggtggagtttataatacctattgcatatttagtaaacttttgttgaatatttcacataagcactagatcaaactcagatctactgagtcgttttttggggtgtgggttatagatctttgttctcttaatagatctttgtcctcttaataggatctactcaaggttctcatgcacccaaagtttgaaaattactcatttaaactctactatttattgg

SEQ ID NO: 730360 - DNA, 616 bp, Homo sapiens
aatcgaccgcccactcttcaaggatttctggcagcaattccttgacagtttaaaagccttggcagtcaagcaacaacgaactgtctacagactgacgctcgtgaaagcatggaacgtggacgagctccaggcctacgcgcagctcgtgtccctggggaatcctgacttcatcgaagtgaagggcgttacctactgcagagaaagttcagcaagcagtcttaccatggcccatgtgccctggcatgaggaagtggtacagtttgtccgcgagctggtggatctgatccccgaatatgaaattgcatgtgaacacgaacactctaattgcctcctgatagcacacagaaagtttaaaattggtggtgaatggtggacatggatcgattataaccgcttccaggagctcatccaggaatatgaagatagtggtggatcaaaaacgttcagcgcaaaggattatatggccagaactcctcactgggcattatttggtgccaatgaaagaagctttgatcccaaggacacaagacatcagagaaagaacaaatcaaaggctatttctggatgttgagattatctgatttcaaggtactgaaggacaaaaacttggatggcc

SEQ ID NO: 730361 - DNA, 647 bp, Homo sapiens
ggaagtatggctgtagtaggaaaaggagaatgccacaatatcccctgtgaaaaaggagataagcttcgactcttctgctttcgactgagaaagagggaaaatatgtcaaaactgatgtcagaaatgcatagtttcatccagatacagaaaaatcaaaccagagaagccatgactccaggagcatggcactaccccaggaacagagtcagcatccaaaaccttcagaggccagcacaaccctacctgaaagccatctcaagactcctcagatgccaccaacaaccccatccagcagttccttcaccaaggtcaccaaggacaaggatatcaaataactactgttcaatctttactcaagtgtggaaattttgcctgaagtcctccacctaaaaacctgatgccattggtaatgatgtttatgaagataagatcaaagcacagaaaataatatatgtatatatatgtatatatatctggttgaaatactatatatatatatatatataccagctattaattctaggaaatggagtattaagggtgcattttatttcattagttttacttttatgcattttcttcatatcatattttgcattcagaattttcataatttgaaaaaaaataaactttttttttcttaaaga

SEQ ID NO: 730362 - DNA, 631 bp, Homo sapiens
atacagaaaaatcaaaccagagaagccatgactccaggagcatggcactaccccaggaacagagtcagcatccaaaaccttcagaggccagcacaaccctacctgaaagccatctcaagactcctcagatgccaccaacaaccccatccagcagttccttcaccaagaaggatgaaacccacccaggagcacagtcatcgcctgcaaactttagaatcacctcaccaactgtggcccctcctctttcttctgacacttccaccaaccgccatccagcagttccttaaataaggtcaccaaggacaaggatatcaaataactactgttcaatctttactcaagtgtggaaattttgcctgaagtcctccacctaaaaacctgatgccattggtaatgatgtttatgaagataagatcaaagcacagaaaataatatatgtatatatatgtatatatatctggttgaaatactatatatatatatatatataccagctattaattctaggaaatggagtattaagggtgcattttatttcattagttttacttttatgcattttcttcatatcatattttgcattcagaattttcataatttgaaaaaaaataaactttttttttcttaaaga

SEQ ID NO: 730363 - DNA, 576 bp, Homo sapiens
ttgagagttaattatttactgttttctaattcttgccagtatttatgaacagctgtagcttgatatttacctactgaattttaggagaactaatggtcacagtttgggttcttttatgtgtatgtttttaaaacagctattttgtgaatctaggtggttggtttttagaagatttcaggagatgcagtccagcacaattagagctggaacattgttacagcaggctttttgttgctcatgggcagatagagggaaagaatcagttgttagccccaaatttccacatttcagtgttgtaaactctgaatgtgataggtagatgtgggctaagaataatttcctccagtgaagacacgggagaagagcttctattatgaggttatagataaggccttagttatatcatggaaatggactccatgtagttctagaactgcatttcccaaagtatatcctgtgagatgctccacagaaaaaatgattgcatggactaagtttgaaaaatgttgcatgctactcttcccctcgaagatgacagtggatgtcagcattaaagactttgacaggtctttctgt

SEQ ID NO: 730364 - DNA, 518 bp, Homo sapiens
gctatacaactcgagctcggtaccggcatgtgctgtaggccagcggatcacctgaggtcgggagttcgagaccagcctgaccaacatggaaaaaccccgtctctactaaaaatacaaaattagtcaggcatggtagcgcatgtgggaggtaatatatccattactctgacctgtcttttaaaaacagagtggtagaccaggtatccttacgttagtgattctgggtcatgacaccccaagatcattggtgagagtacaatgaacatgcaaggatgcatacaaggttgcttttgtgtttgttttttagaaaatgaggtttgcagaccttttgtccttttttactcgatttaaaaaattttcaacaggtatttatctgaagtactgggtacaggccagtttttttgttttttgttgttgttgttttttgaactaccaccacagtcatgcaaatgaatatgagctgttgaattaattaccctatcttctacatctcttctacttcccatcacgctggccta

SEQ ID NO: 730365 - DNA, 517 bp, Homo sapiens
ctgtaggccagcggatcacctgaggtcgggagttcgagaccagcctgaccaacatggaaaaaccccgtctctactaaaaatacaaaattagtcaggcatggtagcgcatgtgggaggtaatatatccattactctgacctgtcttttaaaaacagagtggtagaccaggtatccttacgttagtgattctgggtcatgacaccccaagatcattggtgagagtacaatgaacatgcaaggatgcatacaaggttgcttttgtgtttgttttttagaaaatgaggtttgcagaccttttgtccttttttactcgatttaaaaaattttcaacaggtatttatctgaagtactgggtacaggccagtttttttgttttttgttgttgttgttttttgaactaccaccacagtcatgcaaatgaatatgagctgttgaattaattaccctatcttctacatctcttctacttcccatcacgctggcctacagcacatgccggtaccgagctgattgtatt

SEQ ID NO: 730366 - DNA, 542 bp, Homo sapiens
  misc_feature (415)..(415): n is a, c, g, or t
  misc_feature (431)..(431): n is a, c, g, or t
  misc_feature (446)..(447): n is a, c, g, or t
ctgtaggccagcggatcacctgaggtcgggagttcgagaccagcctgaccaacatggaaaaaccccgtctctactaaaaatacaaaattagtcaggcatggtagcgcatgtgggaggtaatatatccattactctgacctgtcttttaaaaacagagtggtagaccaggtatccttacgttagtgattctgggtcatgacaccccaagatcattggtgagagtacaatgaacatgcaaggatgcatacaaggttgcttttgtgtttgttttttagaaaatgaggtttgcagaccttttgtccttttttagtggaggacaatatattataacaggagatagtcaatgtacacatgactggggaacttggccgctcggtacccggcatgtgctttttgtcttgctgtaatagcacgnacagtgaagcataagngaatatggtctgttnntttaactgctcaattttatacatcatgatctgatcggtcgcttcatcgctggcctacaacacctgccggcaccggctcggcttgtactatgtctg

SEQ ID NO: 730367 - DNA, 726 bp, Homo sapiens
ctgtaggccagcggatcacctgaggtcgggagttcgagaccagcctgaccaacatggaaaaaccccgtctctactaaaaatacaaaattagtcaggcatggtagcgcatgtgggaggtaatatatccattactctgacctgtcttttaaaaacagagtggtagaccaggtatccttacgttagtgattctgggtcatgacaccccaagatcattggtgagagtacaatgaacatgcaaggatgcatacaaggttgcttttgtgtttgttttttagaaaatgaggtttgcagaccttttgtccttttttactcgatttaaaaaattttcaacaggtatttatccgaagtgctgggattacaggcgtgagccagctcacccggccttaggttggggcttttaaatgacccttcaggtgtgtgtctgtgatgacttgaggcttttttttttactgtcttccagtgaaattaccagatgaatatcagtggtgagaaatttgattccttgaaatgtaaggaatttcattcttgaattgtgtgacaaaaccagggagcatgattttgggtccattcaggatctatccagtcaacactgagtatatagttgttgatggagactatgataggttctgaggatggatctgttatattctccataaatctgtatgtgagtcatgcctttgtttgcttcctacttgttctgtttactgggttttttttttctttgag

SEQ ID NO: 730368 - DNA, 414 bp, Homo sapiens; identical to SEQ ID NO: 346066

SEQ ID NO: 730369 - DNA, 488 bp, Homo sapiens
  misc_feature (52)..(52): n is a, c, g, or t
  misc_feature (59)..(60): n is a, c, g, or t
  misc_feature (134)..(134): n is a, c, g, or t
  misc_feature (485)..(485): n is a, c, g, or t
tgcatgatagggaactagcgaatgtggctggatagacttggagatatgagtngtagatnncatgtagtcgaagtaatcttattcctttatggattccaagttgttaaatggttcatattctttagctaaatttncaggagtgaaaagaaaaagaggaaggaagaaacccctctcaggcaatcatgtacagccacccgaaacaatgaaatgtaatacattcataagacaagtgaaagaagagcatggcagacacacagatgcaactgtgaaagttccttttcttaagaaatgcaaggaagcaggacttcttaattacttacttgaagaaatattagacaaagttcattcaattccagaaaaactcatggatgagactacttcagaatcagactatgaagaaatcgggagtgcactttttgactgtagattgttcgaagacacatttgtaatattttcaagcagcaatagagaaaaaaattcatgcntct

SEQ ID NO: 730370 - DNA, 502 bp, Homo sapiens
  misc_feature (148)..(148): n is a, c, g, or t
  misc_feature (499)..(499): n is a, c, g, or t
ctgctgacttatttgtagaagttgcatatctttagatttattgtaaaaactattggcatatgattcgtctttttcatgtagccccagggtattctttccttaatgaatccaattttcataaatggttcatattctttagctaaatttncaggagtgaaaagaaaaagaggaaggaagaaacccctctcaggcaatcatgtacagccacccgaaacaatgaaatgtaatacattcataagacaagtgaaagaagagcatggcagacacacagatgcaactgtgaaagttccttttcttaagaaatgcaaggaagcaggacttcttaattacttacttgaagaaatattagacaaagttcattcaattccagaaaaactcatggatgagactacttcagaatcagactatgaagaaatcgggagtgcactttttgactgtagattgttcgaagacacatttgtaatattttcaagcagcaatagagaaaaaaattcatgcntct

SEQ ID NO: 730371 - DNA, 235 bp, Homo sapiens
tgactctaaggatctagacagcggaccccatggttaagtttgagatccctacttcaccgtctctgggatcaggtccgatacatgaagatcattgagaaaagtggttaccaggccctgccttgggttcgctacatcacccagagtggcgattaccaacttcgtaccagctagaagggagaagagatgggggtttgaactgtgtgactaccttatagacccggttgcagattttgcg

SEQ ID NO: 730372 - DNA, 721 bp, Homo sapiens
  misc_feature (655)..(655): n is a, c, g, or t
  misc_feature (675)..(675): n is a, c, g, or t
  misc_feature (679)..(679): n is a, c, g, or t
tgaggccaacgaggcaaaagtttcaaaggttgtcctgtatggggtgttttgtgcgtcttgttaaaataatgaagtgctttatttcattatttgtggggcatcaagtctgcaacttattctttcataaaactgttagtgttctttggttatgcaacttattcttaattggttcagaaatgttaataattagggaatctgggtgataagtgtgtgagaacgccgtaatatatgtattttgtaacttacaaataaatgtgagattatttcagaatttaaaaatatttttaaaaagaacattaacatttacttcaagaaactttctgccattgtcaaatcctaattcctcttactgattacagatcaaataacaaaacgaagcatattgaagaagagaacttgattgacgaagactttcaaaatctaaaactgcggtcgacaggcttcaccaatcttggagcagaagggagcgtctttcctaaggtcaggataacggcctccagagacagccagatgcaaaatccctattcaagacacagcagcatgccccgccctgactattaggtgagtcagtgggctttttctcctgcttttgggagtgaatgcaccagggcagagcagagacctggttgctgaatcttcaatccttggctgcccngcaggctttctttttctttntaanttttattatgttatatgatattttaataattaaaattatata

SEQ ID NO: 730373 - DNA, 532 bp, Homo sapiens
  misc_feature (466)..(466): n is a, c, g, or t
  misc_feature (486)..(486): n is a, c, g, or t
  misc_feature (490)..(490): n is a, c, g, or t
tcgtacattaaaccctccgtgaagggaaacgggccagaagggcttccaccgctgaggggcagagagcccgtttctttttttttttaaaaatatttttaaaaagaacattaacatttacttcaagaaactttctgccattgtcaaatcctaattcctcttactgattacagatcaaataacaaaacgaagcatattgaagaagagaacttgattgacgaagactttcaaaatctaaaactgcggtcgacaggcttcaccaatcttggagcagaagggagcgtctttcctaaggtcaggataacggcctccagagacagccagatgcaaaatccctattcaagacacagcagcatgccccgccctgactattaggtgagtcagtgggctttttctcctgcttttgggagtgaatgcaccagggcagagcagagacctggttgctgaatcttcaatccttggctgcccngcaggctttctttttctttntaanttttattatgttatatgatattttaataattaaaattatata

SEQ ID NO: 730374 - DNA, 903 bp, Homo sapiens
  misc_feature (579)..(579): n is a, c, g, or t
tgaggccaacgaggcaaaagtttcaaaggttgtcctgtatggggtgttttgtgcgtcttgttaaaataatgaagtgctttatttcattatttgtggggcatcaagtctgcaacttattctttcataaaactgttagtgttctttggttatgcaacttattcttaattggttcagaaatgttaataattagggaatctgggtgataagtgtgtgagaacgccgtaatatatgtattttgtaacttacaaataaatgtgagattatttcagaatttaaaaatatttttaaaaagaacattaacatttacttcaagaaactttctgccattgtcaaatcctaattcctcttactgattacagatcaaataacaaaacgaagcatattgaagaagagaacttgattgacgaagactttcaaaatctaaaactgcggtcgacaggcttcaccaatcttggagcagaagggagcgtctttcctaaggtcaggataacggcctccagagacagccagatgcaaaatccctattcaagacacagcagcatgccccgccctgactattagaatcataagaatgtggancctcgccatggcccccaaccatatgtacatatctattattctagcagtgtttagacaagactgcatggagaagtgagcaccacgtaaagactctggcctccgggagtttcttcttccatctagacatactgccagtcctcatctgcaatggcaacgttgtgcaatgtcttgcaaacgacatccacgctcacttgctaaataagaatctatgacattaacatgtagctcgatgctattagcgcttgtcagagcagcgtgcgttccctctcaactcaagctacaaacagtacctgcagacaactcggcttcaccggctacgccaca

SEQ ID NO: 730375 - DNA, 662 bp, Homo sapiens
  misc_feature (79)..(79): n is a, c, g, or t
  misc_feature (338)..(338): n is a, c, g, or t
tgccgtgtgactgtgtactcaactgataggacaaatttcagctgatcctcactattgtgggcaccatcgctggcgttgncattctcagcatgataattgcattgattgtcacagcaagatcaaataacaaaacgaagcatattgaagaagagaacttgattgacgaagactttcaaaatctaaaactgcggtcgacaggcttcaccaatcttggagcagaagggagcgtctttcctaaggtcaggataacggcctccagagacagccagatgcaaaatccctattcaagacacagcagcatgccccgccctgactattagaatcataagaatgtggancctcgccatggcccccaaccatatgtacatatctattattctagcagtgtttagacaagactgcatggagaagtgagcaccacgtaaagactctggcctccgggagtttcttcttccatctagacatactgccagtcctcatctgcaatggcaacgttgtgcaatgtcttgcaaacgacatccacgctcacttgctaaataagaatctatgacattaacatgtagctcgatgctattagcgcttgtcagagcagcgtgcgttccctctcaactcaagctacaaacagtacctgcagacaactcggcttcaccggctacgccaca

SEQ ID NO: 730376 - DNA, 209 bp, Homo sapiens
  misc_feature (182)..(182): n is a, c, g, or t
cgacggaaggtagctgtactgtatggtgaaggataaaatccgttctgtatagcagctgtagttgggtcgtaagtaagtgtcattccagcaagtctcacctctccttctctatgccatggtcttccattagggatgtatttgtttgggttctgtctctttttctgtcctccatcagcaaactnacagataaaggttctgtgggggcagta

SEQ ID NO: 730377 - DNA, 183 bp, Homo sapiens
  misc_feature (17)..(17): n is a, c, g, or t
gcggcccggaaggtagntgtactgagagcacatccgccgcacaagtgaacctcatgggaatggggtttggagcagccctgcccctcgctgtgaacttcctgttggtgctggttcacatgatgctcttatagttggtaagttttatgaagtgtttgctgaggaattctgtcatcttaacccaac

SEQ ID NO: 730378 - DNA, 219 bp, Homo sapiens
ctagaggagtccccgcgaaaggtgaagcgtgttactgagagcaccatccgccgcacaagtgaacctcatgggaatggggtttggagcagccctgcccctcgctgtgaacttcctgttggtgctggttcacatgatgctcttatagttggtaagttttatgaagtgtttgctgaggaattctgtcatctttaacagtaacagctaccttccggataatga

SEQ ID NO: 730379 - DNA, 703 bp, Homo sapiens; identical to SEQ ID NO: 440813

SEQ ID NO: 730380 - DNA, 539 bp, Homo sapiens
gttagctgttactgtggtacaacattacttaaaggaagttggaagagttaactccgcagatctggggaccctaagaggctgtgtgatgcctcagcacttgagcccacgtggaaaggctgtggccagggccctgacctgctgtgtctgcagtggggttgtcccagccctcatgggcagctgaccttgagttctggccttattttcccccctctcagggcttggagaagatctctgcctacatgaagtccagccgcttcctcccaaaacctctgtacacaagggtggctgtctggggcaacaagtaatgccttgaaggccaggaggtgggagtgaggagcccatactcagcctgctgcccaggctgtgcagcgcagctggactctgcatcccagcacctgcctcctcgttcctttctcctgtttattcccatctttacccccaagactttattgggcctcttcacttcccctaaacccctgtcccatgcaggccctttgaagcctcagctacccactttccttcatgaacatccccctccc

SEQ ID NO: 730381 - DNA, 1811 bp, Homo sapiens
gactgcagctgatggaagatgagccccaacttctaaaaatgtatcactaccgggattgagatacaaacagcatttaggaaggtctcatctgagtagcagcttcctgccctccttcttggagataagtcgggcttttggtgagacagactttcccaaccctctgccccgccggtgcccatgcttctgtggctgctgctgctgatcctgactcctggaagagaacaatcaggggtggccccaaaagctgtacttctcctcaatcctccatggtccacagccttcaaaggagaaaaagtggctctcatatgcagcagcatatcacattccctagcccagggagacacatattggtatcacgatgagaagttgttgaaaataaaacatgacaagatccaaattacagagcctggaaattaccaatgtaagacccgaggatcctccctcagtgatgccgtgcatgtggaattttcacctgactggctgatcctgcaggctttacatcctgtctttgaaggagacaatgtcattctgagatgtcaggggaaagacaacaaaaacactcatcaaaaggtttactacaaggatggaaaacagcttcctaatagttataatttagagaagatcacagtgaattcagtctccagggataatagcaaatatcattgtactgcttataggaagttttacatacttgacattgaagtaacttcaaaacccctaaatatccaagttcaagagctgtttctacatcctgtgctgagagccagctcttccacgcccatagaggggagtcccatgaccctgacctgtgagacccagctctctccacagaggccagatgtccagctgcaattctccctcttcagagatagccagaccctcggattgggctggagcaggtcccccagactccagatccctgccatgtggactgaagactcagggtcttactggtgtgaggtggagacagtgactcacagcatcaaaaaaaggagcctgagatctcagatacgtgtacagagagtccctgtgtctaatgtgaatctagagatccggcccaccggagggcagctgattgaaggagaaaatatggtccttatttgctcagtagcccagggttcagggactgtcacattctcctggcacaaagaaggaagagtaagaagcctgggtagaaagacccagcgttccctgttggcagagctgcatgttctcaccgtgaaggagagtgatgcagggagatactactgtgcagctgataacgttcacagccccatcctcagcacgtggattcgagtcaccgtgagaattccggtatctcaccctgtcctcaccttcagggctcccagggcccacactgtggtgggggacctgctggagcttcactgtgagtccctgagaggctctcccccgatcctgtaccgattttatcatgaggatgtcaccctggggaacagctcagccccctctggaggaggagcctccttcaacctctctctgactgcagaacattctggaaactactcctgtgatgcagacaatggcctgggggcccagcacagtcatggagtgagtctcagggtcacagttccggtgtctcgccccgtcctcaccctcagggctcccggggcccaggctgtggtgggggacctgctggagcttcactgtgagtccctgagaggctccttcccgatcctgtactggttttatcacgaggatgacaccttggggaacatctcggcccactctggaggaggggcatccttcaacctctctctgactacagaacattctggaaactactcatgtga

SEQ ID NO: 730382 - DNA, 891 bp, Homo sapiens
gactgcagctgatggaagatgagccccaacttctaaaaatgtatcactaccgggattgagatacaaacagcatttaggaaggtctcatctgagtagcagcttcctgccctccttcttggagataagtcgggcttttggtgagacagactttcccaaccctctgccccgccggtgcccatgcttctgtggctgctgctgctgatcctgactcctggaagagaacaatcaggggtggccccaaaagctgtacttctcctcaatcctccatggtccacagccttcaaaggagaaaaagtggctctcatatgcagcagcatatcacattccctagcccagggagacacatattggtatcacgatgagaagttgttgaaaataaaacatgacaagatccaaattacagagcctggaaattaccaatgtaagacccgaggatcctccctcagtgatgccgtgcatgtggaattttcacctgactggctgatcctgcaggctttacatcctgtctttgaaggagacaatgtcattctgagatgtcaggggaaagacaacaaaaacactcatcaaaaggtttactacaaggatggaaaacagcttcctaatagttataatttagagaagatcacagtgaattcagtctccagggataatagcaaatatcattgtactgcttataggaagttttacatacttgacattgaagtaacttcaaaacccctaaatatccaagttcaagagatagccagaccctcggattgggctggagcaggtcccccagactccagatccctgccatgtggactgaagactcagggtcttactggtgtgaggtggagacagtgactcacagcatcaaaaaaaggagcctgagatctcagatacgtgtacaga

SEQ ID NO: 730383 - DNA, 492 bp, Homo sapiens
gacttggtgcccacatttctcaaggatgggaatgttgtgggagtgagagggatgttgcttcctttataatcgtatacacaattaatttcttatttcctactttgggcttctgcctgctgcacctgctgctattggcctattcatggtagctccagccttccccttgaccttgatgtccctgccatcaggaccttcacatgccatcttgtgttcccccaggagtccctgtgtctaatgtgaatctagagatccggcccaccggagggcagctgattgaaggagaaaatatggtccttatttgctcagtagcccagggttcagggactgtcacattctcctggcacaaagaaggaagagtaagaagcctgggtagaaagacccagcgttccctgttggcagagctgcatgttctcaccgtgaaggagagtgatgcagggagatactactgtgcagctgataacgttcacagccccatcctcagcacgtggattc

SEQ ID NO: 730384 - DNA, 1032 bp, Homo sapiens
agccacgccactccctcctgagagcccaccgcgccacagcttggaggaagagcctgcggggaactggctgcaggacgctctcttcttgagtgcaggtgctggctctgctgtgaccatgcccgtgacctttgccctcctgctcctcctgggccaggccactgcggacccatgctacgatccacagggccgcccccaattctgcctcccgccagtgacacagctggctgccgtggcggcctcctgccctcaggcctgtgccctgtccccaggaaaccaccttggcgccagggaaacctgcaatggcagcctgactttggccctgggtggccccttcctcctgacatctgtcagcttgcgcttctgtaccccaggacccccagccctcatcctgtctgctgcctgggcctcagggggtccctggaggctgctgtggcacaggcccgcctggcctggggccttagggggccctgaaagggtgaccttccactccacaccaggtcctaaggccactgtggcggccagccacctccgtgtggagtttgggggccaggccgggctagcggcagctgggctgagaggccgctgccagtgtcatggccacgctgcccgctgtgccgcccgtgcccggcccccccgctgcactgccgccacataccactggcccggggtgcgagagctgccgccgtcccatcgagactggccctggcggctgcacgccccgagaccccaaccttgactaacctggtcctgcaaacagacgcccgagctgccggttcaactctgagctgttcagactgtcgggcggcggagtgggggtctgtaaccggcggccaccaccacaatgggggggtggccaggccacgggacggggggaccaaacggcattacgaggagcggagacgcgcggagcactggggagggacacgaccaacgggaggaccgacagggagagccacgagggcgcaagacccggagagggccgagcgcgcgggttctcgcgcagagaaaaaaccacgagggggtcggagggcc

SEQ ID NO: 730385 - DNA, 1249 bp, Homo sapiens
gtcccatacagggggagctcaggcagggtcagcggagggacctgcgcctgaatcccgaagttccactctgactcacacagcctgggcccccagctctgacatgccccctctgatggggggcgtctcagccccattccatcctcctgcagctgatgcacctcccagctttcggagtgactcccttctttcaaatccgatgtccctgtcctgctcctgccaaatctggccccctccaacgtggtacctaagggtccagagtcgagggtcgcctttgctgtgccctcgcaccccctgggggcgggcctggggcagtgggtcccaagcctgtcaggattgggcccacgctacaccacgataaacgctggggccaggccactgcggacccatgctacgatccacagggccgcccccaattctgcctcccgccagtgacacagctggctgccgtggcggcctcctgccctcaggcctgtgccctgtccccaggaaaccaccttggcgccagggaaacctgcaatggcagcctgactttggccctgggtggccccttcctcctgacatctgtcagcttgcgcttctgtaccccaggacccccagccctcatcctgtctgctgcctgggcctcagggggtccctggaggctgctgtggcacaggcccgcctggcctggggccttagggggccctgaaagggtgaccttccactccacaccaggtcctaaggccactgtggcggccagccacctccgtgtggagtttgggggccaggccgggctagcggcagctgggctgagaggccgctgccagtgtcatggccacgctgcccgctgtgccgcccgtgcccggcccccccgctgcactgccgccacataccactggcccggggtgcgagagctgccgccgtcccatcgagactggccctggcggctgcacgccccgagaccccaaccttgactaacctggtcctgcaaacagacgcccgagctgccggttcaactctgagctgttcagactgtcgggcggcggagtgggggtctgtaaccggcggccaccaccacaatgggggggtggccaggccacgggacggggggaccaaacggcattacgaggagcggagacgcgcggagcactggggagggacacgaccaacgggaggaccgacagggagagccacgagggcgcaagacccggagagggccgagcgcgcgggttctcgcgcagagaaaaaaccacgagggggtcggagggcc

SEQ ID NO: 730386 - DNA, 1496 bp, Homo sapiens
ttaggctaggtacgaggctgggtttgaatcggcacgagggggccctgcggtgtgactcgcgggctcagctggtccggccgtagcacctccgcgccgtcgccatgtcgcggtttttcaccaccggttcggacagcgagtccgagtcgtccttgtccggggaggagctcgtcaccaaacctgtcggaggcaactatggcaaacagccattgttgctgagcgaggatgaagaagataccaagagagttgtccgcagtgccaaggacaagaggtttgaggagctgaccaaccttatccggaccatccgtaatgccatgaagattcgtgatgtcaccaagtgcctggaagagtttgagctcctgggaaaagcacatgtgccatcctctgccacatctaccaccatgctctgcactcgcgctggtaccaggcccgcgacctcatgctcatgagccacttgcaggacaacattcagcatgcagacccgccagtgcagatcctttacaaccgcaccatggtgcagctgggcatctgtgccttccgccaaggcctgaccaaggacgcacacaacgccctgctggacatccagtcgagtggccgagccaaggagcttctgggccagggcctgctgctgcgcagcctgcaggagcgcaaccaggagcaggagaaggtggagcggcgccgtcaggtccccttccacctgcacatcaacctggagctgctggagtgtgtctacctggtgtctgcatgctcctggagatcccctacatggccgcccatgagagcgatgcccgccgacgcatgatcagcaagcagttccaccaccagctgcgcgtgggcgagcgacagcccctgctgggtccccctgagtccatgcgggaacatgtggtcgctgcctccaaggccatgaagatgggtgactggaagacctgtcacagttttatcatcaatgagaagatgaatgggaaagtgtgggaccttttccccgaggctgacaaagtccgcaccatgctggttaggaagatccaggaagagtcactgaggacctacctcttcacctacagcagtgtctatgactccatcagcatggagacgctgtcagacatgtttgagctggatctgcccactgtgcactccatcatcagcaaaatgatcattaatgaggagctgatggcctccctggaccagccaacacagacagtggtgatgcaccgcactgagcccactgcccagcagaacctggctctgcagctggccgagaagctgggcagcctggtggagaacaacgaacgggtgtttgaccacaagcagggcacctacgggggctacttccgagaccagaaggacggctaccgcaaaaacgagggctacatgcgccgcggtggctaccgccagcagcagtctcagacggcctactgagctctccactctgtttcccgcctgggccatccaaccttgaagtcctaaaccacacctcagtcactaaaggtctgtttaaagtt

SEQ ID NO: 730387 - DNA, 974 bp, Homo sapiens
gcctggtggcgaattcggcacgagggaagtctgcttgaaaggaggtagtagtccagaaaaagattttgttttgctttatgaaaaggaagcaggaggagaaagtattattttttgtctttagatttaccatgagcatgtgatgcttaggctacggcagccatcttggtaccctgagaagagtcaccctaagagaagatgccagcattctaggaaaagcagggcggggatggagaaaaaatccagggcctggatgacattgctgagctgctgagttaacctagaactatcctaactcaagatttctctttataagaatctctcttgcaggagtaacacaggcatgtggagaatttctcagagtatttccgcagcaaccaactggcatgaagaatactttgctgaaacatggggttcaaaagcagcccacagctctctttcggacctctgaagtcacacccagtggtctagtcaacatttcctcttgcagagattgtaaaggtttcaatcttaacaccatgtgactaattcggtctctatgatcaaagccttataagaaagaatgactggttgacccgacatggaccaagtgaccgttcttgttcccagtgtgttgtgggctaagaagagatgggcacagaatgatgggaacgcagagcgaaagggcccaactctaccaggaggggaagataaaaactcctgaagaaattatacaaaaatagaatacttacaacagaattctcaacatcatttttccctgtttgaatccagcaagtcagccattggtcacttaagagcactaacccctccctggtttgaagatgttcttgactttaaatacaaacatctgatattccagcttagactcctccacaagaactagagtgtcatcctattttggcttccagctcagtccctctgctacaagtcttgactccagaactctgtgggataataaaatacaagatcatagcttg

SEQ ID NO: 730388 - DNA, 915 bp, Homo sapiens
agagggacgccccctcctcctccccgcctcttgtgaggcgcgcggagccgcctcccctgggtcaggtctgatgggccggtgggcgcgctagtggtggccgccaccgccgaaaccgtcgacctcctgggccccagttccgcgtccagccccgcggcagcatggactacctgacgacgttcaccgagaagagtgggcgccttctgcggggcacggccaaccgcctgttggggttcgggggcggcggcgaagcccggcagacactggccaaaagaagaccctagacaagaaagatggaagacgaatgtcttttcagaaacctaaagggactattgagtatactgttgaatcaagggattctttgaatagcatagccctgaagtttgatacaacacctaacgaacttgttcaattaaataagttattctcccgagcagttgttactggacaggttctgtatgttcctgatcctgaatatgtctccagtgttgagagctctccatctctaagccccgtaagtcctctgtcaccaacatcatctgaggctgaatttgataagaccactaatcctgatgtccatccaacagaagcaactccctcatctactttcactggtattcgacctgcacgagttgtatcttcaacttctgaggaggaggaagcatttactgagaaatttcttaaaattaattgcaaatatattaccagtggcaagggcacagtcagtggtgtgctgctagttacaccaaataatataatgtttgatccacataaaaatgaccctttggttcaagagaatggctgtgaggaatatggcatcatgtgtccaatggaagaggtgatgtcagctgcaatgtacaaagaaattttggatagcaaaataaaggaatctttacccatgtaagagtgatatttata

SEQ ID NO: 730389 - DNA, 1027 bp, Homo sapiens; identical to SEQ ID NO: 267499

SEQ ID NO: 730390 - DNA, 628 bp, Homo sapiens; identical to SEQ ID NO: 267500

SEQ ID NO: 730391 - DNA, 812 bp, Homo sapiens
agagggacgccccctcctcctccccgcctcttgtgaggcgcgcggagccgcctcccctgggtcaggtctgatgggccggtgggcgcgctagtggtggccgccaccgccgaaaccgtcgacctcctgggccccagttccgcgtccagccccgcggcagcatggactacctgacgacgttcaccgagaagagtgggcgccttctgcggggcacggccaaccgcctgttggggttcgggggcggcggcgaagcccggcaggtgcgcttcgaagattacctgagggagccagcccagggggacctcgggtgcgggtccccgccccaccggcccccggcgccgtccagcccggagggacctgacactggccaaaagaagaccctagacaagaaagatggaagacgaatgtcttttcagaaacctaaagggactattgagtatactgttgaatcaagggattctttgaatagcatagccctgaagtttgatacaacacctaacgaacttgttcaattaaataagttattctcccgagcagttgttactggacaggttctgtatgttcctgatcctgaatatgtctccagtgttgagagctctccatctctaagccccgtaagtcctctgtcaccaacatcatctgaggctgaatttgataagaccactaatcctgatgtccatccaacagaagcaactccctcatctactttcactggtattcgacctgcacgagttgtatcttcaacttctgaggaggaggaagcatttactgagaaatttcttaaaattaattgcaaatatattaccagtggcaag

SEQ ID NO: 730392 - DNA, 494 bp, Homo sapiens; identical to SEQ ID NO: 267502

SEQ ID NO: 730393 - DNA, 721 bp, Homo sapiens
ctttagttttggtccagaaagcattttcaaggagctggtcaagcatggctttagcagataagagacttgagaacttacagatctacaaagttcttcaatgtgtgcggaacaaagacaagaagcagatagagaagctgaccaagcttggataccctgaactaatcaattatacagaacccattaatggacttagtgcttggcacttagcctcagtttccaatgatattgatatggtcagctttctccttgaccttggtgctcaccctgatgtgcaagaccgaatgggctgtactcccacaatgagggctgcagaactgggccatgaattgtcaatggaaatattagcaaaggcaaaggctgatatgactatagttgataatgaaggaaaaggtaaaaatcccgacatcctctccagcagattgcaattcattttgtagccagaaagcaataacatggactctttttgttttccaactttagaagtgaattacttatggttttaagggaaaggctaaattctcactcctatacctaaacctactgtctcctcatactttgaaaatgagatagctatatcttagggaaatcatttatgagagcttgctcatatacttagattaatttgtgtttggtggtttcttttaaatgaggagaattttgaacattatacacactgattattcattataaattataaactcttctttaaaacaaagatgaa

SEQ ID NO: 730394 - DNA, 839 bp, Homo sapiens
ttccggggacccggggcccatggacacatacacccagccctgctgtcccgcgcgccagctcaccagccctacccaagggacatcattcacgcctgggcgcctccgccgggctccgggagcccaaggtcgcggctgggccagcgctgagcgtcagaggacgagagcaggggcctccccggtcgccccagcaggcccaggcacataggtgcccagagatccctggcttctgatcgcccggaagactaagagctttagttttggtccagaaagcattttcaaggagctggtcaagcatggctttagcagataagagacttgagaacttacagatctacaaagttcttcaatgtgtgcggaacaaagacaagaagcagatagagaagctgaccaagcttggataccctgaactaatcaattatacagaacccattaatggacttagtgcttggcacttagcctcagtttccaatgatattgatatggtcagctttctccttgaccttggtgctcaccctgatgtgcaagaccgaatgggctgtactcccacaatgagggctgcagaactgggccatgaattgtcaatggaaatattagcaaaggcaaaggctgatatgactatagttgataatgaaggaaaaggtgttttgttttactgcattttaccgactaagcggcattatcgctgtgctctgatcgcccttgaacatggtgcagatgtcaacaattctacctatgaaggaaagccaatattccttagagcttgtgaagatgcacatgatgttaaagatgtgtgcctgacatttttggaaaaaggagccaatcctaatgcaatcaactca

SEQ ID NO: 730395 - DNA, 903 bp, Homo sapiens
ttccggggacccggggcccatggacacatacacccagccctgctgtcccgcgcgccagctcaccagccctacccaagggacatcattcacgcctgggcgcctccgccgggctccgggagcccaaggtcgcggctgggccagcgctgagcgtcagaggacgagagcaggggcctccccggtcgccccagcaggcccaggcacataggtgcccagagatccctggcttctgatcgcccggaagactaagagtcccatgaagtgggcaccattgctattgccagttcacagatgcagaaactgaggtaaaaactagctttagttttggtccagaaagcattttcaaggagctggtcaagcatggctttagcagataagagacttgagaacttacagatctacaaagttcttcaatgtgtgcggaacaaagacaagaagcagatagagaagctgaccaagcttggataccctgaactaatcaattatacagaacccattaatggacttagtgcttggcacttagcctcagtttccaatgatattgatatggtcagctttctccttgaccttggtgctcaccctgatgtgcaagaccgaatgggctgtactcccacaatgagggctgcagaactgggccatgaattgtcaatggaaatattagcaaaggcaaaggctgatatgactatagttgataatgaaggaaaaggtgttttgttttactgcattttaccgactaagcggcattatcgctgtgctctgatcgcccttgaacatggtgcagatgtcaacaattctacctatgaaggaaagccaatattccttagagcttgtgaagatgcacatgatgttaaagatgtgtgcctgacatttttggaaaaaggagccaatcctaatgcaatcaactca

SEQ ID NO: 730396 - DNA, 1800 bp, Homo sapiens
tacttcctcacacagctgatttttgtgaatgatttagacatttctgccccgcagtggccaattattgcatttggtggtttagctggattactaggatcaattgtggactcatacttaggggctacaatgcagtatactgggttggatgaaagcactggcatggtggtcaacagcccaacaaataaggcaaggcacatagcagggaaacccattcttgataacaacgcagtgaatctgttttcttctgttcttattgccctcttgctcccaactgctgcttggggtttttggcccagggggtgaactttatttcatttccacaggttgaaactggtgagtccagctaaatttgcaattccaactttcatcctaagaataataactgtaatggcaaagcggaaatgccagttcctcctgtattccattgagatgggatttcacattttcctctcatcaactcccctgtaatagctagcgtctttctagcgaaagagaagaattcctagaacttatgcatttttttcctgctgaatggaagtcttgagcaatgaagctatattgtccctacatattactatatattgaactgaaagttcttacataatcaatgtcaagttttgtcttattttgttggttgtttaaaccagtgtaggaaataaaagtgatgatatttaaaatagttctcagttgaagcagagaaatgccactgtgctagttgcccaaatgttgtatctatttaaatagtttaagctgatgtgtatgggagcctaaacaagtgtagtatcctgaacttctcccattaattgctattcacacttgggaaaagtgtggacattggttcctaggaagttttgtgaccaactccacatttgttctttcttcctcagggttagtgatgaaaaaaagtaaatatctttttcatatgtccattagaatgtatgaaaaaaatcattttaactaaaagcaaaagaattttatcttatatctaaaaaatatataacttactatatgtttcagttgctctctgaacaaaaattatcttcaatttaatatgtggaatgtgttttctagctttctttgaattatgtatggcaacctggtttagcactggcatcctgaacagttaagagtcactgggaaattattgtatttctttataaatttactgtcatatcaattgctggaaaatgctatgatttttctattattaccttctaagttgtattctctcttacactgtagcctcaactaaggcaattctgctatgtttgttcttcactatgatttactgtgtgccaaaggagttttgacagggtacagagtattttactaaaagtatttttaaatgtttctcatgtgatttctgtaccttcttcctcctgccccttttgcttttttaaagaaactggggaaggatttatgaatacaccaccaccagagtggataatgcttagaattctttattggtggccctactatggtgatgatctagaactgacttacttcaggacagaagaaaaaacaatcacacccttaacctttaagccagttagatcagggggttgcaacaattgggttaaactttgggtatacattggaagcaccaggcatgtttgctttttttgtttatgtgtttgttttttgagacagagtctcacactgtggcccaggctggactccagcacagtggcatgatctcagctccgcctcctgggttcacgtgattctcatgcctcagcctcccgggtggctgggatcacaggcgtgcaccatcacgcccggctaattttgtattttcag

SEQ ID NO: 730397 - DNA, 405 bp, Homo sapiens; identical to SEQ ID NO: 255193

SEQ ID NO: 730398 - DNA, 755 bp, Homo sapiens
acggggaggcggttacctggcaaccgagagatgcggagcgcaaccacctagcggtcggaaagtgcatttttcagagccctaggaatccgagctgacggatccctgacaggggcgactgactcctagttatccccctaacccctaggggccttcagccccaaccccatcatgacatctcctctgtgcagggcggcctccgccaacgccctgcctcctcaggaccaggcttcgacgccctcttccagggtcaagggcagggaggcttcgggcaaacccagccacctccgaggcaagggcacagcccaggcgtggaccccaggccgttccaagggaggatccttccacagaggtgcagggaagccctctgtgcactctcaggtggctgagttacataaaaagatacaactgttagagggtgaccggaaggctttttttgagagctctcagtggaacatcaagaagaaccaggagaccatcagtcagctccgcaaggagactaaggcactggaactaaagctgctggacctgctcaagggagatgagaaagtggtccaggcagtgattcgcgaatggaagtgggagaagccatacctgaagaacaggacaggacaggtttgcccaccctcgccccacctcctccttcatttccagcctgggtcccctcaccactggactccaggctcaccctctccaatccttcctgcacactagctgccattcatgtgctcattcaattaaatctttattactcactt

SEQ ID NO: 730399 - DNA, 845 bp, Homo sapiens
agggtgaccggaaggctttttttgagagctctcagtggaacatcaagaagaaccaggagaccatcagtcagctccgcaaggagactaaggcactggaactaaagctgctggacctgctcaagggagatgagaaagtggtccaggcagtgattcgcgaatggaagtgggagaagccatacctgaagaacaggacaggacaggccctggagcacctagaccaccggctgagggagaaggtgaagcagcagaacgccctgcggcaccaggtggtgttgcggcagaggcggctggaggagctccagctgcagcacagcctgcgccttctggagatggcggaggcgcaaaacagacacacggaggtggccaagaccatgcggaacctggagaaccgcctggagaaggcccagatgaaggcgcaggaggccgagcacattaccagcgtgtacctgcagctcaaggcctatctaatggacgagagcctcaacttggagaaccggctggactccatggaggctgaggtggtgaggaccaaacatgagctggaggcactgcacgtggtgaaccaagaggccctcaatgcccgggacattgccaagaaccagctgcagtacctagaggagaccttggttcgagagcgcaagaagcgggaacgctacataagtgagtgcaagaagcgcgccgaggagaagaaactgggagaacgagcgcatggagcgcaagacccaccgcgagcacctgctgctacagtccgacgacaccatccaggacagcctgcatgccaaggaggaggagctgcggcagcgctggagcatgtaccagatggaggtgatctttggcaaggtcaa

SEQ ID NO: 730400 - DNA, 679 bp, Homo sapiens
acggggaggcggttacctggcaaccgagagatgcggagcgcaaccacctagcggtcggaaagtgcatttttcagagccctaggaatccgagctgacggatccctgacaggggcgactgactcctagttatccccctaacccctaggggccttcagccccaaccccatcatgacatctcctctgtgcagggcggcctccgccaacgccctgcctcctcaggaccaggcttcgacgccctcttccagggtcaagggcagggaggcttcgggcaaacccagccacctccgaggcaagggcacagcccaggcgtggaccccaggccgttccaagggaggatccttccacagaggtgcagggaagccctctgtgcactctcaggtggctgagttacataaaaagatacaactgttagaatctcactctgttgccaggtgggagtgcagtggaacgatttcggctcactgcaacctccgcctcccggaatctcttgaacccgggaggcggaggctgtggtgagccgagattgcaccattgcactgcagcctgggcaacaagagtgaaactccatctcaaaaaaaaaaaaaaagttgatgattgcaaaaaaggtctttcctctgggatgttgcacccatgcacccacccagtaactgtgtgtctgtccacctcacctgcctgccag

SEQ ID NO: 730401 - DNA, 1484 bp, Homo sapiens
  misc_feature (838)..(838): n is a, c, g, or t
gaggccgagggctgccgctaccaatttcgggtcgcgctgctgggggacgcggcggtgggcaagacgtcgctgctgcggagctacgtggcaggcgcgcctggcgccccggagccggagcccgagcccgagcccacggtgggcgccgagtgctaccgccgcgcgctgcagctgcgggccgggccgcgggtcaagctgcaactctgggacaccgcgggccacgagcgcttcaggtgcatcaccaggtccttttaccggaatgtggtgggtgtcctgctggtctttgatgtgacaaacaggaagtcctttgaacacatccaagactggcaccaggaggtcatggccactcagggcccggacaaggtcatcttcctgctggttggccacaagagtgacctgcagagcacccgctgtgtctcagcccaggaggccgaggagctagctgcctccctgggcatggccttcgtggagacctcggttaaaaacaactgcaatgtggacctggcctttgacaccctcgctgatgctatccagcaggccctgcagcagggggacatcaagctagaagagggctgggggggtgtccggctcatccacaagacccaaatccccaggtcccccagcaggaagcagcactcaggcccatgccagtgttgactctaggagagaaagggttaaagcagtcccagccttagcccacctggtgggatggggagtgttaatatctctctggaggacaaatgacagaagggttcatataaacagtatcctgacacagtcatgcttcctggattttggagtcgaggctttctacagaaaagaaagttctgatggccaggcntctcgaactccgcatctcaggtgatctgctcgccttggcctcccaaagtgatgggattgcaggcatgagccaccgtgcccggcttcacacccatttctttaaaaaggatcccgtagcaggcagaaaagccccttccatcctgctcctctgatactgtgcccccttggagatatttccgtcctccacccacgtgtctgtggctggaactgcccagcctgctcctggccccctggaagcctccccacagctggtaatctggacttaaggattgctgggccaccgcctctctgcctaccaccattccatatttaagtggagcccctacgtagaaaggccccggggctttattttagtctccttttcagggatgtcgtgggcgggggagggggttcttggtgctacagccctctccccacccctaaagggacgccgacgctgtttgctgccttcaccacatattagtgcttgaccctggcaggggaccccatggaaaagatggggaagagcaaaatacatggagacgacgcaccctccaggatgctcgctgggattcccacgcccaccactgtcccccaccccatggctgggaggggcctctgaacggaacagtgtccccacagagcgaataaagccaaggcttcttccc

SEQ ID NO: 730402 - DNA, 810 bp, Homo sapiens
  misc_feature (809)..(809): n is a, c, g, or t
gaagaaatgagtgaggtggatgcttcagcgctgttagtctcctccccatgcccctcctcacttcatctagtttagtccctttatcctgtgaagtaggggtcatcattagcccccttttacagaggagagaattgaggcttcgagagagagaaacttggccaggagtttccactcggtccgacgccctcggtgccccgccgggtgcatcaccaggtccttttaccggaatgtggtgggtgtcctgctggtctttgatgtgacaaacaggaagtcctttgaacacatccaagactggcaccaggaggtcatggccactcagggcccggacaaggtcatcttcctgctggttggccacaagagtgacctgcagagcacccgctgtgtctcagcccaggaggccgaggagctagctgcctccctgggcatggccttcgtggagacctcggttaaaaacaactgcaatgtggacctggcctttgacaccctcgctgatgctatccagcaggccctgcagcagggggacatcaagctagaagagggctgggggggtgtccggctcatccacaagacccaaatccccaggtcccccagcaggaagcagcactcaggcccatgccagtgttgactctaggagagaaagggttaaagcagtcccagccttagcccacctggtgggatggggagtgttaatatctctctggaggacaaatgacagaagggttcatataaacagtatcctgacacagtcatgcttcctggattttggagtcgaggctttctacagaaaagaaagttctgatggccaggcnt

SEQ ID NO: 730403 - DNA, 1452 bp, Homo sapiens
tagcactggaggtccagtaggcctggccggggccctgaggggcgagggtgcccgggcttcccacaccttccgcggcgactggagggagccgggccgaggaagcgaccgcgggtccgtgatggcttcttcgcggtctgtgtgttcacgagggccgggcagaggcctgcgagggttctcgtttgcgcttgcgggttagggctgtggtccggggaacccctgggcagcgcgggcagccctggctcgcggttaatcggggggtggagcgcggaagccacgccgcaggtccagctgctcggccggggcgagacggtgctttcgcggcgtgtgcttgcaggagcgcacagttcaggcgccgggacaagctgttggggtgtgagtgagctctccagaatggcacatggctccggggtgcccgggttaaaaggaaggatttgcacaccttccacttagggctcgggtaatcgcaaacttcctcccttaattggcttgcagtgctaaaaagcagatcgttctctctgaggttttcccaacagtacctcaagaaaataacatctgttttttgtaacgttccacggtattcggaattggctacagaacataataagtatttctacccatggcaaattccaccacaccgtcaaggctgagaatgggaagcttgtcatcaatggaaatcccatcaccatcttccaggagcaagatcctaccaaaatcaaatggggtgatgctgaagctgagtatgccgtggagtccactggcatcttcatgaccatagagaaggctggggctcacttaatgggggagccaaaagggtcatcatctctaccccctctgctgatgcccccatattcataatgggcatgatccctgagaagtctgaaaacagcctcaagatcatcagcaatgccttctgtaccaccaactgcttaatcccccggccaagcccatccatgacaactttggcattgtggaaggacttagggcccctcaagggcatcttgggctacactgaacaccaggttgtttcctctgactttaacagtgacactcactcttccactttcgatgctggggctgccattgccctcagtgaccactttgtcaagctcatttcctcgtacaacagtgaatttggctacagcaacagggtggtggcccatatggcctccaaggatgaatgccttcattttcattgtcattacttaagcatttatactgacttccagactccactgaaagacttgtttgaatgcatactttacgtttggaccatccattcacttaacagaaaagatacaggttgagcacttagtgtgtaatagggctttgtagcctgataatttatcctttattaaggattttggctgttgttttaaatacattgggctgccattgacatatttcagagaaggacactgaggcttggaagctttgcaaggcaagacagaagcc

SEQ ID NO: 730404 - DNA, 343 bp, Homo sapiens
agtatcccgtggttactgcttgacgttcccgtgaagacatcccctgcaccagggggtgggggagtgcgagctgaaagctgctggagagtgagcagccctagcagggatggacatgatgctgttggtgcagggtgcttgttgctcgaaccagtggctggcggcggtgctcctcagcctgtgctgcctgctaccctcctgcctcccggctggacagagtgtggacttcccctgggcggccgtggacaacatgatggtcagaaaaggggacacggcggtgcttaggtgttatttggaagatggagcttcaaagggtgcctggctgaaccagtcagcattaaccatt

SEQ ID NO: 730405 - DNA, 332 bp, Homo sapiens
ccgtgaagacatcccctgcaccagggggtgggggagtgcgagctgaaagctgctggagagtgagcagccctagcagggatggacatgatgctgttggtgcagggtgcttgttgctcgaaccagtggctggcggcggtgctcctcagcctgtgctgcctgctaccctcctgcctcccggctggacagagtgtggacttcccctgggcggccgtggacaacatgatggtcagaaaaggggacacggcggtgcttaggtaggaagaacggcgtgcttttcgtacttgtttcggtctatctttctgtctctctttgaaccctctttgccttcttta

SEQ ID NO: 730406 - DNA, 409 bp, Homo sapiens
  misc_feature (165)..(165): n is a, c, g, or t
aaatgtggggcatgagggaaaaggaggagccagcaacagttctgaggtatggtctgagcaggtggacggcagccgtttctggatcaggtggagttcagctctggcataagttcagaacacctatccgacatctatgtggaggccgggcacagtggctcacgcctntaatcccagctactcaggaggctgaggcaggagaatcgcttgaacctgggaggcagaggttgcagtgagccgagatcacgccactgcactctagcctgggcaacaagagcaagattcagtctcaaaaaaaaaaaaaaaaaaaagagctgcaacaaataacaaaaacacaagcagccagtggaagattaggcaaaggctgtgaacacttagttcctagaagaagagaaacacgtggctaatatgg

SEQ ID NO: 730407 - DNA, 404 bp, Homo sapiens
  misc_feature (165)..(165): n is a, c, g, or t
aaatgtggggcatgagggaaaaggaggagccagcaacagttctgaggtatggtctgagcaggtggacggcagccgtttctggatcaggtggagttcagctctggcataagttcagaacacctatccgacatctatgtggaggccgggcacagtggctcacgcctntaatcccagctactcaggaggctgaggcaggagaatcgcttgaacctgggaggcagaggttgcagtgagccgagatcacgccactgcactctagcctgggcaacaacagtgacttgtctcaaaaacaatagcaacaacaacaacaaaaaacaaaactgaaggtgggactgggaagacgtttgggaaagcagcctcgggtgaaggaggtggaatgagttctacgtcttgactttggggtg

SEQ ID NO: 730408 - DNA, 860 bp, Homo sapiens
attcttattccgtaccatacacaaaaaataactcatatttgattatagagctatatgtaaaaggtgagattagtaactaagatactaaaacatactacctgtacaactgcaagtaatataagtgggttaatcaaccataattccatctgtatatttctctacttagatcattatttctataataataataatcccctgcatagtaatctatcaatatctataatgctattttaaataaaactaaattagatggtgggtcaccgtcactctgatttagtggaaattcaagcaaaaatattattgatactccatctttctccttagatttttggtattattacttctttctatttttcattttttgagacacgttctcactctgtagccccaaatggagtgcagtggtttgagattggctcactgctgtctacagttccagcctcaagctatcctcccacattagcctcccaaatagctaggactacagatggatgccaccacacctggctaattgttgtatttttgctagagactgggcttcgccgttcttcccaggttggtctccactaattgcgctgaagaaatctgcctgcctaaacctcccaagctgctcaattacgggcttaagccagagcacccaccatcgtactattacttctaaatgtaaatttgacatttgaaggaaaaatatttacataatgtgctatataccaagatatgtgaataaataaacaatataaatggataatcacccttatgcctgtctgttgactgatttgactacattgtcagtaaggagaatacatgagatcaccaacacaacaggcatcattgtagagattgaagaattgagaccctgt

SEQ ID NO: 730409 - DNA, 465 bp, Homo sapiens; identical to SEQ ID NO: 346100

SEQ ID NO: 730410 - DNA, 263 bp, Homo sapiens
ggaagtcggtgtttggagaaaaggactcaggtttaatgagttaatctcacttggtgaatatgaaaaggcagcttgttatgcagcaaacagtcctagaagaattcttcgaaacattggtacaatgaatacatttaagggtaagcatttctctctgaaccttatatatgtatgaaaatttactactttttctctcataaaatagaaaaagcattaaactgggagactaaagatctaggccccagccctatctctaccatttactc

SEQ ID NO: 730411 - DNA, 579 bp, Homo sapiens
  misc_feature (353)..(353): n is a, c, g, or t
agaaaggcaaactttaaataggtggaaaagggcaaaagagcacataaaagataatgtgcaaaatctcaaagacagaaacgagcacagcactaacgaaagccagtgaaaaaacagccttgtcaaaaggtgtgatttctcaacagttagaaacaagccggctggagaggtaaaatgggactgagtcagagcaggctttgaaattagaatagtttggctcttatgtgataggaaacagtgagccatttcagagtctaggcaagtaaaagatgcaaaaaagagcttaagaacaatctaggggtgggcacggtctcctacttcgatccatcccagcactctgttctgcttacctccanaggcagctcaactgacgtgttaaaagcacttggggtccactgctcagaggtactgactttgacattgctaaatgtttttcgcgaagcacggagcaacgaataactacaaaatagagagaatacagatgaatgaatagcaaagagaaacagcattcaataaaatcacaggtataggcccatttcttttattcaattttattttatattattggtcgctagattccgg

SEQ ID NO: 730412 - DNA, 534 bp, Homo sapiens
  misc_feature (343)..(343): n is a, c, g, or t
gtatgtgtgttggctccgcttactgatgctccgttactgagctgcttactgatgctccgcttactcagtaagcgagcacagcactaacgaaagccagtgaaaaaacagccttgtcaaaaggtgtgatttctcaacagttagaaacaagccggctggagaggtaaaatgggactgagtcagagcaggctttgaaattagaatagtttggctcttatgtgataggaaacagtgagccatttcagagtctaggcaagtaaaagatgcaaaaaagagcttaagaacaatctaggggtgggcacggtctcctacttcgatccatcccagcactctgttctgcttactnagcggagcatcagtaagcggagcatcagtaagcggagcatcagtaagcggagcatcagtaagcggagcatcagtaagcggagcggtcacgcctgctgggggtatgttgtgttggctccgcttactgatgctccgcttactgatgctccgctactgatgccccttaccgcttactgaggctccgtactgaga

SEQ ID NO: 730413 - DNA, 226 bp, Homo sapiens
  misc_feature (2)..(2): n is a, c, g, or t
tnagcggagcatcagtaagcggagcatcagtaagcggagcatcagtaagcggagcatcagtaagcggagcatcagtaagcggagcggtcacgcctgctgggggtatgttgtgttggcaagaagaagaggaggcgaggaggtggcataggctccgcttactgatgctccgcttactgatgctccgctactgatgccccttaccgcttactgaggctccgtactgaga

SEQ ID NO: 730414 - DNA, 260 bp, Homo sapiens
  misc_feature (2)..(2): n is a, c, g, or t
tnagcggagcatcagtaagcggagcatcagtaagcggagcatcagtaagcggagcatcagtaagcggagcatcagtaagcggagcggtcacgcctgctgggggtatgttgtgttgtggttggcaggtaaataataatcttaccacctctatcaggtctatggataacactaatattatggatcaagacctaagtttagttttggtcttgtcattatcttagtttatgattccttgggactatttttttagtgtatattct

SEQ ID NO: 730415 - DNA, 193 bp, Homo sapiens
  misc_feature (2)..(2): n is a, c, g, or t
tnagcggagcatcagtaagcggagcatcagtaagcggagcatcagtaagcggagcatcagtaagcggagcatcagtaagcggagcggtcacgcctgctgggggtatgttgtgttgaatacataatgcttgtgtatcagacttacgttactgtcatcaccattaaaagaattgcagccttgtgccccttactga

SEQ ID NO: 730416 - DNA, 580 bp, Homo sapiens
ctccctgacctccagattagggtgtcaggcatgctttgtgttcctagacaccagtcagcatctcaagcttggcacatttaaaagcaaactccagatttgtccctgctacctccttcctcagtgtcctccttttcagaaaagggcaagtcctgcttttcatttgcttgggccacagtctttgggatcacctcctattcacaaccctcatccaatctatcggtgagttctgtaagctgtgccttcaaaatgttctcagaatgaccacttctcactgcctccaggctctgccttcaggttcaagccactgtcctccctactgagatcatggcagaggcctcctttctggcctcattcagccagagtgatccactgaaactagtcaggtgcctctacaactttgttcaaccctccagtggctttccatcatattcagggcaaatttcacagtcacagtctccacctgtgtctgcagatcatccacccctctctggcctcacttcccactacccttcccctcacccactcctcttcagcagtgcttgcttctctgctatcttttgaacaggctaagaccttttcc

SEQ ID NO: 730417 - DNA, 382 bp, Homo sapiens
agaggatggccactgaggggttgtctgggtcatgggaagaatccttcatgaataagattaatattctcatggaaatgaattctcactcttgtgggactggattagttcctgagagagtgagttgttgtaaagcaagcttcttcctagtgtttgccttcttttcactcattccctagcctttcagcttctccaccatgttgtcaggcagcacatggcccccaccaagagctgagcagatgctgatgccacattcttatactctcaagccaccacagtcgtgagccaaataagcttcttttctttataaattacctggactcaggtattctgttatggcgacataaaacagactaagataggaaagaaagaactagtcagctaa

SEQ ID NO: 730418 - DNA, 443 bp, Homo sapiens
acgttgacacttcaggagctggaagggtaggaatcccaaattctgttgcctaaggcagccagttgtcagaatggactttcctcattttctattatgaggcctgaggaaagacattcagttccaaaggctgtgcctatcctgttaaatagaagagagagggcccggcacggtggctcacgcctgtaatcccagcactttgggaggccgaagggggcgaatcacgaggtcaggagttccagaccagcctggccaacatagtgaaaccccgtgtctactaaagatacaaatattagccgggcgtaatggcgggcgcctgtattcccagctactcgggaggctgaggcaggagaatggcttgaatccgggaggcggaggttgcagtgaaccgaaccgagatcgcgtcgctggactccagcccgggcgacagagtgagactccgtccc

SEQ ID NO: 730419 - DNA, 457 bp, Homo sapiens
  misc_feature (39)..(39): n is a, c, g, or t
tgaaaatgtgggtgttacagtcatggacggtccgttctnttctatgatgccgtttcccacacgtggtacggtgtcgctatagcgacaccgtacacagacacacaaagacacacagtaacaaaccacagacacaaacacacagcaacacacagacacacacaatcacatacacagacactcaaatccatggaaatacacacactgctgagtagctaaggaacagagcttaattccaaggacctgggagtgccagcccctggaatccagcagaccccagcactccaggccagcccaccttggtgacgaagtctttctgggaacacagcttgtcaatgtagctcaggaggcccgggtctgggggcgtccagtcctcttcctgtggctgcttcactttgccctcttcccgttgtttctcgggctcccccgtggtacggtgtcgctatgggtaccgagctcg

SEQ ID NO: 730420 - DNA, 331 bp, Homo sapiens
gggactctagacgatccccatagcgacaccgtaccacgggggagcccgagaaacaacgggaagagggcaaagtgaagcagccacaggaagaggactggacgcccccagacccgggcctcctgagctacattgacaagctgtgttcccagaaagacttcgtcaccaaggtgggctggcctggagtgctggggtctgctggattccaggggctggcactcccaggtccttggaattaagctctgttctttagctactcagcagtgtgtgtatttccatggatttgagtgtctgtgtatgtgattgtgtgtgtctgtgtgttgctgtgtctgtg

SEQ ID NO: 730421 - DNA, 416 bp, Homo sapiens
acagagtgagactctgtcaaaaaaagaaagaaagaaaaagaaagaaagaaagggaaagaaaggaagaaagaatcaaataacaaaaagcacagtcagcattataagatatcagacatacccagcccagaggcagggtggagttggagatcatctagtccatcaaccaaatcaatttaggttgatttttttttaacaatttttttttttagccaagtcaaaaaaagtatttttagccttacttatatataactgtatcttttttggctcacttagaccattttatcaaaggagatcaaccacaaattcctgccggtttttagttgtaagaagctttttttattggcaggaaaactgggagaatgtgtaagttgttaagcagccaggccactctgtgcccagtattctggtaactattg

SEQ ID NO: 730422 - DNA, 452 bp, Homo sapiens; identical to SEQ ID NO: 188343

SEQ ID NO: 730423 - DNA, 2519 bp, Homo sapiens; identical to SEQ ID NO: 193771

SEQ ID NO: 730424 - DNA, 285 bp, Homo sapiens
aaatgaaggcatcctgacatgtgggaatgtcaagacacaagctctgtgcagttttccatgcatggggacagtgccctggcattccagaaatcctggcttacttatcaccacgctctaatcaactgcaaataacattttaaatctaagtgcaaagagaatgatcaggaatatcataaaatctgcatttatttaaaaaaaaaaggagctcacagtgaagtagtctcaagcaattgcttttttttttttcttttttttcttttattattatactttgtcagggggtac

SEQ ID NO: 730425 - DNA, 1405 bp, Homo sapiens
ttgccagtgtaagtggagtgaatccaccatcccttacgccacactgccattgcagacccaaatgggcacatggagaccagcaaccccatcccctctgtgccaacattgccaccattgtgaacacacatatgaatgccaaggcctggtgcctctctctgtgccaccactagcatgaacacatgtacagatgccaaaaactgccaccactgcaaacacacgctcagaggctggcagccctgtgcctgccagcagtgtgatatagtgccccacttctactggtgtgagtgtgagcaagaacactgaaacagcactctgatgatactgcaccccagccaacatgaatgcaccccagcacactgccactgctgctggcatgtgcaaatgaacacattccactgccaccatccctaaaagcgctttggctggcaccacctattgaaatattgtggttagtggtccaggaacacatcaacctctctggcacagctggtgtgaatgtaaattacttcagccagcatggaaagcagtttggtgatttctcaaagaacttaaaacagaattgccattcagctcagcaatcccattatttgttatctacccaaaggaatacaaatgtttctgccataaagacacatgcacgcatatgtttatcacagcactattcacagtagcaaagacatggaatcaacctaaatgcccatcaacagtagactggatgaagaaaatgtgccacatatataccatggaatactatgcagccataaaaaagaatgagatcatgtcctttgcagcaacatggatggagccagaggccattatcccaagcagagtaacacagaaacagagaaacaaatactgcatgttctcacttacaagtgggagccaaatattgagtgaagatggacacacagaaagaaacaacagacatgagttcttacctgagcgtggagggtgggaggatggtgatgatcaaataactaccaatcatgtagcatgcttcttacctgagtgacaaaatagtctgtacacaaaacacctgtgacatgcagtttaccaatataacaaacctatacatgtacccttaaaattaaaatacaggtttttaaaaaatcctcaatctaatggtctagaaactattggggaggggatttgttaaagattcctgaaatgttagcaaccaacagaccaagaacattgacactttgtaggtagttttagttcagattaatagatgcacatttgtttcacctggtaagtctgcagtcaggagctctgggagtcaatgctgtatgtttcaacaataaccggacggcaataacccggacgacaataacccggacgacaataacccggacgacaataacccggacgacaataacccggacgacaataactcggactacta

SEQ ID NO: 730426 - DNA, 551 bp, Homo sapiens
tgcacttagccacccctcccctttcctgtattcaaaggggctcagtagtgagcctgaaccatcaaccccaccacatgcccccgtcacccacttgggtggtgtcagagtagacctacgaaaacatgattcaaacaaggtccagcgtctcaaacccaaatgggcagaatagaacagagagttaacagacaccaacaccaagataacacagattttagaattatctgacaaggattttgaagcagccatcatttaaaaaaaagattcagtgagcaatcatgaacatgcttggaataaatgaaaaaaataggaagtcttagaagatggcagaatcaaatggaaattttagaattgagaagagtaaatgaaacaaaaatctcactggatgggttaaacagcagaatgaggagtaacgagaaaacaatcactgaatttaaagatgaaataaaaatctgagcggagaaaacagactgcaattggtacctgtgggcctctagctaaagacctaacatttgaatcatggctctaagaaagaggagagggagggtggggct

SEQ ID NO: 730427 - DNA, 570 bp, Homo sapiens
ccccgcattggcagcaacactccaatttttaaagcatgagagaagaaaagaggaaatagatggcataatactttcttcccacatcccaaagattgttggtatgtgcacctcactttggagatttaggtcatttaggtcaaaagaaacttgctattgaggaaagagaatctgtagaagtagggtttaagatttgcggggatggggaagggtttgggacactcactttggacatctaggttaatcagagttactgcataatggctccccttctattttgcttccctttatgtatgggtttgtttagacaaggagcagcatgactcttgtatgttgccatagcacatcaaataggaaaaaaaaatagcttgaagaagttggtgaggaaggagctatttaagtcagaactctcagagtgacaaactcaactaaaattaaatttcacaaaagtcaatttattagctttcataaacgataattgtaatctcctagggtgacagtggcctccggcatagctggatccagaagctcgagtgtgctgcctatgcgggtaccgaatcgatggtatcatgc

SEQ ID NO: 730428 - DNA, 619 bp, Homo sapiens
agaggaagtcaagctgtactgtttgatgatgatatgatcatatacctaggaaacctaaagactcctccaaaaagctcctagaactgataaatgaattcagcaaagtttcaggagacaaaattaatgtacacaaatcagtagctctgttataccccagaagcgaccaagcttagaatcaaaccaagaactcaaccccttttctgatagctgcaaaactaaactaaactaaaataaaatacttgggaatagacctaaccaaggaggtgaaagatgtctacaaggaaaacaactttagtatttttaatgggttaaaatgagaggcagcaggtacagcagaagaagtcagtgcgtgggcatccgcatccaatgggtactgcacctttgatggtaaggctttggttttgacttactaaattactaggtacgattattttctagtttttgtcattaaaccttaaaactactaagtaaccccttccatttcttgttaaatattgtaaaatttcatactctcatttatgctgcctgacgttagagtgtttgtttctattttgtgactaccttaaataatacctataaagagtaaactgttagtagtgtttttgctgtaattaaatgt

SEQ ID NO: 730429 - DNA, 571 bp, Homo sapiens
tgcaagcctccaagtgttctcttccaagtatggtcacacaggacatacctcatttctccaggaatgcattctgagaacacatatgaagtgttgtctactagggaagctcattagaggctcagtgaccatagcttttattgggggctggtcatgcaggcaccctttgcctagcacatagcaaaattccaggcttgcggaaggaaagcaggtgttcagcacaaaccccattgtttatacagtttagccacagtgagccattcttatcagggaatagtggcaactctcttgaaatccaggttctcagatgccagctaagggccatccttgaaggcaggcctttttaagtataacagtcttgggcctcaaatgtaaactctatatcaccttctcaaggcatttttctgttacttgctttttggtttcttatatgaatctcacttttttttaaaaaatacctcatactttttgctgaaacctacaaattttagataatatattgcagtgatttctggatactgctaccccctcctctactgtggggctcattggtattgtttacttctttgtttag

SEQ ID NO: 730430 - DNA, 402 bp, Homo sapiens
tttgtcccctcccccacagtgaggacatcggtgtatttacttgtttgcttcattttatgatacagaccttagaatttcagaattgccaaacccatgccctcccaaacaccaaaattaagtagaatttgacatttctttgtagttcttttatgtctttagactgaaagtatttattcaaaaagtattgtattcaaaagttgggtacatttcttttttcttcctgtgtagttattttaataagataaaatagaattcagtttatttgctttgtgtccaattttagtttttctcctacttctatttgattttactttatttcatgcataatatttaagttcccaaaagtcaaaacctctaaccctataaagaggtatactctgaatctcactccatcgcccaggc

SEQ ID NO: 730431 - DNA, 308 bp, Homo sapiens
  misc_feature (25)..(25): n is a, c, g, or t
ctagaggatccggttgtcgagatangatgaaaacagagcaggaaagccagattcataggaataggggacagggggaaggcattttgcttccattaaccatgtagtcatgaagatgactattagagttcaagagacaagggatctagcagagtgatgatcacaaagaccactatccaacatgagtaaagggatcctgtttgtagttcagaaggaaccatgccaccagggatatcttatgtgctgaacatggggggaaactcttccatccagaataatattgcagctaacactttaacacttattaagca

SEQ ID NO: 730432 - DNA, 158 bp, Homo sapiens; identical to SEQ ID NO: 198913

SEQ ID NO: 730433 - DNA, 755 bp, Homo sapiens
aggtagaggataggtctacggcctggaccctggttactccaatatttaaaagtcaggactggaaggaacgattgggacggattagccattgacgtagaagaaccaagaggtgtcccaaaagccaagtggagagagtttcaagaagagagagtgagcagttgtatcagaagctactgatagtccagtaaaatgaggagtgagaattgaccattgaaattagcaacaaagagattcctggagactttgaaaggaacaattttgatactgttgaggatgaaaatcggatcaaagagcaaaaaaggaagtggagacattacctataggtgacttgggagtttcactgtaagggagagctgagaaatggagtgggatctgaaggagaaagtggtgagatggtgggtttggtggtgagagcaagtgaagttctgttgcttctcttttcttagtggaaattgaaagcaaggacattagctaagtgaagaaataggagggggttttgggagcctaaggagagaggagaaggtctaagtcaccttagagagtgggagagtgaactgattagagaaatgaagtggaattgccaggcagtcctaaaggagcttcaggaaagaagtaggtacagagagttgaatggaaccagggtgtgggttttgctggatttgtaaatgaaagacgagaggaacagggagttgtggttatgtgcagagtattaccagtgacccttgggcttaagcaccttggggtccgccctgcac

SEQ ID NO: 730434 - DNA, 1010 bp, Homo sapiens
cccaaagatgctgtctggaagaggtagggagggaaaaacacatagccttacagaatggacatctggtccccaacgttatgtgagcatcttgagttatgacccactccagaaaatctgttgttcgtctggacactgacaaacctctccacagccccagggacaggaaaccctgcttgctaattaatatgcgactcaactccctttcctgtgatctgctgactcatgcaggagcatcctggcagtctgtggagcccttaggctgtgatgtgactcatctgcgagtctaacagacctggtttatctcagttatggctgagcaaaatcaagcagcgtccttaagctctcctgactacagttccatatctgaaaggtggggataatagcatctaccttgcatttgaaacgccgggcatgcatgctcagatgaataactaccacagcggtgctctctctgtgccaggaactgtcaggcgtgtttcattcatatttcatcttccccagtggggcaattctcaacccctaaagtcagaaataccatccgacccagcaatcccattactggctatatacccaaaggaatacaagttgttccgccatgaagacacatgcacgcgtatgttcattgcagcactactcacaatagcaaagacatggaatcaacccaaatgcccatcaatgatagactggataaagaaaatgtggtacatacacaccatggaatactatacagccatgaaaaggaatgagatcctatcctttgcagggacatagaaggagctggaggccattatcctcagcaaactaatgcaggaacagaaaaccagataccacatgttcttacatttaagtgggagctaaataatgagaacacatggacacatagaggggaacaccacacactggggcctatcagagggtggtgggtgggaggagggagaggatcaggaaaaatagaggtgtatctgtcaccagagttcctcccttcctttttctgtatttcctttactgtt

SEQ ID NO: 730435 - DNA, 796 bp, Homo sapiens
  misc_feature (166)..(166): n is a, c, g, or t
ctcacaatagcaaagacatggaatcaacccaaatgcccatcaatgatagactggataaagaaaatgtggtacatacacaccatggaatactatacagccatgaaaaggaatgagatcctatcctttgcagggacatagaaggagctggaggccattatcctcagcnaactaatgcaggaacagaaaaccagataccacatgttcttacatttaagtgggagctaaataatgagaacacatggacacatagaggggaacaccacacactggggcctatcagagggtggtgggtgggaggagggagaggatcaggaaaaatagaggtgtatctgtcaccagagttgcctcccttcctttttctgtatttcctttagtgagggatgatggtgggtgtggcaccagcagtcctaaagagctgctttgagatcacacttgtctgagacacctgtgccttttcaatatagagtcagctactgtagacagctaacaaaagatgaactaaaactcaattcagaaaaaaacaaaacagcattctcagagtaaaaatattagacctggaagcaaccttagaaatcatcatgctttagcagtggattttagaaataggaaactttttattaggtgagatgatttgcctgggattatgcagtagcaaaagcatttaagaatctggatttctgcctcagtctcagaatttcttgttacatgggtatattttatttttatttttatttatttatttatttatttatttgagatggagttttgctcttgttgcttaagctggagtgcaatg

SEQ ID NO: 730436 - DNA, 314 bp, Homo sapiens
aggatcccccctgcgcacagagttgtgctcagaaaaaaacaaaacagcattctcagagtaaaaatattagacctggaagcaaccttagaaatcatcatgctttagcagtggattttagaaataggaaactttttattaggtgagatgatttgcctgggattatgcagtagcaaaagcatttaagaatctggatttctgcctcagtctcagaatttcttgttacatgggtatattttatttttatttttatttatttatttatttatttatttgagatggagttttgctcttgttgcttaagctggagtgcaatg

SEQ ID NO: 730437 - DNA, 1068 bp, Homo sapiens; identical to SEQ ID NO: 202718

SEQ ID NO: 730438 - DNA, 347 bp, Homo sapiens
ccaggagttttaggctacggtgagccatcatcacaccactgtactccctgtactctagcctgggcagcctcgttctttagagtaagacactgtctctttaaaaaaaaaaaaaaagaaaaaagaaaaaaagaaaaggcttttagtgaatatatttttagggtagcaagtgtaatttttataaattgcattatttgaatctaataaataccctcaaagctgaagtcgaattctgattttgattgaaaatattttttacttaaaggaagagggatagaataaatgacacgattaaggaaaagacttcttgtataaggccggggttttttaaatgatttttgaatagttag

SEQ ID NO: 730439 - DNA, 372 bp, Homo sapiens
tctagcctgggcagcctcgttctttagagtaagacactgtctctttaaaaaaaaaaaaaaagaaaaaagaaaaaaagaaaaggcttttagtgaatatatttttagggtagcaagtgtaatttttataaattgcattatttgaatctaataaataccctcaaagctgaagtcgaattctgattttgattgaaaatattttttacttaaaggaagagggatagaataaatgacacgattaaggaaaagacttcttgtataaggccggggttttttaaatgatttttgaatagttagatggacaatacggaattaaaaaggtggtgtaaaaagttatacggggctgggcacagtgactcacgcctgcaatcccag

SEQ ID NO: 730440 - DNA, 582 bp, Homo sapiens
gcggcagcctcagcctctttgagcccctggaccactcgcccttcctatgtcctctctcttgccttgcagtgtttcttctatggttttcctgtcctgcccccacagggtgaatttcagctttctcttagaggcccagctcaaacatcacctcttccacaaggcaccccccgattcctggccctctccaggggcagtttcctgctgccaagggtggacgaaagcgatgatagccccagggcaggacaggctggctcacaagctcactatcaatgcgtctgaccggtgtctgcattctttgtgtgcctagaggatatcagagtgcaggcatcaaaacccagatctggccacccgatggctcacgcctgtaatcacagcactttgggaggtaggcgatcacttgaggtcaggagttcaagaccatcctggccaacatggtgaaacactgtctctactaaaaatacaaaaatttggcctggcgtggaggcttatgcctgtaatcttagcatttttggagggcaaggtggttggatcacgaggtaaggagttcaagaccagcctggccaagatggtgaaaccctgtct

SEQ ID NO: 730441 - DNA, 647 bp, Homo sapiens
cagactctcccatcagtatgtgaactaattttctctaatttattcggagtgactaagaaggacaagctgatgaagagaagaatcagctactagttggccctgatgggcccagtcttctcccatcaggatgtggcattgtgttctgtgcacagtagggcctcagcaaacactgacttgggaggagtattcaagctttaatatattcaaaagttgtccttggaaacacacctgatatctctggatggaaaatcccccccaggtttcaagcagtgggcgatgcatacacactttggcctctgctgcaaagagggaagaggatgcccttaaacgaaaggctttttctttcattctcagtatcaagaaacagacctataaaaagtgcccttcctaatggatatctgctcctcactctgagggcactgacttagtttttcgtgaaacttgagagaccacagggcttccgacatttgctggctgtcatgcagaagaggcaaatcacaggctacatgttctcgccttctgatttaataaggtgcaaactcatgggggaggctctaactgcagctttgtcctcaaggaagtctggggcttatcaggtgcaatgatccctctctaaggatgtgcaatactgatggggcgaagatggg

SEQ ID NO: 730442 - DNA, 365 bp, Homo sapiens
  misc_feature (21)..(21): n is a, c, g, or t
  misc_feature (24)..(24): n is a, c, g, or t
  misc_feature (31)..(32): n is a, c, g, or t
  misc_feature (38)..(38): n is a, c, g, or t
  misc_feature (42)..(42): n is a, c, g, or t
  misc_feature (44)..(44): n is a, c, g, or t
  misc_feature (48)..(48): n is a, c, g, or t
  misc_feature (55)..(55): n is a, c, g, or t
  misc_feature (61)..(61): n is a, c, g, or t
  misc_feature (66)..(66): n is a, c, g, or t
  misc_feature (68)..(68): n is a, c, g, or t
  misc_feature (70)..(71): n is a, c, g, or t
  misc_feature (75)..(75): n is a, c, g, or t
  misc_feature (220)..(220): n is a, c, g, or t
gctccagcagcctaacaaccnttnactgccnntgtacnagtncnagcnctagttncagccntgggnangnntatnctgacttcctctgatttggcatgtggagacactcctataaggagagtcaagcctgtgggagtagaataatctcattcccagagtcagaggagaagagacatgtaccttgaccatcgtccttcctctcaagctagccagagggtgngagcctaaggaagcgtggggtagcagatggagtaatggtcacgaggatccatgacccactcccaaagctcagactatgccaggctccctttctctctcttccccaggtccttcctttgggtctggttgttgcaccatctgcttgg

SEQ ID NO: 730443 - DNA, 390 bp, Homo sapiens
tggcggtcgagcggacccacccattctttgatctgcaggcaggcccttcgtttgtgctgctctgcgctgctgcttatctgtgtgtgctaaaaggggagggagtgtttctgtgcccattcccaggcaccttcgtgcagctgcaggcatctcccccacgcgcttccagcttcccttagtgtgcctaaagaaagggaaaggaatgtgctttaggcccactgttttcactggggcccatctatgtatgtggcttggtgattacccaggaacctcccaagtctgtgcccgagttgcttatctgtgttttacagcctgaaagatcaggctgctctttgttaggagaagtgatttctttgaactgcgtggtgtggtgagaaagggagcaatttctaa

SEQ ID NO: 730444 - DNA, 780 bp, Homo sapiens
cccaggctgccattgcaaaatgttgtgaaaatttcgggactgaaattgtaccctctgaggcttcagagactcatgcgttgactgagttcctaagataacaagagaaggaagaacattgaacgttgcttggagcactgctgttcccagcagtagttttcagtggaatacctgcatcaggattccctaaagtagttgctctaagtgcagatagtagaggtggagcccagaaatcaacattttgaatcttcaatgcaatgattttgatgcacgctaaagtctcagaataatgagttccagatcataaacatgtacgtgataccttcccaccctatttcccaggctgtgggggaagtaaattgcagtaaaaaaaatattgctcttattttattcccaaatagtgatggaatataatgactgagatgaaagacccacactaagaccaccaaccatcttcttaggaatcactatattggtactactcaagcaaaatttgctagtgaccacttctgggctccaggacctcagcccagcactcagtccctcctttcgcaggttcttgctcaatctctgggtcctgcttccaggtaggtctgcctttgctgtcccactcctgaatggctgtatttacctgcctgcatcctggctccaagtatccaagcataatccctcagatgaaatggtcatgctaatgaggaaaactgcccaagaccctgctggggggtagtgtttctgagactaatcatggcatggcatgggataattttgcactggcatgacttg

SEQ ID NO: 730445 - DNA, 1438 bp, Homo sapiens
  misc_feature (366)..(366): n is a, c, g, or t
tagagaggccttgagacatacaggtcttttaaaatacagtagaaacaccactgtttacgattatacgatggacattcataaaaagcataatttcttaccctattcattttttggtgaaacctgattcattgattttatatcattgccgatgtttagttcatttctttgccaattgatctaagcatagcctgaattatgatgttcctcagagaagtgaggtgggaaatatgaccaggtcaggcagttggaggggcttccccagccaccatcggggagtacttgctgcctcaggtggagacctgaagctgtaactagatgcagagcaagatatgactatagcccacaacccaaagaagcaaaaattcntttttatcttttgaaatccagtttcttttgtattgagtcaagggtgtcagtaggaatcaaaagttgggggtgggttgcaaaatgttctttcagtttttagaacctccattttataaaagaattatcctatcaatggattctttagtggaaggatttatgcttctttgaaaaccagtgtgtgactcactgtagagccatgtttactgtttgactgtgtggcacaggggggcatttggcacagcaaaaagcccacccaggacttagcctcagttgacgatagtaacaatggccttaacatctaccttaacagctacctattacagccgtattctgctgtccgtggagacggtaagatcttaggttccaagattttacttcaaattacaccttcaaaactggagcagcatatagccgaaaaggagcacaactgagcactttaatagtaatttaaaagttttcaagggtcagcaatatgatgactgaaagggaaaagtggaggaaacgcagctgcaactgaagcggagactctaaacccagcttgcaggtaagagctttcacctttggtaaaagaacagctggggaggttcaaggggtttcagcatctctggagttcctttgtatctgacaatctcaggactccaaggtgcaaagcctgctgcatttgcgtgatctcaagacctccagccagaagtcccttccaaatataagagtactcatgtttatttatttccaactgagcagcaacctcctttgtttcacttatgttttttccagtatctgagataatataaagctgggtaattttttatgtaattttttggtatagcaaaactgtgaaaaagccaaattaggcatacaaggagtatgatttaacagtatgacatgatgaaaaaaatacagttgtttttgaaatttaacttttgtttgtaccttcaatgtgtaagtacatgcatgttttattgtcagaggaagaacatgttttttgtattctttttttggagaggtgtgttaggataattgtccagttaatttgaaaaggccccagatgaatcaataaatataattttatagt

SEQ ID NO: 730446 - DNA, 1163 bp, Homo sapiens; identical to SEQ ID NO: 398426

SEQ ID NO: 730447 - DNA, 1012 bp, Homo sapiens
gaaaatagaggatcccgtgctgcacaaaggatgcctggaatctcttcttacgggccacccctcagccacagctgtggggccagcgaagtgagagcctgcccagaggggccaagtccctgtcaggttacaaaattgttaagccaacccctcaccaaacacagggcattattagtaaacaggtgaggaaaatcctctaggtcggctagctggacgtgcaggactgagggttcaacttcacagcctgtctacagcaccagccctaccatcactgtggattaatcacccaccaaatcctacccatcccaattatgaaaaaaatgacgagcgtccagtgcaatgcccatctccaacctctgtgcagaggaagcctggcctctccctggagcaggtccttgttcagaggattgctccaggagaacctcgtccctcacccaggtcagcatttcagaaggagacacctgatctgcctctatcgctgccacacaccatgctatgcaggcttggactgctcagaaatctcttgtgggagccacattatttttcctgcagaacagaattatctagaagggggtaaataatagtttctaaggtggtatctgatcacagaataaaatatgaagtgagatgaagtatacagacgggctcagagacagcctgtattcactgcagcactggctctgaaggctgctgggtaggaacgtgagcaggagctggggtcccctgtgctgtttctgcctctgctcatgattctctttgggaggttcagctggtaatgtcatctctgctcactcaggtccttgatctagagaactatttcagtatttgccacccaccacaagcccacatcctggggatgctgtgaacattcctgaacctgtgaagtttcccaaatctctcagaactagagggcctacacagggaggggccatatgccttttcctggtagacagaataaacaactgttaagaggcatcctttgtgcagcacgggatccatgcctataatcccagca

SEQ ID NO: 730448 - DNA, 895 bp, Homo sapiens; identical to SEQ ID NO: 176748

SEQ ID NO: 730449 - DNA, 422 bp, Homo sapiens; identical to SEQ ID NO: 180148

SEQ ID NO: 730450 - DNA, 262 bp, Homo sapiens; identical to SEQ ID NO: 180149
  misc_feature (135)..(135): n is a, c, g, or t

SEQ ID NO: 730451 - DNA, 295 bp, Homo sapiens
tcgtgaggggtcaaacataggtacatagaataattacagtataagtctgaaagtgaaaacgccagaagatggattttttttttaatgcaatggcgattcagaggaaggaaagattctttcttgctgagggaaatcaaggaagtcttcctgtaggaggtagtttctaaaccttatattgaaagatgtagatcctggagagacggaaaaaggcattccaggcagatcactgtgagctggaaagccagtgatgctgtggcaaaatgtattttttacagaaaatagatgggtatctccc

SEQ ID NO: 730452 - DNA, 523 bp, Homo sapiens; identical to SEQ ID NO: 300843

SEQ ID NO: 730453 - DNA, 513 bp, Homo sapiens
  misc_feature (471)..(471): n is a, c, g, or t
caggcgtgctattaggtgagaggctattattatatcctatatacagggaggacaaggaggtctcactaatactctgctagctgagtagacatgaagggaataaggcataacatattttgaggattagcattccaagcaaagtgtaaaactacaaaaatcctaaggtagaagcacagttgatatattcaaagagaaataaggaagacaacatggatagactagggagcatatttgatgctgaggtcagaaagttaaggggtagggatagggataggggctagagaaggtagggccttgcacatcattgaaagaacaggggatttcctttgaaagagatgcaaaaaatcagccgggcatggtggcgggcgcccgtagtcccagctacttgggaggctgaggcaggacaatcgcttgaacctgagaggcggaggttgcagtgagctgagatcgcgccattgcactccagcctgngcaacaagagcgacactctgtctcagggggaaaaaaaaaaaa

SEQ ID NO: 730454 - DNA, 117 bp, Homo sapiens
tttcaatgtcctcgcaaaggtttaagcaaaagccttagctttgccactagcattcctacaaagtgttaaaagcacacttcaggccgggcgtagcagctcacaactgtaatcccagca

SEQ ID NO: 730455 - DNA, 536 bp, Homo sapiens; identical to SEQ ID NO: 183308

SEQ ID NO: 730456 - DNA, 511 bp, Homo sapiens
  misc_feature (477)..(477): n is a, c, g, or t
tgctgggattataggtgtgacccaccgcgcccggccagctccatattttctgctgcctgaattgtaattattctattcctgattttatttgctgattccattgtttttactagttcatattaaatgctaatgacagatatctttacctaaaacattctatttctcttgtcatgagcattatgaaacaaacctacaattgttctccattacctagtttatgacaattaaactcttctttcaaagaaataaacaacatggccaaaatactttccagcacagttgtagcaattcccacctcctccatcagcagtatgagagttcttgcaccatattctcttcaacacttggtattatcagtctttttcatttaagactttctaggggttgatgtaatgctatcctttgtggttttaatttgtattccctggctactaagaaggttaaacctttttttatgtttattaaagctgattcctncttttgtaaaatgatgctctcccatttctattct

SEQ ID NO: 730457 - DNA, 667 bp, Homo sapiens
attctaaactggaaaagatttctcccccttaataccatggaccttatagcatgagctaacactatatgaattttaatattaggttcattttaccacctaaaatgttttgagtattgaaggtatatgatttcagcattttacagtccaactatgacacagtcatgtggtatggatcttgaggacagccttctcatgaagctccaatgtactaaaatattcaagtcagtaagaaccatttctttctggatgtgaatataatttaacaattactgccttgcaaagtatataatcctagagtcaaaccgttatataaaaaaatttccctgtagatatggcaaaattcaaagatgaaaaacagcccctaaaacaaattgctataaactctcttaagaactcattgtgataaaatatataacacctcactcaagaaaaaaaattaacacattcacaggatgatctctatcaggacttaagaagtgaaaaatttgttataacattggagggctgatttgaaaagaatgtttccttacccttctgaaccctgttttgcaaaactatacatcatttctaagtagagctttaccaatagaagacattagtccttgagaaccctcagcaaagggtattttgtctttcaggagtaattttgtcatcacattctatgctt

SEQ ID NO: 730458 - DNA, 701 bp, Homo sapiens
ccccttcaccttctgccatgattgtaagtttcctaagacctccccagaagctgagcagatgtcagaatcatgcgtcctgtacagcccatggaatggtaagccaattaaaactcttttcttggctgggtgtggtggctcacacctgtaatcccagcactttgggaggctaaggcagacagatcacctgaggtcagaagttcgagaccagcctggccaacattgtgaaactccatctttactaaaaatacaaaaattagccgggtgtggtggcatgcacctgtaatcccagctacttgggaggctgaggcgggagaattgcttgaacctgggaggcagaggttgcagtgagccaagattgcaccactgcactccagcatagacaatgaagcaagaaaaaaaagaaaagaccttgtctctaaaaagagagagagagaaaccctgcatggacctccattcatatggccgttctgttactagaagggtccagaccaacacaagagcactaggagccaaagatgaaattcacaaaagagcaattatgagaaatgggagaaagatggagggactgcaacatagggctaatggaagttttagaaaaacagcagaaaatcacagagaagcaatatatgatggacaatcaatgagaattttcaaaaactaggctgggcgttttggctcatgcctataaacccagcactttg

SEQ ID NO: 730459 - DNA, 590 bp, Homo sapiens
ttgctgtcccagagtatctccatcaaccctaaattattatggaactcctaacaattaataagaaaaatatggaaattttaggagaagaaaatgcttcttgaaaacatatgaatcagcataaatcagagaggaaatctgaatagttaacaagaatgcattataataagaaaaataaacagttaaaacatccgtatatcattttatgtccatattgttggcaaaattagaatgatgaatagtaacacgtattggtaaagatactgagaaaaagaatgcttatatatcgccattgggagccttaactaatgaaacaattccagaagacaatttgttaatatctactttgcttaaatatctatatacctgacaacccagttattttactcttggtatatatattgcaaataattctcataagacataagtgaatatgaataaggacatttatttgggttactggctagctgaatataagctgggttcctcttactaagagaatacaccattaaaagttggtggatgcagtctagggaaaactgtgaagcactgaagcaacataataaatttagggttgatggaagaggaagatg

SEQ ID NO: 730460 - DNA, 570 bp, Homo sapiens
tgtgtctgtgtgtacatgtattgtgtatgtttgagcgtgtgtctgtgtgtatctatgtgtttaagcatttctgcacatgtctgtgtgtgtacacatatttgtgtgtttgagcaattctctgtgcgtgtatctgtatgtgtttaagcatttctgcgtgtgtgtgtacacatatttgtgtgtgtgagagcagttctgtgtgtgtgtgagtgtatctgtgtgtgtttgagcctttctgtgtgtgcacatgtgttgtatgtgtctgttttacgtgtctatctgtacatgcacatatgtttcagctgaaaagagtgcggaggggtaaaggtgactgtgagaatgagtgtgtactaggagagctgtgtgtgggacgctgcgtgtggctgttggaaagtaggtgtgaaagagtgtgggtgtgtttgtgagcctgtgtgtagatggtgggggtctgtgagggtagcgggacaggctgactgtgtgtgtgcttgagccaacgctggtatgactgtgattgaaagtacactcgttgatgtggctatgtttgtgttggcataactgtgtatcagggtgatg

SEQ ID NO: 730461 - DNA, 177 bp, Homo sapiens
tttcaagatcctcagcacacacacagtcagcctgtgtgtagatggtgggggtctgtgagggtagcgggacaggctgactgtgtgtgtgcttgagccaacgctggtatgactgtgattgaaagtacactcgttgatgtggctatgtttgtgttggcataactgtgtatcagggtgatg

SEQ ID NO: 730462 - DNA, 428 bp, Homo sapiens
tcactcagtgaagtaaaacccacacaaatttacctttgggaaaggtgttgggcgataacatcactatgttatccccaacaccataccccaaagtcagttaggtgatctgcaggtgctttcgcagtttcagaggaaaaatcaatgcagtcattttattcttacgtattttattaattaaaaatcgtgtgaatcattattgttgtaggaatcctgttattaatcatctttaagattatatatatgccaaaaagagtgttaatcactttgtcttggctagtatttggtcagctgagtgcagttcacctcagctgatatatttttccattatctgccattcttattcacaaattttcattgattataggtattctacgccaattccaaaaaatagctcaatggctcagtgttgggcgataaaagcagagata

SEQ ID NO: 730463 - DNA, 628 bp, Homo sapiens
gttcttcctgtagggctgaagcagtgcctactcgatagaatcagtcatcatgcaaataaaagccacctgagtcaaaggcaaagccagagtgcagcttggagcaaagaagttaaaagcatattggcagaggaagagccctggcattccagcaggagctaacaggaaaaagaaaatcaatggcagtagccctgacacattcacttctggtggttaccactcacctggggatgtgagtctcggcgggccaggctcctggggacagggggcccaaggggcagtagagggttcgcacatctaaggaggagaagaagcatgagatacatctggtacagaagcttgggaggagcttgttcaaactcaaaaaccagacggctgaacccctggccccacagcccccagcagggccatctaaggtggagcagctacaagatgagaccaaccacctaaggaaggagctagagagtgtgggaagacagctccaggctgaggtggaaaacaatcagatgttgagtctcctgaacaggagacaggaggagaggctacgtgaacaggaggagaggctacgtgaacaggaggagaggctgtgtgaacaggaggagaggctgtgtgaacaggaggagaggctacg

SEQ ID NO: 730464 - DNA, 545 bp, Homo sapiens
ttaaaagcatattggcagaggaagagccctggcattccagcaggagctaacaggaaaaagaaaatcaatggcagtagccctgacacattcacttctggtggttaccactcacctggggatagccagtaccaagaactagcagtagccctggattcaagctccgcaataatcagtcaactcactgaaaacatcaattcactggttcgcacatctaaggaggagaagaagcatgagatacatctggtacagaagcttgggaggagcttgttcaaactcaaaaaccagacggctgaacccctggccccacagcccccagcagggccatctaaggtggagcagctacaagatgagaccaaccacctaaggaaggagctagagagtgtgggaagacagctccaggctgaggtggaaaacaatcagatgttgagtctcctgaacaggagacaggaggagaggctacgtgaacaggaggagaggctacgtgaacaggaggagaggctgtgtgaacaggaggagaggctgtgtgaacaggaggagaggctacg

SEQ ID NO: 730465 - DNA, 583 bp, Homo sapiens
aggaagagccctggcattccagcaggagctaacaggaaaaagaaaatcaatggcagtagccctgacacattcacttctggtggttaccactcacctggggatcaacaggtatctacggggagggccgtgcatcctctactaccctgcaggatctggagagccagtaccaagaactagcagtagccctggattcaagctccgcaataatcagtcaactcactgaaaacatcaattcactggttcgcacatctaaggaggagaagaagcatgagatacatctggtacagaagcttgggaggagcttgttcaaactcaaaaaccagacggctgaacccctggccccacagcccccagcagggccatctaaggtggagcagctacaagatgagaccaaccacctaaggaaggagctagagagtgtgggaagacagctccaggctgaggtggaaaacaatcagatgttgagtctcctgaacaggagacaggaggagaggctacgtgaacaggaggagaggctacgtgaacaggaggagaggctgtgtgaacaggaggagaggctgtgtgaacaggaggagaggctacg

SEQ ID NO: 730466 - DNA, 355 bp, Homo sapiens
gaaatggaactacagttagtggggcagtagagccatgggaagggctgtattcactccgagaccaggacattctgtgtagacacagaagaacaaacactaaggacaccttagagaccagtgcaagaagtgacattatggtgtgtgtcggggagagacagaaagataacttggctctagaaatggaatgaaataaaccctcctttaacacaggaagaaaaggagagagaggaggtgaaaaagagagaagcagtgataaaaagagtatacaaaaacaacttaggaggttaaacaagaaatcacaagattaggaataaacaacttggcagagccgaggaattcagtcatagctggtctt

SEQ ID NO: 730467 - DNA, 338 bp, Homo sapiens
gtggagcaagctctcaacgatctgttcccttttagttacaggaaacttgataatgaagatctccaccctggtcaagaacagaggaaagacctaagtaagtcttattatatttttaattatttaaaatatgctttcatttatgattgaagactattttacaagtttgtctgtttctcataaactatttaataccagaattataattgcctgccaatttgtctccatgtctgcttctcccacaaaacctagagctccttgaggataagaactatgtatatatcatatatctttgtatcaccagtgttttacatagtacctggccacacgttgagaagctt

SEQ ID NO: 730468 - DNA, 312 bp, Homo sapiens
gtggagcaagctctcaacgatctgttcccttttagttacaggaaacttgataatgaagatctccaccctggtcaagaacagaggaaagacctaagtaagtcttattatatttttaattatttaaaatatgctttcttgtataaggggggccgggtcatcgcgacggggcttttacatgaattggacgactgtaacaggaggatatccgtcgcgcgatgcgacgcagtgatcggttcgcctggcacaacattggagcttcgtcttgccgagagatatccggtgaggactagagatatattgcgtccagcagta

SEQ ID NO: 730469 - DNA, 1971 bp, Homo sapiens; identical to SEQ ID NO: 197315
  misc_feature (1409)..(1409): n is a, c, g, or t
  misc_feature (1625)..(1625): n is a, c, g, or t

SEQ ID NO: 730470 - DNA, 326 bp, Homo sapiens
gcactccctaaggtcaactgttttgagattggaaaagctcttaagcatagaagaggccaggcacagtggctcatgcctgtaatcccagcactttgggagactgaggcaggtgtaagccactgtgcctggcctcagattaatacattttaacctaacattccacctttaacaaataagctaccaacaatttagtatgatcctaaaggtatactattggaaaagtctagcatataaagtaacatcttttttttttgttcggagacacagtctcgctctatcccccaggatggagtgtagcgcgcaatctcggctcactgcaacctctg

SEQ ID NO: 730471 - DNA, 255 bp, Homo sapiens; identical to SEQ ID NO: 209222

SEQ ID NO: 730472 - DNA, 413 bp, Homo sapiens
gtggggggtgtataatgaaattactctgtttaggaggatgaactgatatttattttaacagcaacattgaggtatcacatttattacatggacctgagcttcaatcgtagtaaggaaaccagcccaggaaagtcgttccatcactagccagaagttacagggcaaaattatagcttaacttttggaaggcaaaatggagtctctgtcgcccaggctggagtgcagtggtgagatcttggctcactgcatcttctgcctcctgagttttagcagttctctgcctcagcctcccaagtagctgggactacagccacgcaccaccacgtctggctaatttttgtatttttagtagagacggggtttcaccatcttggctaggctggtcttgaactcctgacctcgtgatccacccg

SEQ ID NO: 730473 - DNA, 829 bp, Homo sapiens
ctgcccaaacctccctcactctccaaagtctcatttcaaatgttgcctttccctgaagcttctcccggaatgacccatctctccctcctcattctgatcatttcctctttgaattcccgtagtgttaggtatgccctcctcttccagcactgaatccagccttgcctcgcattagagtcatttgtacacctgaccttaatccccctgagggcagggatagtttgtgtttatcccaaagtcctgaaacaactagtacagaacctgagacacaggaaggccccagaattgcctgccgaatagaacagtgatagtgctgaatttggttcctcctttaacctgtgtgaccccagacgtttgttttctatgaagcctcaaaacatggttatgtttcctaatttacaacgaacacatggaaacccatgttttgaaaacgggggtggggaggatgaactgaaggcagcctcttcagccaagttccaaaggccaggtggcccactgtgaaccttgtttaaccacacagaacatatgaatagctacaacaagggatctaacagttaccagaatgttttcagaaaggtgacttcagaagtgccaagcttcaggaagacctggactgagaagggatcagacaactttaggaaagcaggtaccaaacagcccttttacagtttacacacaggccttggtgtcagaaaaatactggtttgagtactggttatgcatcagagatgccactctggacaagctccttatgctctctgggactctgctttctcatctaaaaaatggggatcacctgaggtcaggagtttgagaccagcctggccaa

SEQ ID NO: 730474 - DNA, 667 bp, Homo sapiens
gaggctgaggcaggagaatcatttgaacctgggaaacaatggttgcagtgagccgagatttgccactgcactccagcccgggagacagagtgagattccatctcaaaaaaataaaaaaaaaaaagctacttgggaaccatttgatgcattcaagtcttgctgttatgccctgttaggtgggtattaggcagtgtgcaatctaaggctaattttcccctctaatgaggcaagaccttgcttagtcctctacccaatgacctgtgaattctgaacaggcattgttcttggccctgtctgagtgtcaagcactattccaatgcattcagatggttctttccctagaagcaagtgattatgtcacacgtgtatgctgatgtactctgctacatactccaggggttcctctgcagatctccggggttctctctctgtgcaaaactctctctctggtacccttccttataagctgcagttaccttgttctttctggacttagctctgttacaaccaaggaagtcagctggtctcttgtcttagttctccttccctgtgtgatgacctgataaactctcaagtctgtaagctaagcaattgcagggctcacctcacgtttaccatctctcgaacactatcttttgtcacctgatgtctagtgtcttgaaaaaaa

SEQ ID NO: 730475 - DNA, 2724 bp, Homo sapiens; identical to SEQ ID NO: 412753

SEQ ID NO: 730476 - DNA, 412 bp, Homo sapiens; identical to SEQ ID NO: 395745

SEQ ID NO: 730477 - DNA, 656 bp, Homo sapiens
ttatgccatttcaagttatcttttagctcttctaataccttttcaactaattccatcagtagaatcacccaatgggggttttgttttcttgactggaccctgactaatacagtcccaaggaaagcaatctatagcctataccaaagacataaaagagagcaaaccataaaagaggaattgataataatgaagataaagtgaaaatctctaacatatttaatcaactttctagaagcatataatagactagatgatgacaatacagtatataaagagaaatggttcagcatttttcagaattactgaattctatcaattctcaaactcaggaagtccaatgaatcccaagcagaataaataacaatttctaaaaatccacacctaggcacatcctagggaagctgaaaatcacaaaacaattttaaaagcaatcagagagaaaatacaatacccctgtaaatgagctgcaattagcatgataacagactgatcaataggaatagtggaaactaaagacagtgcaacaacatcacaataggccaagagaaaaatactactggcataaaattctgtatacacagcagaataatcttttcagaatgagggtgaaataaagccattttcagacaaaaagaaagaaactgaatctgcacact

SEQ ID NO: 730478 - DNA, 1006 bp, Homo sapiens; identical to SEQ ID NO: 337544

SEQ ID NO: 730479 - DNA, 361 bp, Homo sapiens
taccattagtgcggaatgcctgcctgtgcgacctcgacagtctcagcgctggtttatatcatggccagccccttctccatcacctccaagacttatcctcctgatctcaccagtgtcttcatctgggagacactcatggcagcctatccttctcttcattctctcatattgatcatggggattcctagggtgaagcagacttgtcagaagatcctgtggaagacagtgtgtgctcggagatgctggggcccatgatctgggaagaaaagtgtggtcaggacactcttgggacgctcttttgatagctctctataagggagctgctttccatgtcttttaagattttccttcttttacacca

SEQ ID NO: 730480 - DNA, 279 bp, Homo sapiens
gttcactctagagtatccccatctatactgacgcggaggtaggattggtgctgtgggtgaaagagtatgatggggaagggacagacgaggtcagtaggtcagtatagataggtcagtatagatacagtatagataggtcagtatagataagtagtatagatagcgtcagtatagataggtcagtatagataggtcagtatagataggtcagtatagataggtagtatagataggtcagtatagatagagtatagataggtggtatagataggtcagtat

SEQ ID NO: 730481 - DNA, 778 bp, Homo sapiens; identical to SEQ ID NO: 360188

SEQ ID NO: 730482 - DNA, 348 bp, Homo sapiens
tcaaaagagctgctgcagaagaatccaattttcctgaacgaagttcttctgaagtctttcttgtagatgagactctaaaatgtgacatttcactgttacctgaaagagcaatattacagattttcttctacctcagtttaaaagatgtgataatatgtggtcaagttaatcatgcctggatgttgatgacacaactaaactcactgtggaatgctattgatttttcctcagtgaaaaatgtgattccagataaatatatagtgtctactttgcaaaggtggcgtttaaatgtgctgcgtttgaattttcgtggttgtcttctccgacccaaaactttcagatctgtca

SEQ ID NO: 730483 - DNA, 964 bp, Homo sapiens
  misc_feature (26)..(26): n is a, c, g, or t
ggtcaccctcttctcaaccctggcgnacgttagactctcttgaggagcctctcatttagagtctaatttaattgattcaggtagtgtattttttttaacgctctgaggttgattccaacaagctaccacagttgagaactactaggctgtagacagtgtttccaataaccattgaagatgtttggtttttgagcagaagtggaccgagacgtccctgaaaggggtgtatgactctgtgtgttggtctttcgccttagcaagagggatatcaagctggcagttgcctactattgctattatctgtccccaccgccaggccttctttctcattggtgaggaccaagctttctcttttcccggcatgctccgataccctctccctgaagacaggaggtcagtggaattgcctcattttgattggtggaatcatgatttacacagttgtagatgaagctggcatgagacttgatacaggactgccatctctaggtctgggacatgtgccccggagactggtggtctagaggctaactgtgagactgtgtgtgctttggctttgcccggtggggtgtgggagcttggagaccaggtgcttctgggactgtcctctctgcaggcctccaggatcatgtggtatgtcagcaccaggggcgtagccccacgggtcaactttgaggggggcctcttctctgggtatgcacctgacgggggctctttatgcctgaagagctcccacagttggcagagagaccctgtgccagtggagcacactctcctatctggcttggtgaagagctgtgtgcctccccaatggctccgagctccctccaaagatgattttggtctggtcgccggccttagaatccggccaaagagggccctggcccggtggaaaggcaacttggcccgggagggccaattttaggggccgttgcggaaagccgggtctcggaaggaacttttg

SEQ ID NO: 730484 - DNA, 318 bp, Homo sapiens
cgacgagcatagaatgtagagagaggaatgcatcacctacgcctccctaagaatggtagtactttcagtaacaatagggaggtcaagattataagggaaattaatgacatctgttttcaggtatcagtacctcaagagattaaacatgataattaaagtgagagccaaaagggttttgaaaaagttgggcaacatgatttgtgagtagtggagaggcatgtcctagttacgcagtgataaatagtcttgcatacagttcgtgctgttcaattctgctcacccatgggcatgttcggaagtttgtgttgaaacatgcat

SEQ ID NO: 730485 - DNA, 280 bp, Homo sapiens
cgaaggctttatgcccagcctgtccccttatttgagtgagttggaggtttgtgcaagattttatccaagtggaggtttttccatctgtgtagccacgggcatgtctccaggcacaacgccacgtgctagttcccttactggttcctgcagcctgatttccccccaccccaggctgctttctattttacgtggggataaggctctgaccttgggccgggggctctccaggggctcttcccttgctgtctacctaaggcaagctaactcctttcgtcccccg

SEQ ID NO: 730486 - DNA, 280 bp, Homo sapiens; identical to SEQ ID NO: 673252

SEQ ID NO: 730487 - DNA, 319 bp, Homo sapiens; identical to SEQ ID NO: 673255
  misc_feature (57)..(58): n is a, c, g, or t

SEQ ID NO: 730488 - DNA, 232 bp, Homo sapiens; identical to SEQ ID NO: 673258

SEQ ID NO: 730489 - DNA, 306 bp, Homo sapiens; identical to SEQ ID NO: 673260
  misc_feature (33)..(33): n is a, c, g, or t
  misc_feature (93)..(93): n is a, c, g, or t

SEQ ID NO: 730490 - DNA, 129 bp, Homo sapiens; identical to SEQ ID NO: 673262

SEQ ID NO: 730491 - DNA, 403 bp, Homo sapiens; identical to SEQ ID NO: 673264

SEQ ID NO: 730492 - DNA, 201 bp, Homo sapiens
ctaaatggctgttacctaaatggctgtacctaaatggcaactcgtgatcgccaaatccagcagccatttaggtaacagccatttaggtaacagccatttaggtaacagccatttaggtaacagccatttaggtaacagccatttaggtaacagaatctaggtgacagccatttaggttcagccatttattacacattatac

SEQ ID NO: 730493 - DNA, 396 bp, Homo sapiens; identical to SEQ ID NO: 673266

SEQ ID NO: 730494 - DNA, 317 bp, Homo sapiens
agatgcatacaccacatgaaacgtcctattatctgtaggctcattcatttctctaacagccatttaggtaacagccatttaggtaacagccatttaggtaacagccatttaggtaacagccatttaggtaacagccatttaggtaacagccatttaggtaacagccatttaggtaacagccatttaggtaacagccatttaggtaacagccatttaggtaacagccatttaggtaacagccatttaggtaacagccatttaggtaacagaatctaggtgacagccatttaggttcagccatttattacacattatac

SEQ ID NO: 730495 - DNA, 324 bp, Homo sapiens; identical to SEQ ID NO: 673268

SEQ ID NO: 730496 - DNA, 344 bp, Homo sapiens; identical to SEQ ID NO: 673269
  misc_feature (1)..(1): n is a, c, g, or t

SEQ ID NO: 730497 - DNA, 265 bp, Homo sapiens
  misc_feature (1)..(1): n is a, c, g, or t
ntcccaagagcacaagcaacagcgcaaaggagagaagccccggtctgcagtcatttaggtaacagccatgttaggtaacagccatttaggtgacagccatctaggtaacttccagtttaggtaacagccatttaggtaacagccatttaggtaacagccatttaggtaacagccatttaggtaacagccatttaggtaacagccatttaggtaacagaatctaggtgacagccatttaggttcagccatttattacacattatac

SEQ ID NO: 730498 - DNA, 347 bp, Homo sapiens; identical to SEQ ID NO: 673271

SEQ ID NO: 730499 - DNA, 268 bp, Homo sapiens
gagagacctctagaggagcctgttctgtaatcgataaaccccgatcaacctcaccacctcttgcacagccatgttaggtaacagccatttaggtgacagccatctaggtaacttccagtttaggtaacagccatttaggtaacagccatttaggtaacagccatttaggtaacagccatttaggtaacagccatttaggtaacagccatttaggtaacagaatctaggtgacagccatttaggttcagccatttattacacattatac

SEQ ID NO: 730500 - DNA, 577 bp, Homo sapiens
atgttagaagataagctaagtggacgtgattgtacgatacttgaataaactacgcttacacagaaaacatttctattgtgtttctatctacagtatttagcacagtgcctctaacattatagatactctctaaataggtgtagatcaaatagatgtgtttaacttatgaaatttgataaagatagcctgaaagtgtaggaatgttcttctcagttatagtttaagtagtcaggataacagccatttaggtaacagccatttaggtaacagccatttaggtaacagccatttaggtaacagccatttaggtaacagccatttaggtaacagccatttaggtaacagccatttaggtaacagccatttaggtaacagccatttaggtaacagccatttaggtaacagccatttaggtaacagccatttaggtaacagccatttaggtaacagccatttaggtaacagccatttaggtaacagccatttaggtaacagccatttaggtaacagccatttaggtaacagccatttaggtaacagccattaggtaacagccatttagggtacagcctgtgag

SEQ ID NO: 730501 - DNA, 498 bp, Homo sapiens
atgttagaagataagctaagtggacgtgattgtacgatacttgaataaactacgcttacacagaaaacatttctattgtgtttctatctacagtatttagcacagtgcctctaacattatagatactctctaaataggtgtagatcaaatagatgtgtttaacttatgaaatttgataaagatagcctgaaagtgtaggaatgttcttctcagttatagtttaagtagtcaggataacagccatttaggtaacagccatttaggtaacagccatttaggtaacagccatttaggtaacagccatttaggtaacagccatttaggtaacagccatttaggtaacagccatttaggtaacagccatttaggtaacagccatttaggtaacagccatttaggtaacagccatttaggtaacagccatttaggtaacagccatttaggtaacagaatctaggtgacagccatttaggttcagccatttattacacattatac

SEQ ID NO: 730502 - DNA, 737 bp, Homo sapiens
atgtaaaagacacatgtacacaggcaatgtatttctcttactttctttaaaaaacattttgttatttaagacaatctgtaacaaagtataaagaatgaatacatgttctgacagcaactggataccttgctagtagaatacaaaatggtagagccactctggtaaacaatttgacagtttcttacaatgttaaacatataattaccatcttactcagcaaaactattcctgagtatttccccactggaaatgaaaacatgttcacatgaagacttgtaattcactgttcagagcaactttattcacattagctgaaaactggaaacccaaatttccaacagtaatgtgaatggataaactgtggtatatctaaaaaatggaagaccgttcaataataaattaggaagaactaacctgatacatgcaacaatatgcatgaatctccaaaacattaggcaagagaaaaaagtcatatacccagccatgtgaataatcactgatgccagactccattgataggtaattctagaaaaggcaaactattgtgacagaaagtaaatcagtgtttgctaatggcctatggtaggaggaagggattgactgcacaggggtatgtgggaatttgggggtgatggaaatgttttgtattatgaatgtgatagttgctagaagactatatagttatcaaaactcatgattggatacttaaaatgggtgatttgctaaatgtaatttat

SEQ ID NO: 730503 - DNA, 400 bp, Homo sapiens
  misc_feature (164)..(164): n is a, c, g, or t
  misc_feature (171)..(171): n is a, c, g, or t
tagctgttccaggggatcccgcataagtggatgctccggagggaagagtgggggaaacaagaagagcgatggtgtgaaggaatcctcagagagcaccaacaccaccatcgaggatgaagacaccaaagtgcggaaacaggaaattataaaagtgacagagcagntgattgnagccataagcaatggagactaagagtcctacacgaagatgtgcgaccctggcatgacagcattcgaacctgaggccctggggaacctggtcgagggcctggacttccatcgattcaattttgaaaaccttgtgatcccggcacagcaagcccgatgacaacaaacaatcctgaatccccaaatccacctgatgggcgatgagtcagcctggattgcataccatccgcat

SEQ ID NO: 730504 - DNA, 433 bp, Homo sapiens
  misc_feature (197)..(197): n is a, c, g, or t
  misc_feature (204)..(204): n is a, c, g, or t
tagctgttccaggggatcccgcataagtggatgctccggagggaagagtgggggaaacaagaagagcgatggtgtgaagaaaagaaagtccagttccagcgttcagttaatggaatcctcagagagcaccaacaccaccatcgaggatgaagacaccaaagtgcggaaacaggaaattataaaagtgacagagcagntgattgnagccataagcaatggagactaagagtcctacacgaagatgtgcgaccctggcatgacagcattcgaacctgaggccctggggaacctggtcgagggcctggacttccatcgattcaattttgaaaaccttgtgatcccggcacagcaagcccgatgacaacaaacaatcctgaatccccaaatccacctgatgggcgatgagtcagcctggattgcataccatccgcat

SEQ ID NO: 730505 - DNA, 507 bp, Homo sapiens
  misc_feature (426)..(426): n is a, c, g, or t
tagtcgactcctagagcgatccccgtatctctaacattaaacaaacatacataagtaaacctttaattagtatacactcaaggtacatacattgttttcctttctccttctaaagcatggaagagattttttttttaaataagctgacaaaatatgaaaattaaaagaacacaaccgcatgcagaagtagcacagaggacttcctagaaattgtattctttctccagggagcaacaagaatcgttattcccaaaagggactctattcacttcacagcctggaaggtaatacctacctctgacagaacagaaactggcgtctggatcctagaatcacctagcagtagtcacaaatacctttttttttttttttggggtaataccccatttaaagaaatttatggttaccttgcaacaaggtaattcnttaaaaagaaaaagaaaagccccaccatccctattgttagagattcttttctctacctttaaaaccaaagggttctgcccc

SEQ ID NO: 730506 - DNA, 494 bp, Homo sapiens
atcaacagaaagttagttctttgagaagataaacaaaatcaacaaaacgttagtgaaactcagaaaaaaagaaaaaaagagactcaaatttgaaaaaatcataaacggaagaggatatgtcacaatggacaccatagaaatataaaggatcattagagagtactatgaacaacaatatgccaataaatttgaaaatttaaaggaaatgaataaattcctggacacatacaacctataaagattgaacccagaaggaaaagaaaacacaaatagaccaattacaagtcatgagagagaatcagtagtaaaaggtctttcaacaacaaaaaaatccaaaaccagacggctttactgctgaattctaccaaacctttaaagaagaattaataccaattctttccaaactatcccagaaaataaaagaggagggaattcttcctaattcattctacaaggccagcagaaccctgataccaaaactagtttgatcgaac

SEQ ID NO: 730507 - DNA, 1321 bp, Homo sapiens
gagatctgatggttttataaagaggagttcccctgcacaagctccctctcttgcctgccaccatgtaagaagtccctttggtcttcctttgtcttctgccgtgattgtgaggcctccccagccatgtggaacttataaaataataagatggctgatcctgcaaagaggcgcggtgacatcaacagtgactcagtctctatgatggtattagtaactggcagctgactctcctatttatcatcaagttatgttccaaataagactttcaagtctgagaaaaatgacaaatcccttccaggcatggttcaagttaaagctgaaactgtgtcttcgtttcagctcaagagaggttttgattgtgtcgtggcttttccttgtgtattggttgaggaactgtgccttggaggggcggggagtcttgagaatgggtcaactgatggagggggagtggaagacattggttgcccaagaaaatatgtcaacatctgtccatcactgcaactccggcctgattatcattttttctgcttctgtaagcaccaatgagacaatgccactgaaccacattctttgttgcctgcagtatttcccaccactgcgccacctctgatatgctaatgaggaagcccagggttttgtgtggctgaaaagcctttcaggcacaatcagtgggtcaacaatctcaactctgtacagcggctcagcctgctctgtgagaggctcctctttcggaggggtccttcctcacaccttttctgtgaagtgcgtctgtgcttaaggaggcaattaacatctggctgttgtccctggagaaattgacgaacatcaaagaataaatcataccttgaaactgccagtggacatgactgtccggtcactgtggggggaagccctaaccaatggtctgaatctaaaaatgacccagtggcaccggtttgtagtaaaactttgaagatagaactccatgcaaattctgactccatagtgctggttcttgatgtaaatctcccaatgtaactgtcaaggtttaaaaatatcttacgtaggtgttcagaatcataaggtcatagaattataaaatgttaaccggcagaagtattttcatctttgtcatacgaaaaagagtaatttgctcataataagccttcaatatttatgtattggattgcaattaacaggaatcaaaggaatcttataaggatcatttatctagaataatctctattttctagaattacttaatgatcattgtctttattcagcctaagtaacattgaaatttttcttcattcaaataaattcatactcatgaagcctttcc

SEQ ID NO: 730508 - DNA, 1457 bp, Homo sapiens
gagatctgatggttttataaagaggagttcccctgcacaagctccctctcttgcctgccaccatgtaagaagtccctttggtcttcctttgtcttctgccgtgattgtgaggcctccccagccatgtggaactgtactcaaactgtggcccaagtgctggtagcattagcatcaactggaagcttgttagaaatgtagaatctcagatctcaccccagaatggactatggactcagaatctgcattttaataagattcacaattcacagtataaaataataagatggctgatcctgcaaagaggcgcggtgacatcaacagtgactcagtctctatgatggtattagtaactggcagctgactctcctatttatcatcaagttatgttccaaataagactttcaagtctgagaaaaatgacaaatcccttccaggcatggttcaagttaaagctgaaactgtgtcttcgtttcagctcaagagaggttttgattgtgtcgtggcttttccttgtgtattggttgaggaactgtgccttggaggggcggggagtcttgagaatgggtcaactgatggagggggagtggaagacattggttgcccaagaaaatatgtcaacatctgtccatcactgcaactccggcctgattatcattttttctgcttctgtaagcaccaatgagacaatgccactgaaccacattctttgttgcctgcagtatttcccaccactgcgccacctctgatatgctaatgaggaagcccagggttttgtgtggctgaaaagcctttcaggcacaatcagtgggtcaacaatctcaactctgtacagcggctcagcctgctctgtgagaggctcctctttcggaggggtccttcctcacaccttttctgtgaagtgcgtctgtgcttaaggaggcaattaacatctggctgttgtccctggagaaattgacgaacatcaaagaataaatcataccttgaaactgccagtggacatgactgtccggtcactgtggggggaagccctaaccaatggtctgaatctaaaaatgacccagtggcaccggtttgtagtaaaactttgaagatagaactccatgcaaattctgactccatagtgctggttcttgatgtaaatctcccaatgtaactgtcaaggtttaaaaatatcttacgtaggtgttcagaatcataaggtcatagaattataaaatgttaaccggcagaagtattttcatctttgtcatacgaaaaagagtaatttgctcataataagccttcaatatttatgtattggattgcaattaacaggaatcaaaggaatcttataaggatcatttatctagaataatctctattttctagaattacttaatgatcattgtctttattcagcctaagtaacattgaaatttttcttcattcaaataaattcatactcatgaagcctttcc

SEQ ID NO: 730509 - DNA, 447 bp, Homo sapiens
gtcggtacttctcgcggctgtactctcggaccctgtctcaaacagcaaaagagtagatctcctttggttctaacaagaggggatgtgagattcaagatcagagcccactgtccactctgcacagaccacatgctcaggtgcacccaggggctgggcaggaagccagatgaaggaaagaggttggctgtgagactgtacatagagatgctgatggtgttaactgcaggatacacagcccatttgaggctggcactctaagtgcctcagctgatggtggcaggtgaggatgtgtgcccagtgtcaccagaacttgccctctttagagacaagttagaagttctgacttttatataaaatctcctgatttaaaaatgttgctaacgaatcccaaattaaagaaaaatactgtgcaagccaaagagcacagtctgcattttgtttgggctc

SEQ ID NO: 730510 - DNA, 330 bp, Homo sapiens
atttattgtctgtctcctctatcagaatataagctccttgagggcaaggatctttgtcttattctctgatgcatcttaagcacctggcacatagtaggcgctcaataaaagtaactggatgaatgaatacatgaacacattaggtatactgtacagcatactgttcaaggaaatgctatataactgtatctttttgaaaatgttacctgttgccctacaagataacttatccaagttagtgacaaattatttttcttttctcttttatctgcttagtagttcagacattctcatttttagacatttctactagtggtctgaggctatggg

SEQ ID NO: 730511 - DNA, 257 bp, Homo sapiens
  misc_feature (92)..(92): n is a, c, g, or t
  misc_feature (102)..(102): n is a, c, g, or t
ctgctatcaaccaacctttttcagcacggtagtgaaatatttcaaaccatattcaaacatctaatatagatttataataaaacaggaaaaanggcttgccanattaaagtgctatgagctattacattcaagaggttatcttgattttattttttgaggtggagtctcgctctgtcgcccaggctggagtgcagtggcatgatctcagctcactgcaacctccactcctgggttcaagcaattctccctgcctcagc

SEQ ID NO: 730512 - DNA, 370 bp, Homo sapiens
tcatcaacaaccttccttacacatcagataagctttgaaatactttatcggaaaaacagggagaagaggagcaaggtctgcagtcttgagtactgagtgggagctccaccttccactacaagtctcctggaggctgttcatgaacaattactgttatgttaatttcaggtatttgttttttttttttgttttttgagacggagtctcgctctgtcgcccaggctggagtgcaatggcacgatctcggctcactgagacctctgcctttcgggttcaagcgattctcctacctcagcctcccacatagctaggattatgattacaggcatgcgccatcacgcccagctaatttttgtatttttagtacaga

SEQ ID NO: 730513 - DNA, 339 bp, Homo sapiens
gatactacttcaacacaccaaatcaactgcatttctatacagtaacaatgaacaatctgcaaaggaaataaaacaattccatttacaatagcatcaaaaagaataaaatccttagggatagacctaatcaaggaagggaaaaatctgtatactaaaacaataaaacactgctgaaaaaaattaaagaagacaggctgggcgtggtggctcacgcctataatcctataatcccagcactttgggaggccaaggcaggcagatcacttgaggttaggtgttcaagatcagcctgggcaacatggcgaagccctgtctctactaaaaatacaaaattagctg

SEQ ID NO: 730514 - DNA, 92 bp, Homo sapiens
gccagcaccaaccagacatctatgtacctctgtgccagcagtttcctaacaccggggagctgttttttggagaaggctctaggctgaccgta

SEQ ID NO: 730515 - DNA, 81 bp, Homo sapiens
gacagcagcttctacatctgcagtgctagtccgacgaacaccggggagctgttttttggagaaggctctaggctgaccgta

SEQ ID NO: 730516 - DNA, 603 bp, Homo sapiens
ccctcccttccttccttccttcctcccttcctccttccttccctccctccattctttcctttcttcctttcttcttttctttttctttgtctctcatgctctctctttttctttcctttttgttctacttttttaaatagaccacactgcactgaaatctacattacttaccaaaacctctggagctgcttctgtcttgtaggcagggagctcgtcctgtagcccttaggtcctcccagcctcctcctcctctgatttgtgggtgccactggggcagctgctgagtctcagtggttcctagtcatcaccaagttctgcccacctagatggtttgcacctgtccttaccagaaccctgcactgtctagatgactgaggctgcttctgcctaactgatctgctatctgtgttctgggggcaccccagggttagaggtaaatggcacaggcattgaaatctccaactgctctgactccaggttggtgcacttcaatgccaagtactaaccacacaataacaggatgccaccaaaaccttggtatggggctgctgcatcctaattaaaaagtaatagatgttattttttaggttctaggtttacaga

SEQ ID NO: 730517 - DNA, 572 bp, Homo sapiens
tctttttctttgtctctcatgctctctctttttctttcctttttgttctacttttttaaatagaccacactgcactgaaatctacattacttaccaaaacctctggagctgcttctgtcttgtaggcagggagctcgtcctgtagcccttaggtcctcccagcctcctcctcctctgatttgtgggtgccactggggcagctgctgagtctcagtggttcctagtcatcaccaagttctgcccacctagatggtttgcacctgtccttaccagaaccctgcactgtctagatgactgaggctgcttctgcctaactgatctgctatctgtgttctgggggcaccccagggttagaggtaaatggcacaggcattgaaatctccaactgctctgactccaggttggtgcacttcaatgccaagtactaaccacacaataacaggatgccaccaaaaccttggtatggggctgctgcatcctaattaaaaagtaatagatgttattttttaggttctaggtttacagaaaaaatggagtggatagtacagagagttctcctaggctcccctgtc

SEQ ID NO: 730518 - DNA, 595 bp, Homo sapiens
ccctcccttccttccttccttcctcccttcctccttccttccctccctccattctttcctttcttcctttcttcttttctttttctttgtctctcatgctctctctttttctttcctttttgttctacttttttaaatagaccacactgcactgaaatctacattacttacctaggtcctcccagcctcctcctcctctgatttgtgggtgccactggggcagctgctgagtctcagtggttcctagtcatcaccaagttctgcccacctagatggtttgcacctgtccttaccagaaccctgcactgtctagatgactgaggctgcttctgcctaactgatctgctatctgtgttctgggggcaccccagggttagaggtaaatggcacaggcattgaaatctccaactgctctgactccaggttggtgcacttcaatgccaagtactaaccacacaataacaggatgccaccaaaaccttggtatggggctgctgcatcctaattaaaaagtaatagatgttattttttaggttctaggtttacagaaaaaatggagtggatagtacagagagttctcctaggctcccctgtc

SEQ ID NO: 730519 - DNA, 340 bp, Homo sapiens; identical to SEQ ID NO: 728562

SEQ ID NO: 730520 - DNA, 333 bp, Homo sapiens; identical to SEQ ID NO: 728563

SEQ ID NO: 730521 - DNA, 578 bp, Homo sapiens
  misc_feature (255)..(255): n is a, c, g, or t
  misc_feature (367)..(367): n is a, c, g, or t
  misc_feature (527)..(527): n is a, c, g, or t
  misc_feature (536)..(536): n is a, c, g, or t
  misc_feature (563)..(563): n is a, c, g, or t
  misc_feature (572)..(573): n is a, c, g, or t
  misc_feature (575)..(575): n is a, c, g, or t
ccggttgggcgccgcgcggtgaggttgtctagtccacgctcggagccatgccgtccaagggtccgctgcagtcggtgcaggtcttcggacgcaagaagacagcgacagctgtggcgcactgcaaacgcggcaatggtctcatcaaggtgaacgggcggcccctggagatgattgagccgcgcacgctacagtacaagctgctggaagccagttctgcttctcggccaaggagcgatttgctggtgtagacatccntgtccgtgtaaagggtggtggtcacgttgcccagatttatgctatccgtcagtccatctccaaagccctggtggcctattaccagaaatatgtggatgaggcttccaagaangagcaatcaaagacatcctcatccagtatgaccggaccctgctggtagctgaccctcgtcgctgcgagtccaaaaagtttggaggccctggtgcccgcgctcgctaccagaaatcctaccgataagcccatcgtgactcaaaactcacttgtataataanacagttttntgagggatttcatcacgtttcaagaanagaaaagannanaag

SEQ ID NO: 730522 - DNA, 593 bp, Homo sapiens
  misc_feature (255)..(255): n is a, c, g, or t
  misc_feature (542)..(542): n is a, c, g, or t
  misc_feature (551)..(551): n is a, c, g, or t
  misc_feature (578)..(578): n is a, c, g, or t
  misc_feature (587)..(588): n is a, c, g, or t
  misc_feature (590)..(590): n is a, c, g, or t
ccggttgggcgccgcgcggtgaggttgtctagtccacgctcggagccatgccgtccaagggtccgctgcagtcggtgcaggtcttcggacgcaagaagacagcgacagctgtggcgcactgcaaacgcggcaatggtctcatcaaggtgaacgggcggcccctggagatgattgagccgcgcacgctacagtacaagctgctggaagccagttctgcttctcggccaaggagcgatttgctggtgtagacatccntgtccgtgtaaagggtggtggtcacgttgcccagatttatgctatccgtcagtccatctccaaagccctggtggcctattaccagaacatatgtgtgccatgacggtcttccacagcaacgggagcatcaaggaggatcgatgcctcatccagtatgaccggaccctgctggtagctgaccctcgtcgctgcgagtccaaaaagtttggaggccctggtgcccgcgctcgctaccagaaatcctaccgataagcccatcgtgactcaaaactcacttgtataataanacagttttntgagggatttcatcacgtttcaagaanagaaaagannanaag

SEQ ID NO: 730523 - DNA, 638 bp, Homo sapiens
actccagcctgggtgacaggtgagactccatctcagaaacaaacaaacaaacaaaaactctccagaaagcaatacagagaacaagcaaatggaaaatataaaaggttaaaagacggggttaaaataaagactgaagtcctagaaggaaagaaaaaagaaaataaaggagagccaaagtgcttagagacctaagagctgagaatttttgaagctaagaaatgaaaccacagttatgggaagcacaacatataccaaacagaataaataaattcatgcacagtcatgttatagtaaaactgcaaaacaccaaaagagaagatcttaaaggaccaaagaaaagatacaccacctacaaaaaaaccacaatcaataagaaagatagatttctcactgctatattagaagctggaagaagagggcatactatcttcaatgtgataacctggaatgatcaacctggaattttatgtccagagaaactatctttcaaggatgatggtgaaatacaaagacatttcagataagcaaaatagaaactgcctccaacagactttcacttaaggaaattctactttaggaagaagaaaaatggtgccagaaaggaagtctgagatacaggaaggaacggtgagcaaaga

SEQ ID NO: 730524 - DNA, 170 bp, Homo sapiens
cggatgttatcgcccaacacagttgccaggctgtttaacagtcatttttgatatgggttaacttggttatttcagatttgccttgactatccttatcaagaaatctgagtggaatttagacaggaaaagagatttcttaattctgactccagtgttggggataacatcac

SEQ ID NO: 730525 - DNA, 1049 bp, Homo sapiens
ataggtaggtaacttcatcaaatgtacataatctgtatcaggctagtccacctctgaaaatctaaggaaaggatttaaaggaagagccaagcttgtgcctaaagatgtttactgtaacctggtctctcagaaaaggtagaaacagtctaaatagccagaaataggggaatagtgagcacattcaggtgacaaaactcctagaactcatgtcacatagaaatatgtaatgctgtcattctaatctggaataattctggtataaaatatatataaatgttacttaaaatcaagcatgtgaggctggacatgttggtgcacacttgtagtcctagctactcgagttcttggcactcagaaattcgagaccagtctgagtcgatggtgaaataggtaggtatatttctctcccactggatcacatctccttgaagacagcaaccacagttcgtccgagtgtacagagtagcaaccacagttcgtccgagtgtacagagcagcaaacactgttcactgttgcctttcatttctctccctctaaagattctgaacaataataccctgtcaattagcaaacttttacctggagacagaaggcttatgcaaccagtgcacttaagtactggtcataccttgctaaagactttcttaagacttaaacaaaaattttggggggaagaagaggaggatatgcttcatgtttataaactaaccaaagacagatttttaattttttaaaaaagttatgtcttaaaagcttgctttcattatttcattcaaaaaaaccatggtgcttttaatataaaaatacagaagcataatttctgcatatgtcaagtctaacctaatcataacttgccaatctgctgattttaatgtaatcctaaggatgctagacaacaatatgcttgcttgattcacctgacactatttacataaaataaaagcattttaacaatacatcgagatgcaaatctttctggctctgattggtgccctttctccctcttaacaaaaagtggcacacacacacaaaagagcctccaacttat

SEQ ID NO: 730526 - DNA, 575 bp, Homo sapiens
cacattttctatggtatttatttgggtaggtatatttctctcccactggatcacatctccttgaagacagcaaccacagttcgtccgagtgtacagagtagcaaccacagttcgtccgagtgtacagagcagcaaacactgttcactgttgcctttcatttctctccctctaaagattctgaacaataataccctgtcaattagcaaacttttacctggagacagaaggcttatgcaaccagtgcacttaagtactggtcataccttgctaaagactttcttaagacttaaacaaaaattttggggggaagaagaggaggatatgcttcatgtttataaactaaccaaagacagattttcaaccccaccactctactgaaaactgtacctgtcacgactacgaagtttatttcttatttgacctattagctgtgtaaggcacaaataggtgcttccttaagtgaaaaactttctgctttggttactaggatacaagattgctggtttaactacctacttggattcatagtctctataatggatcttccttattacacctacctatttcacaatcg

SEQ ID NO: 730527 - DNA, 684 bp, Homo sapiens
cacattttctatggtatttatttgggtaggtatatttctctcccactggatcacatctccttgaagacagcaaccacagttcgtccgagtgtacagagtagcaaccacagttcgtccgagtgtacagagcagcaaacactgttcactgttgcctttcatttctctccctctaaagattctgaacaataataccctgtcaattagcaaacttttacctggagacagaaggcttatgcaaccagtgcacttaagtactggtcataccttgctaaagactttcttaagacttaaacaaaaattttggggggaagaagaggaggatatgcttcatgtttataaactaaccaaagacagatttttaattttttaaaaaagttatgtcttaaaagcttgctttcattatttcattcaaaaaaaccatggtgcttttaatataaaaatacagaagcataatttctgcatatgtcaagtctaacctaatcataacttgccaatctgctgattttaatgtaatcctaaggatgctagacaacaatatgcttgcttgattcacctgacactatttacataaaataaaagcattttaacaatacatcgagatgcaaatctttctggctctgattggtgccctttctccctcttaacaaaaagtggcacacacacacaaaagagcctccaacttat

SEQ ID NO: 730528 - DNA, 263 bp, Homo sapiens
ctggctgcatttgtttcaaaaggaggcctctgtaactatgattcaattatctctatagttgatggaactgatatgagactgcaaaggaatcaagaggactgaattatactaaatgaggctagtaaaaatcagccacttattcacaggaattagaaaatcaagacatctgaaagggcagcagtatcaagtgagttgtgttctatgtgggaggcttataaatgtgtgaaaacaagaaggagctagtggagagattggagatattg

SEQ ID NO: 730529 - DNA, 289 bp, Homo sapiens
tatccacaatcttccgctcccaagatgtgacctctccctctctgtgtcctttctctccatcagtatctcctggctatggtcatagcgtatttcagccgggccggcctcccctcctggcaataccaacgcattcatttcttcctggctctgtgagtggtttgctgcctcctatccgtcaatatccaatgccctgggacagcgggggaagtgggattccagcctttcatttattctttcacctatttgtcctctttactctgtgtacaaaaaagacaggattatagtctcg

SEQ ID NO: 730530 - DNA, 187 bp, Homo sapiens
ctcagccggtaccattgctcaccgctcctgggctgtgcacaaacccactcacgcacacagcactcagtaagccgggactgacccactcagacacgcacacaggcgcacatcacacacaggctcagccccccaaacccagacccaggagctggagcgtacgggtccacgtggctagaaaatgcaggtt

SEQ ID NO: 730531 - DNA, 619 bp, Homo sapiens
agacggagggctggggctgacgtcccccgtgcagtgtgactcgtgcagacggagggctggggctgacgtcccccatgcagtgtgactcgtgcagacgaagggctggggctgacgttccccgtgcagtgtgactcgtgcagacggagggctggggctgacgttccccgtgcagtgtgacacgtgtccctggcctctcaagagagacaacggcacaggagggtgggtagaagcctcggaggctctgggtgaggaaccctgagccctgtgtgtctcctgcctgggtcccctggactccctcccagggtgaagagccaaaggcccagttctctccctagtcccagcttgggtttgtggaaatgaccagtgctgactcccaggcagaccgtggtgttgaccccactggatgtgtggtatgtaggcacggggtggcaccgtcacctgcccctcacagacacactggcggcctgtgcacaaacccactcacgcacacagcactcagtaagccgggactgacccactcagacacgcacacaggcgcacatcacacacaggctcagccccccaaacccagacccaggagctggagcgtacgggtccacgtggctagaaaatgcaggtt

SEQ ID NO: 730532 - DNA, 230 bp, Homo sapiens
caccgctcccttgagtaattcataaaatccactctttaacctctgaatcatcccttcatttcttgctctaagtaaaatctagctccctgaggatgccttttcctttcgcagccatctcaaatgataggtgtttcctcttttctcctccacacacttcatatcactgtacctactggagatgtggggaagaaatcttccctgctctggctgagcgtgggcaatcctgtaat

SEQ ID NO: 730533 - DNA, 217 bp, Homo sapiens
tacaaccggccaagcgatcgctgggtgtttggctgttgcattagatgatcgctgggtgtttggctgttgcattagatgatcgctgggtgtttggctgttgcattagatgatcgctgggtgtttggctgttgccttagataatcacttgtctgtttggctgttgcattagatgatcactgggtgtttggctgttgcattagatgatctccttggcgtt

SEQ ID NO: 730534 - DNA, 423 bp, Homo sapiens
cctaagcaaagagaacaaagctgacttcaaactatactacagggctacagtaattaaaacagcatggtgctggtacaaaaacagggacataaaccaatagaacagaacagagagcctattttaaaaatcaggggttttaaaatcgtaggccacacacctatgataacctgatctttgacaaagctgacaaaaacaagcaatggggaaaagactccctattcagtaagtggttctgggataactggctagccataagcagaagactgaagctacatagtacccctcctttacatcatatacaaaaatcaactcaagatgcgttaaagacttaaacgtaaaactatgaaaaccctggaagacaacctaagcagtaccatcctggacacaggaatgggcagatttcatgacaaagacaccaaaagc

SEQ ID NO: 730535 - DNA, 2264 bp, Homo sapiens; identical to SEQ ID NO: 187544

SEQ ID NO: 730536 - DNA, 2174 bp, Homo sapiens; identical to SEQ ID NO: 187545

SEQ ID NO: 730537 - DNA, 329 bp, Homo sapiens
  misc_feature (57)..(57): n is a, c, g, or t
  misc_feature (70)..(70): n is a, c, g, or t
agcaactgctccttcgcagctcctaaatagctaagattacaggcgctgccaccacanccggctaattttngtattttagtagagacgggatttcaccatgtggtcagactggtctcgatctcctgacctcaggtgatccgcccacctcgaccttccaaagagctgggattacagacgtgagccactgtgcccagcccgagaccctgtctcttaaaaaaaatccatctccacttctggttgactgtgttactcagtctctgtctgcttcagtttaattttcgtacttaataatggtattttcttgcagagtgtttgtaaagaataaatat

SEQ ID NO: 730538 - DNA, 477 bp, Homo sapiens
cctgcttctgatgaaagctctggtatcgagactttagtggaggagctctgctccagactgaaagaccttcagagtaagcaagaagagaagattcacaaaaagttagaggggtctccctctccagaggcagaagcaggaagcgcttcctgcttctgccaccaggaataagggaaaagacgagcaggaggctctcaagagggatccaagagaagaggctgcttttttgacctctgactcatgtgtctgccgcaggggttttgaacctaaattgccaccgaattatagcaaaccggcagctcaaacatttaagcttcaaaaggagctaaaaacaaaggttctttccttttttgagatggggaaattaaagacaggaaggtcagtgtcgctgtgaatcagggccaagaccagcacaaacccccatttctcagttcctgccgcttccagagaacactgcccttctccaccagcctcttcagc

SEQ ID NO: 730539 - DNA, 532 bp, Homo sapiens
ccaacgctgctcacagaaactgtgagctaataaatgttgttgtgagttggtaagttcaggagtaatttgttacacagcattagataacacatacaacaagtaaagcactaagaatagcacctggcacacagcaggcattgaaatagctgctgaatgaggtggggtataaattaataactctataagtaatgacctctccaccagatctgaacaactcccaacattaggaccagcctgcctggctgcttccaccctagttagattttcagcctctctacgctgctacggtagcctctaactggtctccagccttctcctcactcctcatccccaatcttctcttacataccgtgggtaagtaaatctctcccaaatcctcctgtccatagctttgttggtgcctcctaaaaccagcaacatcaaagccaaaaccataactcagcatagagggctctcccaacaccacccccaatccctgcctagccttaagcagaagctgagcctaagaatctacttttgtgagcagcgttgg

SEQ ID NO: 730540 - DNA, 605 bp, Homo sapiens
ccaacgctgctcacagaaactgtgagctaataaatgttgttgtgagttggtaagttcaggagtaatttgttacacagcattagataacacatacaacaagtaaagcactaagaatagcacctggcacacagcaggcattgaaatagctgctgaatgagtaaataaaaaggaaaacagaacattaaattctaaagtgatggcttactgctttgaatctctttgcaattaagggtggggtataaattaataactctataagtaatgacctctccaccagatctgaacaactcccaacattaggaccagcctgcctggctgcttccaccctagttagattttcagcctctctacgctgctacggtagcctctaactggtctccagccttctcctcactcctcatccccaatcttctcttacataccgtgggtaagtaaatctctcccaaatcctcctgtccatagctttgttggtgcctcctaaaaccagcaacatcaaagccaaaaccataactcagcatagagggctctcccaacaccacccccaatccctgcctagccttaagcagaagctgagcctaagaatctacttttgtgagcagcgttgg

SEQ ID NO: 730541 - DNA, 472 bp, Homo sapiens
gagccggcagcccctctccgtttccttagacacttactgatgctgctcctcccagcctgatgagtgacggatgaagatattagatttctattatccctaagtctctcgtttgtttcctgaggcaagtctacataaggccgggttcccttgtttccaaggcccgcctatcgtgtttgcactgactgagctcctccctggtgggcccctagaagctgttgtacttatcaagtattcttcagccctctattcttttacctactcaggaaattgccctcttattatcaagaagacctcatcaaacaagtttcttatctgactcctctctaacgagaaacccataaacctccagacaggcaccaccggacaggcagcctggtgtggggacctgggagtcccagacagaggttttcagtcctagctctaccacttgctagcaggagaagtttgctatcctagttgggttcttcctgaa

SEQ ID NO: 730542 - DNA, 414 bp, Homo sapiens; identical to SEQ ID NO: 214182
  misc_feature (359)..(359): n is a, c, g, or t
  misc_feature (361)..(361): n is a, c, g, or t

SEQ ID NO: 730543 - DNA, 891 bp, Homo sapiens
tggccccagctgagtgcctcctagcactgaggaaagcagaaccaagctttgcaacaatgaactctccttgctggaagagaccgcccacctctaacagaattttgtagctggaggaaacttcagacacaagtcctgttacagaagaggaaactggcacagagaggaaatggtgcttgcataaggtctctggacagagtcttgccctgttgcccaggctggagtatagtagtgcagtggtgtgatcatagctcactgtaacttcgaccacctgggctcaaacaatccttcttcctctgcctcccaagtagctgggactacagagcaggacccaggatgcaagaccctaggcatccccaaggccttccactgtccccaggccttccaaagagacagcggcaggaccgcacaatctacaactggaaacagcaggaagtgctagaaaatcactttaaggaggaacagtacccagactatgacacacgacaagagctggcggagatgctcaatctcagggagtaccaagtgcaggtgtggttcaagaatcgccgggccaaacgctctcgggagcggtggttccagaagcagctccagcagctccagaagcatcctcagcagcagcatcctcagcagcagcatccccagcagcagctccagcagcagcagccccagcagcagccccagcagcagcagccccagcagcagccacagcagcagcagccccagcagcagcagctccaccagcagccccagtagcagctctagcagcagcagcagcagccccagcagcagcaactccagtagcagctccagcagcagcagccccagcagtagctccagcagcagcagcagcagccccagtagcagctccagcagccccagtagcagctccag

SEQ ID NO: 730544 - DNA, 1015 bp, Homo sapiens
gcctccctgcctgtcgagtctgcacacgggtttcacgccctcccctgtgttctggccaggagactttgcgttcggttggaattgttacagagttcagctggaggtttccttctccctgtggccttttcccagttcctctggcagccctcctcaaggacccctgtgagataagtcagaggtgactttcctggggacccagagaacccacaaggcttttcccactgcttactgtattttgctcggctctctaaattgaatcaattgcaggtaagtcagggatttcttcttggtttggatccactgctggtgagcagacagagtcttgccctgttgcccaggctggagtatagtagtgcagtggtgtgatcatagctcactgtaacttcgaccacctgggctcaaacaatccttcttcctctgcctcccaagtagctgggactacagagcaggacccaggatgcaagaccctaggcatccccaaggccttccactgtccccaggccttccaaagagacagcggcaggaccgcacaatctacaactggaaacagcaggaagtgctagaaaatcactttaaggaggaacagtacccagactatgacacacgacaagagctggcggagatgctcaatctcagggagtaccaagtgcaggtgtggttcaagaatcgccgggccaaacgctctcgggagcggtggttccagaagcagctccagcagctccagaagcatcctcagcagcagcatcctcagcagcagcatccccagcagcagctccagcagcagcagccccagcagcagccccagcagcagcagccccagcagcagccacagcagcagcagccccagcagcagcagctccaccagcagccccagtagcagctctagcagcagcagcagcagccccagcagcagcaactccagtagcagctccagcagcagcagccccagcagtagctccagcagcagcagcagcagccccagtagcagctccagcagccccagtagcagctccag

SEQ ID NO: 730545 - DNA, 889 bp, Homo sapiens
tctgttttctggttttggctgtgccataaacgattatttatgaaaactgcaatagtcatcatttaaagttatggaactgtgtccggaattggtgggttcttggtctcactgacttcaagaatgaagccgcggacccttgcggtaagtcagggatttcttcttggtttggatccactgctggtgagcagacagagtcttgccctgttgcccaggctggagtatagtagtgcagtggtgtgatcatagctcactgtaacttcgaccacctgggctcaaacaatccttcttcctctgcctcccaagtagctgggactacagagcaggacccaggatgcaagaccctaggcatccccaaggccttccactgtccccaggccttccaaagagacagcggcaggaccgcacaatctacaactggaaacagcaggaagtgctagaaaatcactttaaggaggaacagtacccagactatgacacacgacaagagctggcggagatgctcaatctcagggagtaccaagtgcaggtgtggttcaagaatcgccgggccaaacgctctcgggagcggtggttccagaagcagctccagcagctccagaagcatcctcagcagcagcatcctcagcagcagcatccccagcagcagctccagcagcagcagccccagcagcagccccagcagcagcagccccagcagcagccacagcagcagcagccccagcagcagcagctccaccagcagccccagtagcagctctagcagcagcagcagcagccccagcagcagcaactccagtagcagctccagcagcagcagccccagcagtagctccagcagcagcagcagcagccccagtagcagctccagcagccccagtagcagctccag

SEQ ID NO: 730546 - DNA, 968 bp, Homo sapiens
gcctccctgcctgtcgagtctgcacacgggtttcacgccctcccctgtgttctggccaggagactttgcgttcggttggaattgttacagagttcagctggaggtttccttctccctgtggccttttcccagttcctctggcagccctcctcaaggacccctgtgagataagtcagaggtgactttcctggggacccagagaacccacaaggcttttcccactgcttactgtattttgctcggctctctaaattgaatcaattgcagacagagtcttgccctgttgcccaggctggagtatagtagtgcagtggtgtgatcatagctcactgtaacttcgaccacctgggctcaaacaatccttcttcctctgcctcccaagtagctgggactacagagcaggacccaggatgcaagaccctaggcatccccaaggccttccactgtccccaggccttccaaagagacagcggcaggaccgcacaatctacaactggaaacagcaggaagtgctagaaaatcactttaaggaggaacagtacccagactatgacacacgacaagagctggcggagatgctcaatctcagggagtaccaagtgcaggtgtggttcaagaatcgccgggccaaacgctctcgggagcggtggttccagaagcagctccagcagctccagaagcatcctcagcagcagcatcctcagcagcagcatccccagcagcagctccagcagcagcagccccagcagcagccccagcagcagcagccccagcagcagccacagcagcagcagccccagcagcagcagctccaccagcagccccagtagcagctctagcagcagcagcagcagccccagcagcagcaactccagtagcagctccagcagcagcagccccagcagtagctccagcagcagcagcagcagccccagtagcagctccagcagccccagtagcagctccag

SEQ ID NO: 730547 - DNA, 418 bp, Homo sapiens; identical to SEQ ID NO: 209747

SEQ ID NO: 730548 - DNA, 1444 bp, Homo sapiens
ggcaagatttatgcaactggaggtattgtcagcagtgaagggcccgcgctgggtaacatggaggcctacgagcccacaaccaacacatggaccctcctcccccacatgccctgccctgtgttcagacacggctgcgtcgtgataaagaaatatattcaaagcggctgacatcagcagaaagcccacgataagactgtggacaagtctggtgaggcaagtgccacgcaatgataattttccagcgacaccaacaagaggccaacaaaacacaatcaaggaactcactgcgctcaacatgttgaatattctctacattgaatgtagaaaatcatcctcgcctttggatgaaacggaggcaccgcgcttggagccgcaggaaccacgatcccgccatggggctggctgcctcctgaacaggggcgctcgctctgccaggtgcaatagagtttcacgtatttttcaactgggagagagaagctgttttttccttcctgcagagcaagcttgatccctaaacaaccatagatcagttatcttatgacaacattaggcatcaggctctcttggaataagatcaaagtgtccttatcactttgattcctactttgttttttaaccgatctacactttcagtggccgacagaaaacgagggacaatactgtgcatcacaaggcctaggaggctgctggtccccactggggctgaagagaagcccagctgcccacgcggagccaggggtggcagctgtgggacagccggggagcagggacagcggtctgtccttcacaggtttttctactgtgttttgctggagaaggacagtgattgcgctagctttctcttacccggtatgaattatttagatttctgaggcattttcttgataaacaaaaggctatttttaagtactgagaggaggagcaggccacaagagggataatgtgtgggaattcccaaagctctttgtaggtagtgccagaggggggctttgctctcatttttctatgtgcagaatagaggatctctcctggggtgggcgatgcccccattttatttttagaaaaagtaactcccagacagccccataaaagctgtgcccaaggaagaagagtctgtctagaaggagcccggttctggctcaggacaccggccaagtccctccatgaggtcaagctgaggaccaggccagtgggaagggaaggagggagaattagcgtctataaagcacaggagactatttttgatattcatagctatatattaaggcacctgccacaagagctctcaggatggggacagccttcttagtggagccatggcagcaaggcctgagggcatgaacagaaccactcttcttgtcacatacgaacctgagaaaagggaagccaggagggaggtcacaccatggctcaaaagggaaaggccttcccacttgtccttagc

SEQ ID NO: 730549 - DNA, 541 bp, Homo sapiens
aacatactcagaaaaagtaacatgcaaggtaatttgaaatcagactttaaagcatgtttgaaaagatggcaagcatttccattggttttcatagttttttttaatgacttgactccaaataagaaggatgtcttattatttagcttgacaacatctatgttaaagagactaggatctaaaccccgaagagaaattcagaaactagaaaaaaagaaaatgaacccggggtgttaagctgggaaccaaaaagagcacatttcaattcttttccaccgtaatgccacaaaaccgtaccttaaaacttctaagattacaatcttaggtaagaaaaggaaatattttcagttacaaatagacatgtctttgcgccttcattctagactttttttttggagacggagtctccccgtcccccaggctggagtgcagtagctctatctcggctcactgcaacctccgcctcccgggttcaagcaattctcctgcctcagcctcccaagtagctgggattacaggcacctgccaccacgcccggctaatt

SEQ ID NO: 730550 - DNA, 710 bp, Homo sapiens
ggaggcccccagacctttctcctccaactgggagtctagaagtgtgtctgacatgtgaaaaggaagattgaagagtgagaatggaggagtgtgtgttcagggtaaggatgcccaggatatgtaaaggtttttttgcagaggggctagggtagagcatgctgggagggatctgtaggtttttcatcaccaataaggtagaacctagaatcctcaactagtatcctaagcttggcatggtccacactggtagcttcttctctttcccccactctgcctttgacttcaaacagtttagcaattttgagatcctgcactcagaccactaggctctcaccccaaagcctctttgtttcatctctgcctgctaaaaaaaattctacttttctttcgtggccctgctagactgccccactaggaagcctctctagatcctaccaggcataataaactggatcatcatctacactcccatgggcatgctggaactttcccatggcacaaactctggtttccccagtagctgtaactaaaatcaggtttccctgacaacaggaaccttgtttcatccatccatgttcctggtgcccagccgagagtaagaaacaataactatgtgctgaatatattggatggaataagaaagagggggtctgggggtctgagggaccacctctctaatagtggagggcagctggacatggatgggagtt

SEQ ID NO: 730551 - DNA, 648 bp, Homo sapiens
ggaggcccccagacctttctcctccaactgggagtctagaagtgtgtctgacatgtgaaaaggaagattgaagagtgagaatggaggagtgtgtgttcagggtaaggatgcccaggatatgtaaaggtttttttgcagaggggctagggtagagcatgctgggagggatctgtaggtttttcatcaccaataaggtagaacctagaatcctcaactagtatcctaagcttggcatggtccacactggtagcttcttctctttcccccactctgcctttgacttcaaacagtttagcaattttgagatcctgcactcagaccactaggctctcaccccaaagcctctttgtttcatctctgcctgctaaaaaaaattctacttttctttcgtggccctgctagactgccccactaggaagcctctctagatcctaccaggcataataaactggatcatcatctacactcccatgggcatgctggaactttcccatggcacaaactctggtttccccagtagctgtaactaaaatcaggtttccctgacaacaggaaccttgtttcatccatccatgttcctggtgcccagccgagagtaagaaacaataactatgtgctgaatatattggatggaataagaaagagggg

SEQ ID NO: 730552 - DNA, 454 bp, Homo sapiens
agacaattaacagggtgccggcttttactgtagtgccccagttgacagaatcatgcatcagaagcttttatgtgaaagtggaatctttgttctggagaaaatcaaagtgtgactgtatttgaaagccagctcgttgaaggattccttcttctaatgagctgcgccagtagtaactgaggtgtggtgattagcgaaaggtcactcctgccgtgccaccttccgtgccgatttccctacctaacacggggccagggaaggcagcgagcgcaataaatcagaacacaggtgcccattaacctgccgtgaggaacggtcagagagccttttccttgtttcattccaaaaaggtggggggagagagcaaggagaacaggtttttggcatattagaaccaagcacggtttgtgttaatcaaggacaccctgaatcagtgcaatgaaacctacatgtacag

SEQ ID NO: 730553 - DNA, 484 bp, Homo sapiens
agacaattaacagggtgccggcttttactgtagtgccccagttgacagaatcatgcatcagaagcttttatgtgaaagtggaatctttgttctggagaaaatcaaagtgtgactgtatttgaaagccagctcgttgaaggattccttcttctaatgagctgcgccagtagtaactgaggtgtggtgattagcgaaaggtcactcctgccgtgccaccttccgtgccgatttccctacctaacacggggccagggaaggcagcgagcgcaataaatcagaacacaggtgcccattaacctgccgtgaggaacggtcagagagccttttccttgtttcattccaaaaaggtggggggagagagcaaggagaacaggtttttggcatattagaaccaagcacggtttgtgttaatcaaggacaccctgaatcagtgcaatgaaacctacatgtacagtaaaagccggtaccgagctcgattcgtatc

SEQ ID NO: 730554 - DNA, 718 bp, Homo sapiens
agacaattaacagggtgccggcttttactgtagtgccccagttgacagaatcatgcatcagaagcttttatgtgaaagtggaatctttgttctggagaaaatcaaagtgtgactgtatttgaaagccagctcgttgaaggattccttcttctaatgagctgcgccagtagtaactgaggtgtggtgattagcgaaaggtcactcctgccgtgccaccttccgtgccgatttccctacctaacacggggccagggaaggcagcgagcgcaataaatcagaacacaggtgcccattaacctgccgtgaggaacggtcagagagccttttccttgtttcattccaaaaaggtggggggagagagcaaggagaacaggtttttggcatattagaaccaagcacggtttgtgttaatcaaggacaccctgaatcagtgcaatgaaacctacatgtacagaatgaagcgttttttctttgtcatcatgaaaactcctttttttctacctttctgtttctttttttaaatatgtatccttggggtttgtttattttttttttcttgtttcacttcaaatgaatctggaaaaactttccagggggcttctccctgggtgtggtgtgtgatcggcagccccgccgttgtggcccgaggctcctggaagctcatcagctgatggtcttccttggcctgtagtaaaaatactgctgaattcctcgttgg

SEQ ID NO: 730555 - DNA, 405 bp, Homo sapiens
ttgccctactccctccgctactccctgacgccccctgcagcccccagcccccctgcaggccccagccccagtaagtttggagaggggaacaaatgctgagcctaggtagggaccaccttggggaggaagccaaaatcacactgctcacccgagagcccctgccccgcgctggcacgcccccgcctggagtgcactcgtggccccgggcgctgtcaggtacccgaattggggtaagcgagttggtaactggacctccaaagccttcccctggggttgactttggaattgttcctacagcccggggactggtggttggggtgggaagaggaccaccaccaccaagggtgactttgagggagactagagcgcggccccccgacagctgtgggggagcgggggtgtgga

SEQ ID NO: 730556 - DNA, 483 bp, Homo sapiens
cagaatttttatggaagcttcattatgtaggcatgactgattaaatcactggccattggtgatgaacttaatcttcagcctgtctcccctctccggaggttgagaggtgaggctgaaagtcccaaccctcttatgcctgccttggcctttcctgtcaccagcccccatcctgaagctacctaggggctgctggccagcatacaaaaaggcatcactctggaaagtccaaagattttagaagttgtatgccaagaaatgagacaagaccaaatatatatttcacaatatcacagtactgaatactataggcaactgtaacacaatggaatttgtgtatctaaacacagacaaggtacagtaaaaatatgggaccaccatccttcatgtggtctggtctgtcattgacggaaacatcactgtgtggcacatgattatatatctttaaaagaaaaaatgaaaaatatatgctgatataaaacttgc

SEQ ID NO: 730557 - DNA, 500 bp, Homo sapiens
gcccattgggcggccaagtcagcattccattccagtacagtgtgggggtgcagagatgggggccaagagtacaaatagagtgggacagttgtcattgcccagcctgtgagttgaagtctgtgcagtcagccagtgggtctgacaaagagggcagtgctggcactgcctcatgcttccgcagaggtgatgaggttcaggctgaggtggagaccacgctgcactcgccatgcattcaatggtgccccatctcttgttctctaggaagcattcccgctacctgtgtgatgcagttggttccacctattcccagagactccaccctggccctccttgccctggcccccagcactgagcccctagggccatttagctggccagcatgatctaagacagctttctgcaggcattcctcttgtaggagtcatgaagcagcaatgtgtattttgcttctttttgttgttgttatattaaaaaatatttttatattctagtccaatcct

SEQ ID NO: 730558 - DNA, 755 bp, Homo sapiens
atgcactcccagcttcatctcacttcaatccactggttgatagaagtgcagtcaaagactgtcccctcctctgcaagcttttatgttctctctcctctctccctagccacgtcctgttctgttatcaacacacttactcacctcctggccttctccttctattgtctctcatccctcttccctcacaaaaacagaagcaaagagccagagccttcagtttggaggaactgaaaacattctcttctgctttctcattttgtagatgaggaaactgaagttgaggaatagtgaagagtttgtccaatgtcatagccccgtaatcaacgggacaaaaattttcttgctgatgggtcaagatggcatcgtgaagtggttgttcaccgtaaactgtaatacaatcctgtttatggatttgtttgcatatttttccctccatagggaaacctttcttccatggctcaggacacactcctggatcgagccaacaggagaactttctggtaagcatttggctaacttttttttttttgagatggagtcttgctgtgtcgcctaggctggagtgcagtggcgtgatcttggctcactgcagcctccacttcccgggttcaatcaattctcctacctcaacttcctgagtagctgggattacaggcgcccgccaccacacccggctcatttttgtacttttagtagagacacagttttgccatgttggccaggctggtcttgaattcctcagctcaggtgatctg

SEQ ID NO: 730559 - DNA, 989 bp, Homo sapiens; identical to SEQ ID NO: 338124

SEQ ID NO: 730560 - DNA, 456 bp, Homo sapiens; identical to SEQ ID NO: 338125

SEQ ID NO: 730561 - DNA, 1614 bp, Homo sapiens
agtcaccgagacccccttcccgggctgcacaggcgggagcggggacccgggtggggagaggggtgtgggaggggagtttccgggtcggaaaagggagcgccctactgggttcgtggccgtgcttgcctagaggctgggcccaggtagggaagcgaagtggactcgtggtttttctccgagggacccaggctttgggatcccgggctccggggctctctgccccccttcccattctctttccggaatccaggccttccgtcttcctgcttgctccccacccccctatctgagcgccgcacgaggctccccagcgcccctcttttcccctccaccaaaaaaatcagttctcctgaattctgatttttcacttactaagctagtacagtgccacacacccagggattccaagcctgggcatgtccatgaatagaagagctactgggggaaggagaagactccaggatgtggcccagaccccccggaactgggaagctggggtacactgggcagtgagggttctgtcttccatcccacttgacccagcttgctgtctgttctgcagacattcttttaggggaaccccctgggtggcggggccctaactgagggaaattggtcacctggtgtctggggaggagtgggcgcttagcaggaggcaccctaaaaggaagaaaagttaaagagaaatgtcgaagaccaaatgcctgggtgcctgcagagaggaagataggatttgggcatctgcataccctgtgtggtgttggagatacatactacagaggaggatacccctgggcataggcctggcactggaggatgatatgtttgggagatcattaagatcttatggctatgatggggtggaaaattgaggtagcttctccagggacaaaataccagatttcagcatggtgatggatagagagagggtggaagagaacaggcatttctttggcgtcggttactgtcgtcttgtcactgtgctaggcattttacttacctttagaaagcagaccagaaagcaagaggtcagggaatcatggtaataatagtaataactaacggccgggcgcagtggctcatgccttaatgccagcactttgggaggcctaggtgggtggatcacctgaggtcgggagttcgagaccagggcctggccaacatggtgaaaccacatctctactaaaaatacaaatattagccgggcgtggtggcacgtgactgtaatcccagctactcaggaggctgaggcaggagaatcgctggaacttgggaggcggagattgcactgaacagtgattgcgccactgcactccagcctgggcgacagagagagactctgtctcaaaaataataataataatagctaacatgttatactgcctgcctgtgctagggacttgcatgtatcaaatcatttagtctcacctaacaactgtgcaaggcaggtacaatgtccattttacacataaggaaactgaggcccagagacttacagtagtaattgggccaaggccttgcataactagtagagccaggatttgaacccagctgacagactcagaagctctgacttccccctgctggtggaaacacccagccttgagagcaagg

SEQ ID NO: 730562 - DNA, 1937 bp, Homo sapiens
  misc_feature (1084)..(1084): n is a, c, g, or t
gggagtgtgggaagtctggcggttggaggggtgggtggggggcagtgggggctggggggggagttctggggtaggaagtggtcccgggagattttggatggaaaagtcaggaggattgacagcagacttgcagaattacatagagaaattaggaacccccaaatttcatgtcaattgatctattccccctcttgtttcttggggcatttttccttttttttttttttttggtttttttttataccccttcctttagcttatagtgcgcctcagaaaaccaaatttaaaccccccccccgatgttaacgggggggcagtgacaaaaagcaagaaacgcagagaagccagctggggagaccaccaggttcggtgcccccggcacatatatcgcccggagtgggactggggtttacacatctcggtgctcccgtggtggcatggggctgagagctggagggggtggacgccctcgcgggggggaccgggcgccagggaggccccctgtgggaaaacctcaaggggagagtgggaaaagcgccactggatccgggccgggcttcctggggggacaagggcgcgggtccccaagaacgtccgagaagggccggaccggcgagcagggttcaggaccacgggatccccccacaagggtgcacaagacaggggctgtctagagagggcccccaggacggggggccaccgagtggtgtcccctgaagtcctggcccgcatggtaccacgcggcacccccggtgtgttacccgggggggctccccctcgggggtgcgccacctattgcccgacatcctgccaccttttgaggagccccctgcgtcttttctcctggtgctctttgtgtccgccccatcgaacccgtctggtccacagggcctcgcgtttgaggaacgtctggcgcaagagaggatacactcgaaaacaagcgctagcgactcacccaaaacgaaaacggtgactacccaacgtagtggctgcgaccagctggtgactcaccacaccaaacggggagcacgaaacaccactcgtacccaacacgaagttgtggtcctgcggtcaagatcacatncatccaacgtcagtgccactagccaccgacactgatcaccgaagacactccactagtccaactaacactaccagctagccactccgggccgggcgagggcgcgacgagccgccggcgacgggcgagcgggacgggcgggtggcgccggagcggcggggggcggggcgggtcgcgagcgagggcccgcagctacggggggtggggagggagcggcggcgtcgagggggtgatacgggcggggtgggggatggtgcgagcggggtgcatggagggggggggagggtcgaggacagcggccggggagagcagggatgcgcgagtcgctggggagggcgcgtagagcggacgcgagccgggccggggcggggcggcagtgctggcgggggcggggggcgcgcggccgaggagaggcgagaggcgggtcgggggacacgcggaggaggcggtctgagggaggaaggcaggggggagggggagagggacgggaggggcgcggatcgggcggggactccgccacgcgagggaccgacgatagatcagggcgcagggcgcgaggggaggcaggacgagcgccggtagacagcgcagggtcgatgccaggcgaggagacagtgcgggtggcgccaggcgtgcgaggcgatgagccgcagaccccacgagtgaggccggcaggcgggtacggacgggacggggcaccgtaagggagcggcggtcggacgcacgacgaagatggcggcgggctgcggtggcgtgggcacgagcgatgagggcgggcgaggggcacggacgcgcgcggcggaccgcgacgcaccaaaggcgaaggacgagacagcacgggcgagagctggagcag

SEQ ID NO: 730563 - DNA, 1031 bp, Homo sapiens
  misc_feature (367)..(367): n is a, c, g, or t
  misc_feature (395)..(395): n is a, c, g, or t
  misc_feature (397)..(397): n is a, c, g, or t
  misc_feature (414)..(415): n is a, c, g, or t
  misc_feature (420)..(420): n is a, c, g, or t
  misc_feature (437)..(437): n is a, c, g, or t
  misc_feature (439)..(440): n is a, c, g, or t
  misc_feature (442)..(442): n is a, c, g, or t
  misc_feature (456)..(457): n is a, c, g, or t
  misc_feature (476)..(476): n is a, c, g, or t
  misc_feature (479)..(481): n is a, c, g, or t
  misc_feature (488)..(488): n is a, c, g, or t
  misc_feature (514)..(514): n is a, c, g, or t
  misc_feature (518)..(518): n is a, c, g, or t
  misc_feature (655)..(655): n is a, c, g, or t
  misc_feature (676)..(676): n is a, c, g, or t
  misc_feature (684)..(684): n is a, c, g, or t
  misc_feature (698)..(698): n is a, c, g, or t
  misc_feature (701)..(701): n is a, c, g, or t
  misc_feature (703)..(703): n is a, c, g, or t
  misc_feature (707)..(707): n is a, c, g, or t
  misc_feature (709)..(709): n is a, c, g, or t
  misc_feature (712)..(712): n is a, c, g, or t
  misc_feature (715)..(715): n is a, c, g, or t
  misc_feature (719)..(719): n is a, c, g, or t
  misc_feature (725)..(726): n is a, c, g, or t
  misc_feature (730)..(730): n is a, c, g, or t
  misc_feature (732)..(733): n is a, c, g, or t
  misc_feature (736)..(736): n is a, c, g, or t
  misc_feature (740)..(740): n is a, c, g, or t
  misc_feature (754)..(756): n is a, c, g, or t
  misc_feature (766)..(766): n is a, c, g, or t
gggagtgtgggaagtctggcggttggaggggtgggtggggggcagtgggggctggggggggagttctggggtaggaagtggtcccgggagattttggatggaaaagtcaggaggattgacagcagacttgcagaattacatagagaaattaggaacccccaaatttcatgtcaattgatctattccccctcttgtttcttggggcatttttccttttttttttttttttggtttttttttataccccttcctttagcttatagtgcgcctcagaaaaccaaatttaaaccccccccccgatgttaacgggggggcagtgacaaaaagcaagaacgccacgaacccagcctgtggaagaccaccacgntccttgccccccgccatttatcgccctngntgggatttggtttttcnntctgntccctgtggctgggttngnntngaggttggacgccnnctgggggggcactggccantgnnnccccttnggagaagttcagaggggattggaganaggncatcttgtccggccgggtttcgggggacaggggttgtgtccccagaaattcctgagggcggaggggggggtggggcagggtctcctcaggtgtcaggagggtgctcgggaggccacaggagggggctccgtggctgncctgaggttgcccggaggggnaggggctncccggttttgtaanccngngggntnccntcnggcnggggcnngggngnnccncctnccgacacttgaggnnngcctcccctntccctcggggaccttttgtgcccgcccttaagagccctgcttgtgttctcccgggaggctccgaagcttctgggggccctctggggggacagggggggtgagcccggggaatagggacggtccagcggttcagcccccaaaaacaggaaatttgccgggtttgccctcgacctgttgtttggcctcggagccccggtctgggtgtgtctttggcccccggggccttggttggctgtgtttcgcttgtgtttctcgccccttgtgc

SEQ ID NO: 730564 - DNA, 941 bp, Homo sapiens
  misc_feature (367)..(367): n is a, c, g, or t
gggagtgtgggaagtctggcggttggaggggtgggtggggggcagtgggggctggggggggagttctggggtaggaagtggtcccgggagattttggatggaaaagtcaggaggattgacagcagacttgcagaattacatagagaaattaggaacccccaaatttcatgtcaattgatctattccccctcttgtttcttggggcatttttccttttttttttttttttggtttttttttataccccttcctttagcttatagtgcgcctcagaaaaccaaatttaaaccccccccccgatgttaacgggggggcagtgacaaaaagcaagaacgccacgaacccagcctgtggaagaccaccacgntccttgccccccgccatttatcgcccagaagtccatgagggcaggagggaagggggctagggacagggtcaaccccaagggtgtacagaggagggtgcctcggaagagccaacagggaagggggactccgggacgggcacctgaaggctgtccgacaggggaaaggggctaccggggtgtaaccagagggtcccacaaggcgggagacaaggagggaccgcataccgcacccactgtgaaaagaaacccttcaccaatataccatcagagaacaaatcttagacacggccccattccagacaccccgtgcgatagatctacagggagaggtcccgaagagccacgcgggggagaccactctgagggggggacaaaggagggggattacaggcccgagaaaagtatgggagagagacaagacacgggccattgaacacccagaaaacgataaagcatggcagagtttggtcccaatcgaccaggtgtctttgggccccggaccccagggctctggttgagccatacaacacacacgcgagcaataggattgcacagagaatggcaacggaagaac

SEQ ID NO: 730565 - DNA, 678 bp, Homo sapiens
ggtgcctgcttctccttctgccatgattataagtttcctgaggcttccccagccatgcgtaactctccttcccatttatgagagagccacatgacatcagcccatagactgtggagagtattccagatctatcacattctgcgattctgcgattcccagaaggctggtcatgaaaaaattccctcttcagtttacatatatggcagtgctccagtgccatgacagttttaatcttctggttccatctgcatagatttcagtctctaattgaggaaaatcatctgtttttctcaggagccccttgattcaagtttacacaaaatgtgcctttggagactatcctgttaatttaaacagttcagatcccacttgtatgtgagacagatgcttctctggccatcagccaggtaccactaaaggaggtacaggcacttctagatatctgttgaggcctggaaggggcaaaacaattcaggaagcagttgaagataaaggggtttaccatggaagagaagatccaggtgccttcatggaaatgcttgtggttgaaaagagatgaagatgagggtccctggaaagaggaagaaccagccaggaaaattataccattagcaagactggcatcagcaagtagttcgcagtgttggttgttcttggtttcgcaggattttataggag

SEQ ID NO: 730566 - DNA, 531 bp, Homo sapiens; identical to SEQ ID NO: 174251

SEQ ID NO: 730567 - DNA, 647 bp, Homo sapiens
ggtgcctgcttctccttctgccatgattataagtttcctgaggcttccccagccatgcgtaactctccttcccatttatgagagagccacatgacatcagcccatagactgtggagagtattccagatctatcacattctgcgattctgcgattcccagaaggctggtcatgaaaaaattccctcttcagtttacatatatggcagtggcacttctagatatctgttgaggcctggaaggggcaaaacaattcaggaagcagttgaagataaaggggtttaccatggaagagaagatccaggtgccttcatggaaatgcttgtggttgaaaagagatgaagatgagggtccctggaaagaggaagaaccagccaggaaaattataccattagcaagactggcatcagcaagtagttcgcagtgttggttgttcttggtttcgcaggattttataggagttctgaacactgggaagtccaagagcaaggcaacaacagattcaacatctggtgagagctactctctgcttacaagatggcactttcttactgcattctcacacagaagaagagaccagtactgtgtcctaccatggtggaaaggcaaaaaggagccaaacaggctccctcaagaccttttcttttctt

SEQ ID NO: 730568 - DNA, 797 bp, Homo sapiens
tgaaaaaggtgcctgcttctccttctgccatgattataagtttcctgaggcttccccagccatgcgtaactctccttcccatttatgagagagccacatgacatcagcccatagactgtggagagtattccagatctatcacattctgcgattctgcgattcccagaaggctggtcatgaaaaaattccctcttcagtttacatatatggcagtgaaaagacaagaggaatcttggcctcaaaaactgatatccatcataagatcatggtgaaatacagtctgaagcaggtccagagtgagaagagaaaagaatcacagaaatggggctggagtttcaactgtattaagccagaagactacctgcctccaaactttcaagaagccaacaaagttcctgactgtttaaactaatttgagttggatttctattgcttgtatctaaaagaatcctaactggaaaaaagaagttattgccagaagaagaaagaagaggagaagaaagaggtgtcataaactttctaagacagtgccttgcctgaagactatgagtttctgtgcatcctaggacctttatggaaattagataatttttgatgaagttaaacaattatattataagaaactcctcaaatcaagaataaataaaaacaagagtagcattaaaatttactgcagagtacattaatacagttcaaatctaaatgtctgctcttgcatttctgtgacttttcatgccatgctgaaaatctggaatggaaactctcatccatcttggtgatttcctagtgccctgagg

SEQ ID NO: 730569 - DNA, 409 bp, Homo sapiens
aaaagacaagaggaatcttggcctcaaaaactgatatccatcataagatcatggtgaaatacagtctgaagcaggtccagagtgagaagagaaaagaatcacagaaatggggctggagtttcaactgtattaagccagaagactacctgcctccaaactttcaagaagccaacaaagttcctgactgtttaaactaatttgagttggatttctattgcttgtatctaaaagaatcctaactggcacttctagatatctgttgaggcctggaaggggcaaaacaattcaggaagcagttgaagataaaggggtttaccatggaagagaagatccaggtgccttcatggaaatgcttgtggttgaaaagagatgaagatgagggtccctggaaagaggaagaaccagccag

SEQ ID NO: 730570 - DNA, 1187 bp, Homo sapiens
accagttgctaagaagttgttaccaagtttggtgaataattaaactcttggacatgacaggggaggagaattattgattcaaaggaccttagagctcaaaaggtcctgagagaccatcataaccaccctctttattttacagatacagcttctgaggatcacggggatgaaaggcgtgaactgggctcacacagctaatgcattaggacaccagaaaaggaagaaaagacagtggcagctgaagacatttcaggaatgcttcactgagaacctaagtcttgttctgggccataaagaaaaggggagggtgtggtttctataccagagataagaaaggagaaaattggacgtggaggaaagatatgagtaccaatccgagcgaacaaggaagagtgagtaaatctgtccagctggagttggagtgaaaaaggtgcctgcttctccttctgccatgattataagtttcctgaggcttccccagccatgcgtaactgagtgaggacctagaattttaatgtctaatatgcggtgtgaattaaagaagcggccttgctatgctgaccttttcaatattctaatctttgctttgctgacctctcaggcctcttcctggcaacagttaggcttttgagaggagagagagctgagactgttggctccttcccatttatgagagagccacatgacatcagcccatagactgtggagagtattccagatctatcacattctgcgattctgcgattcccagaaggctggtcatgaaaaaattccctcttcagtttacatatatggcagtgctccagtgccatgacagttttaatcttctggttccatctgcatagatttcagtctctaattgaggaaaatcatctgtttttctcaggagccccttgattcaagtttacacaaaatgtgcctttggagactatcctgttaatttaaacagttcagatcccacttgtatgtgagacagatgcttctctggccatcagccaggtaccactaaaggaggtacaggcacttctagatatctgttgaggcctggaaggggcaaaacaattcaggaagcagttgaagataaaggggtttaccatggaagagaagatccaggtgccttcatggaaatgcttgtggttgaaaagagatgaagatgagggtccctggaaagaggaagaaccagccag

SEQ ID NO: 730571 - DNA, 863 bp, Homo sapiens
  misc_feature (8)..(8): n is a, c, g, or t
  misc_feature (221)..(221): n is a, c, g, or t
atcccagncacacagaggccggcttggtcactatggaggagataggcatcttggtggagaaggctcaggatgagatcccagcactgtccgtgtcccggccccagaccggcctgtccttcctgggccctgagcctgaggacctggaggacctgtacagccgctacaagaagctgcagcaagagctgtgagttcctgggaggtgcagtgaggaatacatcaanagatgagcaacaatgaacctggagaaaaggaaatttctccagtgccccaggaggaggtgaagcgaatccaaagcatcccgctggtcatctggacaatttcttggaggctgtggatcagaatacaagccatctgtgggctctaccacaggctccaactattatgtgcgcatcctgagcaccatcgatcgggagctgctcaagcccaacgcctcagtggccctccacaagcacagcaatgcatctggtggacgtgctgtcccccgaagccgacagcagcatcatgatgctcacctcagaccagaagccagatgtgatgtacgcggacatcggaggcatggacatccagaagcaggaggtgcgggaggccgtggagctcccgctcacgcatttcgagctctacaagcagatcggcatcgatcccccccgaggcgtctcatgtatggcccacctggctgtgggaagacctgttggcaaaggcggtggcacatcacacaacagtgattcatccgggtcgtgggctcggagttgtacagaagtatctgggtgagggccccgatggtcgggatttgttcgcctggcaaggaaaatggcctgcatcatcttatagacgaattgatgcttgcaacaaaagattaatgtcaa

SEQ ID NO: 730572 - DNA, 759 bp, Homo sapiens
  misc_feature (8)..(8): n is a, c, g, or t
atcccagncacacagaggccggcttggtcactatggaggagataggcatcttggtggagaaggctcaggatgagatcccagcactgtccgtgtcccggccccagaccggcctgtccttcctgggccctgagcctgaggacctggaggacctgtacagccgctacaaggaggaggtgaagcgaatccaaagcatcccgctggtcatctggacaatttcttggaggctgtggatcagaatacaagccatctgtgggctctaccacaggctccaactattatgtgcgcatcctgagcaccatcgatcgggagctgctcaagcccaacgcctcagtggccctccacaagcacagcaatgcatctggtggacgtgctgtcccccgaagccgacagcagcatcatgatgctcacctcagaccagaagccagatgtgatgtacgcggacatcggaggcatggacatccagaagcaggaggtgcgggaggccgtggagctcccgctcacgcatttcgagctctacaagcagatcggcatcgatcccccccgaggcgtctcatgtatggcccacctggctgtgggaagacctgttggcaaaggcggtggcacatcacacaacagtgattcatccgggtcgtgggctcggagttgtacagaagtatctgggtgagggccccgatggtcgggatttgttcgcctggcaaggaaaatggcctgcatcatcttatagacgaattgatgcttgcaacaaaagattaatgtcaa

SEQ ID NO: 730573 - DNA, 662 bp, Homo sapiens
  misc_feature (17)..(17): n is a, c, g, or t
cgcaagcatctcttctnttttccacctcgccttccgcggattcccagcttgagaaacacctctttgccccgtcatgccaaagaggaaagtgaccttccaaggcgtgggagatgaggaggatgaggatgaaatcattgtccccaagaagaagctggtggaccctgtggctgggtcagggggtcctgggagccgctttaaaggcaaacactctttggatagcgatgaggaggaggatgatgatgatggggggtccagcaaatatgacatcttggcctcagaggatgtagaaggtcaggaggcagccacactccccagcgaggggggtgttcggatcacaccctttaacctgcaggaggagatggaggaaggccactttgatgccgatggcaactacttcctgaaccgggatgctcagatccgagacagctggctggacaacattgactgggtgaagatccgggagcggccacctggccagcgccaggcctcagactcggaggaggaggacagcttgggccagacctcaatgagtgcccaagccctcttggagggacttttggagctcctattgcctagagagacagtggctggggcactgaggcgtctgggggcccgaggaggaggcaaagggagaaaggggcctgggcaacccagttccccgc

SEQ ID NO: 730574 - DNA, 2047 bp, Homo sapiens; identical to SEQ ID NO: 398446

SEQ ID NO: 730575 - DNA, 2406 bp, Homo sapiens; identical to SEQ ID NO: 398447

SEQ ID NO: 730576 - DNA, 863 bp, Homo sapiens
ttcacggcgaaatgagactgttcgtgagtgatggcgtcccgggttgcttgccggtgctggccgccgccgggagagcccggggcagagcagaggtgctcatcagcactgtaggcccggaagattgtgtggtcccgttcctgacccggcctaaggtccctgtcttgcagctggatagcggcaactacctcttctccactagtgcaatctgccgatatttttttttgttatctggctgggagcaagatgacctcactaaccagtggctggaatgggaagcgacagagctgcagccagctttgtctgctgccctgtactatttagtggtccaaggcaagaagggggaagatgttcttggttcagtgcggagagccctgactcacattgaccacagcttgagtcgtcagaactgtcctttcctggctggggagacagaatctctagccgacattgtttgtggggagccctatacccattactgcaagatcccgcctacctccctgaggagctgagtgccctgcacagctggttccagacactgagtacccaggaaccatgtcagcgagctgcagagactgtactgaaacagcaaggtgtcctggctctccggccttacctccaaaagcagccccagccagcccgctgagggaagggctgtcaccaatgagcctgaggaggaggagctgggtaccctatctgaggaggagattgctatgggtggtactgttggggagaagggctagaaaagttgccccggtggggcccagcagaatccagtgttgctgtggttggagaaggatgtgtcatcacacagtggcctccttacgtacaatgtcccccttgggagtcactggttgtggcccgca

SEQ ID NO: 730577 - DNA, 691 bp, Homo sapiens
ttcacggcgaaatgagactgttcgtgagtgatggcgtcccgggttgcttgccggtgctggccgccgccgggagagcccggggcagagcagaggtgctcatcagcactgtaggcccggaagattgtgtggtcccgttcctgacccggcctaaggtccctgtcttgcagctggatagcggcaactacctcttctccactagtgcaatctgccgatatttttttttgttatctggctgggagcaagatgacctcactaaccagtggctggaatgggaagcgacagagctgcagccagctttgtctgctgccctgtactatttagtggtccaaggcaagaagggggaagatgttcttggttcagtgcggagagccctgactcacatgtcagcgagctgcagagactgtactgaaacagcaaggtgtcctggctctccggccttacctccaaaagcagccccagccagcccgctgagggaagggctgtcaccaatgagcctgaggaggaggagctgggtaccctatctgaggaggagattgctatgggtggtactgttggggagaagggctagaaaagttgccccggtggggcccagcagaatccagtgttgctgtggttggagaaggatgtgtcatcacacagtggcctccttacgtacaatgtcccccttgggagtcactggttgtggcccgca

SEQ ID NO: 730578 - DNA, 997 bp, Homo sapiens
  misc_feature (6)..(6): n is a, c, g, or t
  misc_feature (404)..(404): n is a, c, g, or t
  misc_feature (406)..(406): n is a, c, g, or t
  misc_feature (408)..(409): n is a, c, g, or t
  misc_feature (413)..(414): n is a, c, g, or t
  misc_feature (420)..(420): n is a, c, g, or t
  misc_feature (430)..(430): n is a, c, g, or t
  misc_feature (464)..(464): n is a, c, g, or t
  misc_feature (470)..(471): n is a, c, g, or t
  misc_feature (474)..(474): n is a, c, g, or t
  misc_feature (479)..(479): n is a, c, g, or t
  misc_feature (497)..(497): n is a, c, g, or t
  misc_feature (503)..(503): n is a, c, g, or t
  misc_feature (510)..(510): n is a, c, g, or t
  misc_feature (512)..(512): n is a, c, g, or t
  misc_feature (519)..(519): n is a, c, g, or t
  misc_feature (522)..(522): n is a, c, g, or t
  misc_feature (530)..(530): n is a, c, g, or t
  misc_feature (548)..(548): n is a, c, g, or t
  misc_feature (555)..(555): n is a, c, g, or t
  misc_feature (579)..(579): n is a, c, g, or t
  misc_feature (594)..(594): n is a, c, g, or t
  misc_feature (604)..(604): n is a, c, g, or t
  misc_feature (612)..(612): n is a, c, g, or t
  misc_feature (618)..(618): n is a, c, g, or t
  misc_feature (624)..(624): n is a, c, g, or t
  misc_feature (637)..(637): n is a, c, g, or t
  misc_feature (641)..(642): n is a, c, g, or t
  misc_feature (644)..(645): n is a, c, g, or t
  misc_feature (650)..(650): n is a, c, g, or t
  misc_feature (729)..(730): n is a, c, g, or t
  misc_feature (743)..(743): n is a, c, g, or t
  misc_feature (964)..(964): n is a, c, g, or t
gttagngctgagagtgcggagtgtgtgctccgggctcggaacacacatttattattaaaaaatccaaaaaaaatctaaaaaaaatcttttaaaaaaccccaaaaaaatttacaaaaaatccgcgtctcccccgccggagacttttattttttttcttcctcttttataaaataaccctggtgaagcagccgagacctgaccctgccctgcccggtggcccctgctagcagctccaagaaggaaccaagagaccgaggccttcccgctgcccggacccgacaccgccaccctcgctccccgccggcagccggcagccagcggcagtggatcgaccccgttctgcggccgttgagtagttttcaattccggttgatttttgtccctctgcgcttggttcccgctcncntnncccnngctaangcccccagcnccggcactcgctctcctcctctcacggaaaggtngcggcnngtngcccngcgggcagccgtgccganatgaancccagtncncccaacnacnccatggcntcgctctacgtggggganctccacnccgacgtgaccaaagcgatgctcnacgagaagttcagcncggccgggcncatcctcnccatcngggtcnacaaggacataancacnngnngctcnttgggctacgcgtatgtgaacttccagcagccggcggacgcggagtgcctttgggacaccatgaattttgatgttatanngggcaagccagtncgcatcatgtggtctcagcgtgatccatcacttcgcaaaagtggagtaggcaacatattcattaaaaatctggacaaatccattgataataaagcactgtatgatacattttctgcttttggtaacatcctttcatgtaaggtggtttgtgatgaaaatggttccaagggctatggatttgtacactttgagacgcaggaagcagctgaaaatctattganaaatgaatggaatgctcctaaatgatcgcaaag

SEQ ID NO: 730579 - DNA, 937 bp, Homo sapiens
  misc_feature (6)..(6): n is a, c, g, or t
  misc_feature (344)..(344): n is a, c, g, or t
  misc_feature (346)..(346): n is a, c, g, or t
  misc_feature (348)..(349): n is a, c, g, or t
  misc_feature (353)..(354): n is a, c, g, or t
  misc_feature (360)..(360): n is a, c, g, or t
  misc_feature (370)..(370): n is a, c, g, or t
  misc_feature (404)..(404): n is a, c, g, or t
  misc_feature (410)..(411): n is a, c, g, or t
  misc_feature (414)..(414): n is a, c, g, or t
  misc_feature (419)..(419): n is a, c, g, or t
  misc_feature (437)..(437): n is a, c, g, or t
  misc_feature (443)..(443): n is a, c, g, or t
  misc_feature (450)..(450): n is a, c, g, or t
  misc_feature (452)..(452): n is a, c, g, or t
  misc_feature (459)..(459): n is a, c, g, or t
  misc_feature (462)..(462): n is a, c, g, or t
  misc_feature (470)..(470): n is a, c, g, or t
  misc_feature (488)..(488): n is a, c, g, or t
  misc_feature (495)..(495): n is a, c, g, or t
  misc_feature (519)..(519): n is a, c, g, or t
  misc_feature (534)..(534): n is a, c, g, or t
  misc_feature (544)..(544): n is a, c, g, or t
  misc_feature (552)..(552): n is a, c, g, or t
  misc_feature (558)..(558): n is a, c, g, or t
  misc_feature (564)..(564): n is a, c, g, or t
  misc_feature (577)..(577): n is a, c, g, or t
  misc_feature (581)..(582): n is a, c, g, or t
  misc_feature (584)..(585): n is a, c, g, or t
  misc_feature (590)..(590): n is a, c, g, or t
  misc_feature (669)..(670): n is a, c, g, or t
  misc_feature (683)..(683): n is a, c, g, or t
  misc_feature (904)..(904): n is a, c, g, or t
gttagngctgagagtgcggagtgtgtgctccgggctcggaacacacatttattattaaaaaatccaaaaaaaatctaaaaaaaatcttttaaaaaaccccaaaaaaatttacaaaaaatccgcgtctcccccgccggagacttttattttttttcttcctcttttatcagctccaagaaggaaccaagagaccgaggccttcccgctgcccggacccgacaccgccaccctcgctccccgccggcagccggcagccagcggcagtggatcgaccccgttctgcggccgttgagtagttttcaattccggttgatttttgtccctctgcgcttggttcccgctcncntnncccnngctaangcccccagcnccggcactcgctctcctcctctcacggaaaggtngcggcnngtngcccngcgggcagccgtgccganatgaancccagtncncccaacnacnccatggcntcgctctacgtggggganctccacnccgacgtgaccaaagcgatgctcnacgagaagttcagcncggccgggcncatcctcnccatcngggtcnacaaggacataancacnngnngctcnttgggctacgcgtatgtgaacttccagcagccggcggacgcggagtgcctttgggacaccatgaattttgatgttatanngggcaagccagtncgcatcatgtggtctcagcgtgatccatcacttcgcaaaagtggagtaggcaacatattcattaaaaatctggacaaatccattgataataaagcactgtatgatacattttctgcttttggtaacatcctttcatgtaaggtggtttgtgatgaaaatggttccaagggctatggatttgtacactttgagacgcaggaagcagctgaaaatctattganaaatgaatggaatgctcctaaatgatcgcaaag

SEQ ID NO: 730580 - DNA, 1274 bp, Homo sapiens; identical to SEQ ID NO: 728593

SEQ ID NO: 730581 - DNA, 1571 bp, Homo sapiens; identical to SEQ ID NO: 728594

SEQ ID NO: 730582 - DNA, 972 bp, Homo sapiens
tatttttgtatttttagtagagatgaggtttcactatgttggccaggctggtcttgaactcctgacctcgtgatccccctgctgcagcctcccaaagtgctaggattacaggcgtgagccaccacacctggcccccttcaaatcttaacagagaagccaccaaagtctccttgggtccatcacatggatgggcctcctgggcccctcagaccctgggcttcccttgaggtcctggagctatgtgggctccagctctgggaaggtggacccccatgcatgtgtcctgccgtcactgtctctatggagtctggctcacactaagtgagccataaggccttcttcaaggtcatctgtcccactgatttcagactcagggcggagtgtgaaatcatctgtcccccacagtgcactcagaaccctgtctggactagggcacacacacatgcatgcgcatatgaacacacatatgcatatgcacgcacacatgcaaggctgcaagtctcatgcacacacacatgcacacacatgcacatgcatgctcacatgcacaggcactcaggcacctagagccttctcatcctgcactttgagtcccccctccccttgcccatccttgcccatccttcaaggcctcagtcaaaagccatcttttacaaattgtctctggttgactttcctttttttccctcttagaagaagcgatgctgtcctcagtcatcaagcgttcactaggcgcttggtgtgtgccaggccccgatgtgggtcttgggcatgttccagttctcacgtcctcagggctccttggtgagtcgagggtgaggaggacacagaggccaggaggcctggggccggtctgggtggccctcaggctccagagctcagcctccctgctgagtcaaggcgagcaggatacacctgtccggagctcgcggggagtgggcccttcggggtcccccgggtgggcacacaagg

SEQ ID NO: 730583 - DNA, 667 bp, Homo sapiens
ttggtggattcctcagtccctgccgccgcggggcgccctgggatagcggcggggcctcctgaacagatctcggcccctttccaaacactcctgatgcctcatttgcctctcgcttcttttcgaccaccattttgggggctgaggcactcacggggcctccccaggtttcactccgtttctacacagtcggagccccatggatctcccatctcccggaggaaccgtgaagccaaacagaagcgcctgcgagagaagcaggctactctggaggctgagatagcaggggagagcaagtcacctgcagaatccattaaggcctggaggcctaaggagttagtattgtatgaaatccctacgaaacccggtgaaaagaaagatgtctctgggcccctgcctcctgcatacagcccccgatatgttgaggctgcctggtacccgtggtgggtacgagagggcttcttcaaaccagaatatcaggcccggctgccccaagctacaggggagaccttttccatgtgtatcccacctcccaatgtcactggctccctgcacattggccacgcactcacggtggccatacaggatgccctcgtgcgctggcaccggatgcgtggggatcaagtgctgtgggtccctggttcagatcatgcaggaattgctacacaag

SEQ ID NO: 730584 - DNA, 1196 bp, Homo sapiens; identical to SEQ ID NO: 728595

SEQ ID NO: 730585 - DNA, 790 bp, Homo sapiens
gaatgcagatgtgaggctggaggcagtagagccatctcgcaatcatgcagcaacaagcaaggcagagctggcatgttgttgactgataacatcgagaagctgctatattaatcctggactgccaatctctgaacttcttgagatgggtcttgctctgtcacccaggctggagtgcagtggcaggattgcagctcactggagcctccaaatcctggcctcaagcgatcctcccgcctcagcctcctgagtatctgggactacaggtgtgcaccaccacactaggctatttattatttttgttattattttgtaaagatagggtctcaccatcttgctcaggctggtcttaaactcctgggctcaagcgatgctccccctgtggcccctcaaagtgcaaagaaaacttaacagctttatccacagtgttattttcttttctcttgatgctgtgaattatccccttgatgtcagtgaagctggggttgttttgaaagacttaaatcaatacttccattgagaaaattggaccttgctggctaaagatgaaaagctggaaccctttccaacagctcacttctgtgggctgagatcaggggcagatggctcagtgtcccttgaggtgatttgattacccgtcacggccggacgcctggtctgggtacgtgaagagaagcacagacaggcagctgtagttacactgtttaaaaaagcagaggtactttttcaattcaatgacaggaaggcaaaatacccctacaggtttgaaggaaaaataatttttttcaaaatg

SEQ ID NO: 730586 - DNA, 718 bp, Homo sapiens
  misc_feature (327)..(327): n is a, c, g, or t
  misc_feature (330)..(330): n is a, c, g, or t
  misc_feature (336)..(336): n is a, c, g, or t
  misc_feature (350)..(350): n is a, c, g, or t
  misc_feature (354)..(354): n is a, c, g, or t
  misc_feature (356)..(356): n is a, c, g, or t
  misc_feature (366)..(366): n is a, c, g, or t
  misc_feature (389)..(389): n is a, c, g, or t
ggcctctctctccaccccacccctctttctggcgtcatcccctccccaacaccacctctgctgctgcctctggctgtggacctgcacctcttccccatccccgccaggcccggggagcggggtgagcctggatgagagcccccccaacctggggctctcccaggccatggcccgtgtgctcccagggaggagccccggaccctgagcatctgctggaggcttggcagaggccccgcggggaccgtgtcttctgaggacaaaaggcggcggccagcaggcagacggagggggggggtggggggtggggggggtagggggaccggcagncanggcagncagacgggtagcangggncnagcactggcncccctcccagcttggcagtggcntgaagatgggagtgggagtgctatagtggcggaagcaccttgccgggacccccaccttgccagctagttggacaccccagggctgtgtgctggcccacctggttgtcccccaggcacccccgaggcctacccaggtgcacccttccggtgcctgctttccctgatgcctgcgatttggaccagctcgggctgtttctccggccactgaaggcgggagtgtccctggccgccgatcacctagggtcccccatgtgccccgggtgtggttacctggggttagccgcttgaccccctcggggtttcaagaatcctgttagagccggtgattc

SEQ ID NO: 730587 - DNA, 1028 bp, Homo sapiens
  misc_feature (261)..(261): n is a, c, g, or t
  misc_feature (338)..(339): n is a, c, g, or t
  misc_feature (345)..(345): n is a, c, g, or t
  misc_feature (402)..(402): n is a, c, g, or t
  misc_feature (436)..(436): n is a, c, g, or t
  misc_feature (438)..(438): n is a, c, g, or t
  misc_feature (446)..(446): n is a, c, g, or t
  misc_feature (459)..(459): n is a, c, g, or t
  misc_feature (463)..(463): n is a, c, g, or t
  misc_feature (518)..(518): n is a, c, g, or t
  misc_feature (546)..(546): n is a, c, g, or t
  misc_feature (564)..(564): n is a, c, g, or t
  misc_feature (595)..(595): n is a, c, g, or t
  misc_feature (913)..(913): n is a, c, g, or t
  misc_feature (977)..(977): n is a, c, g, or t
  misc_feature (1003)..(1003): n is a, c, g, or t
tgctgggtgttaatcggccgagggggaaggcatgatggctggcgcccatggaggtggccgtgtgtcggactcggcggccccgatgtggagctgcatcgtgtgggaacttcactcgggcgccaacctgctcacctaccgcggcggccaggcgggaccccgcggcctggcgctgctcaatggcgagtatctgctggcggcgcagtgggcaagaactacatcagcgcctgggagctgcagcggaaggaccagctccagcagaanatcatgtgccccgggcctgtcacctgtctgactgcatcacccaatggtctctacgtcctggcaggagttgcagaaannatccanctgtgggaggtctccaccgggaaccttctggtcatcatgagtcgaaaataccaggangtctcctgccttcagttcacaggggaaagcagcnanttcatctnatggggcaaggantgcntggtgctggtttggagcctctgcagcgtgctgcaggccgacccctccaggattcnggcgcccaggcacgtctggtctcaccanacgctccccatcacgganctgcattgcggctttgggggccccctggccngggtggccacctcctcactggaccagacggtgaagctatgggaggtctcctcgggggagctgctgctctccgtcctctttgacgtgtccatcatggcagtgaccatggacctggctgagcaccatatgttctgcgggggcagtgagggctccatcttccaggtcgacctcttcacctggcccggacagagggagaggagcttccacccagagcaggacgccgggaaggtcttcaaagggcacaggaaccaggtgacttgcctgtcagtgtccactgacggcagcgtgctgctctcaggctcccacgacgagaccgtgngcctctgggacgtgcagagcaagcagtgcatccggacggtggccctcaaaggccagtcaccaangccgccatcctgctggcgcccgtcancatgctgagctcagacttcagccca

SEQ ID NO: 730588 - DNA, 838 bp, Homo sapiens
gaggcatggacgctttcatgggtggttacgcgacagttgccaggaccgagggcgaaaccggctgcaaggcattgtgggacattggaggacttggaatatgcgctagaaggctcaatccaagcccattggaagaggaagacgtacgcagcggagacagctgatccggagtcggggcggcctgccaggtgcccaacctctcccagagcatggcgtcttgggcacgcccctgccggcggacagtgcgtcctctagggccgggagctgcgggccgagttcgcgtgggccctgcgctttcatccctgccggggacgccggggttgcgggataaaccgctcgacacaccctgcctccctgactgcgcctgtgtgacacatacgttcactggtggggcacgcatcagatacggatggcagtggttttgaagtgggaggccctgtataaatgtaaacggttattactgtaaatgctctaacagagctgcctggggggcgcttccagggaagcgtggcaatctcaggccgggagaggagaggcgtcctgggccagggcgctgcaggaatacaggtctggcgatgtgcaagtacacagattcaccaggcaacagcattgcggcaagggtgggatggggaagccagacctaaggccagaaaaggagattgcgaccagagcatgcctgctgtgactgtcagagtaagtggtttcaactttattagagacttctaaggaatgacttggtcagctctgtgctttcttgccttcaagagtgtgtgctgggcgctggcactgcgctcaagcagatgataatcaagacacatacctggtgtgcgaggagcttatg

SEQ ID NO: 730589 - DNA, 916 bp, Homo sapiens
  misc_feature (687)..(687): n is a, c, g, or t
  misc_feature (693)..(693): n is a, c, g, or t
  misc_feature (702)..(702): n is a, c, g, or t
  misc_feature (713)..(713): n is a, c, g, or t
  misc_feature (722)..(724): n is a, c, g, or t
  misc_feature (734)..(734): n is a, c, g, or t
  misc_feature (746)..(746): n is a, c, g, or t
  misc_feature (751)..(751): n is a, c, g, or t
  misc_feature (765)..(766): n is a, c, g, or t
  misc_feature (768)..(769): n is a, c, g, or t
  misc_feature (771)..(771): n is a, c, g, or t
  misc_feature (786)..(786): n is a, c, g, or t
  misc_feature (795)..(795): n is a, c, g, or t
  misc_feature (815)..(815): n is a, c, g, or t
  misc_feature (818)..(818): n is a, c, g, or t
  misc_feature (820)..(820): n is a, c, g, or t
  misc_feature (831)..(833): n is a, c, g, or t
  misc_feature (841)..(841): n is a, c, g, or t
  misc_feature (843)..(843): n is a, c, g, or t
ccgcgccagtgtcccgccgcctcccgcaagcggaaatagttcccggaacgcctgcggtcccgggccgcctcccagactccaggggagccgtccctccaactcccgggagctgccgagggaggggcggatccgggccagctcctctgccagagcccagcccagagagggtgaccgggggacgcagggccgggtttccagccccacgagagggatggtgtagggaccggggcgtcgcggcgagacgcctttcctcgggggggggtgcgggggggcgcccacctcctccgtgtcggccggagggtctgcaacagcgggtggaatttttagcacaagcgagggaggaggttggagcgacgagaggcgggagcggaaagggcgcggaggccggggctgcagcgcgctccaccgcccagctgcaggtggcgcctctcgccacccgcaccccgctgcgcccagggaagggccgatggcgcgccgtcctccctcctcccttcgggaagcctgcgacgtcccatcccctccgacgcaggcccgggaaaggctcaaaaggttcgaggtcgcgttcctgctatcccgcgggcttctctcactcttagatcccgcaccagaggaagcggatctccttgagtgggcaaagcaggggtgaggggctgggggcagttccactgacaacgggacgggggcganaggggnttacccagntacatacaganacagcagannngaaatctatntttaatggcttnggctntatagcacgaagcnngnncncctctcgttcaaggnacacagtcntctctactgcccactcctgnggncnttaaaatcgannncctgagtncnagaggggtcacgtgccagggcagcagtgaagggagaagggtcacagttcacttctgtgacgtatcggacaccc

SEQ ID NO: 730590 - DNA, 857 bp, Homo sapiens; identical to SEQ ID NO: 724096

SEQ ID NO: 730591 - DNA, 1048 bp, Homo sapiens
  misc_feature (829)..(829): n is a, c, g, or t
  misc_feature (831)..(831): n is a, c, g, or t
agtttcccagaccctcgtgtggaggcttggtcaaaaggcgaaacctgaagaaatactttagcacaggatgaaggaggaagtggcagaagggtaaaaccaacccctgtcaaacttcaccaagtggctctgccccggactcagctccaccacatcctactcttattgggagccaagcaagaaggactaaggtgactgggacctgggcagtgggagaatgggcagtgggagaaagatcatgaggaagcagaaggggctttgttttggtccagggaaccaaatccagcactataaccgccaccagtcctgggagtcactggcagaaaaaatcagaacagggaatgcaaaggtgctgctctgcctctactgagcacccctccccatctctaagcctcattcttatattctataaaatggggattatgacatccacctgtgtgtcctgttgacctgtttgtaaaggtagaataaggtaagtgagtatgaaagcactttaaacatgtaaagcactatattacaggctttttctcactcaactgaccctagtcattaggatgggtagacatgacaagaaggaagaagaatgcagatgccggggagcagagactgtgaacatctcaattttgcataacagaactatggtgatggtcttatggagcagctagtccaggttctcatttgacaaggaagctaaagcccaaagaggggaatgaatgttccatggtcaagagatgatcagaggacaaacctggtccacggatgccaggccagtcctttatcaacccaaactctggttgcccaggtgaaggctctagaggagaacgcaggccanancaagggggcacaccggaaacgcgggaaagaccacaagaggacagagctcaggggggtagtagctacatggaaaaaagtgaagcacgaagaccaaaaaaacatataaaagaagaacaagacgcatacacagtaatgtcaacaagcgaacaaatactaaagcgactaaataaatatttatatattgctgttttttttttttcttcttttaggagacgga

SEQ ID NO: 730592 - DNA, 643 bp, Homo sapiens
taactgggaagctgtgccccaaaaggagcttcaaagaagagccccctccacatcctcaggagaaggactcttggttggaaaaggcctggaagtgaccagtatctatggtgcttcgtctctttctcaggcccataaggacagaatttacatttgaaaagaagaacaacacagaaacttttgcaaagggctgccaatactttttctctgaggaacgtgcaatgtgatgaacaaaatttttttcccagaaagccagaggctgggcaaaggcagaggggcctggaggctgctcccaggttgggatttccagttccttgatgaagagaagttacgagactgggcatccttgctttgttcctaaacaggaggtgaaaacattcagtcttctgccattaggtctgccttattattttcgtcagtgttgtgcaggagaatccacttagaagcctgggtaaaattgtattacatgatcttgggtttggtccctgagaaagagccagattaacgctggcaggacaagaaagcaggagtgcccttcaaacacgctgctgaagggcaactggaggttccggggaaatgtgaagaaagaaacgcaaacacccctaggaaccaggttggtcttgtgaattgatttccagaggaaggc

SEQ ID NO: 730593 - DNA, 921 bp, Homo sapiens
  misc_feature (18)..(19): n is a, c, g, or t
  misc_feature (26)..(26): n is a, c, g, or t
  misc_feature (34)..(34): n is a, c, g, or t
  misc_feature (698)..(698): n is a, c, g, or t
gaagccaagccgcagctnngaagccngagcggcngaactcggcagctccaacccaactcggcttaactccgcctcaccgagcccagtccaagactctgtgctccctaggtttgcaacagctctctggatgccgtggcaagcatttcgcagatttggtcaaaagctggtacgcagacgtacactggagtcaggcatggctgagactcgccttgccagatgcctaagcaccctggatttagtggccctgggtgtgggcagcacattgggtgcaggcgtgtatgtcctagctggcgaggtggccaaagataaagcagggccatccattgtgatctgctttttggtggctgccctgtcttctgtgttggctgggctgtgctatgcggagtttggtgcccgggttccccgttctggttcggcatatctctacagctatgtcactgtgggtgaactctgggccttcaccactggctggaacctcatcctctcctatgtcattggtacagccagtgtggcccgggcctggagctctgcttttgacaacctgattgggaaccacatctctaagactctgcaggggtccattgcactgcacgtgccccatgtccttgcagaatatccagatttctttgctttgggcctcgtgttgctgctcactggattgtgggtctcggggctagtgagtcggccctggttacccnaagtgttcacaggcgtgaaccctttggttcttgggttcgccatgatctctggcttcgtacaggggacgtgcccaccttgggagctccgaagaggcctaccaattggtcttggtgaacctcatggaccctattgctggggcccgggcccggcggttgtgcctcggctcgaggaatctccgggcgcgccggttatcctcggggccctgctgccccgggacgccac

SEQ ID NO: 730594 - DNA, 945 bp, Homo sapiens
  misc_feature (18)..(19): n is a, c, g, or t
  misc_feature (26)..(26): n is a, c, g, or t
  misc_feature (34)..(34): n is a, c, g, or t
  misc_feature (722)..(722): n is a, c, g, or t
gaagccaagccgcagctnngaagccngagcggcngaactcggcagctccaacccaactcggcttaactccgcctcaccgagcccagtccaagactctgtgctccctaggtttgcaacagctctctgatcatcttcttcaattcctgctaggatgccgtggcaagcatttcgcagatttggtcaaaagctggtacgcagacgtacactggagtcaggcatggctgagactcgccttgccagatgcctaagcaccctggatttagtggccctgggtgtgggcagcacattgggtgcaggcgtgtatgtcctagctggcgaggtggccaaagataaagcagggccatccattgtgatctgctttttggtggctgccctgtcttctgtgttggctgggctgtgctatgcggagtttggtgcccgggttccccgttctggttcggcatatctctacagctatgtcactgtgggtgaactctgggccttcaccactggctggaacctcatcctctcctatgtcattggtacagccagtgtggcccgggcctggagctctgcttttgacaacctgattgggaaccacatctctaagactctgcaggggtccattgcactgcacgtgccccatgtccttgcagaatatccagatttctttgctttgggcctcgtgttgctgctcactggattgtgggtctcggggctagtgagtcggccctggttacccnaagtgttcacaggcgtgaaccctttggttcttgggttcgccatgatctctggcttcgtacaggggacgtgcccaccttgggagctccgaagaggcctaccaattggtcttggtgaacctcatggaccctattgctggggcccgggcccggcggttgtgcctcggctcgaggaatctccgggcgcgccggttatcctcggggccctgctgccccgggacgccac

SEQ ID NO: 730595 - DNA, 764 bp, Homo sapiens
ggaacagagcttgtcatgaagcgggaggggagggtatgcgtcagaaaagaaatgacaggtttgaaatctgcagaagctcgtctttcctctccgcctctcctccccagccggccccgcccccacctggcttcctaaataaagaccttcctctgcatggagaccgcctcactcaaactcaccccctcgtgcatatgcagagtctcaaaagacacggccccgcccccgccacagcgagggtctgaatgggaggttggaggagagcatctgtgtcccagacccggcggtggggggcccagggtgctgggcacatcttctggaacccgggctcgccgaggcaggcgagagctgtcccctcgcctctgttggggatgcctgccaaggttagccatgggcgaggccagggacagcgcctgggtggtgccaaggggactgtgagtcacctgtggataggagggctgagtgaggaggggacacgggccctgggcctcaagggcaccatctgaagatcccataaggatgaggacaggggaggccagagggcagaaattcaaggcaacggaacagctctagatgggggatgcccctggcatggggtgggtggaggccagggacgctgctcggctccccgcagtgcccaggacagcccaacccagagaatgatccggcccaatgccacagtgccgagggggagaccctacattcatctggaaaaaaatagacttcgatcccttctcactccagacaccaggataaactcctgatgg

SEQ ID NO: 730596 - DNA, 366 bp, Homo sapiens
cggggtgaggtcgccaggccctgcggtgggctgtatgtgtgttgtctggatggtgcaggtccggggtgagttcgccaggccctgcggtgagctggatgtgtggtgtctggatgctgcaggtccggggtgagttcgccaggccctcggtgagctggatatgcggtgtccccgtgtccgaatggtgcaggtccagggtgaggtcgccaggcccttggtgggctggatgtgccgtgtccggatggtgcaggtctggggtgaggtcgccaggcccttggtgagctggatgtgcggtgtccggatggtgcaggtccggggtgaggtcaccaggccctcggtgatctggatgtggcatgtccttctcgttta

SEQ ID NO: 730597 - DNA, 814 bp, Homo sapiens
gggggggggggagaacccaaacctacggctaggtacgaggctgggtggccccaaggaccttgagtggagacaagtcacaggttcttttcctgacttaggcacaggctgggcagctggaagggctgcagaaggggcactggcagccactcagtccccccgcgtgccttgcccagcccctcagctgtgcatttttctgggctaagaagacaaaacagacagatgctaggctgccaagtgatctggacaggacagtcttgtgggggagtgtgtggaggggtgtttttctgttcttgaaccctcagccaaagtgggaagtgcctttaggggctaggtgcccacacagatgctgagaaatgcccagactgccctccatgaggctgcctgctcaacaacactccttactttgcttgacccaggtcactgtgacctgcccatttttcccctgcatccagggctgaggtggagaggggcagtgtactcctgcagcacaggtatgggaggaggcagctgtgggagggagggagagaaggacacaggcactgctcctgtgcaaggaagactccctctcactcttcagctggcagtggggtggctgcccagaaccaggctgtctggatcaaacccagcttttgcacttgtgaccttcaacaagtttctgaacctctccgatctgtttcttcaagggagatcatcatataacctgtgtgataggctgagattgaatgaataattgatatgaaatgtgaatagtgcctgagcaggcgtggtggtcacacctgttatcccaacactttgggaggctgaggtgagcaga

SEQ ID NO: 730598 - DNA, 1569 bp, Homo sapiens
  misc_feature (599)..(599): n is a, c, g, or t
  misc_feature (1042)..(1042): n is a, c, g, or t
  misc_feature (1145)..(1145): n is a, c, g, or t
  misc_feature (1148)..(1148): n is a, c, g, or t
  misc_feature (1163)..(1164): n is a, c, g, or t
  misc_feature (1216)..(1216): n is a, c, g, or t
  misc_feature (1238)..(1238): n is a, c, g, or t
  misc_feature (1244)..(1244): n is a, c, g, or t
  misc_feature (1253)..(1253): n is a, c, g, or t
  misc_feature (1263)..(1263): n is a, c, g, or t
  misc_feature (1276)..(1276): n is a, c, g, or t
  misc_feature (1282)..(1282): n is a, c, g, or t
  misc_feature (1285)..(1285): n is a, c, g, or t
  misc_feature (1292)..(1292): n is a, c, g, or t
ggactcgcgggcttggctggtctcggctcgattagcacgctcgcgacgtccgcttcgtccatgtctgtgggttagtcaccaaccggctatcggacttagacgagtccgagtagtgctagtgctggtgcattggagctcgtcgagcaaagcggtctgatgacaagctatggacagatggctcatggtggcgtagagctgaggaatgatatgaacgatacccaaagagcatggattgtccagcaagatgaccaatgggatccggcatgaaaggttttgaagggtaggcttgagacgcaccctttatttccggatcctaatccagtaatgctccggtgtaatttattccaggtagtattgtcgacctatatgtgcctgggaaagagatttattgaagcatccatgaggagagagagcatatgggaaggcctaaagcgtttgtggacaatagaaggtgtcccccggttctagtatccgctagtcctggcttgacctaaggactatcttaatgagcttgggaagataaggaagggaagaagaaagatgaacaagaggcatgcgcaaggctctgagcaccttgcgtcagaagatccgaaaatacnacgtgatttcgagtcccatatcacaagctacaagcagaaccccgagcagtctgcggatgaagatgctgagaaaaatgaggaggattcagaaggctcttcagatgaggatgaggatgaggacggagtcagtgctgcaactttcttgaagaagaaatcagaagctccttctggggagagtcgcaagttcctcaaaaagatggatgatgaagatgaggactcagaagattccgaagatgatgaagactgggacacaggttccacatcttccgattccgactcagaggaggaagaagggaaacaaaccgcgctggcctcaagatttcttaaaaaggcacccaccacagatgaggacaagaaggcagccgagaagaaacgggaggacaaagctaagaagaagcacgacaggaaatccaagcgcctggcatgaggaggaggcaggacanatgaaggcggggagtgggaaacgggtccggggcggagctgcccgtcggttaaggagaagccaagaaatgtttgccaagggaactgagatcacccatgcatgtngtnatcaagaaactgaanngagatcctacaggcacgaggcacgaagggaactgatcgtgctgcccaagatngagctgctgccaactgctggtncagatngcagcgganaacaacctgngagagggcgtcantgtcanganccagtcnatatcatcgcctctctctatgacctaccaaaccccaaccttggcacacctaccatgaaagccaaagattctggcgcgaagcgcccttgcaacggcccccaaacgcaagcctgacatgagatcatcactgatacgccaaaagatccccaacaatcccggtagcgcgaagccatcatcctgcgacgaagaccgcaaacactgggaaacgacgaaccagaccacgcgtgaccccggccacgacaccatacacacggcggcagcaacggacacaacactcc

SEQ ID NO: 730599 - DNA, 720 bp, Homo sapiens
ctcccctgctcactcctcactccccagccctctctgccatgcctgctcactcctcagtcttacgtcattacacgtcacttctatcagggagggtctccctgatccacctgtccacagcgtggcatgctttctaaaagcgctctgcgatttccttcacagcaccgtcacccgtgtagccatgcctgtgtgtgactgatctcatgtctctcccaccacacttcaacggccaagagggcaaggcttgtggcagccttgcacagtgggatatacttggaccctcctcggcaccagcacacgggacaggtcaacgtctgataagagaatcagccacttcctggtacaccccctaacacaccccaggctgtggacgcgaggtccaccccaggcacagccacttcccctcagtccaccatgggggttccaccgtctttcaagacagagccctaacctcaccctccctgacaccttgctcccttcaattactctcacatcctctgtgatccccccaaaaagctgactcttcctaaaccactatctcagtttcacataatgtcatgcacatggtctgttttttctactagatttattttctttcattttattttgacacagtcttgctctgtcacccaagctggagtataatggtcccatcacagctcactatagcctcaactcgtgactcctgggatctccagcttcagcctctcaagtagctgggac

SEQ ID NO: 730600 - DNA, 1112 bp, Homo sapiens
  misc_feature (729)..(729): n is a, c, g, or t
  misc_feature (733)..(735): n is a, c, g, or t
ccagaaaagtgctttaggctgggggacccaggaatacttcgccaacgagaagggtttgagacggacgtgagagaagaaggtggtgtgagtgtcctggtttcctggctgcccaccatcagaacctcctgcctacatttggggaattcccatcgcaagggccctaatggaaagcaggccaccatttgccacaaagccccaatgcttgctctccctgactcggctctggggttgcaggcagaagacatgagctccgccaatcggatgctccaactgggaccttgaatctggagcaagtcacggaatagcaaggctggtttaggaattcatttctgcggcggcggtggaggcgatggggccaacagcggcctctagtgtctggaggaggaagtgtcagcgctactgccgcagcgtgaatgcatctcagtccacgtggggcaggcaggtgtccagatgggcaatgcctgctgggagctctattgcttggaacatgggattcagcctgatgggcagatgcccagtgacaagaccattggtggaggggacgactccttcaccaccttcttctgtgaaactggtgctggaaaacacgtaccccgggcagtttctgtggatctggagcctacggtcattgatgagatccgaaatgggccataacgaaaggtcttccacccagagcaggtcatcactgggaaagaggtgctggccaaaatatgccgtggtcctataccntggnnngggatcttggcccatgctgggtcggggaccggcagctgttgtacccgtggccggcgttagggggccgggggtccacgatgtggggggcccggccgtggtacccaaccccgagaagggggcccttgagactgaggaaaccacgggggagtacataacacgacccccgaggtattgtagggggggccgaaaaatttgtttgcacacccaggggaacagagtcctgtgtgggcaggaaaaatgctccgtagtaaggatgagtggcccccagccagcatagtatactagtgtagagaaaggagcgtcagacaaccaaactaggagagcgcgagcgcgtcggctttcgtactgcgtctgtcttgatccactaaccttagtat

SEQ ID NO: 730601 - DNA, 813 bp, Homo sapiens
gtggcaggagaggggggcctgcgtgtgaccgagcgtgcgtgggaggacgcgcgtgtgtgtctgtgcgccctgatcacggtggtctgtgggtggggcggatcgtgcacgcgcgcccgatctgtgcgccccaagccagccttgccttactggtaccagtacctgcctgctgctaccaactagtcaacatgtggcatcttccaggccactgtgatgagtcagggatgagcatctgactctggttggtccaatcagcttgtccagggactttggctgggaagattggaaaggaggccagctttttgggctggggttgctgagagatgtgatgatgaaatgtgtggcctacctggcatctggccccagcttcagctccatttactgtcttgctccccaccctcactagcctgcattgaggcctcctctgtgccccccaacccctgagtttctcatccccagagagcccagctacacagaattgaagggttttctcattcatcttcctgcgctcaccctgaagactgggcctatgtcatctgctaaccactgtccccccagcactcacagtggaaaatggagtgttatgcagccctgcagcttgccttctagaacagttcacaggcaaggctcccaaatgaaccctgtacagccagatggtgccagcaacacagagctacttgttacatcagctcagactaagccaacccaaaggagcatctggtgattccacagaaccacaagagacttgacctcctggaaatgaattaaccaagattaatgaaaaagattaaggtcatgtgccctgtaaaaatgtcc

SEQ ID NO: 730602 - DNA, 610 bp, Homo sapiens; identical to SEQ ID NO: 171413

SEQ ID NO: 730603 - DNA, 760 bp, Homo sapiens; identical to SEQ ID NO: 171608

SEQ ID NO: 730604 - DNA, 774 bp, Homo sapiens
  misc_feature (640)..(640): n is a, c, g, or t
  misc_feature (657)..(657): n is a, c, g, or t
ggcaggatcgaggccgcgggttaagtcggccgaggggcagaagcgcatgaggctgtgggacttgccttccatttgatttctgaattgtgaaggtgcatgctttctggaggcctgcacagacctttcccacccgctttcctgaaagaatttgacagggaaagtgagaccgcaggaaggctttttgggggaaggtttcttcaatgctagactctctcaggcagagctgcatcgggccccctgccttccctgctcccaatttcctgagaccgcccgcccccacccagaattggggatcttgatcaggtagccacgatggaggtgatgaacctgatggagcagcctatcaaggtgactgagtggcagcagacatacacctacgactcgggtatccactcgggcgccaacacctgcgtgccctccgtcagcagcaagggcatcatggaggaggatgaggcctgcgggcgccagtacacgctcaagaaaaccaccacttacacccagggggtgccccccagccaaggtgacctggagtaccagatgtccacaacagccagggccaaacgggtgcgggaggccatgtgccctggtgtgtcaggcgaggacagctcgcttctgctggcacccaggtggaggggcaggncaccaacctgcagcgantggccgagccgtcccagctgctcaagtcggcattgtgccatctcatcaactaccaggatgatgcccagctggccattcgcgcctgccgagctcacaaactgctcaaacgaagaggac

SEQ ID NO: 730605 - DNA, 1232 bp, Homo sapiens; identical to SEQ ID NO: 490411

SEQ ID NO: 730606 - DNA, 2607 bp, Homo sapiens
ggcacgagggataagtattgaggcgctgctatgggggccctgctaggaggatttccctggactcaacgggttcctgtccaaggtcctttcattatccttcttcgccgatggagaactgagatccagagagtttaactaactcacccaagatcacatcagctactggggtggaagtaggagctgatcccagaccaacttgctcaggaagaaaggttttctcctgtgttggatatggtagagcctccgtacataccgggttcatctgaattctcagcctcagctgcggtcacgcgcatcaccagcctctcacctcccaaatcacaccaaagaagaataaaataggcatccatcggaaattcccgtctgctttcgacacacatttttgtaaatgttcgttacatcctagtaggggtgagtgtgtgtctaaggcaggcatgttgatggggttggggaagttatggcccaccttaaacgtaataaccttgcgcagttctttgggggctgcgagtacactacaggcatgaatgttcagtcacctgatcttcattccagacgctaggaaaagcaggccggtgtaaggaagaaagcctttcaaatttgtattggctcctatttagtatttgtcagggtccagggctgcactccagtgaacgcctcacttaggaaagattggacactcgacagaccacatatttatctcgctctctgtcggtcagtgcgttccaaagcccaagccgttatggaaaacaggctcggaaaaatgcatatttcccccaacatctcagactaacaagctgccccttcagcaaatatcctattgccccagccacggggatcaccttcatgatgccccctccccatcagagcgtataaaagagtccctatgcttcccataggcctcatgacctcatctctcctgcacagtccacttggtgttaatgggcccagtcaaaaggcaggactgttggacgccagtgttccttattcgaccatctgtcgatcaaagtgaccacacaaaccccgctttgccgtcgcagtacctccacagcaacgccacggttctccctcttcctctcacacgcttctccccatcccacctgggtcctgccgcctcctcccgagagcaaacgtggagctatttgtccaagcgtcatatgcgagctgcaggagacgctcataaatccctgccctgttctctggcagtttcagacgttgtcgggcccagaccctccttttctttcttaaaggtcacaaaatctaattagaaccattgctaactgtatattctcgttgtcggtaagccttaaataataaaaatcagaccaaatgagactaagcaagggagatggaaaatcgatgtcatatttgttccaagtaatttcccttcagaagagaaaaggctcttaggactggtttgtgaatttaaaagatgtttaaagttgcatctaggcatcggaacatcaaagtcaaccccaaacagaatttcgctggatgatctctccttattcccggaaaagtcagtgctgtttggtagaagggcctaagacggggtgacagccttcctcttcctgtctgttttaagcagttgtggctttgccaaaaataaaaataatttctttgaaaaacggaaaaaaaaaaaaaaaaaaaaaaaaactggagactagttctctctctccctcattgtacccattctaatcgcaatggcattcctaatgcttaccgaacgaaaaattctaggctatatacaactacgcaaaggccccaacgttgtaggcccctacgggctactacaacccttcgctgacgccataaaactcttcaccaaagagcccctaaaacccgccacatctaccatcaccctctacatcaccgccccgaccttagctctcaccatcgctcttctattatgaacccccctccccatacccaaccccctggtcaacctcaacctaggcctcctatttattctagccacctctagcctagccgtttactcaatcctctgatcagggtgagcatcaaactcaaactacgccctgatcggcgcactgcgagcagtagcccaaacaatctcatatgaagtcaccctagccatcattctactatcaacattactaataagtggctcctttaacctctccacccttatcacaacacaagaacacctctgattactcctgccatcatgacccttggccataatatgatttatctccacactagcagagaccaaccgaacccccttcgaccttgccgaaggggagtccgaactagtctcaggcttcaacatcgaatacgccgcaggccccttcgccctattcttcatagccgaatacacaaacattattataataaacaccctcaccactacaatcttcctaggaacaacatatgacgcactctcccctgaactctacacaacatattttgtcaccaagaccctacttctaacctccctgttcttatgaattcgaacagcatacccccgattccgctacgaccaactcatacacctcctatgaaaaaacttcctaccactcaccctagcattacttatatgatatgtctccatacccattacaatctccagcattccccctcaaacct

SEQ ID NO: 730607 - DNA, 1221 bp, Homo sapiens; identical to SEQ ID NO: 174501

SEQ ID NO: 730608 - DNA, 717 bp, Homo sapiens; identical to SEQ ID NO: 176524

SEQ ID NO: 730609 - DNA, 708 bp, Homo sapiens
  misc_feature (233)..(233): n is a, c, g, or t
  misc_feature (393)..(393): n is a, c, g, or t
  misc_feature (420)..(420): n is a, c, g, or t
  misc_feature (442)..(442): n is a, c, g, or t
  misc_feature (465)..(465): n is a, c, g, or t
  misc_feature (529)..(529): n is a, c, g, or t
gcagccacgccactccctcctgagagcccaccgcgccacagcttggaggaagagcctgcggggaactggctgcaggacgctctcttcttgagtgcaggtgctggctctgctgtgaccatgcccgtgacctttgccctcctgctcctcctgggccaggccactgcggacccatgctacgatccacagggcctgccccaattctgcctcccgccatgtgacacagctggcatgcntgtggctggcctcctgccctcaggcctgtgccctgtccccaggaaaccaccttgtgcgccagtggaaacctgcaatggcagcctgacatttggccctgggtggccccttcctcctgacatcttgtcagcttgcgctttctgtaccccaggacccccagcncctcatcctgtctgctgcctggggccntcagtggtggtccctggaggcntgctgttggcacagggcccgccntggcctggggccttagtgggtgccctgaaacgggtgaccttccactccacaccagtgtcctaanggccactgtgtgcggccatgccacctccgtgtggagtttgggggccaggccgtggctagctggcagctggtgctgagaggccgctgccagtgtcatggccacgctgcccgctgtgccgccctgtgccggccccccgctgcactgccgcaatataccactggccgggtgcgagagctgcg

SEQ ID NO: 730610 - DNA, 670 bp, Homo sapiens
gctccccatgagttcagggttggctctatcctgaacccaccataggggcccagctttcaaaatgtgtgggtggtttgttttcaaagagagagaaggcggtgggcaggaagcaccatcccagatctgctgtcaccaccagataatctgttgtcataaaccccagaactttccatgaggctgctcaaatgtgctcggccttcccaggccggtgttacggccaggccgcctcctgcttgcagctggtgaggacggacagggcatgctgtggcctctgtgaggtcgcaggcccaggcgtgtgaaggaagagaagacacagggtccccatgacctccagagaggcctcctcgccctgtcctggccaggcctgccccggaagcaccccttgcgggcagttagagcagcgacgtccccgagcggcacctggtttcctctccaagctcagctgcagctggggtggcggcaggacctcggctgggtcctcaccagccctgggcctccctggcaaagtgggctgtggacgctgggcaggccagaccccagactcctggctccctcacccaggcctgggagtggttctcagtttgctcagtgccccccagcccactgagatcaggtccttatggctggagccagggatctgagctccctccctttcctggcctctcgaagc

SEQ ID NO: 730611 - DNA, 1196 bp, Homo sapiens
cagcagctgctgcctagaagggaggagaggagtgggagtgagccggagagggtgaagcaggcaggaagctgcaggccggcggtggatggggccaggaagcatgcagggggagtgaggaccgtgtatgagagaaacactgcccaagagagaagaaagaaaatcacaggacccgaggaaaaagaatgagtggtgtgttcagagatgacacatgacaacaaattgtttgcttggaggattttcttacgcgtgcgtgtttaaactggcctcaaggaggaagaagaaacatgcgttcctggatgactgagttctggaatattctgtcataagactttgcaactggagtagccccagaaaaaggcaggcagtgggagttggctccctccccaaagccatccctgagttggctttgttttgggttcctcccaggtggaatttaggcaaaacttacagtattgttctgggatctgggcaagttgtgttggggatggacatgggtctcagagagatgtgcgttggcgagaaacggacagtgatcattccgcctcacctgggctatggggaagctggcgtggatggagaagtgcccggcagtgccgtattagtgtttgacattgagctgctggagctggtggctggccttcccgaggggtacatgttcatatggaatggtgaggtgtcacccaacctttttgaagaaattgacaaggatggcaacggagaagtcctcctggaagaggaaggtgggaccgaagagctcagggagcctggtgaggctgtggggccggttctgaagggtggccaatgtcttccgtatcgcggaatccagtggtcagctctcacgctcctcttaacttcaacacagctgattcccctacaggatgcatctttctctggcttccaggacaccacacttcatggtgttccttctacctccctgctccagtccagtcttctctctccacttcacactcatgtgttcagctgcctgcttgatgtcctcatttacggaacccctgctatccacccgcacaccccgcttggggcctgctttacccaaagcctttcccgtcgcagtcagtggcatcactggcctccagtggctcaggcgagagcactcggtgatctctcactcctctttctctcgtaggccgtaatggtcctcaggaaatcattccagctctaccttgagagcacac

SEQ ID NO: 730612 - DNA, 736 bp, Homo sapiens
caccatccatgtaagatgtgacttgctcctccttgccttctgccatgattgtgaggcctccccagccacttggaactgaagcaaacactgctattgccacctttttgcagaggaaggtactgaggtgaagcgacttgcccaaaccctacaaaaataactggccattgcatcaacagcagtgtcaagagcatcatagcatcggatgatgatggacagatgcctctgctgcagagttatgcccccgccccaacactcaattggcaatcatctggggaagtctgtcacaatggtccctgtccacctttcttttagtggtttcagcatctgtcaaaggttcttatttgaatttccatcctatcaagggctgcaaaatggtgactttctgaccgtattattgcatctacattcacagctgacattcttcaataaagaaaagttttccttcatcaagtagaactatttagttatgctgaaattcagtatcttctagaaagacattaaatctttaattatttttaattctcaattctcagaataaccaattcatgtaataatcacctccagtgatggcaaatgagttttgttttggaagacattctcttttctagttatgtacttgcggagttttatatattcatagtcatttttaaatgctcaggttgtctcacacttgccactgtatactcttcaactagaatgctacttaacccagattaaaatccacgtttcccgtgta

SEQ ID NO: 730613 - DNA, 469 bp, Homo sapiens; identical to SEQ ID NO: 728600

SEQ ID NO: 730614 - DNA, 1307 bp, Homo sapiens
  misc_feature (801)..(801): n is a, c, g, or t
  misc_feature (1255)..(1255): n is a, c, g, or t
  misc_feature (1267)..(1267): n is a, c, g, or t
  misc_feature (1271)..(1271): n is a, c, g, or t
  misc_feature (1276)..(1276): n is a, c, g, or t
tctgtgtcattggcgtaccagtgctacacgggttagcctggactaaaggcatccttgtcttgtgagctatacacctcagtagaaagaggatctaagggaatgatcactgtagtttagttctgttgacctgtgccaccttacccctttgtgaattgtctgcttggtatttactaattccacagggtcatcagatgcctgcttgataactatatacaacaataacataacatactttcacttcttcctattgtaatcgttgtgccatggatctgatctgtaccatgaccctacataaggctggatgtgcaccatcacgtgctgagtggccccatatgtactgtgtggctgtgggtgtgggtgggagtgtgtctgctagagtcacacggcaacacgattttcaagattctaaagctcaattcaagtgacacattaatgataaactcagatctgatcaagagtccggatttctaacagtccttgcttggggggtgtgctgacaacttagctcaggtgccttacatcttttctaatcacagtgttgcatatgagcctgccctcactccctctgcagaatccctttgcacctgagaccctactgaagtggctggtagaaaaaggggcctgagtggaggattatcagtatcacgatttgcaggattcccttctgggcttcattctggaaacttttgttagggctgcttttcttaagtgcccacatttgatggagggtggaaataatttgaatgtatttgatttataagttttttttttttttttggggttaaaagatggttggtagcntttaaaagggaaaattttctcctgggttggctagtatctggggggtatcctcgtggtaagtgtagcctcaaataggtcatcatgaagggttaaaaaagcgaggtgggccagtgttagtgcgggggggtaaaggccagggcctctccaaccacgggtgccactgacttgctgtgtgacccgtgggcaagtcacttaactataagggtgcctcagtttcccttcgtgttaaaaggggggataataatactgacctacctcaaagggcagtttggaggcatgactaaggcttttaagaaagcattgtggggatccttcagcacaggaattctcaagacctgagtatttttatactaggaatgtcccccatgaacttgatacgtccgtgtgtcccagatgctgtcattagtccttttggtccctccagaacctgatgatccctgggacgggggtactngccgacattggntctnacagntgcggctcggggccttggggggttcccttgg

SEQ ID NO: 730615 - DNA, 1872 bp, Homo sapiens
tctgtgtcattggcgtaccagtgctacacgggttagcctggactaaaggcatccttgtcttgtgagctatacacctcagtagaaagaggatctaagggaatgatcactgtagtttagttctgttgacctgtgccaccttacccctttgtgaattgtctgcttggtatttactaattccacagggtcatcagatgcctgcttgataactatatacaacaataacataacatactttcacttcttcctattgtaatcgttgtgccatggatctgatctgtaccatgaccctacataaggctggatgtgcaccatcacgtgctgagtggccccatatgtactgtgtggctgtgggtgtgggtgggagtgtgtctgctagagtcacacggcaacacgattttcaagattctaaagctcaattcaagtgacacattaatgataaactcagatctgatcaagagtccggatttctaacagtccttgcttggggggtgtgctgacaacttagctcaggtgccttacatcttttctaatcacagtgttgcatatgagcctgccctcactccctctgcagaatccctttgcacctgagaccctactgaagtggctggtagaaaaaggggcctgagtggaggattatcagtatcacgatttgcaggattcccttctgggcttcattctggaaacttttgttagggctgcttttcttaagtgcccacatttgatggagggtggctgtcatgcagcagctgtgactgatgtgctggtttagagggtgtctcccgagaggacccagaaattcaggaacgttccctgtgaaattacgttgccccgtgtgtgagtggtctccatggcaacttgagagccagaccacggcatgggagtaggagagcagcaggaaggcaactacgtgggcagggcagcaggacccccacgaacacacaatccaaccatatacccccacaggacacatgaaggctcccaagacaaatcttgacagaacggagaccccacagaacagaacaaacaccacaatcagaagaacacgacagagaaaaagccacaacgacaagcggagaagagaacagcagcccgaccccagacaaaaacaccaaacacaacacacaaagggagacaacaaacagcaggcagcagggcagccaccaccacacaagcagcccagcaagccgagagacagaagagcaagacaccaagcaaacgccgcgccagacgcacacggcgcagcacacagacaggacaaaggaaacaaggccacacaacagcaaccaacaacacgcacaccgagggcacacagagcacaacagaaacccacacgcacgcccgcaagaacagaaaaaaagacagaacaacaagagcagagaacacgcacacgacgccggagaagcgaaacacgaacacacaacaacaccacaccgacaccaaaaacaaaaaccacacacaagcaacaacaaggaacgacccgaccgacagacgcacgaaggaaaacgggaagaacgaaggaaagaaaaaaagaaacacagggcaacaaagcaagaaaaggacaaacacgaaaacgacagaaaggggaggagcggacggagggaacaagaagaaaaagacaacgaggcaagcagcggaaaaacaggaaacaggaagaagcaagagggaaagacaagcgacgcgaccagcggaggcaaccaggcagcgagaaaggcgcgggcaacgagagggccaaacgcgccacgacgagcgcaacgggaggagagcagcacgcaacagaaaacagagacccaaacacaccccgccgccagcaggcaaaacgctgaccgcacaccccaacggaaagaggagaccacgcagcgaccggagccaaac

SEQ ID NO: 730616 - DNA, 796 bp, Homo sapiens
  misc_feature (21)..(21): n is a, c, g, or t
  misc_feature (23)..(23): n is a, c, g, or t
  misc_feature (250)..(250): n is a, c, g, or t
  misc_feature (672)..(672): n is a, c, g, or t
gtctagtacaggcctgggtgntngacccggctgcgcgggtgtgtgcgggcgctgtggcctggtgggtgctgccttgtgcctggaggctggtgagtgctgcgccccagccgctgctacccacggcagagccgggctggcttcgcgtggggcggcgtgggcggccctgagccccgtggctgcagctcgtaaggggagccctgctgggtgctgggagctgcgtgcgctgtgccctgtggtgggatgccctggngtgctgtaccacacggcgcggtggcacctgcgcgcccaggacctccactgcagagcgctcagccgcgcagctctccctgtccagccgcctgcagcttgaccctgtaccagtacaagacggtgtcccttctgcagcaaggtccgagccttcctcgacttccatgccctgccctaccaggtggtggaggtgaaccctgtgcgcagggctgagatcaagttctcctcctacagaaaggtgcccatcctggtggcccaggaaggagaaagctcgcaacaactaaatgactcctctgtcatcatcagcgccctcaagacctacctggtgtcggggcagcccctggaagagatcatcacctactacccagccatgaaggctgtgaacgagcagggcaaggaggtgaccgagttcggcaataagtactnggctcatgctcaacgagaaggaggccagcaagtgtatggtgggaagcgaggccagacggcaggagagagattaaagttggaggaagagggcgggaagagtggatggtgcacctgagtatcaccc

SEQ ID NO: 730617 - DNA, 2311 bp, Homo sapiens
gccgggacgcagcccgagtcccagttcccgccgtagcgatggccgatttcccagccgcggacgctgaaagcgaggactccacgccgatgacccttcggcgtaccatgtccggcgggcgcttggccaaacagcccaagactgcggaatcacactcgccactgtgtacctagacgccatctgcagacccagcgcctgcggggattccggaaacgggagagcgggcttccggaaacggtgaccaatgggaaacgtgatcagatgttactaggcgaacagtccgtttccaggcaacacagaaggaagagacgctctcagtcaccctaaaatagacggagctttcagccaatggatatgcaggtttgctccagattagccaataagaagtgtttggggccggccgagcgcggcggctcacgcctgtaatcccagcactttgggaggccgaggcgggcggatcacgaggtcagaagatcgagaccatcctggctaacacggtgaaaccccgtctctactaaaaatacgaaaaattaaccagacgtggtggcgggcgcctatagtcccagctactcgggaagctgaggccgcagaatggcgtgaacccgggaggcggagcttgcagtgagcggatatcacgccactgcactcctgcctgggcgacagagcgaaactcggtttcaaaaaacaaaagaagtgcttgtggccgaccttcctacaagcacagcagaaactttcctgcgcatttctgcgctggaacgcctacccgccgcgccaaaccaaaactttgcaatcacgtttggtgctgtttcctgcactttcttggagattagcaccaggcgctggagaccctcccacctcgcccacgcccaccgcccggtgaacaccgagacccaaccttgtgcaccgccagtcttgtgatcaacaaacaggctagtaaagtataaaaataaaataaaggaaatgtagtcgggcgtggtggcgtgcgcctgtaatcccagctactccggaggttgatgcaggagaatcgcttgaacctgggaggtagaggttgcggtgagccgagatcgcgccactgcattccagcttggacagcaagagcgaaactccgtctgaacatagtaaaataaaataaaggaaatggggccgggcgcggtggctcacgcctgtagttccagcactttgggaggccgaggcgggccgattacttgaggtcaggagttagagaacagtccggccgccaacatgatgaaacccccgtctgtactaaaaatacaaaaattagccaggcgtgctggcgggcgcctgtaatcctcccaaagtgctgggattataggcatgcgccaccatgcccggccggcttatgatttaaaacatgaattgtttatttctggaattttccacataatatttttggaccaaggttgcctcaggtaacaaactacagaaagtgaaattgcagataaaggggattactgctcctctgctctaaaattggtgtttgggtgatcagaagcaggtagccaatgggaagagcacttctgagtgataactaaagcagtttggtggccttttcacattctccaatgttcaaacatattttccactttccattttctctttcacctcattttgcctctctatcccccatccctgcttatttcttaagcccattgatggcactcattaaattgtatttagggctaatgagtcattgttccttaatatcgttttcaatatgccacaatttaggacacatttaaaattttctaaaacaatatcctaatcaatattgactaatttgagccacattcccaactctaactcagcacacactgccagtcttccccaatatctgtctcctctcaattccccaccacaccttataaaattgtaatcaaagatatctcactctgtcattgttaatctaagaataaaaacactgactttaatacggttttactaagtttcaaccttctaattaggtaggcctctaggtattctgcagatcactgctggtcttgatagccattaatatatgtttgtattatgttatttttcaactaaatcgcagttggaaaaaaacatatttaatattatgcccttggatctgttactgcatcactagcacttgtgatgcaatagaacacttcgcctgtactgaaagggccaagagtaaatgccttgttttgtttttttgttttgttttgttttgctttttgttaaaacatgtctatagagttggcagttaatgctgaatttgtcaaataccccttccaaaattatacttgtatttaaaaaataaatggatctacct

SEQ ID NO: 730618 - DNA, 925 bp, Homo sapiens
gaactaggtcacgcgctccgcgggtcgggcacccccgcccgccaggcacggccgcggctccttcctcttcctgcccgcggtagtgggggtggggcaggcctcgggacacctgcctccgccgccggcgccggcgccgtcctcgcgcggcttcccgggcggtctgccccgaccgtagactcccggcccgctcgccgcggcaggagccgtggttccgcggacctgggcgcgctctctccctggccactgggagaccccccgcggcctcgcggggaaaacctcgggactgccccgcgcccccggccgtctctgcgtcgctccttctcgcccgcgaccgtggactcgtcctcgcgagcctgggttggcggaagctgcgggggccggggtcgcactacttggcgcggaagggccggcggtgggcggagggatccccgtccgcggggtgagccgctgggcggagccgggaggagccgcgaggatccgcagtggggagccgggaggaacctggcgccggcacccacccgccgcgcccacgcgtgccgcggtcgcttgtttcccgcgggagcccggccgcgctcggggggaggcgcgcgcgcagctggggctgcctgggtctaggagctccggagccaccgtttggtgcccgtggagccgcggggaaggcgcacgcgctcgggtcttcccggcgggtcgtcctgcactttctccatctcggtacggaccgcggcgttctgttccaggcaaggcaaattagtcaacgactcagaaggcagctgaatccgggcctgggatgccaggttgctggaacagcagacggtgcgatcgccccctgggaatcggatagccgggcgtccatatcctgctggtggacccagaaggccgaattgccaggctgaggctggttggaagcggcaaaacaaggccggaa

SEQ ID NO: 730619 - DNA, 1072 bp, Homo sapiens
gaggcttgccctccttccctgcctgccgggtgcgtgtgagcggctgccctgcggatgctgtcctggacctgttggcaccacagacagttgctctgctgtgcctgtggcctcggggcaaagagaaagtggcgatttctacactcagtgctcgggaaccagtgggcactgagaatggtttatggcctgacattacttgcaaccaaagccaggcagcatttggattttcgcttttggaaaccaccttacctggtttgctccatgagggaggggcagcaacatcgctgggaaccctgaggtgtagatatgtataaatgagctgtgtgtgtatctgaagctcgggcacttgtggggttaccaggagtgtgcgtctcactcccaggcctcgttctggaaacgattctgtaggtctgtctgggaggccttaggcaagtttgatcaagaacagtcgagctggataaacaggctgttccttgtccagcactagtcatcccaggggggcgggggcggggctgcaactcctgtgcacaaaggaagggccctgggtaggggtcaggagctgccttgcccagagatgtgtctgggtcactttggaaacaggaatcctctccccaaaatgggtagcaatgggggtacagaggccaaagacgcagctgcatgtcctgcagtgcctgggacgccccgtagtgaagagtgatgtggcccaaatgtcagcagtgccagtgtcagactcctgctaagagacagtatcaagaaagataacttcaaaatacactttctggaggcctggcgcggtggctcaggcctgtaatcccagcactctgggaggccaatgcatgtggatcacctgaggtcaggagttcgagaccagcctggccaactgcctgaaaccccatctctactaaaaatacaaaaattagccaggtgtggtggcgcaagcctgtaatcccagctatttgggaggctgaggcaggagaatcgcttgaacccgggaggcagaggttgcagtgagccgagatcgcaccactgcactccagcctggacaacagagtgggactctgtctcaaaaaaaaaa

SEQ ID NO: 730620 - DNA, 710 bp, Homo sapiens
  misc_feature (18)..(18): n is a, c, g, or t
gctgagtgcggccgcganggggcgggcggactctcgggcgctcagagctggcctcgggtcctcggagcctggcgctcgaacctcccttccgacctccacccggaccccgaccgaacggctggccgggccgaagaacggcgagagaatccatactcctgaagtgcggtaggagattcggtggcgatggtgagacgcaaggaaggactgaattgcgatggtacttgtggatgttggtgactgtgattgtgcagttagttgtgcgggggggagataccgaagagacgaggccacactgtaggggacggatggtggagagtgaggagaacaggtaacgaccgctgtaaacgcaggacttagggagagcatgggagtggtgagggacttacgagaggatgacgatgcggatcaggtggcggctcaagacacccaggagagacaacaacgatccgggcgacgtaggacgaggaaaccaaaagggagcacccgcgaaagaagaccaatcacggcagagctagtgcgccgaacagaaagccgaccaccggcaggacggggaccactagaaggaaacacgagcgtcatcgagccacaaaaagcgcaaaggaccccacacagcagaacagcgaaacagaagatacatcgccattgacgacacctacttagagagcccgaacagttagacgacagctgctgatcggagcgacgacagcaca

SEQ ID NO: 730621 - DNA, 749 bp, Homo sapiens
tttgtttttttaggtttccgtgtgtttctattgagctgctcagtgcccggcttagaagaccaggaaaaggagtcacaggtcgtatgctggaggcttgagccgcggcaccgtggcgcggctcgcctcgctgcggttggtggtggcggtggacattgcagcgcggctggaggggtaggaagaagaagatagttttgggatagatagagggtccttagacaaggtgcaagacaaacagaagagggcatgtggggtcaaactcgctagctgcctgcctgatttttctgcacacaggtgagatattcctgcacatcctctggtgaccccagaatgagggggactcgctggtgaattgcctcgggcttcacgtccagtacaggctgggtccccgtggtcgccaagcctcctgcctgctcaatgatgtaggccacgggattgcattcatacaggagccggagctgtggaggaacagaggcaggacaaattcaccaagagcctagcaacatgaagagagatgccaggaagaagagagaagccaggaaacaagccaaccgcacaatccccacatcagagcaggagaagatgggggcctgctggcagagctggggcttggctgtggtcactctgaacctgctctttggtgttttcatgagtggtgggaagaatagggaccatatggagcccacacaggaagctctagcagtaacacagcagcaggaagacattctaggaagcagccatatagtcttctt

SEQ ID NO: 730622 - DNA, 759 bp, Homo sapiens
tctctcatgtgcttctctgcatctctgattcagccatgatctaattatctcagtctgtttccctatgcgtgcctctgtctgtctgtgggtgtctctaagtctctgtagatagacaggtaggtagggagagagaaagagacagagagagagaaagatccactctttctcttccctgccccttcttccttgcctctcctctcctaccaacttcccagtactctcagcatatccctcctttctagagctaaagaagtagagcaattccactggggaagcagcgtctaaagggtatttggtcaccttctccatgtgcagcctttgcagtacgctgcccctccagtctacagcaagtttttcagcttatgcacctgttgcaggggaagggggcaggagcactgtggtccagcagcatggccattggcggagctgtctccatggtgagcagcagagcccataggagccaggggagcacgtgagcagccctaagggtggatggagaggctgcctcaggtcagaaagccatgcagctcttgaggctgaggatccaatggcactcctgggaaatccctcccaggccctgtactcatctcttcctttcaccttccttcatgaaagcttttgccactgcctcttctagagaagattgtgagacccttgagactgggggtttctgacatcgagagggagatccagaatctgtggccaaaaacattcttcccaaccccagtgctgccttctacacccagctgcctccttctt

SEQ ID NO: 730623 - DNA, 791 bp, Homo sapiens
gtaagaagtgcttttcacctccccccatgattccgaggcctccccagccacatggaactaaccaggacatcagaggaagaaaatcagcagacagaaaaatactggggaaaaaaaaatgccacgtggttctgttcagctgagcttctgctccctccagcacccccacatgggacatttgtttaccccccacgatgctgctcttggagagtcccaggggacaggtttcaagcccttagggatgcagcctgtctaacttaatatgcacagccgttcacatccagggcacagaggcagcctggctttccctggaggcccacggggaccacaatgctgcatttgtctgtggaactgagatttagctgcacattcttgcctgaatgcagcgggcctccagccacagcctgctggcatgggggattccaggagggatgtgcttcatgagccggcaattgcccttctttccagtccccagacccagtcaagattacagatagatgcgttcatcgcgcgcaggtgctggggaagccagtgggacatcactggctacattcaccaacaggattttccaactgcagtatttatcggtttttcaaacgaattcaacatctgtattcctcacccatttactgagtggctacaatgtgtaaggaaatattctcagtcatggggagttcagaaaaggtccaaggcatataagatatggcatgtgctctgagagaactcatcatctatccagaacctaatcatcactttgtggacaacgcgagagaaactagcattctatggagtac

SEQ ID NO: 730624 - DNA, 1197 bp, Homo sapiens
ggcacgaggtgacgatgaccaccttttcatatgcctgtttgccatttatgtcctctgtagcaagaggcaggacaaacagtgaggactgcaccaacactcaccgggtgacccctttgctttggaaacttactcagggtgaaaggaattccgattttaaacagcatctctttgtgtggcctgtttgaggcaccacacagagcttgctggagcagctctgttgaccgctgacccttggcctgctaactgaaacaagattcacaagtgaggctgctgccccagtttcatggatgctggcagaagacttaagatttctgaatcagagacagaagacttcatttatttgtcacagctaaagcaatggccagtgtcagtgtatttgcactggtgcctcaagccctgatgcccacggggtgatgcagagaccctatgactcccgcacatgcattgggtcaagtcacagtagaggaccactgagctgggcaccatgtggacctatagcaggcagcaggcaagccctctcctttgaggttcctccctgcaactacgaccccgaaaaatggatccagtaaagaagagtcaaggctttatagtcttggtgcacccagtaagacctgtaggagaacaggaagcctgtggaggactgtttcttccaaaagtttccaagtgttagctcttacaacatgtataaacaacactgcaatttgtctccttgcaccgtacatccacgaagcagatttgcttcttgccaaattatttccctcagtgatttcaggaactgacaattcccagtcgcatataggaattttcttgcgtcttcttttcctgactaactcttgcgttgtcagacactttcatttgtgctaagctgataagtatcaaacgatgatgcaggctattcattatgtgtgtccttgattactgatgagtttgagcaattgtcatttgttggactgatcgttcaatttcctcttcggtccttggccttttcatatattttgccttttcttgtaggtgtgtccttttcaaattgatttttttggtgtttttggtatatcctgtgtactaattctttgtcatttatatgcattaataatatctcctttcactgtgtggcttgtcttctcaatttgtttttgggtttttgtttcagagaacattttataagctttaaataataaagtttatttatttttaatt

SEQ ID NO: 730625 - DNA, 978 bp, Homo sapiens; identical to SEQ ID NO: 405169

SEQ ID NO: 730626 - DNA, 3126 bp, Homo sapiens
ggcacgagggtgagggtgtgagggtcgcgctcctgctgtctggactttttctgtcctactgagacacggccgacatgagatgatgaacctcaagtaccaccccagacaacaaggctgcttcatcaggacacaaacctgcctgtaccaggacctctgacctgtgtgcagcagagacactgaggataccattggcatcaatgtcaaaagtgacttcaatctgaggaacaccttggggttcaggaggtatgcccgtgaattcaaacttgccaagcaggttgttatccttggacatggcacgctcaccttcataaacctgaataagcacaccaggctggttgtcagaataggtaatgaaggtctgtgtctgcttggtaggaatggtggtattacagttgatgaggatggtcatgactccactagcagtttcaataccaagggaaagaggagtgacgtccaagagcagcaaatcttgaacattttcagacttgtctccagacaggatggctgcctggacagccataagcaacagcttcatcatggctgatgctcttattcagttcttttccattgaagaagtcttggagaagcttctgaatcttggggatactaatagaaccaccaaccaggacaatatcatgaatttgtgacttgtctggtttggcatctcgaagggctttctctactgggtccagggtgccacagaacaggtcagcattcaattcttcaaactgggcacaggtaatggaggtatagaagtcaattcctacatagagagaatcgatctcaatactgacttgggtgctggaagagagagtacgcttagcatgttcacaagcagtacggaggcatcttacagctctcttgctctcactgatgtccttcttatgcttgcgcttgagctcagcaataaaatggttgaccattcggttgtcaaaatcttctccacccaagtggttgtctctggctgtagacttgacctcaaagattccatcctcaatagtgaggattgacacaccgaaagtgccaccccccaggtcaaagataagcacgtttctttgtgctccaacctttttgtctgaacttttgtaaacaatagcagcaacagttggctcattaataattctaagtacattgagaccagcaatagttccagcatctttggtaacctgaaactgagagtcattaaagtaagctggcactgtgaccacagcactggtaacagtcttcccaaggtaggcttctgcaatttccttcatctttgtcagaacaatagaggatacctcctctggatagaagcttttggtctctcccttgtattctacttggacctggggcctgtcagcatcattcactaccatgaagggccaatgcttcatatcagactggacaacagcatcatcaaatctgcgtccaatcagacgtttggcatcaaaaactgtgttggtggggttcattgcaacttgatgctttgcggcatcaccaatcaactgtttagtgtccataaaggcgacatagcttggagtggttcagtttccctgatcattggcaattatctctacttttccgtgctggaaaacacccacgtaagagtaggtggtgctaagatcaataccaactgcaggtcccttggacatggttgctggcatgtagccctggctccgataaagaagaaagccacaggaacccgagagctgcaggcgagttcaatgagctaggatttcttaatatatatgtgataatgttttaactttgataattgacttttataatgacttgagtagtcttaaattgtctttcatttaaaacttttgttcttttaaaaaagcaccaagtctatgctactaacaaaaatttccttttaccatgtagactacttgggatgaaaataacttttcataattactatcatgaagggaggagagtggaaagttgccagatactgcagcaagatataaagatgaattcttcaaatgaggaagcaaactttatcaagtggttgaatttcttagatcaccttgttggacataatttcttgtaaacaaattatgcagtcagtgtcacgttcatgcagagtcttttaacttaaaattcattacaggtaacactttcaaaaagaagttctgtagtcttgcatactatttaccacaccatatttactgcacttagcttcattatggaggaaagaacaatagtaaactatcaataactgagacaataatcatattcattagtgatgagtcaaacaggttatacttattttttaaaataaaaacatttgtaaatttttctctacgtttttaaaacaacagtttaacaatagcagttctgttattttagctttaattttttgtaccaacagttaatttgctcatgcccaaagatttacatttataaaaaatgttctgccatgcaagttttaagagatttttgaattgttgacaatactcagcacagtcacatgtctctcataaatccacccagacttaagaaccaattttcagtgcaactcatgaagacaaagaatagccattataaacacattgttgaaaatcatttaaaaaatcattaaatttttttgcatttaatattttttcagctttcttaagatataattaacaaaaattgtatatattcaagttgtgttatgtgaggttttgatacatgtatacatagtaaaataattaccacagttaagctaattatactatacatagtaaaataattaccacaatcaagctaattaatatatttattatcacacataattctttttcttgttgtggtgagaatacttaagatctactctcttagaaaatttcaggtatataatacattattattaaccatagttgccatgctatacattagggctccagaacttattcatttcataacttcaagttataaaagtcacgataaaagtttgtgccttttgcaagtttgtaccttttgatgaacatcttcccatatcttcccattttcctcagtcccctgcacctggaaaccacccttctaaactgtttatatgagttcaccttttttcagattccacatataagtgagatcatgcagtgcttgtgtttctgtgtctggcttatttcacttagcataaagtcttccaagttc

SEQ ID NO: 730627 - DNA, 1692 bp, Homo sapiens
  misc_feature (735)..(735): n is a, c, g, or t
  misc_feature (1128)..(1128): n is a, c, g, or t
  misc_feature (1139)..(1139): n is a, c, g, or t
cagatcggatcaggtcgggcgggggtaattcggacgaggctcgggttaccttcactgctctgtgtcctcagcgtgtgtggcttcgtgacctgaagatactgggaaatccatagctaagatgccaggaccccctgaaagcctagacatggggccgttgacatttagggatgtggccatagaattctctctggaggagtggcaatgcctggacactgctcagcaggattgtataggaaagtgatgttagagaactacagaaacctggtcttcttggcaggtattgctgtctctaagccagatctggtcacctgtctggagcaaggaaaagatccctggaatatgaagggacacagtacggtagtcaaacccccagtagagacggggtttcaccgttttggccaggatggtctctatctcctgacctcgtgatccgcccgcctcagtctcccaaagtgctggtattacaggcgtgagccaccatgcccagcctaataaaaatttttttatttctattgtatccaatagcttgttttaagtgtgtagaacaataacttacacttttatgttaattttatattttgttaatttactgactgtattattagtttagacaaatttcaatgtactgtggttttttatgtgtaagattatatattcctcaaacagcaactttttacttatttgtcttcagtttcaatggctttaaaaagaattcttttttcattattctgccanatgcttccagtgctatgttaaaatagaaacattgacaaagggcacaatagagtttactattggtgtctgtgaatttgaaatggcaaacaactccttaagtttttataagctgatttcaggaggtaaagatcttcttttcttgtgttccccagggttttgggatgccctctgggtttgtagtggagtggggttgtaacttggttgcaaggctgctggttctacattagggtccatatttagttgtcatgttacaagaggcttgggtagttgtacttcccaatttttttttttttttttttttttgagacaggagtctcgctctgtcgcctggctggagtgcagtggtgtgatctcagctcatcaaaacctttgcctccctagttcaagcgattntcctacctcancctcctgagtagctgggattacaggtgcccaccagcacgcccagctaattttttgtgtgtttttagtggagacggggtttcaccatgttggctaagctgggtctcgaactcctgacctcaggtgatccacccgccttggcctcctgggtgctgggattacagacgtgagccaccacccccggccacttgtttcttttaaatgcttattaaaagtttctcatcagaatattttatttataattatactgcatattctctgaaattttactgccaatttttcaaaatacctgcttttgatgagtacagttacagtcaaatactgtagttagacaaattcttttttaatggtatattaatgttgcataccaaattgtatgagttaaacgtctcttcctgtgcagtttcatattagtggtgttttcagtgtaggtatcttaatatcagcttatcgtggtttttggttatgtattataattttagtcaatttgcaattctgtctgtatactttatgtcaatgtgaggttgaattaaaagatagccatatgtctatcac

SEQ ID NO: 730628 - DNA, 442 bp, Homo sapiens
  misc_feature (224)..(224): n is a, c, g, or t
  misc_feature (226)..(227): n is a, c, g, or t
  misc_feature (284)..(284): n is a, c, g, or t
gcgcagccggcgctgagcttgcagtggccgctcccctcacccgcccccttcgagtccccgggcttcctgccccacccggcccgtgggggagtatctgtcctgccagcttcgcccacgccctgactccgggaccgtccctgcgcgctcttgggcgcaccaatggcccgcggggctgcgctggcgcatggtgctcttcgagcctgctgggtgtactggtcggccgncnncgtcgtggtggtttcgatttatctgatgcccttcctgacaatgaaaacaagaaaccnactgcaatccccaagaaacccagtgctggggatgactttgacttaggagatgctgttgttgatggagaaaacgacgacgacgacgacgacgacgacgacgacgacgacgacgacgacgacgacgacgacgacgacgacgacgacgacgacgacgacga

SEQ ID NO: 730629 - DNA, 681 bp, Homo sapiens
  misc_feature (224)..(224): n is a, c, g, or t
  misc_feature (226)..(227): n is a, c, g, or t
  misc_feature (284)..(284): n is a, c, g, or t
gcgcagccggcgctgagcttgcagtggccgctcccctcacccgcccccttcgagtccccgggcttcctgccccacccggcccgtgggggagtatctgtcctgccagcttcgcccacgccctgactccgggaccgtccctgcgcgctcttgggcgcaccaatggcccgcggggctgcgctggcgcatggtgctcttcgagcctgctgggtgtactggtcggccgncnncgtcgtggtggtttcgatttatctgatgcccttcctgacaatgaaaacaagaaaccnactgcaatccccaagaaacccagtgctggggatgactttgacttaggagatgctgttgttgatggagaaaacgacgacccaggacaccggaacccacccaaaccggatgccaatatccaaacccaaaccaccctaagttcctccgggtagcctttcagattgctgaacctttgcgagatggcgttcaggtggaagcacggaaacggaggcagtgatggtggcaggcagccacaggaaacgcacagggcgaagagggccgaaagccccaaggcgttgatccccgggagattgtggggggcatgtcgatggtcggccgttggcatggagccattctctagcttcattgctaaccagaaaagagacgctatgcttccaaggaaaatgcgaacaagggagg

SEQ ID NO: 730630 - DNA, 890 bp, Homo sapiens; identical to SEQ ID NO: 178664

SEQ ID NO: 730631 - DNA, 902 bp, Homo sapiens
  misc_feature (716)..(716): n is a, c, g, or t
  misc_feature (718)..(718): n is a, c, g, or t
  misc_feature (720)..(720): n is a, c, g, or t
  misc_feature (858)..(858): n is a, c, g, or t
  misc_feature (860)..(860): n is a, c, g, or t
atcatcaactgggcacaaagtaagggactctgtgtttctgaatcagaagctaccactacatgccagatttgtgacctctgccaaaagttagcctatttgtctcatggtgaaagaggccatattgcactgagtgttgactggctgcagagtgttgactggctcctggtaaattggtgacatcagacctttgacctcttccaagctattccactggtatctcattcctgttgactttttctcaggtaatggttttgctgttctagtctgatcagccaattgtggccacatcattgtggcccttgaaactaatctgtgtcatgattttggctttctggatggtgataatactgcattttttagtgcaaaaactcatcaacaatgggcttatagtcaaagtatttggtagccaattcattatcttcagactggtggtaccattgagagatggaataaacttttaattaaaaaacagcttaattgagatgtaattcacatatcataaaattcaccctttggaaggtttttagtttattcacagagttgtgcaaccatcctacagtatgtagtctttgtggctggcttccttcacttagcaaaatgttttcaaagtttatccatgtgggccgggcgcggtggctcacacctgtagtcccagcactgtgggaggccgaggtgggcagatcatgaggtcaggagatcaagaccatcctggctancntngtgaaaccccatctctactaaaaatacaaaaaattagccgggcatggtggtgggtgcctgtagtcccagctacttgggaggctgaggcaggagaatggggtgaacccaggaggcagagctttcagtgagctgagatcncnccattgtactccagcctgggcaacagagcgagactctgtatc

SEQ ID NO: 730632 - DNA, 1299 bp, Homo sapiens; identical to SEQ ID NO: 178863

SEQ ID NO: 730633 - DNA, 669 bp, Homo sapiens
ggaatgtggaaagaaacgaggttaatatcttttgggaaattaatttgtgccaaactatttggcttcttcgtcctagttgcattgtctccctgacctcatctcccctgagaatcagcctctgtttccctggtcaaggccacggcttttctctgatcctgaggagagtttcctaccagagtggaagcagggaggactgaaagcactaggaacagaggggagctatcggattgcatctagaacctgctgtgagcaacatcttcagaattaaccataatgtgttccctcctttcctgtgtccagatgaggaaggagaactttgattcttccttccaattacatgatgcgagaggaaatcttatgaaatgttgggaggccattaaaggaggcccatgcaagagttggtggtagcaatgggcacaactgggatgaacagcctgtgttttcaagggataactggaagcagagatgagtgaaggggaagaagtagaagacgcatatgctaatagggcatgctccaatagtgctcatgacctcaggtggcctctccacagtctaaactggagctgggatctccaaaggccctcttcgttcccaagactttaattataatctgtatatgcaggtgactccctaatccatatttccagcccagtctttcttggaattaaa

SEQ ID NO: 730634 - DNA, 696 bp, Homo sapiens
gaacaccttctccctttggttttggtccacagaagactggtgatacagattgcattgtctccctgacctcatctcccctgagaatcagcctctgtttccctggtcaaggccacggcttttctctgatcctgaggagagtttcctaccagagtggaagcagggaggactgaaagcactaggaacagaggggagctatcggattgcatctagaacctgctgtgagcaacatcttcagaattaaccataatgtgttccctcctttcctgtgtccagatgaggaaggagaactttgattcttccttccaattacatccaaaatatccacacaactactaatatttggaagctttgatcctttggggtgaggatgcgagaggaaatcttatgaaatgttgggaggccattaaaggaggcccatgcaagagttggtggtagcaatgggcacaactgggatgaacagcctgtgttttcaagggataactggaagcagagatgagtgaaggggaagaagtagaagacgcatatgctaatagggcatgctccaatagtgctcatgacctcaggtggcctctccacagtctaaactggagctgggatctccaaaggccctcttcgttcccaagactttaattataatctgtatatgcaggtgactccctaatccatatttccagcccagtctttcttggaattaaa

SEQ ID NO: 730635 - DNA, 1387 bp, Homo sapiens
tccatcagggtgacccagaagtcctacaaggtgtccacctctggcccccgggccttcagcagccgctcctacacgagtgggcccggttcccgcatcagctcctcgagcttctcccgagtgggcagcagcaactttcgcggtggcctgggcggcggctatggtggggccagcggcatgggaggcatcaccgcagttacggtcaaccagagcctgctgagcccccttgtcctggaggtggaccccaacatccaggccgtgcgcacccaggagaaggagcagatcaagaccctcaacaacaagtttgcctccttcatagacaaggtacggttcctggagcagcagaacaagatgctggagaccaagtggagcctcctgcagcagcagaagacggctcgaagcaacatggacaacatgttcgagagctacatcaacaaccttaggcggcagctggagactctgggccaggagaagctgaagctggaggcggagcttggcaacatgcaggggctggtggaggacttcaagaacaagtatgaggatgagatcaataagcgtacagagatggagaacgaatttgtcctcatcaagaaggatgtggatgaagcttacatgaacaaggtagagctggagtctcgcctggaagggctgaccgacgagatcaacttcctcaggcagctatatgaagaggagatccgggagctgcagtcccagatctcggacacatctgtggtgctgtccatggacaacagccgctccctggacatggacagcatcattgctgaggtcaaggcacagtacgaggatattgccaaccgcagccgggctgaggctgagagcatgtaccagatcaagtatgaggagctgcagagcctggctgggaagcacggggatgacctgcggcgcacaaagactgagatctctgagatgaaccggaacatcagccggctccaggctgagattgagggcctcaaaggccagagggcttccctggaggccgccattgcagatgccgagcagcgtggagagctggccattaaggatgccaacgccaagttgtccgagctggaggccgccctgcagcgggccaagcaggacatggcgcggcagctgcgtgagtaccaggagctgatgaacgtcaagctggcctggacatcgagatcgccacctacaggaagctgctggagggcgaggagagccggctggagtctgggatgcagaacatgagtattcatacgaagaccaccagcggctatgcaggtggtctgagctcggctatgggggcctcacaagcccgggctcagctaaagcctgggctccagctttggctctggcgcgggctccagctccttcagccgcaccagctcctcgagggccgtggttgtgaaga

SEQ ID NO: 730636 - DNA, 789 bp, Homo sapiens
acttaatggttaaaaagcaatgataaaactggacattaatgaaattgatttttagttacagttggaataagttttttaccaaaaagaaaccagagacgttagttaaggagacttaaaaagatctgaaatatgaaaagagaatgagaagatgagcagaagataaatttgtgggacacaagtataacttggggtagaaactggagaagagaatcgaaaaacaataatgccagaaggacccttggtatgaaagtactaatggaatgtgattcatagaaagttcatagaaagtgagtccttgcaacttgagaaacatacatacatatatatttataatctctaaagcaacatcaggaatcttctaatatatgataaagaatttgtgtagaattacgttgttcacagtattattggagagacaaataagatttcaaggaattcatttataatcaaaagtgaaatgtgtcttcttgaaaccagcaagaaatagatgaattgagtgaaacgtgttgttattaggagaagtgggataacgtatacaaaaagaacatgcgatctgaatatgatctgaatatgagggtggataggaattttttgacagtgaaatctgttatgatgtagtctcatttccaagaaaagtcttgagttccatccccttctgaatttaaattgaaacctggacagaaaacaaactatcctgtagtttccactgctcaggaggaacaaacagaatctatattatctaatgcatcttgccatctttatttctagaatctataagattttcattat

SEQ ID NO: 730637 - DNA, 1215 bp, Homo sapiens; identical to SEQ ID NO: 285678

SEQ ID NO: 730638 - DNA, 1582 bp, Homo sapiens
cttccacactgtggaagctttgttcttttgctctttgcaataaatcttgctactgctcactctttgggtccatgctgcttttatgagctgtaacactcaccacgaaggcctgcagcttcactcctgaagccagcgagaccatgagcccgccgggaggaacgaacaactccagatgtgccgccttaagagctgtaacactcaccgcaaaggtctgcagcttcactcctgagccagcgagaccacgaacccaccagaaggaagaaactccgaacacatccaaacatcagaaggaacaaactccagacgcaccaccttaagagctgtaacactcaccgcaagggtccgcagtttcattcttgaagtcagtgagaccaagaacccaccaattccggacacattttggcgacccagatgggactttcgcctatcaccaagcggtgagaccatcacctatagctgagcggcgagaccatcacctatcaccaagcaatgggaaacactcaggcatcaacaggctcacccttgaaatgcatcctaagccattgggaccaatttgatccacaaaccttgaaaaagaggcggctcatttttttctgcactatggcttgggcccaatattctctctctgatgaggaaaaatggccacctgagggaagtacaaattacaatactatcctgcagcttgaccttttctgtaagagggaaggcaaatggagtgaaataccttatgtccaagctttcttttcattgaagaatcaaggccatcaagctacagatgggcttacaaatagaacctttacaatccctgagctagacataaatacaccaatcggcactctgtatctagctcaaggtttgtaaacacaccagtcagcaccctgtgtctagctcagggtttgtgagtgcaccaattgacactctgtatctagctgctctggtggggccgtgaagaacctttatgtctagctcagggattgtaaatacaccaatcggcactctgtatctagctcaaggtttgtaaacacaccaatcagcaccctgtgtctagctcagggtttgtgagtgcaccaatggacactctgtatctatctgctctggtggggccttggagaacctttgtgtggatactctgtatctaatctgatggggacgtggagaacctttgtatccagctcagggattgtaaacgcaccaatcagcgccctgtcaaaacagaccactgggctgtaccaatcagccggacgtgggtggggccagataagagaatgaaaccagggcttgggacctgcagcccgccatgcctgagcctcccacaccccctccatgggctcctgtgcggcccgagcctcctcgacgagcgccaccccctgctccacggcacccagtcccatcagccctcactcactcttggcacctcctctgcccgggctcccactttggtggcacttgaggagcgcttcagcccaccgctgcactgtgggagcccctttctgggctggccaaggccagagccggctccctcagcttccacactgtggaagctttgttcttttgctctttgcaataaatcttgctactgctc

SEQ ID NO: 730639 - DNA, 824 bp, Homo sapiens
cttccacactgtggaagctttgttcttttgctctttgcaataaatcttgctactgctcactctttgggtccatgctgcttttatgagctgtaacactcaccacgaaggcctgcagcttcactcctgaagccagcgagaccatgagcccgccgggaggaacgaacaactccagatgtgccgccttaagagctgtaacactcaccgcaaaggtctgcagcttcactcctgagccagcgagaccacgaacccaccagaaggaagaaactccgaacacatccaaacatcagaaggaacaaactccagacgcaccaccttaagagctgtaacactcaccgcaagggtccgcagtttcattcttgaagtcagtgagaccaagaacccaccaattccggacacattttggcgacccagatgggactttcgcctatcaccaagcggtgagaccatcacctatagctgagcggcgagaccatcacctatcaccaagcaaatcaaggccatcaagctacagatgggcttacaaatagaacccaaaatgagttcaactaacaacttctaccaagggcccctggaccgacccactggcacttcccctggcctagagttcccctctgaaggacactacaactgcaaggccccttcttcaccccatccagcaggaagtagctagagcggtcatcggccaaattcccaacagcagttggggtgtcctgtttagaggggggattgagaggtgacagcgtgctggcagtcctcagccctcactcactcttggcacctcctctgcccgggctcccactttggtggcacttgaggagcgcttc

SEQ ID NO: 730640 - DNA, 1675 bp, Homo sapiens
actgacttccttcgcactcagcccactcgcacccgggtgaataaacagcctttgttgctcacacttagcctgttcaagttgtctcttcaattagatgctcgcataacatttggtgccgaaagcccgggataggggaactcctccggcagacctctcctctatcctcccggtacccacgttctcccatgcaagagacttccctcgccctcaggacctcagaccagctccgcgagcactccggcctctgtctatggatatgaaatccaacaccggtcacggactcttcttggggagacagccttccttcagtgttcggtcaatgcccgggacgcccgccttggccatttgccagccacacaacccaggacctccaatggggacgcccactgaggatcctagtggttgctcttttccttgtctctttctttccccccagtctttccttgttctatcatgggcaatttcccgccttccatccctctttcttctgtctggcttgtgtcctcagaaacctcaaacctcttcaccttgcacccaatctaaaggctaaacgtctaatttttttctgtaacacgtcctggccccagtataaattagaaaatggcgctcagtggccagaaaacagcacttccaatttctctatttgtgggacttagacaacttctatggaaaaatgggcaaatgggtctgaggtaccctacttccaggcattttttacatacgatctctccctagcctatgcttccaatgtaatccatccccaattttccttatttcccttctgtctacccctccttcttccactggcgatgctgactcctcttgtctgttgacccctccgatctttctccccaccacctatcgaacctgcttctaattctcccccagaacctatttctacccacaatccaccctcttatgcccctcccattaccacccttcctcacatcctctatggcttacagtttgggcctgcgaccaacccccaggcccctgcctagcaatttcccctcggagaggtggcaggaaccaaaggaatagttcgggttcaggtccctttctccctgttcgacctttcccaaattagtgaacatctaggctctttcccatctggaccccaccaaatatatacgagaattccaatacttaacccagtcctataatcttacttggaatgacttaaatgtcatccttacctctaccctcgctcctgaggagtgagagtgggtttggatcctagctcaatcttaggctgataaccgccggtgccgtaagcctggcctccagtaaggtgctagggcagtaccctgtgaagaccccggatggacttaccaggccctgggacccaggcatagccaggcgggactacatgatctcttgcctagttaaagggcttcagaaggctgcatataaagccgtcaattatgacaaactaaaaaacaaaaacaaaaacaaaaaaaaccactcagaacaaagataaaaatccagctcagtttatggcctgtctacctgccaccctcaggcgatatacagcactagaccctgaagggatagaaggccgccttattcttaacatgcattttattacccagtcagtttctgacagtagaaagaaacttcaaaaattagagtctggctctcagatcccacaacaggaattaatcaacctcgcctt

SEQ ID NO: 730641 - DNA, 1764 bp, Homo sapiens
  misc_feature (334)..(334): n is a, c, g, or t
actgacttccttcgcactcagcccactcgcacccgggtgaataaacagcctttgttgctcacacttagcctgttcaagttgtctcttcaattagatgctcgcataacatttggtgccgaaagcccgggataggggaactcctccggcagacctctcctctatcctcccggtacccacgttctcccatgcaagagacttccctcgccctcaggacctcagaccagctccgcgagcactccggcctctgtctatggatatggtaagctgcctcggtctctcctcatctctccctctctttttctcttttcaaaattgagacaaagaaccttcctcntatccgtgtttcagaaatccaacaccggtcacggactcttcttggggagacagccttccttcagtgttcggtcaatgcccgggacgcccgccttggccatttgccagccacacaacccaggacctccaatggggacgcccactgaggatcctagtggttgctcttttccttgtctctttctttccccccagtctttccttgttctatcatgggcaatttcccgccttccatccctctttcttctgtctggcttgtgtcctcagaaacctcaaacctcttcaccttgcacccaatctaaaggctaaacgtctaatttttttctgtaacacgtcctggccccagtataaattagaaaatggcgctcagtggccagaaaacagcacttccaatttctctatttgtgggacttagacaacttctatggaaaaatgggcaaatgggtctgaggtaccctacttccaggcattttttacatacgatctctccctagcctatgcttccaatgtaatccatccccaattttccttatttcccttctgtctacccctccttcttccactggcgatgctgactcctcttgtctgttgacccctccgatctttctccccaccacctatcgaacctgcttctaattctcccccagaacctatttctacccacaatccaccctcttatgcccctcccattaccacccttcctcacatcctctatggcttacagtttgggcctgcgaccaacccccaggcccctgcctagcaatttcccctcggagaggtggcaggaaccaaaggaatagttcgggttcaggtccctttctccctgttcgacctttcccaaattagtgaacatctaggctctttcccatctggaccccaccaaatatatacgagaattccaatacttaacccagtcctataatcttacttggaatgacttaaatgtcatccttacctctaccctcgctcctgaggagtgagagtgggtttggatcctagctcaatcttaggctgataaccgccggtgccgtaagcctggcctccagtaaggtgctagggcagtaccctgtgaagaccccggatggacttaccaggccctgggacccaggcatagccaggcgggactacatgatctcttgcctagttaaagggcttcagaaggctgcatataaagccgtcaattatgacaaactaaaaaacaaaaacaaaaacaaaaaaaaccactcagaacaaagataaaaatccagctcagtttatggcctgtctacctgccaccctcaggcgatatacagcactagaccctgaagggatagaaggccgccttattcttaacatgcattttattacccagtcagtttctgacagtagaaagaaacttcaaaaattagagtctggctctcagatcccacaacaggaattaatcaacctcgcctt

SEQ ID NO: 730642 - DNA, 573 bp, Homo sapiens
actgacttccttcgcactcagcccactcgcacccgggtgaataaacagcctttgttgctcacacttagcctgttcaagttgtctcttcaattagatgctcgcataacatttggtgccgaaagcccgggataggggaactcctccggcagacctctcctctatcctcccggtacccacgttctcccatgcaagagacttccctcgccctcaggacctcagaccagctccgcgagcactccggcctctgtctatggatatgcataaaaagacaggaatgttaggtcctctgagcaggcggcgccatggtcaagccatcgtgacccctgtgactcacacgtacacatccagaaggtctcctggagccagaaagtctgggacgacaggaaaaccacaaaagaagaaaaacggctagttcctgtcttagctgatcagccaaccttgtgacattctatcattgtaacaggctgtaccctaactgatcaatcaacctcatgacactgtgctctgtaaccttatgataatgtaccttatgacattcttcccctgccctcaataaacagctccgaactataa

SEQ ID NO: 730643 - DNA, 1004 bp, Homo sapiens
actgacttccttcgcactcagcccactcgcacccgggtgaataaacagcctttgttgctcacacttagcctgttcaagttgtctcttcaattagatgctcgcataacatttggtgccgaaagcccgggataggggaactcctccggcagacctctcctctatcctcccggtacccacgttctcccatgcaagagacttccctcgccctcaggacctcagaccagctccgcgagcactccggcctctgtctatggatatggtgttcaataatagggaagagactgcccggcgacagcgcatttcagaactacagatgcttgcctccgccataagacaaaccccagctgcactgcctacctgcaagaacttcaaggcatctaaacgcaacatccaacagcccctctgggactttgcttcaagcgatgaaaacctggccactgggccaaggaatgcctgcagcctgggattcctcctaagccatgccccgcctgtgcgggccctcactggaagtctgactgcccgactctcatcgccacttccggagctcctggagctcaaacccaaagctccccaccgactccttcccagatctcctcggcttggcggctgaagactgacgctgcccgaacgtctcggaggccccttagacaatcgcggatgccgagcttcgggtaactcttagggtggaggcataaaaagacaggaatgttaggtcctctgagcaggcggcgccatggtcaagccatcgtgacccctgtgactcacacgtacacatccagaaggtctcctggagccagaaagtctgggacgacaggaaaaccacaaaagaagaaaaacggctagttcctgtcttagctgatcagccaaccttgtgacattctatcattgtaacaggctgtaccctaactgatcaatcaacctcatgacactgtgctctgtaaccttatgataatgtaccttatgacattcttcccctgccctcaataaacagctccgaactataa

SEQ ID NO: 730644 - DNA, 941 bp, Homo sapiens
  misc_feature (579)..(579): n is a, c, g, or t
  misc_feature (607)..(608): n is a, c, g, or t
  misc_feature (665)..(665): n is a, c, g, or t
  misc_feature (712)..(712): n is a, c, g, or t
  misc_feature (726)..(726): n is a, c, g, or t
gtgttcaataatagggaagagactgcccggcgacagcgcatttcagaactacagatgcttgcctccgccataagacaaaccccagctgcactgcctacctgcaagaacttcaaggcatctaaacgcaacatccaacagcccctctgggactttgcttcaagcgatgaaaacctggccactgggccaaggaatgcctgcagcctgggattcctcctaagccatgccccgcctgtgcgggccctcactggaagtctgactgcccgactctcatcgccacttccggagctcctggagctcaaacccaaagctccccaccgactccttcccagatctcctcggcttggcggctgaagactgacgctgcccgaacgtctcggaggccccttagacaatcgcggatgccgagcttcgggctagacataaaatctgccaagctgccaatttcctgttacctactccagagacccagtgatatgaagacaccctagctggactgtcagttctcgttaagaacctaacccctcaaactctacaacctctgtggacaggatcctacctggtcatctatagtaccccaanagtggtcagtctacagaatcctccccannggattcatcgctccaggataaaatatgcccatctgacgaccagcctagctcctccanctcctcctggaagtcacaagtactctctcctacttcccttaaattanccgattcctgaaanagaacaataaccctgtataccttttatttacagtagacctttacacagttcaccccactatgtaaagctctgttctactttatgcccctgatcaccattctcaactaggtctaaatggccctgcgtttggtctaatacggcagtcaaggtttcttcagaccatgggagtgaactcatggggtccctccagtgtggacttaatctttctaagtggg

SEQ ID NO: 730645 - DNA, 959 bp, Homo sapiens
  misc_feature (597)..(597): n is a, c, g, or t
  misc_feature (625)..(626): n is a, c, g, or t
  misc_feature (683)..(683): n is a, c, g, or t
  misc_feature (730)..(730): n is a, c, g, or t
  misc_feature (744)..(744): n is a, c, g, or t
gtgttcaataatagggaagagactgcccggcgacagcgcatttcagaactacagatgcttgcctccgccataagacaaaccccagctgcactgcctacctgcaagaacttcaaggcatctaaacgcaacatccaacagcccctctgggactttgcttcaagcgatgaaaacctggccactgggccaaggaatgcctgcagcctgggattcctcctaagccatgccccgcctgtgcgggccctcactggaagtctgactgcccgactctcatcgccacttccggagctcctggagctcaaacccaaagctccccaccgactccttcccagatctcctcggcttggcggctgaagactgacgctgcccgaacgtctcggaggccccttagacaatcgcggatgccgagcttcgggtaactcttagggtggaggctagacataaaatctgccaagctgccaatttcctgttacctactccagagacccagtgatatgaagacaccctagctggactgtcagttctcgttaagaacctaacccctcaaactctacaacctctgtggacaggatcctacctggtcatctatagtaccccaanagtggtcagtctacagaatcctccccannggattcatcgctccaggataaaatatgcccatctgacgaccagcctagctcctccanctcctcctggaagtcacaagtactctctcctacttcccttaaattanccgattcctgaaanagaacaataaccctgtataccttttatttacagtagacctttacacagttcaccccactatgtaaagctctgttctactttatgcccctgatcaccattctcaactaggtctaaatggccctgcgtttggtctaatacggcagtcaaggtttcttcagaccatgggagtgaactcatggggtccctccagtgtggacttaatctttctaagtggg

SEQ ID NO: 730646 - DNA, 950 bp, Homo sapiens
gactgttcaggtcactgaaagcaaggaaagcctgataaactgccacggccacgaggagtctaaggacacatccaatttccattcgcatccaaaatggaatccgagacagaaagaggaccttagccttcatatctgtttttttcttatgaagcttcttctggttggaaacttgtcaaatttcatcagatggctggaactctccgtgtctccttttctttctgtcatggctggcaagagctcatgggccatgagctgcatctttataaacatgaacagattagcaggtattcccaaatgggacaaatgctaccttattgcagacagtttctagtatagtcccacattctttgagaaagtaggtggagaccccatcagcaccaggccactggcagcaaatggttgtagccaggagccagaatagagcaagtccagcctgagcctgtggtcggcagtggagaagagagggtcgcagacctgaggcaaagggcagcctgaacaatcaagaaccagagcagccctggcacccgacacccaggagagtgggctacaggaagaggatctgagaccagagcccacagagtctgcagaaactagaggcacaaggcacgaggaatcacaaagcaaacttaagtgccgacatcaaagaaggcattctcaccctgtttcctgcttctgggtttctccacattcctatagccttacagacagtaagcccagtgtggtgggaacagggaattgaagtggaaagcacaggccaggggatctgatgggtctcttagatcccctgggagggcatgacaacatagagaaagaagagtcctttaaaagcattcaacataacgtagtttgcccaggcagttcacgctgactgaaacctcctctgtcttctgaactcgggcatgcctatctcatctcttcttttgaagcagaatgctttaaatttttatttt

SEQ ID NO: 730647 - DNA, 640 bp, Homo sapiens; identical to SEQ ID NO: 460923

SEQ ID NO: 730648 - DNA, 671 bp, Homo sapiens
  misc_feature (72)..(72): n is a, c, g, or t
  misc_feature (161)..(161): n is a, c, g, or t
  misc_feature (180)..(180): n is a, c, g, or t
  misc_feature (194)..(194): n is a, c, g, or t
  misc_feature (274)..(274): n is a, c, g, or t
  misc_feature (333)..(333): n is a, c, g, or t
  misc_feature (426)..(426): n is a, c, g, or t
  misc_feature (442)..(442): n is a, c, g, or t
  misc_feature (578)..(578): n is a, c, g, or t
gtcactcccagactccttgcggagttcgccgcctgattctaggctggtcactactccgagcctgtgacgttngcggcagccaggccgtcgacgatgcccagtgaaactctctgggaaattgcaaaagctgaaggtggaaaaaaggggaattaagtggaagntgaaggtgatggagctganattgcagaaaaatngtgttttcttcattggcagtaacaatctgggggaaagactactattattctaaggtgtcttgacagagatgaaccaccanaaccaaccttagtttggcaatatacatatggaagaagagcaaaagggcacaacacaccnaaaagatatcgctcacttggggaactcgggtggaggaacctctttatgggacttaatcagcatacccatcacaggtgacaccttacggacgtntctctgtgttctcgtncgtggatctttcaaaacctaagtgatctcgtggcccaccatggaaaactctctggcaaggcaacaaaaagccatgtagaccaatgtgatatggaacacctggggaaagaccaaagtgctaaagcggtttctgaacntgagacacgacgaatctgcactactctggccgccggatcttctcagggaccatgacttctttgacccactccggtacctctggtcatattgga

SEQ ID NO: 730649 - DNA, 734 bp, Homo sapiens
agcgacagatgcgtcctggcaacagtcggcagagttgctgcggtttgtgcccttgcgatttctttttctgagagaggagagtcaaactcccacctccagctctcgaaggagcttttcctgagggcactgcaaagaggctccttttctttcagatcagcagtatcagcccaagtcagaaccatggctccaaaacaaaagaaaaagacatcacgtggcaaaaaaagactaaaaccagtattagctgctagtgaagacatggaaccagtaaatatggagagcatgggtcatccagaaatttatcctttagtattaaccaccaagacccaagaaatatttaactgccgaatagatgaagatgtcacagatgaacaaccttataagcttatcaataaagaagacatttttgaggacctgcgcaacagagctgcagtatctgatttccacccagtcaaaaaaattgtccaggaatatcctggaaatgagcttctgcttgtttatgacaaagacttcaaatatggacttaacttttatcttattgcaactgaagagggcaaagaaaactatttaaatcccccagaagtaccagaagaacaagaagaatataaagaacatattcctgaagatgtgtatatttataaaccacctgtctctaaaccatgggtttctttgggcagtgaaaaagaaattgaggaagaatcagttacggaatctacaaagcagattacatatatgat

SEQ ID NO: 730650 - DNA, 590 bp, Homo sapiens
agcgacagatgcgtcctggcaacagtcggcagagttgctgcggtttgtgcccttgcgatttctttttctgagagaggagagtcaaactcccacctccagctctcgaaggagcttttcctgagggcactgcaaagaggctccttttctttcagatcagcagtatcagcccaagtcagaaccatggctccaaaacaaaagaaaaagacatcacttgggccggaaaggtggaggttgcagtgagccatgatcatgcccctgcactccagcctgggtgacagagtgagaccctgtctcaaaaagaaaaaaaaataaaataaaagctaacagtttataattaaaaatcatctttcatttagccttaacattttcaattttatttttatgattgttgttctgtttttaattttttattgtaatgaaatattttaaatgtttagaaaaaactacagagtagtataacaaatatctacacttaattatccagaattttaaaatattaatttttattatatttactttaaaacttttttaacaaaagaaataaatattacagacaatattccactccctctcgtatcctccctaattcc

SEQ ID NO: 730651 - DNA, 842 bp, Homo sapiens
gagggtgtcctctcttactacagtgagggaggctatctggcggtgatattttgaagtattcaacatctttcgttctaaatccatcctgaaatatttatgaagctcacggcagtgcttagtaaatattgttgaaagaagtatttaagaggaaaatcaatgtgacgatgttggtagataggaaagtcaaggatacttcaaaagtatgaagttaacttgtgccatcacttaagagggcaaaaacacaagagcatattttcagtgagaagacagtgatttcaattctaggtatgttgttgacattgctgggatgtggaaatagagaggtctgatacacatgctctgtgctcagtgatgaaaggcccccaggaataagattgtgaggaagttgggaacttgttttcttaattagtggttctcaaagtatgatcttcaggccagcaacatcagcaccactggggactttgtggaaatgtaaatttggggcccaggccacacctacttaattgaaaagtctgggatggggttcaactatcagtgttttaagaagtcctccaggtgatctgctataccatgaagttgaggaccactatcttaaaaattaatcagaactaccaagctctaatgctcaatgctatccagacttttggtgataaacctactaaggcatgctaacattgtgttctttgtacagccaggtcctccctaacaggggatctaagaggctataaataaaagcaatgaaagcttttactctatgcatttgaatgctaggtataccactttctatttatgtgtcctaggaagtaaattgcttaaccttttgagcctagggtcctcatctg

SEQ ID NO: 730652 - DNA, 986 bp, Homo sapiens
  misc_feature (364)..(364): n is a, c, g, or t
  misc_feature (416)..(416): n is a, c, g, or t
cagaggctgggatcatggtagatggaaccctccttttactcctctcggaggccctggcccttacccagacctgggcgggctcccactccttgaagtatttccacacttccgtgtcccggcccggccgcggggagccccgcttcatctctgtgggctacgtggacgacacccagttcgtgcgcttcgacaacgacgccgcgagtccgaggatggtgccgcgggcgccgtggatggagcaggaggggtcagagtacttgggaccgggcagacacgggagcgccagggacaccgcacagacttttccgagtgaacctgcggacgctgcgcggctactacaactcagagcgaggccggggtctcacanccctgcaggtggatgcatggctgcgagctggggcccgacaaggcgctatccntccgcgggtatgacacagtatcgcctacggacggcacaggacttatctcacccgtgaatgaggacctgcgctcctggaccgcggtggacacggcgggatcagatctccgaagcaaaagtcaaatgatgcctctgaggcggagcaccagagagcctagcctggaagacacaatgcgtggagtgggctccacaaatacctggagacggggaaggagacgctgctcacctggagccccccagagacacaccgtgactcacccaccccatctctgaccatgaggccaacctgacgggtgctggggccctggcgcttctacccctgcggagatcacactgaccctggcagcagtgattggggaggggcatacccaggacacggagctccgtggacgaccaggcctgccacggaatggaacccctccacgaaagtggggcccctgtggtggtgcccttctggagacggggccgcagaatacccgtggccgtgcccgctgaggggtcaccagccgcacaccttaataaaagacgggtcacaccacacccccacggggaaagacgccggcgcccggag

SEQ ID NO: 730653 - DNA, 2721 bp, Homo sapiens; identical to SEQ ID NO: 191265

SEQ ID NO: 730654 - DNA, 2618 bp, Homo sapiens; identical to SEQ ID NO: 191266

SEQ ID NO: 730655 - DNA, 354 bp, Homo sapiens
  misc_feature (14)..(14): n is a, c, g, or t
  misc_feature (22)..(22): n is a, c, g, or t
  misc_feature (25)..(25): n is a, c, g, or t
tagagcatccccgnctcatttnagntcacatgtgctggcacagcctgaggccattagtaccatagcccagagcctacgcacagagaacagcaagaccaaggtggctgtgctggagatcctgggtgctgtgtgcctcgtgcctggtggccacaagaaggtgctgcaggccatgctgcactaccaggtgtatgcagcagagcgaacccgcttccagaccctgctgaacgagctagaccgaagtctgggccggtaccgggatgaagtgaatctgaaaacagccatcatgtccttcatcaatgctgtcctcaatgctggagctggagaggataaactgaaatgagccggttaccgagc

SEQ ID NO: 730656 - DNA, 1221 bp, Homo sapiens
  misc_feature (506)..(506): n is a, c, g, or t
  misc_feature (629)..(629): n is a, c, g, or t
  misc_feature (657)..(657): n is a, c, g, or t
atccgttgaagcagggctatgggagctggagcggagaggagagaagcaccttgcctttgctggtgtttttcccgcagcagatggagtctcgctctatcacccaggctggagtgcaatggcgcgatctcggctcaccgcaacctccatctcccaggttaaagcgattctcctgcctcagtctcctgagtagctgtgattacaggcgtgcgccatcacacccagctaatttttgtattttttagtagagatggggtttcaccatgtcggcctaactcctgacctcgtgatccgaccatcttggcctccgaaagtactgggattacaggtgtgagccactgcacccggcccaaacatttctttcttcttttcttttgagacagagtcttgctctgttgcccgtggctggagtgaaatggtgcgattatagttcactgcagcctcaaactcctggccttaagcgatcctcccatcctggcctcccaaagtgctgggattataggcatganccgcagcaaccactcctcacatttcttgagcatctgtgatgtatcaagccagatgctgggcactgaggttgcagaaggcattgttcctgtcttctaggagcccaggctagcagggaagacggntgtgtatagagttaccacaataccaggnctcaacttccgtctgtaacacaggtggaccatgctagattgtcccagcctgccctgtgcttcattagccggtcaacagatccatctcaaatacctcccatgggtactcactgattgctttaacccaaaccatggcactcttgaagactttccctcaggaagctcaaggactatgcatccttctgggtcagaactggacacacagccaccagtgctggacaatggcggcggctcagggacacactggagcctggcccctgcagagctcccagcatgggtgggaagagagatgcaaatgaccacacgcgggtgaggagactccctcggtgcggctgggatgagccctagacactctcaatcacccccacgatgaccccttcccagaggtcccctcagtcatctgccctgaaccaagctcttcctgatcctagaccctccaccctccctctatcttccagggcttggtgacattccaggcagaaatttctgacccttttactttggtccctccctccccagcccagtctctggtcaaactggattcctggctgttcccagaacgagc

SEQ ID NO: 730657 - DNA, 930 bp, Homo sapiens
  misc_feature (3)..(3): n is a, c, g, or t
  misc_feature (6)..(6): n is a, c, g, or t
  misc_feature (20)..(21): n is a, c, g, or t
  misc_feature (33)..(33): n is a, c, g, or t
  misc_feature (736)..(736): n is a, c, g, or t
  misc_feature (809)..(809): n is a, c, g, or t
  misc_feature (818)..(818): n is a, c, g, or t
  misc_feature (820)..(820): n is a, c, g, or t
  misc_feature (833)..(833): n is a, c, g, or t
  misc_feature (838)..(839): n is a, c, g, or t
  misc_feature (846)..(846): n is a, c, g, or t
  misc_feature (849)..(849): n is a, c, g, or t
  misc_feature (857)..(858): n is a, c, g, or t
  misc_feature (865)..(865): n is a, c, g, or t
aantangctagtacgaggcnnggttaatcggcngagggatctcctgtctcagcctcccaagtagctgggaccaccatgcccagctaattttgtattttttgtagagacagggtttctccatgttgcccaagttggtctcaaactcctgacctcaagtgatccacccaccttggcctcccaaactgctgggattacaggcgtgagccactctgcccggcctgtgcatattttcttcactgacgctgtttccaagtcacagaggccttcacacgtgtctgggagggttttgcccgggcacttgcaggggtggggtgggaggagcatttctacccgtggccccttcttctgcttaaacacacggcagatccagaaatttctctccagcagaatgcagcccctcaaggatgggggccttggttacatcggtttttatgtttaacttccacccagagcttggcgtttcaggggagcctgagttgaaggcacaaatgcgtgacagttcctgctctgccctttacaagctgtgtgaccttgggcaagttactgaacctctctgtgcctcagtcaatagggatgatgacggcaccccttgcagaccttttggaaggcttaactggatgagtcaccctaagcattcggagcagtgtgggtgggggcgctctgggtggaggagaccagctctaggcgagggtgccttggactccctcatgggctgcctctctctccaggcccgcanctctgttcagccagtctgggagacttgggcttgcctttggctatggagagtgttaccccatctttaaagtgcnggaagtgangnatcctctctctantcttnnttggaantgngcagaagnnacagaantgctgggtcccagtggcggcagtacaagtgggcacccggggtccggcaacggggcatgggggcgc

SEQ ID NO: 730658 - DNA, 793 bp, Homo sapiens
  misc_feature (16)..(16): n is a, c, g, or t
ggcagatcgaggcggngttaaccagagcaggaaaggacttggaaaggaataattttgaggagtataaatgagtcctgaaactttgaaaactgctgcttgaggagattctacagccagaggtgccaagagatggctcttgctattatttctgcccctagagattgtcagctttcttttggagctactttggggtggggaaactcttaacaccttccagatactggatgttctgcatgaaaagtccaggattgaagcatcttggtgatgtagctcttttcttcaataagcttatggacacaagatgctcttgtagacacaagatgcttataaacacacacacttcctccgaggtgtacccacagtgccacaaggggtttcactcctagctgcactctgacctgaactgtgtctcttcttagttcatctaggttttgttgagcactggccactagttcagactctaaggcaggttctccattgcgccttcctgacatctttttctgacctgtatgatgacagtccgggcaacctaagtccatgagggatgtcctaatatcattgctccttctcagtgatctttgagctccaaattctcatttgtgactttttttttttttttactacaacagatatctacttctggtctctataaaaatcaaaggtagtattcaagttccctccaggccctcaacccctcccctacccccaaaagttttcaccgttagaaacagaagtggtggaaactcacatggtgtttccttggttccttacagaaatgtgggcctatggaggg

SEQ ID NO: 730659 - DNA, 801 bp, Homo sapiens
tctggttgctcgcgccgacccctggtcgtgaggcctatcctggtgatgtgttctacctacactcccggttgctggagagagcagccaaaatgaacgatgcttttggtggtggctccttgactgctttgccagtcatagaaacacaggctggtgatgtgtctgcttacattccaacaaatgtcatttccatcactgacggacagatcttcttggaaacagaattgttctacaaaggtatccgccctgcaattaacgttggtctgtctgtatctcgtgtcggatccgctgcccaaaccagggctatgaagcaggtagcaggtaccatgaagctggaattggctcagtatcgtgaggttgctgcttttgcccagttcggttctgacctcgatgctgccactcaacaacttttgagtcgtggcgtgcgtctaactgagttgctgaagcaaggacagtattctcccatggctattgaagaacaagtggctgttatctatgcgggtgtaaggggatatcttgataaactggagcccagcaagattacaaagtttgagaatgctttcttgtctcatgtcgtcagccagcaccaagccttgttgggcactatcagggctgatggaaagatctcagaacaatcagatgcaaagctgaaagagattgtaacaaatttcttggctggatttgaagcttaaactcctgtggattcacatcaaataccagttcagttttgtcattgttctagtaaattagttccatttgtaaaagggttctctcatactccttatgtacagaaatcacatgaaa

SEQ ID NO: 730660 - DNA, 1310 bp, Homo sapiens
  misc_feature (26)..(26): n is a, c, g, or t
cagtcaaggagcactacctagagganatcctggccaagttgggcaagcaccagtacctgcaccggcaccggcaccatgagtctgaggatgaatgcgcactcgatttggaccttgtgactgatctggttctgcacatcgatgctcgcggggaaccaggtgggatcctgtgcttcctgcctgggtggcaggagatcaaaggagtgcagcagcgcctccaggaggccctgggcatgcacgagagcaagtacctcatcctgccagtgcactccaacatccccatgatggatcagaaggccatattccagcagcctccagttggggtgcgcaagattgtcttggccaccaacattgctgagacttccatcacaatcaatgacatcgtgcatgtggtggacagtgggctgcacaaggaagaacgctatgacctgaagaccaaggtgtcctgcctggagacagtgtgggtatcaagagccaatgtgatccagcgccggggccgggcgggccgctgccagtccggctttgcctaccacttgttccctcgaagccggctggagaaaatggtccctttccaagtgccagagatcctgcgcacacctcttgagaacctggtgctgcaagcgaaaatccacatgcctgagaagacggcggtggagttcctgtccaaggctgtggacagtccaaacatcaaggcagtggacgaggctgtgatcttgctccaggagatcggggtgctggaccagcgggagtacctgactaccctggggcagcgcctggctcacatctccaccgacccccggttggccaaggccattgtgttggctgccatcttccgttgcctgcacccactactggtggtcgtttcctgcctcacccgggacccttcagcagcagcctacagaaccgggcagaggtggacaaggtgaaagcactgttgagccatgacagcggcagtgaccacctggcctttgtgcgggctgtcgccggctgggaggaggtgctgcgttggcaggaccgcagctcccgggagaattacctggaggaaaacctgctgtacgcacccagcctgcgcttcatccacggactcatcaagcagttctcagagaacatttatgaggccttcctggtggggaagccctcggactgcaccctggcctccggccagtgcaacgagtacagtgaggaggaggagctggtgaaaggcgtgctgatggcggctctaacccaactcatccaggtgaggcagggcaggtcacccggcggggaagttcagccaggttcttttgccattgggatctgtggaggccataagg

SEQ ID NO: 730661 - DNA, 528 bp, Homo sapiens
tgcactccaacatccccatgatggatcagaaggccatattccagcagcctccagttggggtgcgcaagattgtcttggccaccaacattgctgagacttccatcacaatcaatgacatcgtgcatgtggtggacagtgggctgcacaaggaagaacgctatgacctgaagaccaagctggcctttgtgcgggctgtcgccggctgggaggaggtgctgcgttggcaggaccgcagctcccgggagaattacctggaggaaaacctgctgtacgcacccagcctgcgcttcatccacggactcatcaagcagttctcagagaacatttatgaggccttcctggtggggaagccctcggactgcaccctggcctccggccagtgcaacgagtacagtgaggaggaggagctggtgaaaggcgtgctgatggcggctctaacccaactcatccaggtgaggcagggcaggtcacccggcggggaagttcagccaggttcttttgccattgggatctgtggaggccataagg

SEQ ID NO: 730662 - DNA, 1572 bp, Homo sapiens
gtgaggaaacaggaagaagtatggtgggggctggggtagactcccctggagccaagcctatccagctaacaagagctccctggggctggtcacagctggctcatgatgctgaacttgaaagtttttttgtttttgtttttgttttgtggctcctccaagatataggtacatgaagtttaggttaaaggggtgggattctttatttttatttttgtattgtatgtgtcaagaattactctgttgttcaccttttgctttttgcactgtttgttctcttatctgtattttgagcttagtgctaggactgagaggctgcaccatagggaatgtatgggagatggtgaggggtgccagtgaggggtgcgtggaggagaggcctgggctcctctactggatctacactctgtcccaggtttttagatcccactgagcccagctgactgaaaacaaggacagtcagggtgaaacttcttttgccagaagtgtggcctgagttgaatttctgggaggatgacgcagatgtctgctgcagagctgggctgagagttctgcagtctagctctgacttaggtcaggggcctgttggtctctcattggacgtttttgggtctcactcatgcttactgaaacattgtgccaagaaactctgtgggatttgtgtcccttaaaccagactcacttttctgaaaaatctccattgttgaggagaggctgctcaatcgacaccccgagttctcatgactgggaagatagttttcttcaggtgtcaatggcgttagactcccaggaagactagccctgcccacagggccacctgttggtttgagagcgtgttcgtgttctcttgccctccctgcctaagagctactgggatcacgttagcgggcatttaggctttgatgagagggcacagtttgagttaggtttacctccccctttctgtgcctgggaactgtttggtccagctttagaactgtggttttgacttccttatctcttgggagaagcttctgttttaaggaatttctcttccttcttctcctgcctctagcctctcctggaaaggcctggatatggtttctaaaatctcagctgagaacttcagaaaacagcagcagtattttccttttcctagtgctaaaatccctttccctagaaattggctcaccttgggaaacccagggaaagaatcagcaggttctctgccctccctaggggttggggaaggacccaccccggtcagcacagtgccttttcctctcctgctctgagccaggtggggcattccctctagattcaggtttgggcaggggtcctatagtccctgccatggggctgcttccctgtcccttccctcccctttgctggcctactctggcataattcaagtgtcttcttgccttggggatccttagtggcatcaaatggcaacatggaatattgtcctccatgcccctccagaaggacctaggagagtaggtgagctttccaaagtgagagacgaatctttctttctttttttttttaaagggcaggatgggtatgctttgggctttctcctcctgtggcccc

SEQ ID NO: 730663 - DNA, 1996 bp, Homo sapiens
  misc_feature (446)..(446): n is a, c, g, or t
  misc_feature (618)..(618): n is a, c, g, or t
  misc_feature (728)..(728): n is a, c, g, or t
  misc_feature (772)..(772): n is a, c, g, or t
  misc_feature (878)..(878): n is a, c, g, or t
  misc_feature (984)..(984): n is a, c, g, or t
ggccgattctaatagtttgccaagctctgccgagtctggctggcactacagcggtcctgaaggctgtgtgctatcggtcgtgctgccaggagcatggtggtcagccgcgtataggatgagccgcattggcacaagtgagggtgagggagacccactgactggatcgttgtgcgtgatcaggcggactgtcctagcaagcgttcatgcacagctggcgaatggacgggagagagatgctgtcaaactgtctccatggataatctgaagagactgtgttcctgggagtgcagggttcacagattggggaaggcaagtgtgaggtgacggagatgtgatgtaagcgttgatggagaggcatcgattaacaatcgcaaagggaaacttatcttcttttatgaatggagcgtcaactaaactggacaggtacttctaagtcaggagtacantacaaaggacatgtggagatccccaatttgtctgatgaaaacagcgtggcatgaagtggagattagtgtgagccttgccaaagatgagcctgacacaaatctcgtggccttaatgaaggaagaaggggtgtaccatcttctaatgatgaacgcaatgcgtgaatgtacatcnagcaccctcatagacatgcagacggttcatcctcatgtggacatgtattctattaaccgtacacattgaagtgagacgatggtcaggtaggatcaccatgtatgtgtggncagacgcgaggtgatctgagagaagcttgacgtgaggctgcaantggcctaaaagtccctggaatccctatcagataaacctccagggtccatagagcacctgattgagaagatcacatatactgcgccacatctatggtgagtattccncttgctgtacacgtgaacagcctgtgtccctgatcggatcagccaagaaaggaggtcttctactagaagttgcttttagcacaaaccacatagtagcctgagttgnccagagggcacctgtataggcccaatgggctacgcgtggcagaacatatacggaacggcatgatcacgaatggatggggaaaaggagttacccagacaattggctatgaatggtcagaacggtctactgagggagaattgtaacttgaattcgtggggtcccctttgaggaaaacaatgatttgctcgacgtcgatagagttgcgacggagctgtttagaagatctccttttggggcccaacgaagtgcggacacccgtcttggccccgatcaactccacgcaatgtggaaccccttatcaagttccgaacaacagcaaacccggggaccacgacctgtgcattcttggttgtctactgggcaacgggtgccggaaagggcctaatcccccttgggatgcccttgaaggggaaacgaacaggcgaggagcaccggaaccaggggggcttgggcaaaggcaggtggttacctaaacctttgtgggaacgcgtgccgtttgaataagcaagcacccttcttgggccttaattggggcgccacacgccggtgcatcttataagggggcccgagcaggggccagggcgggacgtccccagaccttgtcttgggaacacctttccagctcccaaagcttcctcttccctggaagcgtggcggccctggccgcacctcaccacgggaacattgtcacattcggtgccccaaaccatgccgtaaccctgtgggtgagcccccaggagggccccccttacccttgtcgaccatatataccagcgtgggcgctctgctcgcacaggtcaccccggacgcgcgcgccgccaacaacgcggcagcaacctcctgcaacggcgcgcacatgtcgcacaaaaccccatgtcagcgacagaacaccaacacacccgccgaccccaactctgcgcgcgcaacgcgctgacacagcaccgacataaccagcccgtgacgaccctctaaagcgagatcacaccgctgccgccctattgacattaacgcg

SEQ ID NO: 730664 - DNA, 2202 bp, Homo sapiens
ggcacgaggcctcactgaagtgaatatgaataataatacaagtaattattatcgtattggattttggaaagttggatggtgatattcctttggcatgcgagactattaatatgactcgtgctggaaaaagtcactcatgttttctctgggcttggattcctcattccttcattcaatgaacatttgctccgcagttacttgtgcgaggcactctaaccggagactgaaggtatagagcaagcttgtccaacccgtggctcactaaccgcgtgcggcccaggacagctttgaatgccgcccaacacaaatttgtaaatgttcttaaaacattatgagaggttttttttttgcgctttttttttttttctcatcagctatcattagagttagtgtattttatgtgtggcccaagacagttctcccagtgtggctcagggaagccaaaagatcggacgcatggtatagagaaaaacaagaagcatccctccatagcgtatgccccacaagagacaatttcccagagaccagtagctgaggcaggtgtaggaagtgaatgggccattagatggatgcctgtggaagctaaagaaggcggatcggaggaagacaatccgacctggggagtggaggagagagggggagaaggtggcatcgacttggattttttaagattgagtcatttggggcacttggaaatgggcattctgggtagaaggttcagtattaacaaaaacaaaacaatactcttgagtgggaagaataatggatagtttgatttgcctagaatgtagagattaataaggatgccaggattctagggcgggggaccaagatggggagtcagtggtgggaagccctggaagattccaagcaaggcatgacagtgctgtggcagcggatagttaatttggccaaggagtggaaccctcctttgtagcgtgagagtgttggaccaaggatctttgcagcactgagagtctatgaattagccaatctgggaatacagggcttcatggaaacatcacagtgtaggaggattatggatggaaagtgcagctggaatgggaaaaggtcgaaacctaattagaagccttgggccaggggtagcctgtgatcacctgcgattgtgtttcagacttccagtaacattcttgggagtagttgttaaaaaagtgctcttcgtgtttctgtaacttgggtggcctcttaggcatgagcagacgttcagcctgtccctatcggcagggaacatttatttattttgatgcatccccagggaccaacagagagctataaagacagcagcctgttttgccagttggccagttgaaatgggaaatttcttatacaaagattacagacttaaccttcatgccactctttattataaactgttcatacagttctttgcagatggactcaaaatgaagcatttttttaccttaaagattgtagtagaggatgttataaatgtgtctttaattggttctgtgttttctcatacttatgaagcactgcattacacaatttgtctgaatgaaattggtagatgtggtccatgtaaaacttacccaatcagacaggttacagatatttgcctaaaatctgagcctgggcaccttagagatattctaacctcacccggaaactccgcaactggaaaggtgcagggattctggagcgaggttccacttcacattatcttctggttctgcatatgaatatttaaaaacttcctgtggtgttatatgaaatatgtatttgcatgcttttgcagctgctccatctaatagtatttgagaaggggaaaaaatgaaatgttgcttagtagaaattcctttggttaatgatgttaatcaatggtataaaaaaggagcatgaactctggaataagaagggacacctgaaattgaattccagttgtgtcgcttactacctgtgcgactttaggtctggcacttaactcatctgagtctcagtttcctcatctgtaaaatggtcaccacaataatcagctcgcagtctaacagaacaacctgtcaccactagaatcccacttgttggccttttatagccacacctacttccctcccactgcctcctccacttccttaactcatagcaaccactgtgtgttcactatctttttaaataattgtatcatttcaagaatgttataaaaatggaatgatatagtgtgtg

SEQ ID NO: 730665 - DNA, 1249 bp, Homo sapiens
cagcctgggcagagaccggagctagcccacacgctcttggccaaggacggcagcccgcagagctctgaccagcttggccagagggaatgcagctgattccccctgctctgtgcccgacccgtgttaaagtttaacccggctttccaggtctcctcttttccagacaggggcgcagggaaggagcgcccggcgagactgacgctccggctccacgtcccgctctggctctgggctgtcggttatccctgtaattacctgacagctctgactgggcttaggaaccggtgagaaacctcagtctcatctctggtatctggaggaaggaagggaaataaagaggcattttataaatgcggactcaccagttctcaacctccccggccggtgtgtgggaaagggcggcggccgggctggctgggcctggggcggggcgagccatccccggctcgggctccggggcccggcccactctccacaggccccgcagcgagggcgtggctcccaggttccacgtcctgcgagaggggaccatggcctggggctcagcagcctcctcggggcaccaggcagcctgcggagagaacaaggggagataagcttgaagaccgtggaccagcacaactgcacctcgggcagagccagccatctggaagggtctacgccccaccggtcgctggttacccagcgcagcagctccaactgcactgtcccccaaagaccctagggctcgcaggatgaaatggggcctgctgcctatttgggggtatttgtttccgaatacggaggctccgaagtgcgaaagttgcatatcagctgtgcctgagaccccacacctgagcccttcccagctgagcctggagcctgaggacaagccaggtcctagccccacacagaggaggcaccgcgagtcagcagcatctccaagctgtattaacaggggaaaacagttctcccattttcagagaaccaaggcaatctttcccccaagaaaatcaccttgccggccaggcacagtggctcatgagacaggaggatcgcttgaggccaggagttctagaccagcctgaacaacatattgagaccctgtctctacaaaacaacaagccaggcgcggtggcacaggcctgtggtcccagctactcaggaggctgaggcgggaggatggcgtgggcccaggagtttgaggctgcagtaagctatgatcatgtcactgtactccagcctgggcaacagagcaagatcctgtctt

SEQ ID NO: 730666 - DNA, 501 bp, Homo sapiens
tacccctaggtggaaagcgacgtgtgggaggaatgggacaggctggcccgggactggccggcattgtggtcaaactgcattaagcagaagatcaggtccgtcggcacgagctcaaactcatagggcgggttggtgatgacatacctctttgtgcactgactgggggtgctgaggtgagcatctctcagccggtaaattccaaaacaaagcatattatatgttttcagagctttgcagaacagatcaccataacaaccaccatcccctaagtccgcaaatggcccatcgagcagagctaactgggccacgcggcagcggtccctattggccagtgtctgcggggtgctgtagccacctctaagggcgttttcctcagcaatcagagcctccagctccggcgtggctcctccggtcaccagggtccgtatcagggtgaggatattgtcattgaagtactcgcgctcatgagtgagtccaggacactgacggcaaatgctgtcc

SEQ ID NO: 730667 - DNA, 260 bp, Homo sapiens
  misc_feature (66)..(66): n is a, c, g, or t
cgtgtgtcagccgatggcaccgggtggtcagtgagggacacactttggagaactgctgctaccagngtaagagtgcggggatatgcaggctcctgggtgtccatctgcacctgctctgggctcagaggcttggtggtcctgaccccagagagaagctatacccggggagggggaggcagacagattactagaccccaggagtttgagaccagcctgggcaacacggtgagatcccgtctctgctaaaaatacaaaattag

SEQ ID NO: 730668 - DNA, 628 bp, Homo sapiens
  misc_feature (66)..(66): n is a, c, g, or t
  misc_feature (628)..(628): n is a, c, g, or t
cgtgtgtcagccgatggcaccgggtggtcagtgagggacacactttggagaactgctgctaccagngtaagagtgcggggatatgcaggctcctgggtgtccatctgcacctgctctgggctcagaggcttggtggtcctgaccccagagagaagctatatcctggagcagcggcctggggaccttcaggggtcctcccattatttcgcgaatccaagatctccacctgtgcagggcacacctgtgtccctgtagcgtggggggaatctgtgtcacactcagacagccaccagagacaccccctgggacagcgccacattctgccggaggcgggatgttggtaaccgagacccagactgtgggagttggtgatatgtggggtgatccactcggatgcccagaaattaccgggactttccagcacctggtaaaacggacactggaagttgggcctctttgcttggacacatctcttcccgggccccttgaattgtgaccgaagttggccactaagttggggcgcttggaaaggcgcttggaaccccaagccgttgaaccttggttgggagagtcaaagcgccaaaaaaccaaaggcttgttcaaacccttccgaaaaaaactttttctn

SEQ ID NO: 730669 - DNA, 1168 bp, Homo sapiens
  misc_feature (178)..(178): n is a, c, g, or t
agcgggaggtacgccgggggcgctggggggctctgcggcgggcggcgcgcggccggggcgcggcgcggagcggagctgcagggcggcggcgggagcgcggggcgcaagagccgctccgccgggagtgccggggaagttcgcgctggcagcatggggcggtgacgccgcaccggccttncgcgcctgccagccgggcgagagcaggcggaggagaaggaggatgcatcctcaccgacggctcgcctcccggggccggcgcgcaggtgccttgcagagagaggagtagcttgctggctttgaacgcgtggcgtggcagatatttcagaaagcttcaagaacaagctggagaagggaagagttattcctccatattcacctgcttcaactactattcttatgggaatggacaatggaatgttctctggttttatcatgatcaaaaacctccttctcttttgtatttccatgaacttatccagtcactttggcttttcacagatgccaaccagttcagtgaaagatgagaccaatgacaacatcacgatatttaccaggatcttggatgggctcttggatggctacgacaacagacttcggcccgggctgggagagcgcatcactcaggtgaggaccgacatctacgtcaccagcttcggcccggtgtccgacacggaaatggagtacaccatagacgtgtttttccgacaaagctggaaagatgaaaggcttcggtttaaggggcccatgcagcgcctccctctcaacaactccttgccagcaagatctggaccccagacacgttcttccacaacgggaagaagtccatcgctcacaacatgaccacgccaacaagctgctgccggctggaggacgagggaccctgatctacaccatgcgcttgacatctctggagagtgccccatgcagttgaggacttcccgatggatgcgcaccgcttgccctctgaaatttggcagtatgcgtacctaaatctggaatacgctacgtttggaacaagggtccacaagtcggtggtggtgggggaagatggtcccgagtgaaacgtacaactgagggcaaagggggctgaaacatagaacagacgggaatacagttgcaggcatcagctgaaagaaaggtatgcacagaaactccgaagaggggacaa

SEQ ID NO: 730670 - DNA, 1535 bp, Homo sapiens
gatggttagtactataattatcccaaggattcattcactcatagaacatttgttgagcaattactacctgccagtcacttccaagtggtaagtgagatagaaatggttctttgtggcgctcacaatttattggagaatggaaacacaattacaaaaaaaaagtgtgataagttctgggagaagggtggtacaggatcctgtggggtagtggtggctccatataggagggacattgggatactgatcaggaaggagtgggggacagggctagaagctgcattagtataaagttatgtcagactgccaaaacaaaacaaacacaaaaaatcagtagtctgtggtaaagaattgctataggaacagccagtaggggcagttaagctggtcttggtgaatcaggggaagcgtcctagaggaacagatgtccatgctgaggccaaatgctggacaggagttagccagacagggaaattgcattctgggcagaggagacagcaaaggtcaagaaacatgacaactttggaagactgtaacttgttcagaggcagagggtgcaaaggagaaatgaggaaaggtgaagctggagaggtgggcttggtccagctcttgctgggccttttcagccgtgttaaagatttagactgtatccagagggatgttgaactttaagcctaagactgaaaaggtgagaattgtgccttagatcactatggttgcagtgtggagactggtttggaaaggggagaaatcagaggcttttacagccatcccagggagagagaatgaacaccagaattagggtaatggaagatggaaagaagagaaatcgttttatgggttgctcaggagatagaattgacatgtcttgggattgttttgctgtgtaggggagagagacaagtcaagagtatacatcctgtttctgacttggcaactgggtgggtcatgggtctgtttcctgagacagttgtctacagccataccaccgtaagcgccctaaatctcatcagagacagtttatgcaaatggagcttggggaaagagaggtcgtggctggagacagagatttgggcatcatcaacatataggtgtggggagcagagaaggctgaggaagaaagcaggaaacatataaaaaggagagcagggaaaggagccagtgagacaggaaaaataaaaaattataacaaacctgagaaccaaaatgaacgaaaatctgttcgcttcattcattgccccaaatcctaggcctacccgcagagtactgatcattctatttccccctctattgatccccaactccaaatatctcatcaacaaccgataaatcaccacccaaaatgactaattcaaataacctcaaaacaaatgataaccatagacaaactaaaggacgaacctgatctcttatagctagtatccttaatccattttattgcacaaataaactcctcggactcctgctcaatcatttacaacaaaccaccaatatctataaactagacagggcatcccttatgagcggcgcatgatata

SEQ ID NO: 730671 - DNA, 1872 bp, Homo sapiens
  misc_feature (21)..(21): n is a, c, g, or t
agcggaggggcggacggcgtnggtttgaagaccttcagcgttgccctggcggagcagagacaggccctcggggtggaggtctttggtttcataagagcctgagagagatttttctaagatatgtgtaacacaccaacgtactgtgacctaggaaaggctgctaaggatgtcttcaacaaaggatatggctttggcatggtcaagatagacctgaaaaccaagtcttgtagtggagtgatggaattttctacttctggtcatgcttacactgatacagggaaagcatcaggcaacctagaaaccaaatataaggtctgtaactatggacttaccttcacccagaaatggaacacagacaatactctagggacagaaatctcttgggagaataagttggctgaagggttgaaactgactcttgataccatatttgtaccgaacacaggaaagaagagtgggaaattgaaggcctcctataaacgggattgttttagtgttggcagtaatgttgatatagatttttctggaccaaccatctatggctgggctgtgttggccttcgaagggtggcttgctggctatcagatgagttttgacacagccaaatccaaactgtcacagaataatttcgccctgggttacaaggctgcggacttccagctgcacacacatgtgaacgatggcactgaatttggaggttctatctaccagaaggtgaatgagaagattgaaacatccataaaccttgcttggacagctgggagtaacaacacccgttttggcattgctgctaagtacatgctggattgtagaacttctctctctgctaaagtaaataatgccagcctgattggactgggttatactcagacccttcgaccaggagtcaaattgactttatcagctttaatcgatgggaagaacttcagtgcaggaggtcacaaggttggcttgggatttgaactggaagcttaatgtggtttgaggaaagcatcagatttgtccctggaagtgaagagaaatgaacccactatgttttggccttaaaattcttctgtgaaatttcaaaagtgtgaactttttattcttccaaagaattgtaatcctccccacactgaagtctaggggttgcgaatccctcctgagggagatgcttgaaggcatgcctggaagttgtcatgtttgtgccacgtttcagttcagttctgaagtgttattaaatgtgttcctcagcgacagtgtagcgtcatgttagaggagacgatctgacccaccagtttgtacatcacgtcctgcatgtcccacaccattttttcatgaccttgtaatatactggtctctgtgctatagtggaatctttggttttgcatcatagtaaaataaaataaacccatcacatttggaacataaaaaaaaaaaaaaaaaaaactcgaactagtctctctctctcaatggcgtcagttggtgagtgtccggccccagtaccagtgaaggacaagaaacttctggaggtcaaactgggggagctgccaagctggatcttgatgcgggacttcagtcctagtggcattttcggagcgtttcaaagaggttactaccggtactacaacaagtacatcaatgtgaagaaggggagcatctcggggattaccatggtgctggcatgctacgtgctctttagctactccttttcctacaagcatctcaagcacgagcggctccgcaaataccactgaagaggacacactctgcacccccccaccccacgaccttggcccgagcccctccgtgaggaacacaatctcaatcgttgctgaatcctttcatatcctaataggaattaacctccaaataaaacatgactggtacgtg

SEQ ID NO: 730672 - DNA, 783 bp, Homo sapiens
ggaaggcggtggctgaggcggttccggaggttctagtgtcggagttgggtgcaggcaggtgccatgggcccgcttgaggcacactgaggggacgcggggctgggccatggccggcgctcgggccgccgccgccgctgcctcggcggggtcctcggcctcttcaggcaaccagccgcctcaggagctggggcttggggagctgctggaggagttctcccggactcagtaccgggccaaggatggcagcgggaccggcggctctaaggttgagcgcattgagaagagatgtctggagctgtttggccgagactactgtttcagcgtgattccaaacacgaatggggatatctgtggccactatccccggcacatcgtgttcctggagtatgagagttctgagaaggagaaagacacgtttgagagtaccgtacaggtgagcaagttgcaagacctcatccaccgcagcaagatggcccggtgcagaggacggtttgtctgcccagtaatcctgttcaagggcaagcacatttgcaggtcggccacactggctggatggggagagctgtatggacgctcaggctacaactattttttctcagggggtgcagatgatgcctgggcagatgtggaggacgtcacggaggaggactgtgctcttcgaagtggtgacacgcatcttttgataaggtcagaggctatgacatcaagctgcttcgatacctgtcagtcaaatacattctgtgacctgatggtggagaacaagaaggtgaagtttggcatgaa

SEQ ID NO: 730673 - DNA, 858 bp, Homo sapiens
ggaaggcggtggctgaggcggttccggaggttctagtgtcggagttgggtgcaggcaggtgccatgggcccgcttgaggcacactgaggggacgcggggctgggccatggccggcgctcgggccgccgccgccgctgcctcggcggggtcctcggcctcttcaggcaaccagccgcctcaggagctggggcttggggagctgctggaggagttctcccggactcagtaccgggccaaggatggcagcgggaccggcggctctaaggttgagcgcattgagaagagatgtctggagctgtttggccgagactactgtttcagcgtgattccaaacacgaatggggatatctgtggccactatccccggcacatcgtgttcctggagtatgagagttctgagaaggagaaagacacaggacgagtaccgtaacaggggctttggggggccacaaaccgagaaaaacccccaaacacacaacacaacaaacaaaagggcatttaaagggggcaaaaaggaaagactcattccacacggaaaggcaagatggcccggtgcagaggacggtttgtctgcccagtaatcctgttcaagggcaagcacatttgcaggtcggccacactggctggatggggagagctgtatggacgctcaggctacaactattttttctcagggggtgcagatgatgcctgggcagatgtggaggacgtcacggaggaggactgtgctcttcgaagtggtgacacgcatcttttgataaggtcagaggctatgacatcaagctgcttcgatacctgtcagtcaaatacattctgtgacctgatggtggagaacaagaaggtgaagtttggcatgaa

SEQ ID NO: 730674 - DNA, 766 bp, Homo sapiens
  misc_feature (42)..(42): n is a, c, g, or t
  misc_feature (158)..(158): n is a, c, g, or t
  misc_feature (209)..(209): n is a, c, g, or t
  misc_feature (234)..(234): n is a, c, g, or t
  misc_feature (272)..(272): n is a, c, g, or t
  misc_feature (372)..(372): n is a, c, g, or t
  misc_feature (414)..(414): n is a, c, g, or t
  misc_feature (445)..(445): n is a, c, g, or t
  misc_feature (520)..(520): n is a, c, g, or t
  misc_feature (539)..(539): n is a, c, g, or t
  misc_feature (663)..(663): n is a, c, g, or t
  misc_feature (680)..(680): n is a, c, g, or t
gccggccggtctaagcgggagtctcgcggttccactcgcggnaagcgagagtctgagtcgcggggcagctccggtcgcgtcaagcgggagcgagatcgggagcgggagcctgaggcggcgagctcccggggcagccctgtgcgcgtgaagcgggagtncgagccggcgagcgcgcgcgaggccccggtttctgttgtcccgtttgtgcngggtgaagcgggagcgctgaggtcngatgaggactcggagcctgagcgggaggtgcgagcaangaatggccgagtggattctgaggaccggaggagccgccactgcccgtacctggacaccattaacaggagtgtgctggactttgactttgagaaaactgtngtctatctccctctcacacatcaatgcttatgcctgtctggntgtgtggcaagtactttcaaggccggggttngaagtctcacgccatacattcacagtgtccagtttagccaccaatgtttcctcaacctccacagcctcaagtttnacgtgccttccagacaacntatgagatcatcgattcctcatgtggaggatatcacgtatgtgttgaagcccactttcacaaagcagcaaattgtcaacttgggacaagcaagccaaatggtcccgggcatatgatggtaccanttacctgcgggtattgnggactggtaacattattggcaatgattattgcaacgctgcctcaggggtctatctatggtctctctcgcaatacttctggcacgag

SEQ ID NO: 730675 - DNA, 968 bp, Homo sapiens
ggattagggctcccgaggcaacttgctcggggctcaggccgttctcccccgaagctcgggctgccgggctgttctggctctggcctccctctcctcctcttcctcttccttctgtcccctcccgcgttccttcccggccgcgccgcctgcgccctcgcctcctgtggcgctgctcctccgccctgcgctcctggggtccccgcagtccggctggccgcgttgcgcgcggggctcactttctgccgccggtggcgagtggctgaactcctaagtgaccaggaacagacgatttttaaccgagttctgctgcgtggagcccaggttggcgctagtgagtgcagtgtgctgacccaagtggtggtggcccaaggacgcgctgacccgtacatttggcaaagctttcattaaatgtatcagattctcgcggaagtggttgcagtccggagagtgaaacagctatctctcaagtcctgaccggttcagctgaaatctacatttgcactgaatctggcaaaacacggacgggtccgcccgagatctcaggaaacccagagcaagttacctccatgtagttgatcattctttctgaaaggacggacaccatttaccccactgcaatcctgtccaacgggcagctctgagtttagctttagcgccaaaggattgatttcccccacccgctggagatttactggggacgagcgggggaggggaggcgaaggtacctcggaggaggtcaagtgggggaggaggaggagcagcagaaaattaccagccaagcaggggagggagttggaagcccggaaatataccaggatgcctcaagtaaccttcctttaagtctcagaattcagccctcggaaaacagcctcataaggtgtcctgggaaggagtcctcgggtgggctgcggaggtgatgtcaagagttacagtaactttatgaattaaactgacggtaggcatgtcgg

SEQ ID NO: 730676 - DNA, 821 bp, Homo sapiens
ctcgggctgccgggctgttctggctctggcctccctctcctcctcttcctcttccttctgtcccctcccgcgttgcgcgcggggctcactttctgccgccggtggcgagtggctgaactcctaagtgaccaggaacagacgatttttaaccgagttctgctgcgtggagcccaggttggcgctagtgagtgcagtgtgctgacccaagtggtggtggcccaaggacgcgctgacccgtacatttggcaaagctttcattaaatgtatcagattctcgcggaagtggttgcagtccggagagtgaaacagctatctctcaagtcctgaccggttcagctgaaatctacatttgcactgaatctggcaaaacacggacgggtccgcccgagatctcaggaaacccagagcaagttacctccatgtagttgatcattctttctgaaaggacggacaccatttaccccactgcaatcctgtccaacgggcagctctgagtttagctttagcgccaaaggattgatttcccccacccgctggagatttactggggacgagcgggggaggggaggcgaaggtacctcggaggaggtcaagtgggggaggaggaggagcagcagaaaattaccagccaagcaggggagggagttggaagcccggaaatataccaggatgcctcaagtaaccttcctttaagtctcagaattcagccctcggaaaacagcctcataaggtgtcctgggaaggagtcctcgggtgggctgcggaggtgatgtcaagagttacagtaactttatgaattaaactgacggtaggcatgtcgg

SEQ ID NO: 730677 - DNA, 1301 bp, Homo sapiens; identical to SEQ ID NO: 293140

SEQ ID NO: 730678 - DNA, 345 bp, Homo sapiens
  misc_feature (53)..(53): n is a, c, g, or t
aggccgttacgttcgatcttagcctgcgatggcccttccaccgagaagcccancgtgcccacgtcgtccccgatagcctccaccacaaagtctgctgacttgccaacgacgacgacgacgacgtcgtcgtcgtcgtggtggttgaggtgatgaccctctgcctgaacaaaaacaggcaatcaaggtggagggtgacaggttctgaaaggcagctaagaggagaggaaggctgacagcatgtgtgaggccagaaggaaagggtgagaagacaaggaactgacactctgagagtctccatgctttctcactgtgcatcaagagcaagtttaaccacgacgacgacga

SEQ ID NO: 730679 - DNA, 913 bp, Homo sapiens
cctgttggccgagtggagactggtgtactcaaacccggatatggtggtcacctttgctccagtcaacgttacaacggaagtaaaatctgtcgaaatgcaccatgaagctttgagtgaagctcttcctggggacaatgtgggcttcaatgtcaagaatgtgtctgtcaaggatgttcgtcgtggcaacgttgctggtgacagcaaaaatgacccaccaatggaagcagctggcttcactgctcaggtgattatcctgaaccatccaggccaaataagcgccggctatgcccctgtattggattgccacacggctcacattgcatgcaagtttgctgagctgaaggaaaagattgatcgccgttctggtaaaaagctggaagatggccctaaattcttgaagtctggtgatgctgccattgttgatatggttcctggcaagcccatgtgtgttgagagcttctcagactatccacctttgggtcgctttgctgttcgtgatatgagacagacagttgcggtgggtgtcatcaaagcagtggacaagaaggctgctggagctggcaaggtcaccaagtctgcccagaaagctcagaaggctaaatgaatattatccctaatacctgccaccccactcttaatcagtggtggaagaacggtctcagaactgtttgtttcaattggccatttaagtttagtagtaaaagactggttaatgataacaatgcatcgtaaaaccttcagaaggaaaggagaatgttttgtggaccactttggttttcttttttgcgtgtggcagttttaagttattagtttttaaaatcagtactttttaatgggaacaacttgaccaaaaatttgtcacagaattttgagacccattaaaaaagtttcatgagaaaaaaaaaaaagaaaa

SEQ ID NO: 730680 - DNA, 834 bp, Homo sapiens
tctccggttttctcccccgcagtgctacacacgcagggccctgtcgatggcagcctttacgcgaaggtgaggaagaaaagctcctcggatcctggcatcccaggtggcccccaggcaatcccggccaccaacagcccagaccacagtgaccacaccttgtctgtcagcagtgactccggccactctacagcctctgccaggacggataagacggaagagcgcctggccccaggaaccaggaggggcctgagtgcccaggagaaggcagagttggaccagctgctcagtggctttggcctggaagatcctggaagctccctcaaggaaatgactgatgctcgaagcaagtacagtgggacccgccacgtggtgccagcccaggttcacgtgaatggagacgctgctctgaaggatcgggagacagacattctggatgacgagatgccccaccacgacctgcacagtgtggacagccttgggaccctgtcctcctcggaagggcctcagtcggccacctgggtcccttcacctgccacaagagcagccagaactcactcctatctgacggttttggcagcaacgttggtgaagatccgcagggcaccctcgttccggacctgggccttggcatggacggcccctatgagcgggagcggacttttgggagtcgagagcccaagcagccccagcccctgctgagaaagccctcagtgtccgcccagatgcaggcctatgggcagagcagctactccacacagacctgggtgcgccagcagcagatggttgtagctcaccagtatagcttcgccccagatggggaggcccggctggtga

SEQ ID NO: 730681 - DNA, 1140 bp, Homo sapiens
ctcttgccactgccatgtaagaagtgcctttcaccacccccacaccctgccatgactctgaggcctccccagccacgtggaactgaggcagctgtatggaggccaatatgcagacaagggaagtaactcaggcattttgggggagaggtacagaaagaagagaaaagactgaactgactgctgttctgaacaagaactgtgactatatgtggtactcccagaatgctggtttcctttcagacccatcaagtggccatcctattggcttggactgaagacccccactggagaactgtctctgcagcctatactgatgacactggccactgtccagggctccaccccaaggagtccaagccccagacatttagccttagagagaatccagattttgcatttccagtgcagggattgatggagccttgtgtatcaaagtgccaatttctttctaacaagctagggaggataccgttgacagcagcagaaaggggtagcagtggtttgctttccaaatggtaataagaagggcctggcagtggcaacctgtccacgtatcattaaaaatggactctcctgcttcgtttggaattcaacccaatgaacttgaataaactctggacaatgaccagcacagagccctaagcaggatacagcaagattatttgctttactcatccactgagtacctaccatgtgccaaatactatgctatatgccgagtatacactggcaaataaaacacatatggtccctggagcctatgaatcttaccccatctagccacaaataataaaaataagaagaatctgaaggacaagtgggacagaaatactcaagcagaatgagggtgagattgaagtccctgaacatacagtgccctttacacttgatcttagccaaaaggccgagaagagattacagtgctttttaaaggtagcatttcacccagccaataatcaatccctttggccttcttgaggtgcaaggccacacactcaaattctttaatcaaacaataggctagtgcaaatggagctatttcttaaacccagctgtttacacagcagctacaaatctgttcagaaggaatcccccaccatccacaactgtctatcgagcagatgtgcaagagtatttgtc

SEQ ID NO: 730682 - DNA, 1902 bp, Homo sapiens; identical to SEQ ID NO: 553992

SEQ ID NO: 730683 - DNA, 884 bp, Homo sapiens
tgcttgattcctcgaaaagggcggggactctgggcagcggttgtggagtgccgcgggtccacagtgctgcactgagcagagaggaaggggcgtcccgggatatttggaggataaaggtgtgggcaagggtgatgaccacacctgccggctccggcagcggcttcggctccgtgtcctggtggggcctgtccccggcgctggacctgcaggctgaaagtcctcctgtggacccagactcccaggccgatacagtgcacagcaaccccgagctagatgtgctgcttctgggctctgtggatggacggcacctgctgcggaccctgtcccgagcgaagttctggcctcgcaggaggttcaacttctttgtgctggagaataatctggaagctgtggcccgacacatgctgatcttcagcctagccctggaggaaccggagaagatggggctgcaagagcgaagcgagaccttcctggaagtgtgggggaacgcgctgctgcgcccgccagtggccgccttcgtgcgtgcccaggccgacctgctggcgcacctggtccccgagcccgaccgcctggaggaacagctgccctggctcagcctccgcgccctcaagttccgcgagcgggatgccctggaggccgtattccgcttctgggctggcggcgagaaagggccccaggcgttccccatgagccgcctctgggactcgcgcctgcgccactacctgggctcccgctacgacgcccggcgcggtgtcagcgactgggacctgcgcatgaagctgcatgaccgcggggctcaagtcattcaccccaggagttccgacgctggcgggacacaggcgtcgcctttgaactcagggactccagcgcctatcatgtgccca

SEQ ID NO: 730684 - DNA, 687 bp, Homo sapiens
tgcttgattcctcgaaaagggcggggactctgggcagcggttgtggagtgccgcgggtccacagtgctgcactgagcagagaggaaggggcgtcccgggatatttggaggataaaggtgtgggcaagggtgatgaccacacctgccggctccggcagcggcttcggctccgtgtcctggtggggcctgtccccggcgctggacctgcaggctgaaagtcctcctgtggacccagactcccaggccgatacagtgcacagcaaccccgagctagatgtgctgcttctgggctctgtggatggacggcacctgctgcggaccctgtcccgagcgaagttctggcctcgcaggaggttcaacgtgagctgggatgaagatgagagcccagattcccgagtccttgagggaggaagggattgaaattctaaaacctcagttctttgtgctggagaataatctggaagctgtggcccgacacatgctgatcttcagcctagccctggaggaaccggagaagatggggctgcaagagcgaagcgagaccttcctggaagtgtgggggaacgcgctgctgcgcccgccagtggccgccttcgtgcgtgcccaggccgacctgctggcgcacctggtccccgagcccgaccgcctggaggaacagctgccctggctcagcctccgcgccctcaag

SEQ ID NO: 730685 - DNA, 1351 bp, Homo sapiens
ctctgcctggttcggcccgcctgcctccactcctgcctccaccatgtccattaggggacccagaagtcctacaaggtgtccacctctggcccccgggccttcagcagccactcctacacaagtgggcccggtgcccacatcagctcctcaagcttctcccaagtgggcagcagctgctttcggggtggcctgggcggcggctgtggtggggccagcggcatgggaggcatcaccgcggtcacagtcaaccagagcctgctgagcccccttgtcctggaggtggaccccgacatccaggctgtgtgcacccaggagaaggagcagatcaagaccctcaacaacaagtttgcctccttcatagacaaggtacggttcctggagcagcagaacaagatgctggagaccaagtggagcctcctgcagcagcagaagacggccgggagcaacatggacaacatgttcaagagctacatcaacaaccttaggcggcagctggagactctgggctaggagaaactgaagctggaggcggagcttggcaacatgcaggggctggtggaggacttcaagaacaagtatgaggatgagatcaataagcgtacagagatggagaacgaatttgtcctcatcaagaaggatgtggatgaagcttacatgaacaaggtagagctggagtctcgcctggaagggctgaccgacgagatcaacttcctcaggcagctgtatgaagaggagatccgggagctgcagtcccagatctcggacacatctgtggtgctgtccatggacaacagccgctccctggacatggacagcatcattgctgaggtcaaggcacagtacgaggatattgccaaccgcagccgggctgaggctgagagcatgtaccagatcaagtatgaggagctgcagagcctggctgggaagcacggggatgacctgcggcgcacaaagactgagatctctgagatgaaccggaacatcagccggctccaggctgagattgagggcctcaaaggccagagggcttccctggaggccgccattgcagatgccgagcagcgtggagagctggccattaaggatgccaacgccaagttgtccgagctggaggccgcctgcagcgggcaagcaggacatggcgcggcagctgcgtgagtaccaggagctgatgaacgtcaagctggccctggacatcgagatcgcacctacaggaagctgctggagggcgaggagagccggctggagtctgggatgcagaacatgagtattcatacgaagaccaccagcggctatgcaagtggtctgagctcggcctgtgggggcctcacaagccccggcctcagctacg

SEQ ID NO: 730686 - DNA, 908 bp, Homo sapiens
  misc_feature (193)..(193): n is a, c, g, or t
  misc_feature (219)..(219): n is a, c, g, or t
  misc_feature (250)..(250): n is a, c, g, or t
  misc_feature (270)..(270): n is a, c, g, or t
  misc_feature (302)..(302): n is a, c, g, or t
  misc_feature (380)..(380): n is a, c, g, or t
  misc_feature (384)..(385): n is a, c, g, or t
  misc_feature (578)..(578): n is a, c, g, or t
  misc_feature (583)..(583): n is a, c, g, or t
  misc_feature (589)..(589): n is a, c, g, or t
  misc_feature (598)..(599): n is a, c, g, or t
  misc_feature (611)..(611): n is a, c, g, or t
gggggtgaagaaggggccggccttcaagcaacagcgacgcaagatggcagccaccacggctcgggagtaaaagtccctcgcaatttccgactgttggaagaactcgaagaaggccagaaaggagtaggagatggcacagttagctggggtctagaagatgacgaagacatgacacttacaagatggacagggnatgataattgggcctccaagaacaantttatgaaaaccgaatatacagccttaaaantagaatgtggacctaaatancccagaagcaccccccttgtgtaagatttgtnaacaaaaattagtatgaattggcagtacacatagtctctaatggagtggtggacccaagagccatatcagtgctagcnaaanntggcagaattcatatagcatcaaagttgtcctgcaagagcttcggcgccctaatgatgtctaaacgaaaatttgacactccctcagcgcccgatagcacaggggttacagcaattaattcaacaagaaaaacacaggccttccccttcccccaattcgatgtaatccagtccttcattttcccacagaagtanatttnctaganacgtttgtnnacctcaaagtancggaaggaaggtccccttcaaacggaaatttatcttacagactaccgtcgatgactactacttgttggcccatcgcaaacattaacgtgggcgccaacaaataatccggtccagtgtaaccctgtacagtagttgaactccggatcagacggctttactgggtcccacatactgggggggcatcacccactgggccacaccttcgcatacacgttgtggtacaagcggggcgcgtcaccataacagaggcacaccatgaaaacgcacagcgggggtcgaaacagcacgcacggacat

SEQ ID NO: 730687 - DNA, 940 bp, Homo sapiens
  misc_feature (140)..(140): n is a, c, g, or t
  misc_feature (321)..(321): n is a, c, g, or t
  misc_feature (400)..(400): n is a, c, g, or t
  misc_feature (439)..(439): n is a, c, g, or t
  misc_feature (648)..(648): n is a, c, g, or t
  misc_feature (689)..(689): n is a, c, g, or t
  misc_feature (697)..(697): n is a, c, g, or t
  misc_feature (699)..(699): n is a, c, g, or t
  misc_feature (701)..(701): n is a, c, g, or t
  misc_feature (703)..(703): n is a, c, g, or t
  misc_feature (706)..(706): n is a, c, g, or t
  misc_feature (711)..(711): n is a, c, g, or t
  misc_feature (718)..(718): n is a, c, g, or t
  misc_feature (722)..(722): n is a, c, g, or t
  misc_feature (725)..(725): n is a, c, g, or t
  misc_feature (732)..(732): n is a, c, g, or t
gggacacaaagaaaaattgaataaactgtatgatttaaaagattatcgggagagttacctcccgatataaaaggaaggatttacagaatgtgacctaaggtctggcgtaaatgtgcaccggaaccgagaaggcccggatngtcatggacgatgagatacaccggaatatcatggacatattctttaaagcgccctttatcttcaaatgcggcacggaaaccggaggctttgaagaactcaaggaagcgcggcacgataccgcccgcaataaacacgccgccaaatgtcccgagattgagcgccagattgccgcaaaacggnccataatgacgcaaaacagcgacaatgcgcggcggcaatcggtgcagctgtcagccagcgcgcgtcggtaatatctttnggcttgagattttctggcaggcggttgtcagctttcaanaatggcgcgatacaaattcagcagcccagggccagaaagcacgcgctccgcccgaaacatgaccaatttccgcacgcaatatttcgaggataatggcctcttcttcactattcgggcaaaatcaacgtgaccgcttcgcctggcaagcttaaccaaagcttatcgacatggaccagatgcgcaacccaagcccgttccggcacgtaaancggaataggcttaccttcgaccggtctggggcacaaatggntagatgcncntntncancatcnggatcgncatnganacagggntaaacacgggaataattccagaatggtaaaacgagaatccttttcacttcgcgaatggaaacgcaggttggtgggctcgcaccaggcggaactgggaccacggaaaacgggcttaccgcttgtttcaaaaacgcacagcgtgcgggggaaacgcaatcacggcgtaccgggccaaaaggtggccccacacgtcttatgcggcaaatac

SEQ ID NO: 730688 - DNA, 1218 bp, Homo sapiens; identical to SEQ ID NO: 395758

SEQ ID NO: 730689 - DNA, 587 bp, Homo sapiens
ggagtgaggcaatgcctcgccctgcttcggctcgcgcacggtgcgcgcacccactggcctgcgcccactgtctggcactccctagtgagatgaacccggtacctcagatggaaatgcagaaatcacccgtcttctgcgtcgctcacgctgggagctgtagagcggagctgttcctattcggccatcttggctcctccggcttacattcttgtatagggattactttcctcactttgttatatatcctggaagctatgaacaatgatgcttcttcatactcttcaacctcatcatgataccttgcacgaagcaggagctcaactaatttgggttgaggccagaatgccaatagtgagcaaaaaaggatgatatttgacacttggcattgaatatctgaatcatgatgtccacataactacagctatgcaccacataatgatgttttactcaacaacagaccacatatacaatggtggtttcataaggctataaaggagctgaaaatttcttaccacctcatgtcctcatgtcatagtgcaacatattgctcttgtgtttgcagtgatgctggcataaacaaacccact

SEQ ID NO: 730690 - DNA, 2728 bp, Homo sapiens
tttctcatctgtacattgaggcaatgagtaaccacctcataggtggtaagggttagataggaaagaacacagtagaatgcctagcacacctaagtactcaatcaatgttagttctggacctttcatttgaatactgcttgagctctgtgcccaatctccctttcctggatcaaataagatttttctttgttagtgatttctttctagatacttccttggccagaactatagatcctctgtctttcactaactcttgttgatctatggttctcattcaagtttgtgtagaacatccagagatttcagaggcattgtttactcctgatgaacagggaacattgcgtgtccaggaaccagcacactgcctgagttatgggggatattcaggaagcatgctgaaccaatgaatgaatgaacaaatgaatgaatagctgattctgactagtcaaccaaaacttaattagcgccattgcttccagatgttattgcttctcaagggagtatgcaatgtgaaagaagaaagaaaaaaaggcgcctctcaatcgtcaaatatcagtagatgcattggttttattaactgatattttctcttcaaaggaaaggctgattcagtcttgcacaggcgaaagatccagtgggtcccattggttctctgtgtctcctgctacacaaattactgacggaaagatttgagccttcattgtgaccacatccacagagaccatagtccagagagagcaattggggcctgaatcaactgctggtgtttgttgagcagaaacagtgagtctctgacttcccaccaacagctaacctgatatggaagagccaagaggcatctcagatttgtcaacattgctttaatgagctgaggaacttctcatggtaaactcagcagctgagtaacaggatgatggcaccacaacaggtagataatcaaggcaggaggtcaaagcactggagccaacacccgcccaggatggggtataaaagggttgggaggagaggaggcttcagtctcagtggctcagccttcccagctgatctgaagctcctgtgcagcctcagccctacaccatgacctccttctacagcacctcctcatgccctctgggttgcaccatggctcctggagcaagaaatgtctttgtctctcctatcgatgttgggtgccagcctgtggcagaggccaatgctgcctccatgtgcctcttggccaacgtggcacacgccaacagagtccgtgtggggtcgactcccctgggccgccccagcctctgtctgcccccaaccagtcacactgcttgtcccttgccagggacctgtcacattcccggcaacatcggaatctgtggggcctacggcaaaaacaccctgaatggccatgagaaggagaccatgaagttcctgaatgaccgcctggccaactacctggagaaggtgcgccagctggagcaggagaatgcagagctggagaccacactcctcgagaggagcaagtgccacgagtccaccgtgtgccccgactaccagtcctacttccgtacaatcgaggagctccagcagaagatcctgtgcagcaaggctgagaatgccaggctgattgtacaaattgacaacgcgaagctggctgctgatgactttaggatcaagctggagagtgagcgctcccttcaccagctggtggaggcggacaagtgcgggacgcagaagctcctggatgacgcgaccctggccaaggccgacctggaggcccagcaggagtccctgaaggaggagcagctctccctcaagagcaaccacgagcaggaagtaaagattctgaggagtcagctgggggagaagttccggatcgagctggacattgagcccaccattgacctgaacagggtgttgggggagatgcgggctcagtacgaggccatggtggagaccaaccaccaggatgtggaacagtggttccaagcccagtctgaaggcatcagcctgcaggccatgtcctgctccgaggagctgcagtgctgccagtcggagatcctggagctgagatgcacggtgaatgccctggaggtggagcgccaagcccagcacaccttgaaggactgtctgcagaactccctgtgtgaagcggaggaccgctacggcacagagctggcccagatgcagagcctcattagcaacttggaagagcagttgtctgagatccgggccgacctggagcggcagaaccaggagtaccaggtgctgctggacgtgaaggcccggttggagaacgagattgccacataccggaaccttactcccctgcaatccctgttccacgcctgcctcctgtacttcttgtccaagctgtggccctgtcaccggtgggtctccctctggccatggagccagcatggggagatgattctgaaggcccgagttaggagattgaggctggttgcactggggtcaggagtgccctcaccttgcccagtcttccttcaagactagactcactgaggcattttccctaaatcaaccggtagcagatacttccaaggagtggctccctgcctatgcctctaagctgtattttttgttgttgctaaaatgttgtaattatcttccatgaaagcaattatttttcctggtgtctcttcttggtacttttagttctattccagtgtttcagaatctccaaaaatgtaactgggttccctgcattaaatggtcaataaacctcctt

SEQ ID NO: 730691 - DNA, 366 bp, Homo sapiens
gaagtaaagattctgaggagtcagctgggggagaagttccggatcgagctggacattgagcccaccattgacctgaacagggtgttgggggagatgcgggctcagtacgaggccatggtggagaccaaccaccaggatgtggaacagtggttccaagcccaggtgagtgggggttacagagccagggagtacctggcctccatctgagcagggaggtgactgtgtttctctgtgctccagtctgaaggcatcagcctgcaggccatgtcctgctccgaggagctgcagtgctgccagtcggagatcctggagctgagatgcacggtgaatgccctggaggtggagcgccaagcccagcacaccttg

SEQ ID NO: 730692 - DNA, 598 bp, Homo sapiens; identical to SEQ ID NO: 338675

SEQ ID NO: 730693 - DNA, 243 bp, Homo sapiens
aaggactgtctgcagaactccctgtgtgaagcggaggaccgctacggcacagagctggcccagatgcagagcctcattagcaacttggaagagcagttgtctgagatccgggccgacctggagcggcagaaccaggagtaccaggtgctgctggacgtgaaggcccggttggagaacgagattgccacataccggaaccttctggagagcgaggactgcaagtacgtgtgatctgggcaattc

SEQ ID NO: 730694 - DNA, 391 bp, Homo sapiens; identical to SEQ ID NO: 338677

SEQ ID NO: 730695 - DNA, 397 bp, Homo sapiens; identical to SEQ ID NO: 338678

SEQ ID NO: 730696 - DNA, 370 bp, Homo sapiens
  misc_feature (15)..(15): n is a, c, g, or t
  misc_feature (19)..(19): n is a, c, g, or t
  misc_feature (279)..(279): n is a, c, g, or t
actctgaggatcccngtancatctatggggttgaagggatcattggccagctcaaggcttaccttctcttgggctgagatgctgctgccagcttctaaaacagcactctgttctcaaaacctgggggaatggagaaggcgcatacaccttagagactgcagatgcagagcaggacaggcatttctgatgacagtcaattaatgactttacaaatttaagtccatcctaacaaaagccccttaagacctaattagaggtaatttttctaagtttttgtanattattgaggactacaaatcttaattagcttctcagtaggttgtaattatatattattattttggagatgcatagatggtaacaggggtac

SEQ ID NO: 730697 - DNA, 382 bp, Homo sapiens
  misc_feature (43)..(43): n is a, c, g, or t
  misc_feature (93)..(94): n is a, c, g, or t
  misc_feature (98)..(98): n is a, c, g, or t
  misc_feature (100)..(101): n is a, c, g, or t
  misc_feature (104)..(104): n is a, c, g, or t
  misc_feature (107)..(107): n is a, c, g, or t
tcgtaatgtatacagacatatataccacgttctagtataaatntttcaaaaaatacaataataatataatttataaagaacactcttctatgnncaancnncancancaaaaaaaaaaagccctcagaaaatttctcacaaataagggcaactaaggccggatatctcaaaatcctttacaaaagggagatagttctagtcaaggagtttggggtatgttacttttttttcttctttttcttttcatctgcctccatcttaagtgcaatttcttcagcggtaagagctcccagtttcttattctgggctttcttaaccttttcctggaggcgggacggaggggtacggagctcggaaatccggtaaatctatgggtctataa

SEQ ID NO: 730698 - DNA, 878 bp, Homo sapiens
  misc_feature (43)..(43): n is a, c, g, or t
  misc_feature (93)..(94): n is a, c, g, or t
  misc_feature (98)..(98): n is a, c, g, or t
  misc_feature (100)..(101): n is a, c, g, or t
  misc_feature (104)..(104): n is a, c, g, or t
  misc_feature (107)..(107): n is a, c, g, or t
  misc_feature (421)..(421): n is a, c, g, or t
  misc_feature (431)..(431): n is a, c, g, or t
  misc_feature (434)..(434): n is a, c, g, or t
  misc_feature (437)..(437): n is a, c, g, or t
  misc_feature (444)..(444): n is a, c, g, or t
  misc_feature (447)..(447): n is a, c, g, or t
  misc_feature (462)..(462): n is a, c, g, or t
  misc_feature (482)..(482): n is a, c, g, or t
  misc_feature (485)..(485): n is a, c, g, or t
  misc_feature (487)..(487): n is a, c, g, or t
  misc_feature (515)..(515): n is a, c, g, or t
  misc_feature (525)..(525): n is a, c, g, or t
  misc_feature (584)..(584): n is a, c, g, or t
  misc_feature (598)..(598): n is a, c, g, or t
  misc_feature (678)..(678): n is a, c, g, or t
  misc_feature (872)..(872): n is a, c, g, or t
tcgtaatgtatacagacatatataccacgttctagtataaatntttcaaaaaatacaataataatataatttataaagaacactcttctatgnncaancnncancancaaaaaaaaaaagccctcagaaaatttctcacaaataagggcaactaaggccggatatctcaaaatcctttacaaaagggagatagttctagtcaaggagtttggggtatgttacttttttttcttctttttcttttcatctgcctccatcttaagtgcaatttcttcagcggtaagagctcccagtttcttattctgggctttcttaaccttttccttgatgctggccacatcaattttagtttcagtagaagcttccttaggtttcacaattggtttttccttagggggaataaatgctttgtttctttccncttgtctctnacnganggcttcngcntgtttagcctttatngcttccattttcggccgccnctncngatttgccttcaaaaaggattcaccacnagccaattcnttatcgatcggactgccggggtgggggggggggaagggcggagatgcggccggaacagngtggggcggggggnccgggcggggaggcacatgggggtgtctgaacggtggcaaaaatcgcgcccaactttgtgatcgtaattcagaatctttngccaactctctcttaatcattaagcttttaatgttataaattggatgaatattcttcatagtatcaaggactacttttctaacctcttttaagccactaaaaggtccaatggctgaaactgtgtttccctgaaccataatgtaacaattagttaagagttccaatgccttcaatgtagaacctttgggaccaanaagccg

SEQ ID NO: 730699 - DNA, 293 bp, Homo sapiens
  misc_feature (164)..(165): n is a, c, g, or t
  misc_feature (210)..(210): n is a, c, g, or t
  misc_feature (221)..(222): n is a, c, g, or t
tagaggatcccgtcgtcagcatcagggagctgtcatcatcatcttctgccatctccttggcaaactccaagtcctgctgttctcgctcacgccgttcctctgcagactccaagtccttgttgtacgatttgggaggaaacctcatggccttgacagacatgttnntggatatctaggcagaaggagatgcgctgtgtggaaggctagctnggggctctcgnngtggaatagatgtcaatcatcgtccttgtgattggacatagcccgttctctgtggttgattgctggacgac

SEQ ID NO: 730700 - DNA, 852 bp, Homo sapiens
tgcgcagctgcagcggcggttgaggtcaagtagtagcgttgggctgcggcagcggaggagctcaacatgcgtgagtgtatctctatccacgtggggcaggcaggagtccagatcggcaatgcctgctgggaactgtactgcctggaacatggaattcagcccgatggtcagatgccaagtgataaaaccattggtggtggggacgactccttcaacacgttcttcagtgagactggagctggcaagcacgtgcccagagcagtgtttgtggacctggagcccactgtggtcgatgaagtgcgcacaggaacctataggcagctcttccacccagagcagctgatcaccgggaaggaagatgcggccaataattacgccagaggccattacaccatcggcaaggagatcgtcgacctggtcctggaccggatccgcaaactggcggatctgtgcacgggactgcagggcttcctcatcttccacagttttgggggtggcactggctctgggttcgcatctctgctcatggagcggctctcagtggattacggcaagaagtccaagctagaatttgccatttacccagccccccaggtctccacggccgtggtggagccctacaactccatcctgaccaccacacgacctggaacattctgactgtgccttcatggtcgacaatgaagccatctatgacatatgtcggcgcaacctggacatcgagcgtcccacgtacaccaacctcaatcgcctgattgggcagatcgtgtcctccatcacggcctccctgcgatttgacggggcccgaatgtggacttgacggaattccagaccaacctagtgccgtacccc

SEQ ID NO: 730701 - DNA, 348 bp, Homo sapiens
  misc_feature (204)..(204): n is a, c, g, or t
  misc_feature (265)..(265): n is a, c, g, or t
  misc_feature (317)..(317): n is a, c, g, or t
ggagaagacaagtgaaggtcaagatgaagaaccatttgcttttctggggagtcctggcggtttttattaaggctgttcatgtgaaagcccaagaaggtgaaaggattgttcttgttgacaacaaatgtaagtgtgccccgattacttccaggatcatccgttcttccgaagatcctaatgaggacatgtggagagaaacatacncaattattgttcctctgtaacaacagggagaatatctctgatcccacctcaccatttaganccagattttgtgtaccatttgtcttaccctgtaaaaaatgttatcctacagnaggggggctggagtatcagaagtttctgtta

SEQ ID NO: 730702 - DNA, 1290 bp, Homo sapiens
  misc_feature (204)..(204): n is a, c, g, or t
  misc_feature (646)..(646): n is a, c, g, or t
  misc_feature (688)..(688): n is a, c, g, or t
  misc_feature (739)..(739): n is a, c, g, or t
  misc_feature (742)..(742): n is a, c, g, or t
  misc_feature (746)..(746): n is a, c, g, or t
  misc_feature (768)..(768): n is a, c, g, or t
  misc_feature (814)..(814): n is a, c, g, or t
  misc_feature (835)..(835): n is a, c, g, or t
  misc_feature (855)..(855): n is a, c, g, or t
  misc_feature (857)..(857): n is a, c, g, or t
  misc_feature (882)..(882): n is a, c, g, or t
  misc_feature (886)..(886): n is a, c, g, or t
ggagaagacaagtgaaggtcaagatgaagaaccatttgcttttctggggagtcctggcggtttttattaaggctgttcatgtgaaagcccaagaaggtgaaaggattgttcttgttgacaacaaatgtaagtgtgccccgattacttccaggatcatccgttcttccgaagatcctaatgaggacatgtggagagaaacatacncaattattgttcctctgtaacaacagggagaatatctctgatcccaacttaaccattggaaaaccgaattggggtacactttggcttgtgactctcgggtaaaaaatgtgttgatccatacgagaagtggagcgtggtataatcagatagttactgatacccagagcaatatctgtgatgaagacagttgctacagagacctgctacacttatgacagaaacaagtgctacacagctgtggtcccactcgtatatggtggtgagaccaaaatggtggaaacagccttaaccccagatgcctgctatcctgactaatttaagtcattgctgactgcatagctctttttcttgagaggctctccattttgattcagaaagttagcatatttattaccaatgaatttgaaaccaggctttttttttttttgggggtgatgtaaanccaattccctgccaccaaattatttaaaatagtcccttggtnatcttaataaggataactcacttcttaattatttgtccatactctaagttntcnaaantcttccaatttatcagtgctcncctgaaagaggtatgcctcttagagaatacagtttctagctttaancaattaaccagggggagaaantaaacctcagggagtgaaanantcaggaggtgtaataaattgttccntcgntttcccccccgttttttttttttttttgggatttgcccttggaaaaacccaaagttcccgatttttctaaacattctccttttaaacaacacgtgttccccttggcgtgacagacgcctttttgtgtcttaccacttggggcaatttttgtttgctcccttaagaaaaattatttcgtgggagacctggtttcccaaccctttcttccacaatactctcgcgggggaagctccatatttttaaaggttgacaaaatatgggcttatcaacatttgcggcctatcccgttggcgccgtaatacacactttttatcaaaaccgcgtgggacaactgcttgaccacaccttgccgcctagatttgttacggcgttccgacacggcaaattgccaaaaaaaaatggcc

SEQ ID NO: 730703 - DNA, 588 bp, Homo sapiens
ggctgatgccattttcagcctcagcacgcctgcacccaggcgctcattaaaacagcatgttgctccccactgcctcgtgtgtctgtggcgcgctgtcggggttcgaaccgatacaagaaccttccacctacctggtgctttggcctcatctataagcttttccactgtcctgaaacaagatagagaatctgagcggccagtcatctgccctaagtgctgccgccgaagactgaatgtcctggaaagtttgctgtcacatctccattatgacaaaagcattgtgccgaacagatgaaaaaatgcattgtcaacggaatcttttatgtttgttgtcttcctttaagcaacattgccttacttgttataaaagataaataaatatttgttcatttcaaaaaaaaaaaaaaaaaaaaaaaaaaaaaacaatggcgccgccactgggaccccagaacaacgtcctaaacacacaactggggagggcacccgggcgccaacaggggagataagcagcaacgtgggcacaaacagtgaaccaaagagaacccgggccaaaacaaaaggagaaggggactcaccacaaataaaacg

SEQ ID NO: 730704 - DNA, 1160 bp, Homo sapiens
  misc_feature (7)..(7): n is a, c, g, or t
  misc_feature (21)..(21): n is a, c, g, or t
  misc_feature (37)..(37): n is a, c, g, or t
  misc_feature (56)..(56): n is a, c, g, or t
  misc_feature (62)..(62): n is a, c, g, or t
gggcgangtcggggccatggngctgggcccggtcttnctcttctggctggcatctncccttntgcacctccgggagctgtgctgagccccacagtcttcgttataacctcacggtgctgtcctgggatggatctgtgcagtcagggtttcttgctgaggtacatctggatggtcagcccttcctgcgctatgacaggcagaaatgcagggcaaagccccagggacagtgggcagaagatgtcctgggaaataagacatgggacagagagaccagggacttgacagggaacggaaaggacctcaggatgaccctggctcatatcaaggaccagaaagaaggcttgcattccctccaggagattagggtctgtgagatccatgaagacaacagcaccaggagctcccagcatttctactacgatggggagctcttcctctcccaaaacctggagactgaggaatggacagtgccccagtcctccagagctcagaccttggccatgaacgtcaggaatttcttgaaggaagatgccatgaagaccaagacacactatcacgctatgcatgcagactgcctgcaggaactacggcgatatctagaatccggcgtagtcctgaggagaacagtgccccccatggtgaatgtcacccgcagcgaggcctcagagggcaacatcaccgtgacatgcagggcttccagcttctatccccggaatatcatactgacctggcgtcaggatgggtatctttgagccacgacacccagcagtggggggatgtcctgcctgatgggaatggaacctaccagacctgggtggccaccaggatttgccgaggagaggagcagaggttcacctgctacatggaacacagcgggaatcacagcactcaccctgtgccctctgggaaagtgctggtgcttcagagtcattggcagacattccatgtttctgctgttgctgctggctgctgctatttttgttattattattttctatgtccgttgttgtaagaagaaaacatcagctgcagagggtccagagctcgtgagcctgcaggtcctggatcaacacccagttgggacgagtgaccacagggatgccacacagctcggatttcagcctctgatgtcagctcttgggtccactggctccactgag

SEQ ID NO: 730705 - DNA, 126 bp, Homo sapiens
ggtacggcttccggtggcgggacgcggggccgcgcacgcgggaaaagcttccccggtgtccccccatcctctggcggcggtttagagcagttccgtgttctgagggagcgaaaatccggggcgaat

SEQ ID NO: 730706 - DNA, 119 bp, Homo sapiens
ggaaacgcgccgcagagggtgcggcccagaggaggccgcgggccgggaagggccgggcgggacgggaaacgttagggcagcggcccccggggtgagggggccgagcggacgggcagggc

SEQ ID NO: 730707 - DNA, 1070 bp, Homo sapiens
  misc_feature (33)..(33): n is a, c, g, or t
  misc_feature (45)..(45): n is a, c, g, or t
  misc_feature (65)..(65): n is a, c, g, or t
  misc_feature (70)..(71): n is a, c, g, or t
  misc_feature (77)..(77): n is a, c, g, or t
  misc_feature (107)..(107): n is a, c, g, or t
  misc_feature (113)..(113): n is a, c, g, or t
  misc_feature (122)..(122): n is a, c, g, or t
  misc_feature (137)..(137): n is a, c, g, or t
  misc_feature (144)..(144): n is a, c, g, or t
  misc_feature (150)..(151): n is a, c, g, or t
  misc_feature (166)..(167): n is a, c, g, or t
  misc_feature (171)..(171): n is a, c, g, or t
  misc_feature (181)..(181): n is a, c, g, or t
  misc_feature (185)..(185): n is a, c, g, or t
  misc_feature (187)..(187): n is a, c, g, or t
  misc_feature (193)..(193): n is a, c, g, or t
  misc_feature (196)..(196): n is a, c, g, or t
  misc_feature (200)..(201): n is a, c, g, or t
  misc_feature (204)..(204): n is a, c, g, or t
  misc_feature (213)..(213): n is a, c, g, or t
  misc_feature (221)..(221): n is a, c, g, or t
  misc_feature (223)..(223): n is a, c, g, or t
  misc_feature (226)..(226): n is a, c, g, or t
  misc_feature (241)..(241): n is a, c, g, or t
  misc_feature (247)..(247): n is a, c, g, or t
  misc_feature (252)..(252): n is a, c, g, or t
  misc_feature (262)..(262): n is a, c, g, or t
  misc_feature (268)..(268): n is a, c, g, or t
  misc_feature (271)..(271): n is a, c, g, or t
  misc_feature (279)..(279): n is a, c, g, or t
  misc_feature (286)..(286): n is a, c, g, or t
  misc_feature (317)..(317): n is a, c, g, or t
  misc_feature (320)..(320): n is a, c, g, or t
  misc_feature (323)..(323): n is a, c, g, or t
  misc_feature (338)..(338): n is a, c, g, or t
  misc_feature (352)..(352): n is a, c, g, or t
  misc_feature (383)..(383): n is a, c, g, or t
  misc_feature (389)..(390): n is a, c, g, or t
  misc_feature (393)..(393): n is a, c, g, or t
  misc_feature (397)..(397): n is a, c, g, or t
  misc_feature (403)..(403): n is a, c, g, or t
  misc_feature (408)..(408): n is a, c, g, or t
  misc_feature (453)..(453): n is a, c, g, or t
gagctgagaggggaagccggaaagaggcaagtncctggtgcaaangtggctctgcagcataattnaggcnntggagnagctgtggttgtaacactctacaagatggntttccnggaagccgncagttcttttagaantcatcanattganngctgttccaaccagnnctgnaaggtgatgnattnanggcaantcntgtnntanagggagatngagaagananttngacgaggaaggggancagttngtgangaaaatggtnggtatnttngccttcanggtgaangatggccctgggggtaaagaggccacctggntgntgnatgtgaagaatggcnaaggatcagtgctncctaagtcagataagaaggctgactgcaaantcacannggntgantcaganttccntggtttaatgactggtaaaatgaatcctcagtcggcttctttcanggcaaattgaaaatcactggcaacatgggtctcgctatgaagttacaaaatcttcagcttcagccaggcaacgctaagctctgaagaactccctttgctactttgtgaaaatcaagatgagatatatagatatatatccatacattttattgtcagaatttagactgaaactacacattggcaatagcgtgggataagattgttcctaatgggtgtgaccaatcctgtgtttcctaatgctctgggtgaatagagcctggatggtatactaactgcttgtgggggaatgtgcatacaatgtgtgcattacaaagttaatatgggtacattatggtccggggtaacacatcggagtttcagaataaaattaggaacagtaaaatccaaagaattatgtaaacaaaaaagcttggttgagcttacaaagtcatattcaaggattattctgctgaagattcagtcttaagagttttcctgtgggagaactaagtacagaaacacaatgccaacagctggccagtaattaggtgttgtgcacttcatggtcattaatccactttctcaatagttcttaaaatcagtgaagattaaaaactctaaaaatttctgcatttcct

SEQ ID NO: 730708 - DNA, 612 bp, Homo sapiens
  misc_feature (537)..(537): n is a, c, g, or t
ggcttggtctcttgctccagcgagagctcgaggttagctcttcactgccctgtgtcttctttccaagggtctcggtgattcggccacagcctcagcctccatcacgcggtgaactgatggtgctggaagattcatagactccaggacattcctgaagccgagaaaaggttaagtagggtctggcctggaatactctcctagatgaagatagcccaaccatgagccaccttcgaagcagatgagatgaaattaaagctcttcaactcctaaaggcccagagactatcacaaaagaggtcagaaatcctgaaggtcactttctgacaaactcaggaaccccaggtttatcttggagcctcaagaggagataaattcacccaactcaggctggagtgcagtggaatgatcttggctcacttccgtctccgccttccagtttcaagtgattctcctgcctcagcctactgagtagttgggattacaggtgcctgccaccacacccagctaattttgtatttttagtaaagatggggtttcnccatgttggccaggctggtctcaaactcctgacgtcatgatctgcccgcttcagtctcccaaagtgtgattacag

SEQ ID NO: 730709 - DNA, 579 bp, Homo sapiens
  misc_feature (558)..(558): n is a, c, g, or t
ggcttggtctcttgctccagcgagagctcgaggttagctcttcactgccctgtgtcttctttccaagggtctcggtgattcggccacagcctcagcctccatcacgcggtgaactgatggtgctggaagattcatagactccaggacattcctgaagccgagaaaaggttaagtagggtctggcctggaatactctcctagatgaagatagcccaaccatgagccaccttcgaagcagatgagatgaaattaaagctcttcaactcctaaaggcccagagactatcacaaaagaggtcagaaatcctgaaggtcactttctgacaaactcaggaaccccaggtttatcttggagcctcaagaggagataaattcacccaactcagagttttgctcttggtgcccaggctggagtgcagtggaatgatcttggctcacttccgtctccgccttccagtttcaagtgattctcctgcctcagcctactgagtagttgggattacaggtgcctgccaccacacccagctaattttgtatttttagtaaagatggggtttcnccatgttggccaggctggtct

SEQ ID NO: 730710 - DNA, 1564 bp, Homo sapiens
gcacttgattggccacagcttgggagcacacctggctggggaagctgggtcaaggataccaggccttggaagaataactgggttggacccagctgggccatttttccacaacactccaaaggaagtcaggctagacccctcggatgccaactttgttgacgttattcatacaaatgcagctcgcatcctctttgagcttggtgttggaaccattgatgcttgtggtcatcttgacttttacccaaatggagggaagcacatgccaggatgtgaagacttaattacacctttactgaaatttaacttcaatgcttacaaaaaagaaatggcttccttctttgactgtaaccatgcccgaagttatcaattttatgctgaaagcattcttaatcctgatgcatttattgcttatccttgtagatcctacacatcttttaaagcaggaaattgcttcttttgttccaaagaaggttgcccaacaatgggtcattttgctgatagatttcacttcaaaaatatgaagactaatggatcacattattttttaaacacagggtccctttccccatttgcccgttggaggcacaaattgtctgttaaactcagtggaagcgaagtcactcaaggaactgtctttcttcgtgtaggcggggcaattgggaaaactggggagtttgccattgtcagtggaaaacttgagccaggcatgacttacacaaaattaatcgatgcagatgttaacgttggaaacattacaagtgttcagttcatctggaaaaaacatttgtttgaagattctcagaataagttgggagcagaaatggtgataaatacatctgggaaatatggatataaatctaccttctgtagccaagacattatgggacctaatattctccagaacctgaaaccatgctaatctcagatacagtcttgatggatttctttagtaggagcaatgaagaaaagtgtctccttccacctggcatccagaccaaatttgacccttgtaaatgacttagtcatttacaagggtcttactcagagtcaagtacgggtttgctttttttctgtgtagaatgttcatctaactgcaccttaaaaacacactgaaccctgggacaaaagataattactatgatctgtaggaatctggatatcattgacaaaatagagctgttttggaattttcctgaataagaggaggtgatgcaaatgtatgttgagtgtataaactcactggacaaaagtaagcctctggcttgctgagtttttgaagtatattttcaggtataataatcattgttctaaaattatataaaactatttgttatgttgttaaatcttgctgagacaaattatgactatagtgcatgatatatagtagattataaccttgtgggttgatgtgtctatctagtaataataaaaactaatgagatggcactagtatttccaaggtgttccttggtgttcagggtgtgcacaagagagattttggagcttatctgttatgtgttcatcagttagcaatgggacctgaagttcaacaacccagggtata

SEQ ID NO: 730711 - DNA, 867 bp, Homo sapiens
  misc_feature (191)..(191): n is a, c, g, or t
  misc_feature (212)..(212): n is a, c, g, or t
  misc_feature (217)..(217): n is a, c, g, or t
  misc_feature (243)..(243): n is a, c, g, or t
  misc_feature (247)..(247): n is a, c, g, or t
  misc_feature (276)..(276): n is a, c, g, or t
  misc_feature (284)..(284): n is a, c, g, or t
  misc_feature (293)..(293): n is a, c, g, or t
  misc_feature (298)..(298): n is a, c, g, or t
  misc_feature (300)..(300): n is a, c, g, or t
  misc_feature (343)..(343): n is a, c, g, or t
  misc_feature (408)..(408): n is a, c, g, or t
gagtcttcatacacgcggccagccagcagacagaggactctcattaaggaaggtgtcctgtgccctgaccctacaagatgccaagagaagatgctcacttcatctatggttaccccaagaaggggcacggccactcttacaccacggctgaagaggccgctgggatcggcatcctgacagtgatcctgggnagtcttactgctcatcggctngtggntattgtagaagacgaaaatggatacnaagngcctgtgactgggataacaaagttcttcnatgtgtgngcactcaangtgtngnccttaacaagaagatgcccacaagaagggtaggatcatcgggncacagcaaaagtgtctcttcaagagaaaaacgtgtgaacctgtggttcccaatggctccacctgntgcttactgagaaactctctgcagaacagtcaccacaccttattcaccttaagagccagcgagacacctgagacatgctgaacattatttctctcacacttttggcttgcacatttaatacagacattctaatgttctccttgtggaatggtgtaggaaaaaattgcaagccatctctaataattaagttcagtgttaaacaatttagtaaggtcacgctaagagtactaatcatgtgaggactgatgagaaattattacattgggaaaatccatcattaatgttgccatgcttataaaaaaaaataaagataagaacaaagtaaaaatataaagagaaaaagtaaaaaaagagaaaagaaattaaagcaaacaaagaaaaaaaaaaaagtgaagagagacaaacaaaagaagagatgaaaaaaaaaaaataagagaaaaacagaagaaaagacgaaaa

SEQ ID NO: 730712 - DNA, 449 bp, Homo sapiens; identical to SEQ ID NO: 73459

SEQ ID NO: 730713 - DNA, 487 bp, Homo sapiens; identical to SEQ ID NO: 73461
  misc_feature (319)..(319): n is a, c, g, or t

SEQ ID NO: 730714 - DNA, 514 bp, Homo sapiens
  misc_feature (346)..(346): n is a, c, g, or t
ggagctattgtggctccggccggttgcgcgggccctcggaccctcagagaggcgagggttcgagggcacgagttcgaggccaacctggtccacatgggtcgaaaaaaaaatggtcccaactatgggcgtgtgaaaacaaaaaaaaaaaaaaaaaaaaaaaaaacaatttgtgtggggcgcggcttggggccttggaaaaaagttttttaagaaccatatcgcgtgtgtggggcggcgggggccccagtgtgggtgtaagtgtggacattggggccataacgcgggggtccaagagggagaacccggggcaaggagccaaggggcggggggttctctctcacccaanttaaaaaagcgcgccgggggggagaaacccggaggcggttcctgtggaaaaaatttcccaggtgtgggggttcacgagggggggaaattaaggggggatttatttacaacaggggggttcaaaggggagggtctgagatttaaaatttagggcccgggtcggggggga

SEQ ID NO: 730715 - DNA, 798 bp, Homo sapiens
gccaggcatcctccgcggcgggccggaccgggccggcggaggggagcggaagcccaccggggctggcccgccgctgacccgccgcctccgtctgcctcctcccgggctctgggcccagcgcgcccagatgccgggcaggacccctccgcccgctgctggaacaccaatagcagcgttggagcctctgggccggaggaactggggcctccaccgacacctgcttcttccctcacctcgcagccttccacacctgttgatctgacctctgccccgctgccgcccaggagtaacctaaggcttttggcctgattcgagctcactccgtctaaacctctaaatgcggtgcgaaaaaatcctggggaatgtgccatgcaaagcctgggcatttcaagtgcttttctggattcgcatcaactcctatttacaggcatctttatccggaattcagctcgtcccaaaccccacgtggtgtagctctgcttgtgtttttgaatcccggggcctctttgaatcagaagccctttgtatagagataagtatcctttaggccagaatcagcctccatttttttcgcagtcccatttcctacccgtaatactttcttctgattttaaagccatttgatagagaagggacagggaacagaaccttcgccccccgcctgagcagctggtagactagatatcttccaaacattatctcatttacttccctggagttacaaataggtagatttcatgtccggtgaggggtgggaaaagctgaactttgggactaagaatcctggccgaggtcagc

SEQ ID NO: 730716 - DNA, 370 bp, Homo sapiens
tcgtggtgaatgtgaacatcgacgaaaaaggcaggtcagatttccttgatcaccaaggactggggctgccttgttcaaagcccaactcaggtcccacacatcctagaaacaagcacctgcggcccagcggcttccctcacatcagcctgtcagagctggctcgagctcactggctcactgcagctccagaacttccccgagccccgctcccatgctgctctataggttcacactgcaccctgcagggccagaaaggatgtcgccagcccaatgtgggagatgatggcctggctttactaaaaaactgtgtgatcaaaatcccaactataggaaagacgtaactgagaacgactgggccccatgttctggg

SEQ ID NO: 730717 - DNA, 361 bp, Homo sapiens
tcccgttggccccgctgagcaatactcccagcctcttgcgtggcacccacgtggagtaactgagcaaccggtttattgttaaagctccgattgctgactggttggtgaaaacgaaattgcagttaaaaagaaaattattcatttctgctctccacaccagctcgtcaggaatcagtgacacgggctgactcataagaaaacagtagtaataaaatcgtgtgcgggtagtgactggtgctggtttaggctaagggatcccccctgagggttgcccagtagtgagagagcggagcttggctgcagattcagtcctgtgttacagtgattcgcgaatgggtacacagctcgattcgtatatgta

SEQ ID NO: 730718 - DNA, 528 bp, Homo sapiens
ggctatagacaccctcccttcatcgctcaggggtgtagacaccctctctccatcgctcaggggtgtagataccctctctccatcgctcaggggtgtagacaccctctctccatcgctcaggggtgtggacaccctctctccatcgctcaggggtgtagacaccctcccttcatcgctcaggggtgtggacaccctctctatcgttcggggtgtagacatcctctctccatcgctcaggggtgtagacaccccctctccatcgctcaggggtgtagacaccctctctccatcgctcaggggtgcagacaccccatctccatcacttagggggtggaaacctctctctatcactcagcaggtgtagataccctctctccatcgctcaggggtgcagacaccccatctccatcacttagggggtggaaacctctctctatcgctcagcaggtgtaggcacccccctccatcgctcaggggtgtagacaccctctctccatcactcaggggtgcagacaccccatctccatc

SEQ ID NO: 730719 - DNA, 1521 bp, Homo sapiens
  misc_feature (1084)..(1084): n is a, c, g, or t
  misc_feature (1091)..(1091): n is a, c, g, or t
  misc_feature (1094)..(1094): n is a, c, g, or t
  misc_feature (1128)..(1128): n is a, c, g, or t
  misc_feature (1179)..(1179): n is a, c, g, or t
  misc_feature (1182)..(1182): n is a, c, g, or t
  misc_feature (1197)..(1197): n is a, c, g, or t
aggagaaaggcgagacgacgcgtggaggacgtgggggggcactctagtattattgcggctctgcgataaatctcgcgtgcacaacgctgatatgttattgtcatacagctcgttcagctcatgacaatcagaggtgttctactacgtcagtgattgctgggcgtacgctggtgactcctccgaggtttgcgcttcacgagggtcgtatgaagtacgcgccgagacgtggtatgtacgtcgccgtaccaagagaataagggtgagacgcgtccacgctagcagcaccaataggggtacgacacctgagccaagaagagcatatgaaatatagtactattaggtatatattaattgagagtagggatagtcccgtgagtgtcgtgcctaagagcttagacctttggaagcgtccctgtgggtcttcaaaggcgagtactaacccaaccttcagggccttccctggttggttcgctggggaattttatggacatttggtgtaagccaaccaatggcccaggttcaagagggttgaactccttagatttgagccctgactcaggtctaaagagtggtgttgtgtggacagtcgcgtgccacctggggcagtcacctgcccagatcccagaaggacctcctgagcgatgactcaagtgtctcagtccacctgagctgccatccagggatgccatctgtgggcacgctgtgggcaggagggagcttgattctcagcacttgggggatctgttgtgtacgtggagagggatgaggtgctgggagggatagaggggggctgcctggcccccagctgtgggtacagagaggtcaagcccaggaggactgccccgtgcagactggaggggacgctggtagagatggaggaggaggcaattggggatggcgctaggcatacaagtaaggggttgtgggtgaccagttgctacttggcctctggattgtgggaattaaggaagtgactcatcctcttgaagatgctgaaacaggagagaaaggggatgtatccatgggggcagggcatgactttgtcccatttctaaaggcctcttccttgctgtgtcataccagngcgcccnagnctctgagcccctgggactgctgcttcttagaccncagtaagccactgccacacgtctgaccctctccaacccatagttgaccggntgncttttccctaagccnagggcctcttgcggtcgcttcttactcgcacacaagatgtacccagtatctagggtagtgccctattgtacaatgtgtcacacttgagcgcacgagcaaaagtgaaaggcactgggtcatattccttgcagactggagggtcgggtggtccgggttgagaccgttcatcccaagttgcaccgattcttgttttgacttgagcaagactgttgagcaacatggtgggatctgggccagaaccgcgctggggggccactatcagggtaccatttcccttaaggcgcaaagggtctccctttccaaaatgggtgctcccgcaacctc

SEQ ID NO: 730720 - DNA, 1312 bp, Homo sapiens
  misc_feature (875)..(875): n is a, c, g, or t
  misc_feature (882)..(882): n is a, c, g, or t
  misc_feature (885)..(885): n is a, c, g, or t
  misc_feature (919)..(919): n is a, c, g, or t
  misc_feature (970)..(970): n is a, c, g, or t
  misc_feature (973)..(973): n is a, c, g, or t
  misc_feature (988)..(988): n is a, c, g, or t
ggcggggggcacctactacatcgccctccacatccctgattcctgttgttatggaaactgttgccagagatggaggttctctcggagttatctgggaactgtgccttttgagtttcctcaggctgctggaggaaaactgagactcagacaggaaagggaaggccccacagacaaggtagccctggccagaggcttgttttgtcttttggtttttatgaggtgggatatccctatgctgcctaggctgaccttgaactcctgggctcaagcagtctacccacctcagcctcctgtgtagctgggattatagattggagccaccatgccaagctcagaggattgttctcctaatgacctgatcagtctaagatgggtgggagtctgccacctggggcagtcacctgcccagatcccagaaggacctcctgagcgatgactcaagtgtctcagtccacctgagctgccatccagggatgccatctgtgggcacgctgtgggcaggagggagcttgattctcagcacttgggggatctgttgtgtacgtggagagggatgaggtgctgggagggatagaggggggctgcctggcccccagctgtgggtacagagaggtcaagcccaggaggactgccccgtgcagactggaggggacgctggtagagatggaggaggaggcaattggggatggcgctaggcatacaagtaaggggttgtgggtgaccagttgctacttggcctctggattgtgggaattaaggaagtgactcatcctcttgaagatgctgaaacaggagagaaaggggatgtatccatgggggcagggcatgactttgtcccatttctaaaggcctcttccttgctgtgtcataccagngcgcccnagnctctgagcccctgggactgctgcttcttagaccncagtaagccactgccacacgtctgaccctctccaacccatagttgaccggntgncttttccctaagccnagggcctcttgcggtcgcttcttactcgcacacaagatgtacccagtatctagggtagtgccctattgtacaatgtgtcacacttgagcgcacgagcaaaagtgaaaggcactgggtcatattccttgcagactggagggtcgggtggtccgggttgagaccgttcatcccaagttgcaccgattcttgttttgacttgagcaagactgttgagcaacatggtgggatctgggccagaaccgcgctggggggccactatcagggtaccatttcccttaaggcgcaaagggtctccctttccaaaatgggtgctcccgcaacctc

SEQ ID NO: 730721 - DNA, 694 bp, Homo sapiens
ggcggggggcacctactacatcgccctccacatccctgattcctgttgttatggaaactgttgccagagatggaggttctctcggagttatctgggaactgtgccttttgagtttcctcaggctgctggaggaaaactgagactcagacaggaaagggaaggccccacagacaaggtagccctggccagaggcttgttttgtcttttggtttttatgaggtgggatatccctatgctgcctaggctgaccttgaactcctgggctcaagcagtctacccacctcagcctcctgtgtagctgggattatagattggagccaccatgccaagctcagaggattgttctcctaatgacctgatcagtctaagatgggtgggagtctgccacctggggcagtcacctgcccagatcccagaaggacctcctgagcgatgactcaagtgtctcagtccacctgagctgccatccagggatgccatctgtgggcacgctgtgggcaggagggagcttgattctcagcacttgggggatctgttgtgtacgtggagagggatgagggagtgccggtagctgtgagcagcactccttcatgctcctcacagctaccgccactccctcatagctgtctcctcaagtgtcagctcagccgcctcgtgcctataccttttccagtacaggccactgcttgcaggc

SEQ ID NO: 730722 - DNA, 567 bp, Homo sapiens; identical to SEQ ID NO: 338777

SEQ ID NO: 730723 - DNA, 654 bp, Homo sapiens
ggttatttagcagactaccctgtggtttgaggtaatttcccccaggagggccaatggggactttgaagtatttatgcctctttaaaaacttaagtatccttaaaacagggagggacaataaatgcagcagacaccaagacattatggtccatagaaaggttaagcctggatggaaactagtaaagttgttaaccaacgaccacactagaaatggagtctgagtcattgaacttgacgggtggattcttggatcaagaattttggggagggaaggctatgtcccaaattcactgcaacttcattattgtggcttgtgagggtctgcaaaagtgactgaatctttgtcactggacctctttcacattaatgtccctgtgggaaagaccaagtctttctttagaactcgtgcaatgtcactgccaggtgcttgtaatagtccatggcaggcatcaagagtagaaacttggctagacacagtggctcacacctgtaataccagcactttggaaggctgaggtggccagagatcaagaccagcctgaccaacacgcgaaaccccatctctacaaaaaacacaaaaaaattagccaggtgtggtgtcgagtgctactcacgaggctgaggcaggagaaccacttgaacctgagagcaggg

SEQ ID NO: 730724 - DNA, 497 bp, Homo sapiens
tctgacccacaggagacaaaaataactcagatgcccgggagtactttgagaataatatcacacttgtcaaagtgggtctaatgatgtcagtcatctttttctaccttgcatttcttcattgcagcttacactgacaaatgataccattcctatgtccacagttttctttgattaaaaacccacagagaccacaatactaatatgaccactaaggctgaggcttgaacgaaggttttattctccagaatctgttcaataaaccaatttgatttttataacaaaaaatgtgatacataatttgctcccccattcagtagagattctggacaatggcatcacagaatattggagctagaaagaaacttaaagattactttcatgttattttactgatgagaaaacagatgcccaaagaggaaaaataataactttaaggtcaaaggcaccctgtgggagaggaaaagtaatcaggatggctaacaggccctgtggaaaag

SEQ ID NO: 730725 - DNA, 711 bp, Homo sapiens
cttagcagattccacagggagagggaggtgtcgttagtcatctccacagcaatattccaggaccattaagtttttagaagaaataaagtgtgacccaacaatattatatacagccaagatacagttcaaaaattaaggcaaaaggaaatgttctccattatgaaagaaatcagagaacacaagtcctaagaacttattattgaaaaaagtgaataaaattcagccaatttaagaggaacaatgaacttactggaatagctgtggtaaaaagactaatagtgagcagctaacgaatttaaatacaaaacaaatgcctacacaactatgaggattatgtttacataagagaatgtcactacctgaaaaaatagaaatgtcttcaaaaacaaacaaccctgtcagggcgcggtggctcacacctgtaaccccagcactttggaattttctagctgttctcctcattcttaagaggtattcccttcctgcctttagatgctcaagtgttagaccatgatcctcagaacaactgcagtgtcctggcaaccatgactgcaaaagccaaaaaaatcacatgaaagtcaacaatgctctgccacagctgaattggctactgttaaattaaccaatcttagaaaagcctagcatctgatcttacatgaagtaataaatttccaattgcttcagccactctgatttgcctgtggaaagtag

SEQ ID NO: 730726 - DNA, 519 bp, Homo sapiens
tgcttttccacagggttcttgagttgttgtgaacttattgtttagctagtagctagtttaaccaggattaaacaagtttaatcaggattcttcatggatgtactttttagctaactacagtttttcacatggaaatgaaacttacagtaaacacttaacgtaccacagaatttttttctggatttctggtcctgaagcatgaagtgtactagaaaccaattcttcctgcgctacttgtggaatctttcttactggatcataatcttactttactttatacaatagatgcttaatcagtgcctttaataggaagttagaaactcccaatccaatcaacaaggctttgattctacctcctaagtactacccagatcacagacaatccaaatatcagaactagggggctgggcagagaggacaaatcatctattagggagtgggacagaaagtggaaacattacaaaggagcaagtaggctcagaacagaggggagagtaatactgaccctctctactgagg

SEQ ID NO: 730727 - DNA, 515 bp, Homo sapiens
tactgtatcacagggataagtcatgagtccagttagtgtaaaatactcgtcatgggagtaggattatgggtttataaaggcaagagtaacctgaacatttataagtaaacatattcaaagatattctggcctattttaattccaaattaggcatgtttcacaaactttttaacaaatttttaagtagtcataaaatttcacttcccagttcttatcactttttaattttaatttctttggattaatgtcatcattaaaataggaatacatattggatttttctgactaaaaacctttaaaagaattttttacagaattactgtaagacacaatttctagactctattttataaaattttgctgatttaatcagtgattatgaaattaaagtgacaaaaataagcattacattttactgtattatagtagcaccagtcaaaatttttttttttttaagtggccttatggagacattggcagcatcagccctgtggaaaagtaaggaacggagttca

SEQ ID NO: 730728 - DNA, 562 bp, Homo sapiens
tctctttccacaggccaaggcaagagagaagaaacttcacctaggtgctgagcctagtgatatgttacaaagcttcctattgacagaaccccccccccccaccaaaaaagactcacatcacctgggtgcagtacccagttatgtgtcacaatgcaccataagtgcagggccaaggcaatagaaggaagtcacatcacttacatgatgaatctagataaaagccgcaatgctctgtaggcagagttcaggccaagatttcacatcagctgggtgctggtcccagtgatatgtaaaagtgccctttgtcgcactgccaaagaaggtgttatacattgcttaggtgcttggtccccgtatgtcacaatttcaactgtgctctaggcctagaaaggagagtccaaacactcagatgctgggcaaagtcatacttcccaatcacacacttgaaaatgttcagaaaaaagtttcctagtgccacacaagtcctggcttcgggtatgagagtcaacacctcctatgagttgggtcgaagcacaggagtcacagtccctgtggaaagatc

SEQ ID NO: 730729 - DNA, 604 bp, Homo sapiens
catgatatgacaccgacagaattcaagttcatctggtacatggagtactcacaccgaatgtggggtcgccttgtaggccttgtgtacatcctgcctgctgcctacttttggagaaagggctggctcagccgtggcatgaaaggacgtgttcttgccctctgtggcctcgtctgcttccagggtctgttgggatggtatatggtgaaaaatggactagaagaaaaatcagactcccatgacatccctcgggtcagtcagtaccgccttgctgcccacctgggatcagccctggttctttattgtgccagcttgtggacctcactgtcactgctactccctccgcacaagttgcctgaaacccaccaactcctacagttgagacgatttgctcatggaacagcaggtctggtgttccttacggccctctcaggggcttttgtggcagggctagatgctgggcaaagtcatacttcccaatcacacacttgaaaatgttcagaaaaaagtttcctagtgccacacaagtcctggcttcgggtatgagagtcaacacctcctatgagttgggtcgaagcacaggagtcacagtccctgtggaaagatc

SEQ ID NO: 730730 - DNA, 665 bp, Homo sapiens
tgatcttccgtgcctcagagtgcagttcccaaggaggtttcaagacaaagggccccttacacggcagacagtcgcagcgccgtgttacgtttcatctccctgatggctcccaggaaagctgcagtgacagtggtctaggagaccatgagccggtgggtagtggaaccctgatctcacaccctcttcctctggttcagccacaggacgaattctatgaccaggcctctccggacaagaggactgaagcagatggcaactctgatcccaactctgatgggcctttgggtccccgaggattagctgaagctacagagatgtgcactcaagagtgcttggttttgggtcactctgataattgctggatgcctcctggcttgggtccatatcaacaccccaaatctcctctctcaacctttgcaccccagaaagaatgggtgaagaaggacaagcttgtgaatgggcacaccctgaccagagcctggaaagaagacagcaacaggaaccagttcaatgaccgtaagcagtatggctccaatgaaggccatttcaacaatggcagccacatgacagacattcctctggcaaatctgaagtcttataagcaagcaggaggtgctactgagagtcctaaggagcacaactctaagaaaaggctatatgggacc

SEQ ID NO: 730731 - DNA, 976 bp, Homo sapiens; identical to SEQ ID NO: 170953

SEQ ID NO: 730732 - DNA, 445 bp, Homo sapiens; identical to SEQ ID NO: 171339

SEQ ID NO: 730733 - DNA, 207 bp, Homo sapiens
cggaacctgacaaagttaaatggaagcctacacagctgagccgcatttccatgggagacattttggtcattccaggtgatgatgaactacaccaattgttagtggctgagaagaacctcaggaatgtgccagcatcttttgacttttattttggggggctgcatctactaccacaacatgcaatatggtaacactggcatggctggt

SEQ ID NO: 730734 - DNA, 813 bp, Homo sapiens; identical to SEQ ID NO: 728655

SEQ ID NO: 730735 - DNA, 1018 bp, Homo sapiens; identical to SEQ ID NO: 728656

SEQ ID NO: 730736 - DNA, 906 bp, Homo sapiens; identical to SEQ ID NO: 728657

SEQ ID NO: 730737 - DNA, 701 bp, Homo sapiens; identical to SEQ ID NO: 728658

SEQ ID NO: 730738 - DNA, 1055 bp, Homo sapiens; identical to SEQ ID NO: 176348

SEQ ID NO: 730739 - DNA, 301 bp, Homo sapiens; identical to SEQ ID NO: 176349

SEQ ID NO: 730740 - DNA, 481 bp, Homo sapiens; identical to SEQ ID NO: 728664

SEQ ID NO: 730741 - DNA, 608 bp, Homo sapiens; identical to SEQ ID NO: 392755

SEQ ID NO: 730742 - DNA, 516 bp, Homo sapiens
  misc_feature (365)..(365): n is a, c, g, or t
  misc_feature (416)..(416): n is a, c, g, or t
  misc_feature (479)..(479): n is a, c, g, or t
cagatgcgaccgaatgcgatatcaggagagaaggctggttgtattataagcagattctcaccaagaaggggaaggctgaggaccgggatgacatgctgggctggatcagagcgatccgggagaacagcagggccgagggcgaggaccccggctgtgccaaccaagctctgatcagcaagaagcttaatgattatcgcaaagtgagccatagctctgggcccaaagctgattcctcccccaaaggctctcgcggcctggggggcctcaagtctgagttcctcaagcagagtgcggcacgtggcctcaggactcaggacctgcccgcagggagcaaggatgacagtgctgcagcccccaaaaccccntggggcatcaacatcatcaagaaaaataagaaggccgctccgagggcgttnagggtcaggctggaggagtgccagccagccacggagaaccagcgcgtccccttaatcgtggcngcatgctatcgcattcggtctgtaacctctaggtcag

SEQ ID NO: 730743 - DNA, 898 bp, Homo sapiens
tctgtgtggtgaggtactgacctgacaaaaatttccttaaatgtctgcagagaaaagagaaaatggtcatgtctcagtaaatctgtgatagatgctacagggaaagctgctcctgcccagaaggctgaaaccaaggaagtgtctgctccagaccagcccaaacacacaatcccaaattttggtaaaagttcctatcagccctgtgtacagccagctgtgccaagaacatagtatgctattcccaaagctgagttgggatgaggaatgagggatagtggctggtttgtactattcacttatgaatgatcaccagcgtctccctggattgctcctgtatttgttttaggtgtacagtcaggttctagagatccaaagtagttggtttcaatcattttttcccactcaatggttgcttgggtggaagtacttatacctagaacttcttgccacaccatttcgcctaaagtctctgtcttcatctgtattttttcttttttaaaaatttgttatttcatctgttttttttatgtcagatttacaaggatcttgtaactttaaaattataaaaataaatgttcggtattcttgtaatttatttttacattaaattttttattaaataatttttaaatttaagactttatcttgtattaacgtttatgtatgatgaggggtaggtggctccccaaatttttatttttatgttggaatttctttcggtgtgagacaagaattcaaagtaatatttctcagttgcttcccagttgttttatactacttttctgaaaaatttatataccctattgaaatttcattgtatactaaattccttgatatattgggtctgtttcagactttttttgtctgtttggtccgtcttttcttattccctacctca

SEQ ID NO: 730744 - DNA, 525 bp, Homo sapiens
cttcacagccaatcagcaacgaagccataattcatgtactttcattttatttctggcttaagttccctctttattttcactgttaggatccttattgcttctcatctaaaccatcaatagattcctaattaatgtcttgcctcttcatcccttcaattcatctatctaggccccttctgtctcataatactaaccatagtctgcctatttatcttttcaagcattctctcttgcaagtgattataagctctctgagaatggagaattagtcttggccatttttatactacctgtttcctgttttcaagtagccccgtccccttgctttgccagcagaatgtgatataaaacagacatttttattaataattttaaaagttgcattagtgaactgtatgaattatttacatggccagaaaggaagtagacaaacattgattaagcaaagacaaaataatctgttacgggaaaaatattctggaaaagtaagaggggtgatcctttgtgctgaaaagtctcatttcc

SEQ ID NO: 730745 - DNA, 278 bp, Homo sapiens
cctggggtttttcttttcccccgttccctggtaacgccttcttagactttttaaaaatggttctcaaaagtcacttgctcctgtgtaatgagcctagacgttggtagtaattgggctttttgatagcacatgtgtaggtgtaatggacattgtaacatacttctcacttaaaatgaaattctgtcataaacctgttttcaaaatttcagaagataaaggtattttgttggtagaatggtttgactcctttacgtactttctgtcccgatctacgaatt

SEQ ID NO: 730746 - DNA, 402 bp, Homo sapiens
tacatgatagaccgagctatacccattcgcgaatcacccaaatagcaaacactgggtgactgccgtgtctacagcactatgccaagcaaggaaggcattagaaagagccagttaaaggcagccacctgatccccatgcaactcttaaccttggaacaaaaatccttccttagtctcaagttcatccatcctaaaaggaaaaaggaggatccaatgagcactcggtttccttcggtttctatttttccagattcttgttagaccacagggtatcccgaaggagttttccatggcatgtcagcaaaatccaaataccactcttcagaaggtaatatacttaaaacagaaataaaacagtaaaattgcacccatatattcacaaaatttacactggaaattatgt

SEQ ID NO: 730747 - DNA, 979 bp, Homo sapiens
agcgggcggtgcacgacggctcccattggctggggctcgggcgtcctagccaatccggccgcggggtgcgtttctcctgacccgggtgggaccgcaccccgcggactcagaagcgagcggcaccccgggaccatcccacagcagatccagtggccgccaacgtcaggctggagttgcctccttcgtggatgttggatgtggaagcccaggagccccccaaggggaaatggtcgacgccgcccttcgacccgcgcttccccagccagaaccagatccgtaactgctaccagaacttcctggactaccaccgctgcctcaagaccaggacccgccgcgggaagagcacgcagccctgcgagtactatttccgcgtgtaccactcgctgtgccccatcagctgggtggagagctggaacgagcagatcaagaacgggattttcgccggcaaaatctgactgccccagcgcggcttcctctgaagatgcagtgatcctgcatctttttgtctcgcggagccccgggtctcggttatccacccctacctcccagtgtctaagccacgaataatgccaccagccttcgagttccttgtttcccttgctctggtctccacgtgtatgatggggttctcaggcccaggcttcgaccagaggaccctctgccaccaccgtttcttcctgtccttgagctaccttggtgaactcatgaccccaggcccctgctccaccaggatgtcccccaggtcctgccagctgggaagtgccagcatgaacgcctccaacttcgtggaagccaggtcccctgcagctgagggacgccaagcagacacacctgccctccccagccagctcctgtctgtatgggcgagatgactgagagcgcccacgtccctaaggctgtcctgaccctccatgctgcgacaaggacagggaatggtcggtcactatgggcctggtgtctcccctcccccaccacccgg

SEQ ID NO: 730748 - DNA, 406 bp, Homo sapiens
gtggagagctggaacgagcagatcaagaacgggattttcgccggcaaaatctgactgccccagcgcggcttcctctgaagatgcagtgatcctgcatctttttgtctcgcggagccccgggtctcggttatccacccctacctcccagtgtctaagccacgaataatgggtgaccctagacaagcttcttgacctgtgtgagcccgaggttccccaaggcaaaccaagatggctcagggccccattatcagaggaggacacaccctagatgagccatcccccaggatgacgccacctctgagatcttggtctcctggctccgtctctgaccacaacccaagaatggggtgagggcacagggtgtggactcaactacaggagggcttcctgttcatgcaacgtcccc

SEQ ID NO: 730749 - DNA, 293 bp, Homo sapiens
caagcaaggaagtggatgagctgggatgcaaccccaggttgtctggctggagagaaaaacacagagaaagatgccagaaatgaaaggtgggggctattttctcacagaacttaaaatgaattgaggagaggaggccaggggttcccaggtggccgcctgcccacagtgccacgggctggtaggcggttttcttcactagtccacaaataaacgagaaggaagactaggaaatatttaccaagtgaactgtgctggtagaggaaggacagtcttggtagcttgttttgcttttg

SEQ ID NO: 730750 - DNA, 674 bp, Homo sapiens
agcggacctgagactgtgggcaaaggtaccatgaagtgttgtggagaggagggtcaccaactccaggcagggctgctaagtttattacaaacaggcaagactagaatatgtttccactttagtgagtggaaacctaatcattcataggtatcctgtacacacagaacaactatgacgaagagtgaggcctaaatcagaggagacgaggacaataatagtagtagtggtcatgatgataataataactaccagacatgaagattaaccatgcctaacattgtgttaaacgtctcacttctttcatttaatccttacaataatccaatgatgtagctgctattatttttattatacagatgaagaaactgagggcttgaggggtatactgctttgccaaagtcgtacaaatggtaagtgcagaaccaggatctgaattccgtcagtctgactgcagagcccacgccgacaccgtggaagctggtgatgcccattaggccctgtctgggcatgaagaggatgccctccctcatgagctggaacacagcatcccctgttgtgggtgtggctctcttaaagaccatctggtgaattttgcttgtgctggtttcttattaaacaaccttcagatttggcttcacgtgcaactcacatagagggaaaggagaccatgatcc

SEQ ID NO: 730751 - DNA, 768 bp, Homo sapiens; identical to SEQ ID NO: 728666

SEQ ID NO: 730752 - DNA, 623 bp, Homo sapiens
gggaaggccgctgtttttccctcctggcactcagctgcctgccccccaacaataattcctcacctcccacgcacccagctcttggcagtttacaaagaccttttgcgtccccattacctcatgtgatccccacaacacccatgagaggaagatgaatcgtccgatccaagtgaagccagctgccagtgagggccgaggaggctcctgaacaggatgatctcagatcccccctcaaacaacagctggaactctgttctctatcttctagaggaccgaaagctgtttgtggggatgctgggcaagcagcagggtgaggaggacgtcagacgcctgttccagccctttggccacatcgaggagtgcacggtcctgcggagtcctgacggcaccagtaaaggctgtgcctttgtgaagttcgggagtcaaggggaagctcaggcggccatccggggtctgcacggcagccggaccatggcgggcgcctcgtccagcctcgtggtcaagctggcggacaccgaccgggagcgcgcgctgcggcggatgcagcagatggccggacacctgggacgccttccaccccgcgccactgccgctaggggcctgcggcgcctacaccacggcgg

SEQ ID NO: 730753 - DNA, 438 bp, Homo sapiens
ggagccattgtggctccggcggttgcgcgggccctcggaccctcagagaggcgagggttcgagggcacgagttcgaggccaacctggtccacatgggttgaaaaaaaaaaaaaaaaaaacaaaaaaaaaatttggggcggcctttgggccttaggaaagagcttttcaagaccccttcggtgtggggggcgcgcgcggcgcacgattggggttagagttaacacgtgtggcccagaagcgggttgccaaaggaaaaactcgtggcaaagaaacaaggctgcgggggattccctcacccaaacttaaaaaggcgcgcggggggaaaccgagagtgttcgtgaaacaaactccagaggggggtccggagaggacacaccgggagctctacccacgagggagcaccaggggaagcggaaattaaattaggcccgggctgga

SEQ ID NO: 730754 - DNA, 1092 bp, Homo sapiens; identical to SEQ ID NO: 125801

SEQ ID NO: 730755 - DNA, 671 bp, Homo sapiens
aaatgtaaacggtgactggatatttgcttatcttaaagaattactattcttaggtatcatcatggtagcgtgactacttaaaaaaaaaaagtcctggccgggctgtggtggctcacgcatgtaatcccccagcacttggggaggccgagatgggcagatcacccgaggttagggattccagaccagcctggccaacatggtgaaaccccatctctacaaaaaatacaaaaattagccaggcatggtggctcatgcctgtaatcccagctacttgggaggctgagacaagagaatcacttgaacccaggaggcagaggttgcagtgagcagagatcgtgccattgcactccagcctgggcgacaagagtgaaactatgtctcaaaaaaaaaaaaaagaggaaaaaaaaggtctttattttaaaagatttttcggggaaattttccctagggaaatttgctatcgggaaattggggtcacaggcgttttggtacaaaggaattggtgcagaatttttttggtttgcacaccactggttggaccattgaacgtgggtatatggctcgaaacatggaagtgaggagcacatgggattcttgaaaaaccactacacaccggttgggggggttttaaattttcctgtgaaaaaatgcttaacacaggtcggggccag

SEQ ID NO: 730756 - DNA, 803 bp, Homo sapiens; identical to SEQ ID NO: 281116

SEQ ID NO: 730757 - DNA, 955 bp, Homo sapiens
  misc_feature (437)..(437): n is a, c, g, or t
ggtgagctgctcgcaagaggacggcagaggcccggcagctcggagctccgggaccttgtggcgcatcaggacgctggctgtccctctgcctgggacccatgagcctgccgcctgcctgctctgcctcctgcgtgttagcctcctctgctgcgctcctgggcaggcggcctgtgggatgcctgtggggcgatggacgggcgctgaggctgctgctgcttgccccctggccctgcgcggctgtgaaactggaggaggcctgagccaagcggatggcccctcttatgctgggaggatgctggagagtagcggctgcaaagcgctgaaggagggcgtgcttggagaagcgcagaggaacgggtagttgcagctctggcaagaaaagcgtgtatgcatcctcacctgaggaaggggctgctgcgttatccctgcccaatgcnagcgtgcaagcacgcatgcatgcatgcgagcaagacaggcagcgagcgagcatgcacgcgaacaacaagccccgtggcatgggtgccaggccggatgccagtccacaaagccagtggtgccccggctggtcgccaagcctcagatgccgccgtgtcagagctcaaaggaagctgcacttactccaaacatgaaggaccgttggacttgtgtggaagcgcaaggggcaagtacatgtacttcactgtggtgatggcagagggcaaggagatcgactttcggtgcccgcaagaccagggctggaacgccgagatcacgctgcagatggtgcagtacaagaatcggcagggcatcctggcggtcaaatccacgcggcaagaacgcagcagcacctggtccagacaagaagcccccatcgcagacgaagcggaaccgagagctccggcacgaaaccgaggtaagacttaggcggaaaccaagccaagaacaacccaagctcaagccacaaccaggataaccg

SEQ ID NO: 730758 - DNA, 793 bp, Homo sapiens
  misc_feature (605)..(605): n is a, c, g, or t
ttcgctgtcatcaaagtcgtcgcgattcttgcgatgatcgtgctgggtgtccttatcattgcaactggcctgggtggtggccctccgaccgggataggtaacctgtggcgacacggaggattctttccaaccggcatcagcgggatgctgtgcggttttgtcgtggtgatgttcagctttggaggggtcgagctcatcgggattacggcaggggaggctgacgatccgcgtcggtctattccgcgagcgatcaatcaagtcgtgtatcggatcctcattttctacatcggtgcaatttcggtcatgttgtgtctttttccatggaaccagatcggcaaggcaggcagccccttcgtgacgatcttcgacaaaatcggagtcgcaggtgcggcgaatatcctcaatgttgtggtgcttaccgcttccatgtcggcctacaactcgggcctatactccaacgggcggatgctttacagcttggccgctcagcacaacgctcccgggatcttctggaagacgaatcggctgggggcgccgtgggtgggagtgctcgctcctcggtggtgacggcaacggcggtgctgctgacgtacttgattcctggnaaggtgttttgtacatcatctcgatcgccttgatctctggggtcatcaattggacgatgatcatcatcaccaacctaaagttcggcgaaggatcggtcctgaaggtgtcgcagcggttggaatttcggatgccggtaatcccgttcacagtacgtggtgtgggtttctggcgccgggcgtggcctccg

SEQ ID NO: 730759 - DNA, 1763 bp, Homo sapiens; identical to SEQ ID NO: 546737

SEQ ID NO: 730760 - DNA, 705 bp, Homo sapiens; identical to SEQ ID NO: 125380

SEQ ID NO: 730761 - DNA, 798 bp, Homo sapiens
gggcttcgcagtctccacgatcacgatggtcctctggtgtcccatctttctctctcaaactgtcctttcctcaatcctttgactctgccggacttgtcacccccacaacctggttttgggtctggccaccccaacattaagaaaaaaatcactggatattttcccagaagcttcaattttgtgaagaggagatactgtttttttttcagcgttaatatttcaaacttaaaaaatacaaagcaaggtttcaaaaggtcaactttctggtaactacaagtcttcagattgtgagttcaaaagcaatactgaatttcaaagagaaaatttttttttcctttcttaactccagattcaagaacatgacaacttaaaagtcaatcttaaaagtcatggtaaagaacacctggcagtgaaatggaaagtgctcactgtgctcagttgtacctagccaaaacgagcaacacatacctgtataaaacattcatgcatggagacacagctagtactaatccatctgttgttgaaaaatatataaatgaagtcaaagaagatgaaataaacaatccgaatatccctctgaaggaacttctccgctcaacgttctgtggcagctggtctaatatgattcaactggtcttctgttcatgtttcttacattctaattttgttttgttttgtccatttttccctgtgaaacatgacatatttttcagaagacttctatgttgtttacaaatatgatgtcagtgtgattaaaatttcagtagatggaaaaagcaaactaaagcattctttaaa

SEQ ID NO: 730762 - DNA, 913 bp, Homo sapiens
gggcttcgcagtctccacgatcacgatggtcctctggtgtcccatctttctctctcaaactgtcctttcctcaatcctttgactctgccggacttgtcacccccacaacctggttttgggtctggccaccccaacattaaggtttaattatgacaaacatattaaacacagaaagaccctactttacttgacatctaaatgtgaatgaatttattaatgtcacatgttgcaacattaaagggacaacttgacacagaaaaaaatcactggatattttcccagaagcttcaattttgtgaagaggagatactgtttttttttcagcgttaatatttcaaacttaaaaaatacaaagcaaggtttcaaaaggtcaactttctggtaactacaagtcttcagattgtgagttcaaaagcaatactgaatttcaaagagaaaatttttttttcctttcttaactccagattcaagaacatgacaacttaaaagtcaatcttaaaagtcatggtaaagaacacctggcagtgaaatggaaagtgctcactgtgctcagttgtacctagccaaaacgagcaacacatacctgtataaaacattcatgcatggagacacagctagtactaatccatctgttgttgaaaaatatataaatgaagtcaaagaagatgaaataaacaatccgaatatccctctgaaggaacttctccgctcaacgttctgtggcagctggtctaatatgattcaactggtcttctgttcatgtttcttacattctaattttgttttgttttgtccatttttccctgtgaaacatgacatatttttcagaagacttctatgttgtttacaaatatgatgtcagtgtgattaaaatttcagtagatggaaaaagcaaactaaagcattctttaaa

SEQ ID NO: 730763 - DNA, 715 bp, Homo sapiens
gggcttcgcagtctccacgatcacgatggtcctctggtgtcccatctttctctctcaaactgtcctttcctcaatcctttgactctgccggacttgtcacccccacaacctggttttgggtctggccaccccaacattaattattctttgatggacacttgagttgcttacacctttcactattgtgaataatgctgctgtgcatgtacagtggctcatgcttgtaatcccagagtttttggaggccaagacagaactgcttgagctcaagagtttgaaaccagcctgggcaacataatgagatctcatctctacaaacaattaaagtattagccaagcaaggtggtttacatgactggctactagggaagctgagtctaaccatgagaaaaacaccaaatcatcccaaattaaggatgttggatgaagtgcctgtccaatacacaaaaccgtcaagttggtgaaaaacaaagtctgagaaacagtcacagtcaaaaggagccaaaagaaatctgaatactaaatgttatgtgctaccttggatgggatcctggaacagaaaaaaaaaaagaggcattttcccaacgcaaatggcagcataagcatctgagaatctgagcagcccttgcaagcacctcacagaagctgaagaaacaaaagttggagttcagaacctatcaatgtggaggcattctagcaatgaactctagagtta

SEQ ID NO: 730764 - DNA, 523 bp, Homo sapiens
  misc_feature (134)..(134): n is a, c, g, or t
tgccaaaaaaggcagcacgcccctgaggctgactggcacccagagccaaagatcagcaacggacaagaagaggctggcgagggcttgaggtgcttcaaagaggaagctacacagatagtggataaatagcaggnatttcttgtacttttgccaccagaaaactcatagtgggttggcctatctatcacgctttttaaagaacaggcaaaaaaggattaactagggacaagtgctcttccacccacccctcaggagatcaatttcctctccctgacacatataaatacacacatcctcgaagggtgagttagaaagtgcaccaggagctcgatgctttgggaggcaggggtgagaggattaatcgcctgaggccaggagttccagaccagcctgtgcaacacagcaagaccccatctctacaaaaatatttaaaaagttagccgggtatggtggtacaggcctgtagttccagctacttcggaggctgggataggagatcacttgacgccagggtaccgagctc

SEQ ID NO: 730765 - DNA, 525 bp, Homo sapiens
  misc_feature (283)..(283): n is a, c, g, or t
  misc_feature (486)..(486): n is a, c, g, or t
atcggccagcttaccttactgcgtcagtagcgggttacgtgattgcaaacgagcagtttaaaacggagtgggctttgggctgcagagccgcctggcattctgacagctgagcaggaggcagaggtgagagtccaagatggactaaaaatgtcccagcagctgggagcccaacctcggcccaacctcgttgaaaggaggaacattcggtgcagccgtcggaaccttattatttatgaaaggggacagctcacaggattacatttttctaagccaatcctgtgancatcctccatgaaattctctattttggttgcatgtggtcaaaactgagcctcactgaaacaattgaaaacaaatactcccgacaaatcttaagaatcgttttgaaaatcaaaaggtggggaaaatgttgtggcttctgagctttcttcagcccatattctattattctctgatgttttatggtgtaaaatcataccattccanttatgtattgattgtcagtagagggtaaggctgggtacc

SEQ ID NO: 730766 - DNA, 415 bp, Homo sapiens
tagctcccatcttactgccaatcacccaccttaagtccaaggaggctttacaactattagatctctaggcatctccttagctagtaacatatttatattgatccacctaagttggaaatatgagttgttaagacagccccatgtttcttctgggttttttcttttttctttttttcttttttttggagatgagtttcactcttgttgcccagtctgcattgcaatggcatgatctcggctcactgcaacccctgcctcccgggttcaagtgattctcagggctcagactctcaagtagctgagattacaggtgcatgccaccacgcctggctaatttttgtgtttttagtagagacagggtttagtcatattggtcagtctggtctcgaactcctgaccccaggtgacgtgcctg

SEQ ID NO: 730767 - DNA, 400 bp, Homo sapiens
atccaaagcctttttgttaacatggctgaacttctttaattctgtgttgcactgctcaagttttcgaaacaactgtttgaggctcagtgtctggtacttttcaaatgcttcctggggaagtgatccaagttctcgaattttcttcatacactcttctttcttcttcaatagcatgccttgccgatttgtcatcttttccagttctttagtatcatgatttatagcatccatatgttctttttccatatttttccagcgctccatactcttctgaagctccttaattccagcttctgttttatcaatggaattgtccaaatcttctgatcgtgccatagtgtcttttactcttttattgatggcttcaagttctgatgttgtggctgtgagaacagtaccc

SEQ ID NO: 730768 - DNA, 639 bp, Homo sapiens
  misc_feature (24)..(24): n is a, c, g, or t
tgttctttttcttctttcatagcngaaatttttgttttcaattctctaacttggcgttcgatatcctccattttatctcttgcatcctgctgagcatctcttaattgtctggatttttctccactagtctctcgcttagcagaaagctcatcaagtttggcacgagtctcgttaagttcctgattgtaaatggtatattccagggctcgtctcattttatcccacttctgatactgagctagttcttccttttcttcctctagagtatgtaatctctcttcaatgtattttaacaactcattgattttttcccgtttgccctctgtttctttcattaaggagatgctttcttcctttcgttcgtcatacactctagtaccagctacttctcttaatagctttaatctctgagaatctggtgctgttgtcatcttttccagttctttagtatcatgatttatagcatccatatgttctttttccatatttttccagcgctccatactcttctgaagctccttaattccagcttctgttttatcaatggaattgtccaaatcttctgatcgtgccatagtgtcttttactcttttattgatggcttcaagttctgatgttgtggctgtgagaacagtaccc

SEQ ID NO: 730769 - DNA, 417 bp, Homo sapiens
agtgtgaggagcacaacagcctcaaggaaatggtcctgatggaggggctgtgctctgagcagggacgccggggctcaacactggctagttcctctgagaggaagcccttggagaaccagctagggaagcaggaagagttccgggtatatggaaagtcagaaaacatcttggtcctacgaaaggacatcgaagatctgaaggcccagctgcagaatgccaacaaggtcattcaaaacctcaagagccgggtccggtccctctcagttacaagtgattattcgtctagtctggaaagaccccggaagctgagagctgttggcaccttggaggggtcttcacctcatagtgtccctgatgaggatgaggggtggctgtctgatggcactggggctttctactctccagggcttcaggcca

SEQ ID NO: 730770 - DNA, 129 bp, Homo sapiens
  misc_feature (92)..(92): n is a, c, g, or t
acaatggtggtctcagtcacctcggtgttgtaaggtggaatagagctcccaggctgcagtgtggtaaagactccagtggctttgggctctcnttgttgccctttatgccccgggtcctctagacgccat

SEQ ID NO: 730771 - DNA, 414 bp, Homo sapiens
  misc_feature (385)..(385): n is a, c, g, or t
  misc_feature (394)..(394): n is a, c, g, or t
ctgtgcccccctctaaatctacataaagagaaaaaaagaaaagaataaaaccaagtaatgagttcacatcctgcaaaatgtgaaaaattaaagggctcactaagtataacaaatacaaaataggccgggcacggtggctcacacctgtaatcctagcgctttgggaagctgaggtgggtggatctcaaagtgctgggattataggcatgagccaccacatccgtccttattttcatgttttagagattgtgtctcattctgtcaccccaattggagtgtagcagtgtgatcacagcttactgcacccttgaatttctggacttaagtgattctcctgcctcagcctcctgagtagctgggattacaagcgcctgccaccacactnggctaattnttgatttttagggggaacga

SEQ ID NO: 730772 - DNA, 600 bp, Homo sapiens; identical to SEQ ID NO: 158784
  misc_feature (566)..(566): n is a, c, g, or t
  misc_feature (578)..(578): n is a, c, g, or t

SEQ ID NO: 730773 - DNA, 971 bp, Homo sapiens
aactcccactttccatcctccccagtaatttccctgtgctcctctgaagataaaccgctgcctgcaccagcctagcagcttccagaagctgtggatgagaagcaatctcccaccaaaagccagagctcacctgcaaagcttcaatcccaagcagaaggaagcctccgttttttccccccagatgagcctgaattcacctccagaaagtctcaatgcatcacaccaagggtcacacacctgctcatggttcttcttgaggcaaagcagctcctccttcagggactccagctgggcctccaggtcacacttggcgagggtgaggttgtctagcaccctgcgcaggccacagatgtcagcctccaccagctgttgcagcgagcgctctctctcgtacctgtaacagggaaagtgcaggagtgacagttagagggcaggaaggggcaccaggacatgactcccagctcgcagctgtaagtccactggcctgccctttgccatctaattgtgagttggcttatcctgtgtagtgtgctcaaagcccagaaagcaacaggatgttccccactcagtcaatactaagcacctgagatgaaccaaggggagcagctggtactgaggatactgtgatggacacacagccagcacctgcctttacacacaatggcccaaaagggaggtggcaaagtaaccaggcatttgcaacacagtgcaatcactgcaggcccctctctacaagccccatacccaaagggaccctggattccctattagagtaaaagccacattgccagcatgagaggaaggaaatggctttctttagctctagaagagtgagacttgcacagtgccccgaagaaagatgataaaacacaatgcccttccagcacccagggtagaccctcctcaggtggtgtcaaccctttgactttcacatgttttcatcttaggctatggagcatgatttctgctat

SEQ ID NO: 730774 - DNA, 993 bp, Homo sapiens
aactcccactttccatcctccccagtaatttccctgtgctcctctgaagataaaccgctgcctgcaccagcctagcagcttccagaagctgtggatgagaagcaatctcccaccaaaagccagagctcacctgcaaagcttcaatcccaagcagaaggaagcctccgttttttccccccagatgagcctgaattcacctccagaaagtctcaatgcatcacaccaagggtcacacacctgctcatggttcttcttgaggcaaagcagctcctccttcagggactccagctgggcctccaggtcacacttggcgagggtgaggttgtctagcaccctgcgcaggccacagatgtcagcctccaccagctgttgcagcgagcgctctctctcgtacctgtaacagggaaagtgcaggagtgacagttagagggcaggaaggggcaccaggacatgactcccagctcgcagctgtaagtccactggcctgccctttgccatctaattgtgagttggcttatcctgtgtagtgtgctcaaagcccagaaagcaacaggatgttccccactcagtcaatactaagcacctgagatgaaccaaggggagcagctggtactgaggatactgtgatggacacacagccagcacctgcctttacacacaatggcccaaaagggaggtggcaaagtaaccaggcatttgcaacacagtgcaatcactgcaggcccctctctacaagccccatacccaaagggaccctggattccctattagagtaaaagccacattgccagcatgagaggaaggaaatggctttctttagctctagaagagtgagacttgcacagtgccccgaagaaagatgataaaacacaatgcccttccagcacccataccatgcgctcatgcctgcagttcgattgcattcgttggctacagctgtttcccagaccactctcttatgatccatgtgtatattcagcgatgctacgtttg

SEQ ID NO: 730775 - DNA, 397 bp, Homo sapiens
cctagttttagaagtttcaatagcactgtgatggacacacagccagcacctgcctttacacacaatggcccaaaagggaggtggcaaagtaaccaggcatttgcaacacagtgcaatcactgcaggcccctctctacaagccccatacccaaagggaccctggattccctattagagtaaaagccacattgccagcatgagaggaaggaaatggctttctttagctctagaagagtgagacttgcacagtgccccgaagaaagatgataaaacacaatgcccttccagcacccataccatgcgctcatgcctgcagttcgattgcattcgttggctacagctgtttcccagaccactctcttatgatccatgtgtatattcagcgatgctacgtttg

SEQ ID NO: 730776 - DNA, 161 bp, Homo sapiens; identical to SEQ ID NO: 158787

SEQ ID NO: 730777 - DNA, 255 bp, Homo sapiens
cgactcgagccggtaccctagtttagaagttcatagcagcaactctatttcttagacatggaggcatgggttgccagctagaaccaactgccctgatactcttcatccagttaagtggaaaccttagcaactataataaactatgagatgggtaatcagtgggcattattatctcatgttttcatttgtcactttatgtagcaattcagggatccttattttttcacatatgctatggaaacttctaaaactagg

SEQ ID NO: 730778 - DNA, 460 bp, Homo sapiens
ttgaaatgggcacagaaattttctggtgtttcagaagtatggtgtaaacagcattttgatccgtgtgcagtctgtgggcagggacacctgcctgtcagcctgctattatgatgaggctcttgaagaaactaccctctttctaagaactggaagaactcaaataatgaagagacaatagaggtttgggcagtaatggaaagaagaaaagacagtgcctagccaagcagatgaatgaggtagaacagtcttgttcatacattgccattatatctagtgcagttgaatgaacattttctgtgtctgggcttaggtgcaggcaaatagttatctgtgttgtattcagataaggggttagaagaatctttatttttctgtgtcggtcatctctttcttgctgtaaaatgaaattgtttaaagcttacattatgacattagtgttgaatttctgtgcccatttcaa

SEQ ID NO: 730779 - DNA, 736 bp, Homo sapiens
tggaccccttccttacaccttatacaaaaattaactcaagatggattaaagatttaaacataagacctaaaaccataaaaaccctagaagaaaacctaggcaataccattcaggacataggcatgggcaaggacttcatgactaaaacaccaaaagcaatggcaacaaaagccaaaattgacaaatgggatctgattaaactaaagagcttctgcacagcaaaagaaactaccatcagagtgaacaggcaacctacagaatggaagaaaatttttgcaatctatccatcttacaaagagctaatatccagaatttaaaggaacttaaacaaatttaccaaaaaaaaaaatcaaacaaccccatcaaaaagtgggcgaaggatatgaacacacacttctcaaaaaaaataagatatttatgcttccatttctttagaggtgagtgaccaaggtttggaaaagaggagatgagtgtctgctggagcttagccatctgtggcaccagcgctggtccacataagcagctggccagcggtgcagtgtgaggtagaggggtgtctgtgagtggtgctggaaagagggaagacaaggggtccgggttccagggtccaggtaaggtgaccttggataagcgattcagaccagcctgtctcctacggggcctctgccatcctgctgcccctaaaggcagctgccgtctcccctctgatagggttacccaggtacccaggtcactc

SEQ ID NO: 730780 - DNA, 449 bp, Homo sapiens
  misc_feature (370)..(370): n is a, c, g, or t
  misc_feature (395)..(395): n is a, c, g, or t
  misc_feature (402)..(402): n is a, c, g, or t
atcctagctcagacagttagatggaccctatcccctgaagagaatcagagggatgggtgggcgtgaacaagtgcacgtgtatgtgatggtaatgagtccagttttggataggctgtgttagacattcagtaagactaccaagtggtgatgtgctatatgcagtaagcagctgtcacctgtgtgcagtacgcagaaattacctagagaaaactggccggggcagtggctcacgcctaggtcttctgaagcgatcctctcgatccacatctctctctctgtccctttctctcccaggttcaagcaattctcctgcctcagcttcccaagtagctgggactacaggcacatgccaccatgcatggctaatttnttttttttttttttttttgggaaanggattcncgctctgtcatctggtttgattgcagtggcgcgatttccccccattg

SEQ ID NO: 730781 - DNA, 779 bp, Homo sapiens
gtctgctctagaggatcaccctaacaggctgagcaagactgagctgagggatcttcagccttaacctaaggtctcatactcggagcactatgacatcgccccagctagagtggactctgcagacccttctggagcagctgaacgaggatgaattaaagagtttcaaatcccttttatgggcttttcccctcgaagacgtgctacagaagaccccatggtctgaggtggaagaggctgatggcaagaaactggcagaaattctggtcaacacctcctcagaaaattggataaggaatgcgactgtgaacatcttggaagagatgaatctcacggaattgtgtaagatggcaaaggctgagatgatggaggacggacaggtgcaagaaatagataatcctgagctgggagatgcagaagaagactcggagttagcaaagccaggtgaaaaggaaggatggagaaattcaatggagaaacaatctttggtctggaagaacaccttttggcaaggagacattgacaatttccatgacgacgtcactctgagaaaccaacggttcattccattcttgaatcccagaacacccaggaagctaacaccttacacggtggtgctgcacggccccgcaggcgtggggaaaaccacgctggccaaaaagtgtatgctggactggacagactgcaacctcagcccgacgctcagatacgcgttctacctcagctgcaaggagctcagccgcatgggcccctgcagttttgcagagctgatctccaaagac

SEQ ID NO: 730782 - DNA, 703 bp, Homo sapiens
  misc_feature (35)..(35): n is a, c, g, or t
gagtcggtacccttttaggcttggagcagactganctgagggagttcagatcttcagccttaacctaaggtctcatactcggagcactatgacatcgccccagctagagtggactctgcagacccttctggagcagctgaacgaggatgaattaaagagtttcaaatcccttttatgggcttttcccctcgaagacgtgctacagaagaccccatggtctgaggtggaagaggctgatggcaagaaactggcagaaattctggtcaacacctcctcagaaaattggataaggaatgcgactgtgaacatcttggaagagatgaatctcacggaattgtgtaagatggcaaaggctgagatgatgggtgaaaaggaaggatggagaaattcaatggagaaacaatctttggtctggaagaacaccttttggcaaggagacattgacaatttccatgacgacgtcactctgagaaaccaacggttcattccattcttgaatcccagaacacccaggaagctaacaccttacacggtggtgctgcacggccccgcaggcgtggggaaaaccacgctggccaaaaagtgtatgctggactggacagactgcaacctcagcccgacgctcagatacgcgttctacctcagctgcaaggagctcagccgcatgggcccctgcagttttgcagagctgatctccaaagac

SEQ ID NO: 730783 - DNA, 778 bp, Homo sapiens
  misc_feature (35)..(35): n is a, c, g, or t
gagtcggtacccttttaggcttggagcagactganctgagggagttcagatcttcagccttaacctaaggtctcatactcggagcactatgacatcgccccagctagagtggactctgcagacccttctggagcagctgaacgaggatgaattaaagagtttcaaatcccttttatgggcttttcccctcgaagacgtgctacagaagaccccatggtctgaggtggaagaggctgatggcaagaaactggcagaaattctggtcaacacctcctcagaaaattggataaggaatgcgactgtgaacatcttggaagagatgaatctcacggaattgtgtaagatggcaaaggctgagatgatggaggacggacaggtgcaagaaatagataatcctgagctgggagatgcagaagaagactcggagttagcaaagccaggtgaaaaggaaggatggagaaattcaatggagaaacaatctttggtctggaagaacaccttttggcaaggagacattgacaatttccatgacgacgtcactctgagaaaccaacggttcattccattcttgaatcccagaacacccaggaagctaacaccttacacggtggtgctgcacggccccgcaggcgtggggaaaaccacgctggccaaaaagtgtatgctggactggacagactgcaacctcagcccgacgctcagatacgcgttctacctcagctgcaaggagctcagccgcatgggcccctgcagttttgcagagctgatctccaaagac

SEQ ID NO: 730784 - DNA, 261 bp, Homo sapiens
  misc_feature (139)..(139): n is a, c, g, or t
  misc_feature (178)..(178): n is a, c, g, or t
  misc_feature (186)..(186): n is a, c, g, or t
  misc_feature (194)..(194): n is a, c, g, or t
  misc_feature (196)..(196): n is a, c, g, or t
  misc_feature (206)..(206): n is a, c, g, or t
  misc_feature (211)..(211): n is a, c, g, or t
  misc_feature (216)..(216): n is a, c, g, or t
  misc_feature (219)..(219): n is a, c, g, or t
tcggtacctctcctactgtatcctaggttacgagagagtactctttttaacctaggaacactttaagattttagaaataagaatatgtttctacagacctgaacattagtggtttttttttttttttttttttggaaanaaattttggttttggtggccggggtgggggggaaggggnagaatctnggttcacnangacctcggcntccanggtcnaancaatttttcttgcctcagcctctgtgaatgggcgggaattac

SEQ ID NO: 730785 - DNA, 896 bp, Homo sapiens
cacaggtatcgtgaaaactacccctaaaagccaaaatgggaaaggaaaagactcatatcaacattgtcgtcattggacacgtagattcgggcaagtccaccactactggccatctgatctataaatgcggtggcatcgacaaaagaaccattgaaaaatttgagaaggaggctgctgagatgggaaagggctccttcaagtatgcctgggtcttggataaactgaaagctgagcgtgaacgtggtatcaccattgatatctccttgtggaaatttgagaccagcaagtactatgtgactatcattgatgccccaggacacagagactttatcaaaaacatgattacagggacatctcaggctgactgtgctgtcctgattgttgctgctggtgttggtgaatttgaagctggtatctccaagaatgggcagacccgagagcatgcccttctggcttacacactgggtgtgaaacaactaattgtcggtgttaacaaaatggattccactgagccaccctacagccagaagagatatgaggaaattgttaaggaagtcagcacttacattaagaaaattggctacaaccccgacacagtagcatttgtgccaatttctggttggaatggtgacaacatgctggagccaagtgctaacatgccttggttcaagggatggaaagtcacccgtaaggatggcaatgccagtggaaccacgctgcttgaggctcttgactggattcctaccacaaatcgtccaactgaaaagccttgtgcctgctctccaggatgtctcaacaattgggggtattgggtaccggtcctgttggccagtggagactggtgttctcaaacctggtatggtggtcacctttgctccagtcaacgttgcaacaga

SEQ ID NO: 730786 - DNA, 1294 bp, Homo sapiens
gcaaccgggccgcgccgcgagaaggtcacacgattctccaacatggcggcggcggccctgcggagtggctggtgccgctgtccacggagatgcctcggcagtggaatccaatttctttccagccacaacctaccccatgggtcgacctatcagatgcgccggccgggcggagagctgccactgtccaaatcatattcttctggaaacagaaaaggctttctgtccggcttgctagataatgtcaaacaagaattagccaaaaacaaagaaatgaaagaaagtataaaaaaattccgtgacgaggccagaaggctagaagaatcagacgtgctccaggaggccagaaggaaatacaaaaccatcgagtcagaaaccgtgcggacgagcgaggtgctacggaagaagcttggggagctgacgggcaccgtgaaggagagccttcacgaagtcagtaaaagtgatctcggccggaaaatcaaggagggcgtggaggaagcagccaagacggccaagcagtcggccgagtcggtatccaaaggcggggagaagctgggcaggacagcggccttcagagccctctcccagggggtggagtccgtgaagaaggaaattgacgacagcgtcctgggacagaccgggccctaccggaggccccagcgactccggaagagaacggagtttgcgggagataagttcaaggaggagaaagtgtttgagccaaacgaggaggccctgggggtcgtgctgcacaaggactccaagtggtaccagcagtggaaggacttcaaggagaacaacgtggtgtttaaccggttcttcgagatgaagatgaagtatgacgaaagcgacaacgcgttcatccgggcatcccgggcccttacggacaaggtcaccgacttgctggggggcctgttctccaagacagagatgtcggaggtgctcacggagatcctccgggtggacccggcctttgacaaggaccggtttctgaaacagtgcgagaacgacatcatccccaatgtcctggaggccatgatttctggagagcttgacattctcaaagactggtgctatgaagctcatgtgacacatctgggctctcaggctggacaccgggtcacccgccagtcctttgctcccagactgtaaactttgttagggagaatccttctctgggctggtgtctaagagatggctggttgggggtgtcccctgggcctgtgagagatcacaaagctgccaattttactgggccttttttttccctccaatcttaaaataattttggttaggt

SEQ ID NO: 730787 - DNA, 1318 bp, Homo sapiens
  misc_feature (1316)..(1316): n is a, c, g, or t
  misc_feature (1318)..(1318): n is a, c, g, or t
gcaaccgggccgcgccgcgagaaggtcacacgattctccaacatggcggcggcggccctgcggagtggctggtgccgctgtccacggagatgcctcggcagtggaatccaatttctttccagccacaacctaccccatgggtcgacctatcagatgcgccggccgggcggagagctgccactgtccaaatcatattcttctggaaacagaaaaggctttctgtccggcttgctagataatgtcaaacaagaattagccaaaaacaaagaaatgaaagaaagtataaaaaaattccgtgacgaggccagaaggctagaagaatcagacgtgctccaggaggccagaaggaaatacaaaaccatcgagtcagaaaccgtgcggacgagcgaggtgctacggaagaagcttggggagctgacgggcaccgtgaaggagagccttcacgaagtcagtaaaagtgatctcggccggaaaatcaaggagggcgtggaggaagcagccaagacggccaagcagtcggccgagtcggtatccaaaggcggggagaagctgggcaggacagcggccttcagagccctctcccagggggtggagtccgtgaagaaggaaattgacgacagcgtcctgggacagaccgggccctaccggaggccccagcgactccggaagagaacggagtttgcgggagataagttcaaggaggagaaagtgtttgagccaaacgaggaggccctgggggtcgtgctgcacaaggactccaagtggtaccagcagtggaaggacttcaaggagaacaacgtggtgtttaaccggttcttcgagatgaagatgaagtatgacgaaagcgacaacgcgttcatccgggcatcccgggcccttacggacaaggtcaccgacttgctggggggcctgttctccaagacagagatgtcggaggtgctcacggagatcctccgggtggacccggcctttgacaaggaccggtttctgaaacagtgcgagaacgacatcatccccaatgtcctggaggccatgatttctggagagcttgacattctcaaagactggtgctatgaagctactacaggcaggtggccacccatcaggcaggcaggctggtttccgttccttcgtcctgacttgacttcgctggcggcaatattgggcgggccgggtgtcaccctccggccttgggtggtcggccccgcgcgggggggccgcaactcgcgtttttggctgcccgggccccggggggcggctccccactttgggagcgctacgccctctagtcccgcggcgggccccccagccgcgcngn

SEQ ID NO: 730788 - DNA, 580 bp, Homo sapiens
atccacccaccttagccttccaaagtgttgggattacaggcatgagccaccgtgcctggctggaatattttatttttttaatttgctagtctcactggataactgagtcttgacttatggaatggcataaactcttgatgcaggcatgaagaataaaattagtttttgtaaacaagagaatttgaaactgcttagagaatagaggtaaaaaggaatttccttctttgggtaagagtggatccaaaccatatattctctggctattagagtctccagaggtgtgtggtcattttttgttatggtgattcccaaagatttgcagtgttggcaagtacccaaaatttatctcagctggtcataaaccttagtgccttttgatggttttgttttatagagttacttattaaagttctatgtaaatcattactgttatccttttaagtttctgtatttaactattaccattttttattttatagtcattacatattggatattatgtagaatgtagttatgtatagagtgttttatctacttatttgttgctgcccttttctgagagttatttaatacagtttga

SEQ ID NO: 730789 - DNA, 533 bp, Homo sapiens
  misc_feature (489)..(489): n is a, c, g, or t
caacgatggtcctcagcttctatttttctcagaaaaacagaagctgaattttcaaaatatccggggagctgtctttgagattgttttgagaagaagccagcatcacgagaagtggaggtggtttcatgcctcctggagacagggcttaacttcatacagtttggttttgttgcagtaaaatgtcactgggatcctgtaaagacaagaaggagaaatggtgttttgcctttctttcatttccttttttttttttcaaagacagggtctcgcctaggcaggatgtagtggtacaatcataactcactgcagccttgacctcctgggctcaagcaaccctttcacctcagcttaccaagtagctgaggaccatcgttgcaacgagggtcctcagcggcattaaccagccccagttccgggcggtctggggggaagtgaaccggtgtgagaagatgcgccagttggatgctaaaaagttggcagagacccaanctataaaggacacaccacggaaagagaagggtcacgggaagaga

SEQ ID NO: 730790 - DNA, 545 bp, Homo sapiens
ctataacccagtcaaacccatagcacctggctgtgagttgtggattaattctctgcccatgtttgcaccccccaaaatagctgggatttgacatttctgagacctgtggaataaagaaatgcatccctaaagcacagggccaaagccagtatgagcaaatccctccgatttcggttttgtattgtcttggggattagaatcttttgattcctgtgtgtgtgctgaaactgccatcttattgcttattatgtatgaaaatttggctcagttgagagaagagtcattccctgatattggcaaggtcctaaaacactgtcactcagttcagatcatctttctgggtgcctgttctgtgctaggcagggagctttggggagaccaagaaaaatgggagccagtccctgtgttcagggagcccatggtcaacaagtgaatgaggaatgaaatactgaggcagaaccttgtactacgacaggtgttcggagggatggaggaaggattcctgggtctgagctgggctttgaaggtctaccaggagtttgcta

SEQ ID NO: 730791 - DNA, 594 bp, Homo sapiens
aaaacttctatgttcaataatgcacataataaacttgtaactgcaattcaaaatattaataataccatcactattcagaagcaaacaaaatagcaacaagtttcctaaaagaacaatgtctaaccctctgcggcgctcgcaaattccaaaatgaatcactgaccagtttataattcaagtaaggatatgaaaatacaagagtcctgatttcatcaacatctaggactccccataacatgttagtttcaaacagcctttttctctcagcaagagtgctttcttgcctcttatctgtagccacttctcaaaatgagaacatgacattactatagccaaaagtcaatctccttgtctcatggtcacaagctaggtccccagccaacactgctctctcaaaaatggaagacaacaaaacagggccaggcacggtggctcacacctgtaatcccagcactttcggaggcagaggtgagtggatcatgaggtcaggagatcgagaccatcctggctaacacagcgaaaccccgtctctactaaaaataaaaaaaaattagccaggcgtggtggtgggcacctgtagtccccgctactcgg

SEQ ID NO: 730792 - DNA, 529 bp, Homo sapiens
aaaacttctatgttcaataatgcacataataaacttgtaactgcaattcaaaatattaataataccatcactattcagaagcaaacaaaatagcaacaagtttcctaaaagaacaatgtctaaccctctgcggcgctcgcaaattccaaaatgaatcactgaccagtttataattcaagtaaggatatgaaaatacaagagtcctgatttcatcaacatctaggactccccataacatgttagtttcaaacagcctttttctctcagcaagagtgctttcttgcctcttatctgtagccacttctcaaaatgagaacatgacattactatagccaaaagtcaatctccttgtctcatggtcacaagctaggtccccagccaacactgctctctcaaaaatggaagacaacaaaacagggccaggcacggtggctcacacctgtaatcccagcactttcggaggccacagcaggaggatcgcttgagtccagccaggagttcgagaccaacctgggcagcatggcaaaac

SEQ ID NO: 730793 - DNA, 584 bp, Homo sapiens
  misc_feature (12)..(12): n is a, c, g, or t
ttgagctcggtnccagttcgacggagactctcgtcattgtcctattatagtcacaatgacgagagtgaattaatttttagttagcatctacaggtgcaaagctgaagcagagttcccaccatcatactgtgagctccctcgaaggctatatgtaccctatcttcccatccccattgctctcccacagaaggaaggctgcgttactaatgacagatcagcatcagtctgtcagcctcagtcttagcatttagcacctggctagtgcaaaaagagctcaggaaacagcccagccaggagacaggccctcaggagagagaactgcccaggtctgtggcaggcatgagggcagtggcattgccaccaaatgaggaatccgttattggaactccaacctgagaggtagtgagcttggagggtttctttgtttgtttgtttgtttgtttgtttgtttgagaattgcacacaattacgacagtcatttttcccagaagtcctctctaagagcctgtgctcattcatggtaagttgacgccctgctctcagtgacacccttcagagagagcgagcctggggcctgagatgct

SEQ ID NO: 730794 - DNA, 315 bp, Homo sapiens; identical to SEQ ID NO: 728679

SEQ ID NO: 730795 - DNA, 339 bp, Homo sapiens; identical to SEQ ID NO: 728680

SEQ ID NO: 730796 - DNA, 536 bp, Homo sapiens
ttccatgatatccacggtgttctaaactctcgctgtcagtgccatttccatgatatccacggtgttctaaactctcgctgtgggtgccatttccatgatatccacagtgttctaaactctccctgttggtgccatttccatgatatccacggtgttctaaactctcgctgtcagtgccatttccatgatatccacggtgttctaaactctcgctgtcagtgccatttccatgatatccacggtgttctaaactctcgctgtgggtgccatttccatgatatccacggtgttctaaactctccctgttggtgccatttccatgatatccacgacgttctaagctctccctgtcggtgccatttgcatgatatccatggtgttctaaactctcgctgtgggtgccatttccatgatatccacggtgttctaaactctcgctgtgggtgccatttccatgatatccacggtgttctaaactctccctgttggtgccatttccatgatatccacgacgttctaagctctccctgtcggtg

SEQ ID NO: 730797 - DNA, 332 bp, Homo sapiens
aggaagcacactgcaacaacgtatttaatacaaagcagcctttgggcggggcggggcggttaacaaaatgcatctcagcaccagcctagagaaacttttctgtgtgtaaacagaagaggggttaccatggagaaattcattacggatttcgggagggctttttcctcagacatagagtgaaaagaataagtcgttgtgcaataaatctgatactgacgctgtgtgacttagaagttggtccaaaagttcatcttaggcaattatgcctagatgatcaactacacatcttctgcaacaggtgacacgaacctgttgcagtgtgcttccgagca

SEQ ID NO: 730798 - DNA, 315 bp, Homo sapiens
  misc_feature (55)..(55): n is a, c, g, or t
ggggtggggctggccctcacaggttgttgagttccaccagggtctggtccaaggnctggggaatctcgacgttctcctccttggcactggccaagggctcttttaggtcatcgatgggtttctccaactttgccacagacctctcggcaaactctgctcgggtctcagcctccttcagcttctcctccaacagttagatctcctcttcatatttatcttctttgggggaatactcctcccctagggccttcagggacttaagggcctcgaccacaattcgaaggtcctcctctaggtgcctgaataggctcttgg

SEQ ID NO: 730799 - DNA, 881 bp, Homo sapiens
  misc_feature (857)..(857): n is a, c, g, or t
ggtggaggttgcactgagcccagataatgccactgcactccagtctgggtgacaagatcgagactctgtctcaaaaaaagagaatacttccttccaacagaaacatatctaaagatctgtggtaaacaaatacaaatgtagggagagagaaaagacaaaaaattaacaaagacttcttaaagaattagttttgttgataaaaagtgttaacgataattttacttttttggtaaaagaaagaattgctgcccaccaattcggtgtgatcacttgaaaacacaacttaagagaaaattcactgtaaatctggaattaccagatttcaggaaaaaagcaatctaaagctgtcaatctagacagacatccaaacacctattcatccactccagagctggccaaaaaagtactgtttattaacacatcaagagaacttaattcctttgataaaagaaccacacgggtaatagcatctactgacggatcactggtacatatgattatctctggggctatgttccacatgtgaatataacatttgtactcactgaagctgtctgttgcttccctacagagagacagaggctgctcacgtaccaaaaaatagaaaggagacaaagaggaaaaaccttacagggagaaactcataaccactaatgtgctttcactgggcttaagtccaaagccatggattgttacagaagcaacatgttacagggtgtctgaattgttaaaactgctgtccaaattggttctgcctctagggcaagacctactatgtgtaaaatattggcaggggcgatgaatacatataaggcattgttcttgtactcaaaaaagcttaagagtctcactgggcnctcattatgaggggtcggagctgc

SEQ ID NO: 730800 - DNA, 662 bp, Homo sapiens
tcagtgtgtgctactggggtgcagtcaggcacagtggtttcaagggagcacagcaaggaacccaagaaggccccgcatgtctgcagttggctgactattgcccgggactccagagcatccatggagggccccacaggggaaggcaggagcaggacgggtctagggaggtgaaggccgacctgacctgctaagagacgagaagagagggaggggaaagtcttgttcctgccaggacattgttaatgagaggagtgagaaggcagcaggtgaagagagtgtggcatggaaggcagaaatcagagcgtttttgggtttcgtgctgacctgctattgggaatgaaaatcaagactcaggtgcattctggtccctttctcagggttagccgaacaccacccgcatccctgcctggcctgttgatgccattcttcctaggcccactcaccgctgcagctgctttacttgcacttcctctcgtcatccgaccacagatcagacctctgctgctcgctgccgcccagggagagtgtgcacctacgtgcacattgcaccccactgcccagcacacccaggagtgagagtgaggagcagctgagagagttggaaaagggagcccttatgtggccaccaagggcttccctgctagcagccacacggtggctat

SEQ ID NO: 730801 - DNA, 671 bp, Homo sapiens
aaccgctcccacttggttgcggtggttcggggcaggagacgacgcagcgcggagcggaaagggcggttacccaacggccttagctctcatggcgtcctccgtggtgttacctaaaaataaagttatttgtgattagaaggtaatcgcctcctggtcatgcttccgctggtcaccagtgtctgcggggcgaccccatccttgtggccagagagggcctgtggctgcgctcaaggcgggagcggtccttagcggggccctgcgggacgcccaggccgcgctcctttcccttgctcacctggccttgaagtgaagggggaggtttaacaatgcagtgggaaccccaaagtttgtctcggccgtgctgctcacattccaaacaatgcaaaaggttgcggaaaacctcagcagttgaaaccgtgatgcatttcagcaaagaagtagctcctgtcctcgtaaaatcagtgaagttctcacggacgacctcattgagtgagttgtgaagcttgttgccttaatcagaatgatcagccagcatgcatgctctaatatgctcgtttgtccatgatatgagcagctgccaagtggaagaagaggcctttactcatagtctgttcacttggtagcacaagttggttgtgcaaccaagtgggaggccaggatcctctagaaaa

SEQ ID NO: 730802 - DNA, 260 bp, Homo sapiens
agcaaaccttccttttccagggccactggctcctctcaggacatctcacatgcagtgcaagtggccccactgagaaacattccacctatccagctgcacttctttctaaattggaagagtaaaggcaaaagaacagtatctactataagatccctgagaaaagccatcaagagacacacattctaatgccactgagagttggtctcttaaatattaagattggaccacaaagctgtacagttattctatttagacggtac

SEQ ID NO: 730803 - DNA, 225 bp, Homo sapiens
  misc_feature (18)..(18): n is a, c, g, or t
ccagaggatcccagtggnagatgtgctacacacaggatctagaagaatatgtcaaactataaacggctgtgatgtgaatgacttggttcttggcttgtgtttttcaatttcctataatgcacattcttccaaggcttttttaaaaatataggactgatggatggattgataatagaaggtatacgtccatataaaatattccagcttcctgacaaccagttattt

SEQ ID NO: 730804 - DNA, 249 bp, Homo sapiens
atacatagctcggttccccttttggggtctttgctagtaaactgtaattctttcagtaagtcactgctttactgaatggtgaagatttggaatgtcttctttgatttccaggccaacaatggatagatttggtcgtccttgaagcatttagagacctgtagaatgaacttaacttctgaaaactgggtgcggggccaatagaggggctgctcaatacctcaccagcctgctacgcggaaggctagatgg

SEQ ID NO: 730805 - DNA, 154 bp, Homo sapiens
gagaactgctgttccacctccgcctcctccctgcagtgtggcttcttaggcaagtcccagtttagaagtcatctaactaagtgaacattcttgaactgccaccagacctctcctaaaacttttttctaagcaaagaccccaaaagggggatcct

SEQ ID NO: 730806 - DNA, 850 bp, Homo sapiens
agatgatgatcatgggaggtcctgtcctttcaaatatgcgtgtgagttgatcagagcaggggctctgggtacatctctcagtgtcctaaacatcatgtttcagtcatccctttgcagctctgaatgctctgagctttgtcaagcctcactgactaatacatttcattaggttcatttcaaatgacatgcatttgtatacattttaccaggttggttgtatgaatttattttagctgggtgtggtgatggatgcctgtaatcccagctactcgggaggctgagacaggagaatcacttgaacccaggaggtggaagctgcagtaagctgagattgcaccattgtactgcagcctgggcaacgagcaaaactctgtctcaaaaaaacaaaaaaagagcagcagcaactgactggttggatcaggaaagactctgagaaaggactcctgacctggctcttccagaatgaggatggattttccatatgaaggagccgggggcaggaccttctgggtagagcgtgaaaagaacacagtatgtgtggagagcgggaaattgtgttgaactgtctagaaaacagagccacaggaatgcgtgttgagggcttgggctgtacagtggagagtgccctccctggccaggagttggacattcatcccaccacaagaccccatgaagagttcctcaacagctctgtgtcctcatcaaacctgtgtttgcagaacagtggaggaagagagctgaaggaggggagaggccctgcacctgccaggccctggctagactacaagggtgagcactgagccatgctctcggggaaccttcactggagttgagggcagtgagaatgttt

SEQ ID NO: 730807 - DNA, 301 bp, Homo sapiens
ggcggaccttatttccttctttatgacaacatagtaaaacccgtcctacaaaaataaaaaaataaaaaaaataagccaggtgtggtggtgggcacctgtgatctcagctacgtgggaggctgaggcaggagaatctcttgaacctaggaggcagaggttgcagcgagccaagattgtgccagcctgggcgacagggtgaggctcttgtctcaaaaaaaaaagtccacatcttcatgaaccctcagactcgggagtggggtgtcggcttttttagccagctttggtgggaatggccttggac

SEQ ID NO: 730808 - DNA, 560 bp, Homo sapiens
cttgtcttagaaaggcaagttcttgggccccaccccacatatactgaatcagagaccctgggagtgggacccagcaatctgtcttaatagaccttctaggagattctggcactaaggaaagagaccacaggtcttgtctatctctgtagttggctgcgtctgggccagagtaactgcttgttgaaatgatcagagatctcaaatgaggtcatgcatgttggggtgtgtgtgtgtgcatgtgtgtgtgttgtgtatctttatgtgtgtatgtgtttggtctagggtccagcacatagtaggtgttcactcttgggggtgggaataatcactctaatgtccgtgtttgaggactgcattgctggtgaccgctgagcctgcagaggaggaagagagcagggcagaagattcaggagggggtgcatggcaacttctgatgtcacagtgccccccttcactcctgacttctggctcatgggtcactttggggcaggggcaagaggatggttagctgcagcaaagagaagcaaaagagaagtgggattgagagcacaggggacagc

SEQ ID NO: 730809 - DNA, 767 bp, Homo sapiens
cctactggagggtctaatgaaggtctggtgtttgtgggtgtcctcctcccttccctacacacccgccggcccactttccctctcttttccccttccctctgtggcctggccacctgggctttcgcagaatatgtagacaggacacgagggagaagtgaaggacaagagggcaagggtcttcaggcctcaggtttgcagtgggtctacctctctcccccttcctcatttcccatatcctcgttgctaggactgctgttttaaggaatgttttccaaggaactgtcgaggcaggaaggcagctatgacagacatttactaagtgtgtgccagggcacagggttcgcgtctgggtttgtttcggaggatgcattgatttgcaagacctgctgggatctctgtcctcagagagctgactgtatagacaagtgattggacaactaccacacagtgacacaaacacagtgacagatgcctcagcaccttacctaacccacctaacagtcagggaaggcttcctggaagaagcggtatccacactgagtcccaaaggataggcatgagttagtctggtgaagaggcaggaaaatgagtgtttaaggctgaaagaatagaatgtgcaggggctcacaggcaagagaatacatggttgaaaaaatatacttgggttgagaacctgatcgggggaggaatgtatagcggggctggagggtgctgcgcagggaggccgcggaggctttcttaagaaacttgaacttgagtgaagggca

SEQ ID NO: 730810 - DNA, 577 bp, Homo sapiens
tgagcctcagtgtttctcatctgcaaggtgagatagtaactctaacctctccaggtggttgagaacataaaacaaaatgaactctgcctataaagtcccttactaatggctggcatataacaggagtgcaatgagaagtagtccttattatctccccctctatactcgcccatacagcagagagctgggcaataggaccagcttgttcctgagtgcagaaataaccacagtggggtgttcatgcccaggttatgtatgggcttggtcatcttcatgaaaagatgtgtgcacagtaaagagagaacacatcactggggccaggaaggaacagtggtagaaggaaccccaagcttccccaaaactgcaaattccctgcctccaacctggggcacctctggcagccagccacgttggcagcctcgtactttctcttgggctcttcctgttggcatagcccaccctgttttacaaagctccagtggttttttttttttttttttttcaagggctccagctgttagataaacttttcaaggatatttctgtggcaggtacaaacctggacaggaagacttgg

SEQ ID NO: 730811 - DNA, 671 bp, Homo sapiens
  misc_feature (639)..(640): n is a, c, g, or t
agttcgacggagactctcatagacgtatgatcatttcttcctaaattaaatgtcctataagcaatcttacaacattaaaatcaatgactggcaatggctttgactacaagtgacgttttccaattttgtaaaagtagatttttcaaaggccttggcaacaggtaaagtaacatgtttctgtgtattacctaccctggaatgaagaatgtaattcatggagggggtatctccacactacctggtttgagattcagttactttctagtccaaatatactacagcctttcactagttctccctgaacagactgcaaacaagatgcaaagtatcttactaggaggatttcaaacttttgtggctccatgacgaaacagtttaaacaatcccaggggtagcgattaacaatgtgtaaaatgtgttacggtgatccaaaattccttaaaagatggtcgttgacatttatacttacttcacttgaagagctactatttaattccacataatagtttaatgtgtataccatatcaagatgtccactgtaaaatcatgccgtaccatatagttcaagggattaaaattacagtacataatacattatagcgcattttgggtctttataacccaaaattcactaatggnncatattatatatattctgtgccatctttaaa

SEQ ID NO: 730812 - DNA, 561 bp, Homo sapiens
gcaatctgaaggcaaatcctgtttagacccaggcgaaggttcccggtgacccgggctctcaccagccaattgtcccttgccgtcctcctgagggtgcctggagcttaagcactgtgtgctcttggcctccacactggggatgccgctgactcccactgtccagggcttccagtggattctccgaggccctgatgtagaaacttccccattgggtgcaccaagagcagcctcacatggtgtgggctgacatcaagagctgccagatccaacaggtcctgggggagtaggagccagtgcaaggagagaagtccattgagaaaggcaaatggatgacatcagacccaggggctgaggtccccaactgcagctgggtagcttctggagtggacaaggagcaacagggaagttcgtggcctggtgttctgggatccactgtctcatctcattcttgtgggcaccagaacgtatccaaagacaagactcagtgtctctggcaacagtgagccagagatagaatgtgtttcagaggaggaggaaggggttgttgtaccccatggaaac

SEQ ID NO: 730813 - DNA, 561 bp, Homo sapiens
gcaatctgaaggcaaatcctgtttagacccaggcgaaggttcccggtgacccgggctctcaccagccaattgtcccttgccgtcctcctgagggtgcctggagcttaagcactgtgtgctcttggcctccacactggggatgccgctgactcccactgtccagggcttccagtggattctccgaggccctgatgtagaaacttccccattgggtgcaccaagagcagcctcacatggtgtgggctgacatcaagagctgccagatccaacaggtaaaaatcccgaggcattgccagctcagtggggtcagagagtcctctttgtattatgactcagatgtgaagggaagatgtcaaggtccctaaacatcacagggccttgcttggcatgcaacagatattaaataaatatttgttaaatgaatgaacaaatatccacagcatgtgctgcccatgagctgcagtgccgtggtcaggtagaagtgattttacttcaggagaggacagtgttctctccaggacttttccttactagctagatctgcgtcccgaaactgagaca

SEQ ID NO: 730814 - DNA, 673 bp, Homo sapiens
cagtagaagtgggcgagagagcgttgggtgggaacgtggcacgagagagagaaattatgagattgagagagagagagagagagagagagagagagagagaaagagaaagagagagagaaagagaaagagacagagaaaagaaactatgttgtttaaaatgccagcggaaagtccatgggggtgaaagagtccggcaatggccagggagttagcagcttggcgtagtgtcttcccactgttttgtctgtcttgagaatagcattcaacgcgactgtgttcccgcagcagacgttaggccgctgcccacgccttgagtgccggacgaggtcaacataggctttccgtcacagaatatgtttgggcaggaagatcggaacacttggggctgggccatctaccgctcccccacggcacacacgagtcgtcagggaaatgcccgcctctgtgtgtgttgtacgtgcagccttctgggcagagccgtggagagttggacgtaggccaggtgtgaggaggagaggtgtgtttggggtggccactggctcccttcctgcgtgacgtaggctggcgtgggctcttcccccagccccttgccggtgctgccacgtgagaagggcccgggtgccgtcccgctattccggtagtgcctcccgaattcggtaccggctcgactcga

SEQ ID NO: 730815 - DNA, 467 bp, Homo sapiens
  misc_feature (1)..(1): n is a, c, g, or t
  misc_feature (59)..(59): n is a, c, g, or t
  misc_feature (235)..(235): n is a, c, g, or t
  misc_feature (241)..(241): n is a, c, g, or t
ntagaggtatcccaaccgactcctttgtgctctgtcctacggtgacacaggcggcgtgnggttagacaggtaccggtcagactacggtgacacaggcggcgtgcggttagacaggtaccggtcagattacggtggcacaggcggcgtggggttagacaggtaccggtcagattacggtggcacaggcggtgtggggttagacaggtaccggtcagattacggtggcacaggcggngtgggnttagacaggtaccggtcagattacggtggcacaggcggtgtggggttagacaggtaccggtcagattacggtggcacaggcggtgtggggttagacaggtaccggtcagattacggtggcacaggcggtgtggggttagacaggtaccggtcagattacggtggcaccggcggtgtggggttagacaggtaccggtcagattacggtgaccacagcggtcccgggt

SEQ ID NO: 730816 - DNA, 528 bp, Homo sapiens
tacttcacaggggggggggaccccggtacggacctgtgcagatgtatccatttttgcctcatgtattttgaagtgctgttattagaagtctggcaagttgatgagcagatagatcactacaaggaaagccaagacaaacttccttggcaagctgcattcataggcaaggaaacactgaaggatgaaagcggtcaagaatccagaacatgtagaaaaagcatttatctgagcacagaatttgattctgtaaggcaaagactccctaaatattattcgtgggaaaaggcattcaaaacatcatttaaactttcttggtcaaaatggaagctatgtaagaaagaaagatgatggatgtaaagcatattggaaagtatgcttccattataatcttcataaagctcaacctgcagagagattttttgaccctaatcaacgagggaaagccctccaccaaaagcaagcccttagaaaaagtcagagaagtcaaactggggagaaactctacaaatgtacctgtgatacctcgtc

SEQ ID NO: 730817 - DNA, 812 bp, Homo sapiens
ctggcatctatggtgtttatgaagtatctcctgtcattgtaattgtttcttttctctggtagcttttcacattttcttttgattcttgatgttctatcttacaaaagatgtgtcaaggtatgaatttactactttttgttttgttttgttttttgagatggagtctcactctgtggcccaggctggagtgcagtgctgcaatttcagctcactgcaacctccgcctcctaggttcaagcaattctcctgcctcagcctcccaagtagcagggattacagatgtgcaccaccatgctcggctagttttttgtatttttagtagagatggggtttcatcatgttgaccaggctggtctcaaactcctgacctcaagtgatccacccgcctcagcctcccaaaatgttgggattacaggcgtgagccaccatgcccggcctgaatttactattatttttcctgtttggtactcagtatttatgttaaggactcacattttttattagtaaaaatctaagttattatctcttcaaatattctttactattccttccattctcttcccctggaactcttttcagatgtgtgttgaaggctcttaattcatcctctttgtctttatattctttcatatttccctctttgtctcactaggaggaagaactcagtactggtttctaatttactaaaacctctgtatcgtctctactggttaaatctattagcaaaaactattttaatttctaatcgtttgtttacagtattactaatgggttttgttaattttatactactctgttttcatttccctatc

SEQ ID NO: 730818 - DNA, 429 bp, Homo sapiens
gaaggcaacaggggaacacacatggccagagtaggagagagacagagagcagggaggtttaaacaatcagatctcatgagaactcactaactatatagtagcaaggggagatggggctaaaccattcatgagaactccactcctatgatccaatcacgttccaccaggcccctcctccaacactggggattacaattaaatgtaagatttgggcagggacacaaacacaaaccatatcagagtatgttgaaccatccttgcatccctgggatgaatcccacttgattacaatgaatgatcttttaaatatgtagttgaatttggtttaaggattttgcatctctgttcaaagatactggcctgtagttttctttttttgttgcgtctttgtctggttttggtaccagggaaatactggccctgtgaaat

SEQ ID NO: 730819 - DNA, 598 bp, Homo sapiens
agactcactttccacagggcacatcagttcagaatactgccaaaaataagttttacaaagcttctgcaagttagaaagaaagagagagggagaagaagccacgtggaaagcagcaggattcagaatggctttgtacttctcaacactagccctggaatccagaagaccatggagcaatgccttccaaattgtgaagaaaaattacttccaaccttgagttcaatactcagccataaattggaggggaggtagaactaaaacacttttagaaatgtaaggtctcaaaagatgtgcttttcgtgcacactttctcaggaagctattgaagatgccctgtattagtctgttttcatgctgctgataaaagacatacctgagactgagaagaaaaagagatttaattggacttctagttccacatggctggggaggcctctgaatcatggcaggaggtgaaaggcacttcttacatggcagccacaagagaaaaatgaggaagaacaaaaagcggaaaccctgataaacccatcagatctcatgagatttattcactatcacaggaatagaacaggcccctttgattcaattacttcccccg

SEQ ID NO: 730820 - DNA, 438 bp, Homo sapiens; identical to SEQ ID NO: 728698
  misc_feature (72)..(72): n is a, c, g, or t

SEQ ID NO: 730821 - DNA, 642 bp, Homo sapiens; identical to SEQ ID NO: 112778

SEQ ID NO: 730822 - DNA, 752 bp, Homo sapiens
ccactgcccggtggcagaacatccaggcatccgagtcagtggggagtgggaaaacggaggggtggagtagaagagagggaggaggttggggaaagaggggacccagtggtcttccgcggaggggaggggagctcttcccagccgagtcccctcctccttctcttatcaggcaaacccacttcctaggcgcggaagcaactttccttcaccttgaccaggctgaagccgtcgcatctaattgggactcttggcagaagcacggacctcctggcatcctctccttttcattctttcctccctctctcgttcttttccctcccccaccctccctcttataagggtatatctgcagagtcttcagtgagccagggtacctagacgagaggatttttatacgaaaagccagggtagatttgccgactgctttgcctcactctgaaatccttaggcagtgcatgcaaaggtcggtgaatttcggagtggggtgaaggggcatggggcggtagggagggtggcggctccaactttaaagctctgctagagcgcttggctttcaggtaagcagggactaacagtccttacaagaactctcctgtggtccctgggcagggggctgaccgcatgccagaggagattaggagagcgggagcagagagggagtgtgagagccagggaggccggtacgcagctcagccgtactcgcgactcaactgcacactgcgagcccctggagagggtttgtgcagaacaat

SEQ ID NO: 730823 - DNA, 671 bp, Homo sapiens
ccactgcccggtggcagaacatccaggcatccgagtcagtggggagtgggaaaacggaggggtggagtagaagagagggaggaggttggggaaagaggggacccagtggtcttccgcggaggggaggggagctcttcccagccgagtcccctcctccttctcttatcaggcaaacccacttcctaggcgcggaagcaactttccttcaccttgaccaggctgaagccgtcgcatctaattgggactcttggcagaagcacggacctcctggcatcctctccttttcattctttcctccctctctcgttcttttccctcccccaccctccctcttataagggtatatctgcagagtcttcagtgagccagggtacctagacgagaggatttttatacgaaaagccagggtagatttgccgactgctttgcctcactctgaaatccttaggcagtgcatgcaaaggtcggtgaatttcggagtggggtgaaggggcatggggcggtagggagggtggcggctccaactttaaagctctgctagagcgcttggctttcagttacggaggctgggaagtacaagatcaagttgctggcagatctggtgtctgtagtaacaaattggaagcacttatgttagaactgaagagaaaatatggaaaaacttaaacatg

SEQ ID NO: 730824 - DNA, 739 bp, Homo sapiens; identical to SEQ ID NO: 728700

SEQ ID NO: 730825 - DNA, 486 bp, Homo sapiens
ttccaggtaaccaaacatggtacaggggactgaatttgtacatttaggtaacggggaaaataaaaatactacaacataaactaagagaaactttcaaaagcaatgttcaacttacctttagaaaaatgctctactgaaataaaatcaattgacatatcctctgtttttcatactaattcctctggcccaaacctctctcttgagctctagaattgaacaaagtacctccatgacatctccattggactatgtcaaaatctcctcgtctttatcacgtctaacaccacactcaccgccaaagcaacttgcattgtctcttgtttcaggcaacgcccccaacatgaagatatttgtgcatccagaaatctaaacattcctctgagacctcctaatcccttcagcaaatcctgaccctctacctcaatcactcctgaaacctgctaaatttcctccatctctgtggccactcctgcctgtggaaaagta

SEQ ID NO: 730826 - DNA, 554 bp, Homo sapiens; identical to SEQ ID NO: 122762

SEQ ID NO: 730827 - DNA, 510 bp, Homo sapiens; identical to SEQ ID NO: 126147

SEQ ID NO: 730828 - DNA, 235 bp, Homo sapiens
ctgcaacagtgggagggaagagccagatgcaaactcgttctgcgagcccgaggttccgttctcatgatccttgctgtgatttctcttttgatgttggcaattttaaaatgacatcagtctatctggacctttttcctaaggctcttgctcagaccactcagtagatagccgccacctgcccagtgaggtgaatcaggcccattaggccatttgtcaggggtgggtggagagcggc

SEQ ID NO: 730829 - DNA, 751 bp, Homo sapiens
cccagatttcaacatattgttttcagaaagtgttctttctaatgatgaatgctgatgattactagaaattaaacatttattcagttgtgctaaatggatgaccaagcatcttttaaacgacaacatgcatgagctctttccctcatttagaatttgatttggaggatcagcggtccttgatattggaaccatcttaatccaaaacacagtaaaagcaccaaggacaagcaccggtgccaccgccgggctggaagaatcacccacaagagcggatgccctcacagctgggctcctgaggcccagggcccggaccctctcaccatcttctagcttgtctacgatcgaggcaaaagagtgagatgcctaaaggggtgtgctgtgagcatccacagcctacgggaagccctgttatttatcctccatctctgccttccaaggctccaggcatcctttccacccttaccacctaccaaaggaaggtgttcagaaagaaatggctgcttgactatctggttttcataacctcctctacagtcttcaagtatgtgtatataacatggaagaggcttaaacagtgcgtgtgctgaaaaagactgccactagtgtcaccacgaaaggaaactactttatttctcctcaagcttcaggtgtgtgctgatcaattaaactgactttaattatttattcctgattctaacctatggtgaatttaatcaatttcagcagattacctgccctcgtgcctgttgaa

SEQ ID NO: 730830 - DNA, 548 bp, Homo sapiens
agaagttgtaaacatgggcaagagtagagttgacatggctctgtggacaggtggcaggaaagggtgagaagatagctgaatgtactgtgggtaagtggcatatgagataatcttcgtaactgccttgggtgagcccgctgagggtcccagtggaaggtgctgagtgggcaggcaggactcaagctgctgtcttcccatagtgccttgcagttcctgccctggatttctggtgggaagtccagaaggccctgggagggaaagcagcgaattaacaatatgggaagcattagaggaaatctcctccattgcctcctctcctggctcgacatgctgcctacataatacccatgtatttgccaaaggttgagccaagccagggccctttcttttcacagacttatacagctgtttcactatagagccaggctaaataaacaattctttttcatttcctgcctttctcctgaggacttggtgctgtagatgacagtttctttctttcctatagtgtcttcacagggctaaatatgggaataggcattgtgttc

SEQ ID NO: 730831 - DNA, 518 bp, Homo sapiens
atgccatagctgactcctgaggataaaactacttcagcgagagagggaacaataggccaggcgtgaaccaaaactaaggaagagggggtttcaagagggagggagtgtcaacgctatcgaaaaaatcagataagaacaaaactggccattggatttggcaagacggagatcaaacgaagagcctttcagtaaagcaatgaagacgtatgtttcccacgtgggatgagtgaaagtgagaacaggaggtagggctgtggagcctacagaacagccatttctttcaaggagtttttatagaaaggggcagagagaaggcaaagtagctgaagacaaatatgggctcaaagaaggtctgctcattttttctttcttttcgttcacaaggaggatgttgcaacatgctaggcaatgctggggataattctgtattgaggggaagtgctgatcagggaagaagggatgggatctaaggcacaagttgaggggatggcagccttacacacgagcagggacaggaa

SEQ ID NO: 730832 - DNA, 878 bp, Homo sapiens
ctgtacaatgacttaagtaatggactaggaaacctagcccaatctagctctgcctctcactgaatgggtgagtctgggaaggccgtgctctgctgagctacacaggtaactcagcttggactagggggctggcatagtgatgaagaatatagtcagagatgtgatttattatggaaaaagaatcaacaggactcaataaatagatgtatcactggcatccagctcaaatgccacgttctcagaccctccctgaccaacctaaggtaggactcccctacacctacaagttcactctttatctcatttcatatccattcaaatcctggtttcgtgttactgacggctcttatttgaaagactccaatttatttccttacgtgtttgttgtttgttttcccctaccttctttgttctgttgttgatttaaatactgtgaggactaagggagaagactaagtcaaggacgatcccccaagtttctggtttgggcaactgggtggaagatagtgccattcactgagatggggaacagatttgggactgacagagggaagatgatgagctctgttcagggtacctacctgatgtaaggtacctgtggggcattgagaaagagatattagtaaatgactggatgcgaaggaagcactgctctggattggtgacttgtagagagggtaactgaagccacagggttcatactaagaaagtagagaacaagaagactagagcacctaggatacagctctgaggaacagcaacatttgaaagaccaagaaaagccatgaaaaaccagagcaggtccgggaaagaacaggatcccttgggcagaaaagacccacagagtcctactctgcatgcatttgccacgaggattg

SEQ ID NO: 730833 - DNA, 557 bp, Homo sapiens
aaggaaacagggataatgcagggagcagaataacacagaaagacactataattaacatgctcagagaaaaaatatttcacctatgaaacaaaaccaattagaaaaaaggaagaaagaatcagataatgcacttggaaataaaaatatgacagcagagataaaaacattcacaacatttaatagtagagctggaagataaagttgaagaaatcttcaagaaagcaggaaaaatcaaagacatggatagagtggcccaggaatccacctctccacctagataataattacatcggcagaaagttcctaaagtgattattttgggagcacatgagtccatctgaacacttgtagcttctaggggaaattctgagtggtaaattgcagttaacattggtggatttcagccttcagtgaagtagcagctacccatccccacccactccatggcaggcagctgtggagacacaaccccacatttctgggtcagcttgctgcagccagggtggacaataatagccacttcctccaaatatcagggttctgattgcagatatcta

SEQ ID NO: 730834 - DNA, 732 bp, Homo sapiens
tctttttcccagagcataagttttaaattttgatgaagtctgatttaccacattttttcttttacacatttggtgttcatctaacaactttacctaacccagaccttgccagactttttctgtaaaaggtcagatagtaaatatttcagccttgctgtccctgttgcagctctgccattgtagcaatgaaagcagccatagacaatatgtaaatgaataatagctgttccaataaaactttatgaatactgcagtttgaatttcacataatttacaaattatcaattatattgttttgattattacaaaaacaggtagtggattggccatggtttgctgattcctggcctgacaaacccaagttcacaaagagtttcctctttgattttgttgtggtcgttgttccacaccttcttttttcactgtttccttaaggtagagtgtacatatttataagggtacatgtaatattttgatagattcatacagtgtgtaatgatcaaatcaggttaattagggtatccatcatctcagatgtttatccttttctttttgtattgggaagataacaaatgttctagctattttaaaatatacactaagttattgttgactctagtcaccctactgtgcaaacaaaaactaaaacgtattccttctatctgactgaatttttatgcccatgaatcaacttgtcttcatccctacctgcttcccagcccccggtaacca

SEQ ID NO: 730835 - DNA, 376 bp, Homo sapiens
  misc_feature (1)..(1): n is a, c, g, or t
  misc_feature (18)..(19): n is a, c, g, or t
  misc_feature (23)..(23): n is a, c, g, or t
ntgctagaggatcctccnngggncccttaaccctttaaggtgaaatacaccatctaaatgtaaatataaatgatacttcctcaacataagtttcttcttatactatttcaataaatctcagatctgcttttattctttctcttccatgccaccaataccacttttcttcttaattttactgttagatatgttgtttttggaagaagtatagagggaatggtagtaaagagagagtgctttaggattcaatacattcttttgaacagtaacatttagagaatctgtactccatagtggtatcactgcacatttttaagagcatcttgtatctagaacagataaggaattcatgtgacgtaagaaaaggtgtcactgt

SEQ ID NO: 730836 - DNA, 683 bp, Homo sapiens
  misc_feature (81)..(81): n is a, c, g, or t
  misc_feature (581)..(581): n is a, c, g, or t
  misc_feature (670)..(670): n is a, c, g, or t
  misc_feature (680)..(680): n is a, c, g, or t
aagagggaggtgtcgttagtcatctccacagcaatattccaggaccattaagtttttagaagaaataaagtgtgacccaanaatattatatacagccaagatacagttcaaaaattaaggcaaaaggaaatgttctccattatgaaagaaatcagagaacacaagtcctaagaacttattattgaaaaaagtgaataaaattcagccaatttaagagtaacaatgaacttactggaatagctgtggtaaaaagactaatagtgagcagctaacgaacttaaatacaaaacaaatgcctacacaactatgaggattatgtttacataagagaatgtcactacctgaaaaaatagaaatgtcttcaaaaacaaacaaccctgtcagggcgcggtggctcacacctgtaaccccagcactttggaattttctagctgttctcctcattcttaagaggtattcccttcctgcctttagatgctcaagtgttagaccatgatcctcagaacaactgcagtgtcctggcaaccatgactgcaaaagccaaaaaaatcacatgaaagtcaacaatgctctgccacagntgaattggctactgttaaattaaccaatcttagaaaagcctagcatctgatcttacatgaagtaataaatttccaattgcttcagccantctgatttgncct

SEQ ID NO: 730837 - DNA, 881 bp, Homo sapiens
agcggagttcctcatctggactcactgggagaagtgattcactagaattctcattggaagaaatgacaggaaagctccctccaatatctcaatttccaccccactcagtacctggttttatgattccacaccctcctaatccatcctgccctcctaacacatcccactctcgtaagccatcccactctcgtgcccgcgaatccctccctcttcttccatctgccaagccccttcctcctctccagaagtacgtggatttttcagttttctgccctaactgttatcccactgtggctcatacctgccctccccactaccctaccctaatactctacctgcactgctcttctgctattcattacaaaccatccatttgtcaatgctctagtcccagaactctttctggtaactcccttatcgatcaccctagccctccttctagccctactggtcaacgcttgggtcccagaactcttccctgtgattcccttatccgttctcctgttcctcctcctagccctccttgccaacgctctggtcccagaactcttttctgtgactaccctgtctgtccccctactcctcctcccagccctacttgcaaatgctgtcgtcccagagctgtttcctgggactcctctacctatgcctctacccctcctccttagccctacttctttctagtaccctgtactctaagtccccagcccccagcctgcatccccaaccagaccttatggttcacaagtctcatcttggagaaggtttccctggtcccggggcagttctggaacagttcaggatggccaggactgtggattcccagcagtctgacctcgtggacaaaggaaatgcaagacgatggcaaaccagcattcagc

SEQ ID NO: 730838 - DNA, 879 bp, Homo sapiens
  misc_feature (723)..(723): n is a, c, g, or t
  misc_feature (728)..(728): n is a, c, g, or t
  misc_feature (744)..(744): n is a, c, g, or t
  misc_feature (749)..(749): n is a, c, g, or t
  misc_feature (752)..(752): n is a, c, g, or t
  misc_feature (760)..(760): n is a, c, g, or t
  misc_feature (762)..(762): n is a, c, g, or t
  misc_feature (765)..(765): n is a, c, g, or t
  misc_feature (768)..(768): n is a, c, g, or t
  misc_feature (777)..(777): n is a, c, g, or t
  misc_feature (779)..(779): n is a, c, g, or t
  misc_feature (782)..(782): n is a, c, g, or t
  misc_feature (799)..(799): n is a, c, g, or t
  misc_feature (810)..(810): n is a, c, g, or t
  misc_feature (813)..(814): n is a, c, g, or t
  misc_feature (825)..(825): n is a, c, g, or t
  misc_feature (841)..(841): n is a, c, g, or t
  misc_feature (844)..(844): n is a, c, g, or t
  misc_feature (846)..(846): n is a, c, g, or t
tgagcggactttgcgaggaggagcgcgcgggctgcgggcggctggggcaccgcgggagcggcggcggcggctctagcagaggcggccggggcagcgaaaggttctctctccagggctggacttaataactttgaaactgtccaccggtgtcacgtcctgaacatgagcctcctcctctccttctacctgctggggttgcttgtcagtagcgggcaagctcttcttcaagtgacaatttcacttagcaaagtagagcttagtgttggagaatctaaattcttcacatgtacagcgattggtgaacctgaaagtatagattggtataatcctcaaggagagaagataatttcaacacagagggtagtagtgcaaaaggaaggtgttaggtcacggttaaccatctacaatgcaaatatagaagatgcagggatatatcgttgtcaagcaacagatgccaaaggacaaacacaagaagctacagtagttttggaaatttaccaaaaactcactttcagagaagtggtatctccacaagaattaaaacaaggagaagatgcagaagtggtttgccgagttagcagttcacctgcacctgctgtcagctggttgtatcataatgaggaagtcaccactatttccgacaatcggttcgctatgttagcaaacaataacctgcagattctcaacatcaataaaagtgatgaaggtatatacagatgtgangaacnagtggcggccgggganaaatngantcccggananccntgnatgtcaggnangcngaatacttgccctgttnatgctccttancanngtttttaaggnaccgtgacccaaacanttntntaaccttttccgaaaaaaccccgggccgaagga

SEQ ID NO: 730839 - DNA, 850 bp, Homo sapiens
  misc_feature (835)..(835): n is a, c, g, or t
  misc_feature (837)..(838): n is a, c, g, or t
  misc_feature (841)..(841): n is a, c, g, or t
tgagcggactttgcgaggaggagcgcgcgggctgcgggcggctggggcaccgcgggagcggcggcggcggctctagcagaggcggccggggcagcgaaaggttctctctccagggctggacttaataactttgaaactgtccaccggtgtcacgtcctgaacatgagcctcctcctctccttctacctgctggggttgcttgtcagtagcgggcaagctcttcttcaagtgacaatttcacttagcaaagtagagcttagtgttggagaatctaaattcttcacatgtacagcgattggtgaacctgaaagtatagattggtataatcctcaaggagagaagataatttcaacacagagggtagtagtgcaaaaggaaggtgttaggtcacggttaaccatctacaatgcaaatatagaagatgcagggatatatcgttgtcaagcaacagatgccaaaggacaaacacaagaagctacagtagttttggaaatttaccaaaaactcactttcagagaagtggtatctccacaagaattaaaacaaggagaagatgcagaagtggtttgccgagttagcagttcacctgcacctgctgtcagctggttgtatcataatgaggaagtcaccactatttccgacaatcggttcgctatgttagcaaacaataacctgcagattctcaacatcaataaaagtgatgaaggtatatacagatgtgaaggaagagtggaggccaggggagaaattgacttccgtgatatcattgttattgttaatggtaagcagtaaataatttgtacatgttttatggattcattttagcaatgtaacntnntgnatggcaacc

SEQ ID NO: 730840 - DNA, 713 bp, Homo sapiens
cgctcgtgctgttgctggaaagcgagctcgctgtagaccggccgcgacaccatgtagctgcagctgtactcggggagctgcggcggctccgacctgccgcctggcgctgccatgacctgcgagccagaggacagcgaggagggaggacacgcggtaagcgaggacgatcggaggggaagagcgaggaacagaaagaacgggatcacctgttagctgcagccaggcccccctgcaccgcgagtctggtccgcgtcctgcagccctcggcgctcgcgacaagcgccccacggcgcgcacggccagcctgcaggggggcacctgagaaccttcgggtctcgtggcctgcacccgctgcccggggttccccaaacttgaagcgagtaagcccctgctctgggggcttcccgagttccacccagtcccctatggcccgcagccagggcgctgtccgcgttctgaaatctcccccaaaccgaggggctggggcaggggccaaaggcgcttgcaaggctggaaggggacactgagattccctccctccccgcacctgacccgggacgcagctccaggtgcgcactggaggagaggtgcagacccccgggccaggcgtggaaccgtcagggcgcgctccgcgggtccccaagaggcggacgctgcaggcacattccagcagctgtcgcagccctctcgggggcagaactttcagcttattg

SEQ ID NO: 730841 - DNA, 687 bp, Homo sapiens
cgctcgtgctgttgctggaaagcgagctcgctgtagaccggccgcgacaccatgtagctgcagctgtactcggggagctgcggcggctccgacctgccgcctggcgctgccatgacctgcgagccagaggacagcgaggagggaggacacgcgggaaggaataaactggactacatggaaatcaagactagaagagagggaggaggagctggagctatcctacctcatcagtgttttgtcttctgttgggatgaactttgttaaaactaatgcatggttaagatgaaaggcagaaggaagggtttgataaaccagaacattctcgcctgattgttagtgttctgaagtaaatacagaagaggctccaaaatacagacctctgtacatcaaccttccgtaatccacctgccttgcatatgcagaccatgacaattctacgagctcctggaaacagaactcagaacgcctccccagagaaccctgatgcaaattctctgaaatggtagtcagcatgtgcgttttcctgagaagtgaatgagtcaacagctttcaacagatcttcaaaggcttacttcacccaatgaagttaagaaccactaaagaagaaacctaaaaggaaaatccaggtcatgaactttgcaatttttattcacatacagagaagaggggaggaatctcttgtgtatg

SEQ ID NO: 730842 - DNA, 720 bp, Homo sapiens
agccatgtttccaaggaggtctgtacaaaaagccagacttctgctggcagttactgagagagataggctttccatccatggcagccatttactttgctctgggagacgttgtaatagaaaaggcacaactggggtatttattcattccccccgttcctctagtgtttggtggcgttgccgttgcaagtgcgcagggctaaaatgaactggttatcttaggatcatggaaaacctggaatcaaggctcaagaatgccccctattttcgttgtgagaagggaaccgattccatccctctatgccggaagtgtgagacgtgtgtcttagcctggaagatcttctctaccaaagagtggttctgcaggatcaatgacatatcacagaggaggtttctagttggcattctgaagcagttaaatagcttatatttgttacactatttccaaaatatccttcagaccacacagggaaaggatttcatctataacaggtcccggatcaacctcagcaagaaacgaggggaacagttgtgaagtcctccttgaaccaaatgttggataaaacagtagaacagaagatgaaagagatcttgtactggtttgcgaacagcacccagtggaccaaggcgaattatactctcttactgctgcagatgtgcaaccccaaattactgctcactgctgccaatgtgatcagagtcctgtttctgagagaggagaac

SEQ ID NO: 730843 - DNA, 863 bp, Homo sapiens
agggagaagtcctgtagggagatgggcagttaccttctctccgtctctctctcggggactctatttgtggctggtggagctgtcttaaacgaagagaaccatgagcaatgaatcttgtttaccttattacacagcccacagctactcttcaatgagtgcgttcaaaacctccatgggggacctgcaacgacaattgtacaacagaggagagtacaacattttcaagtatgcaccaatgttcgagagtaattttattcagataaacaaaaagggagaggtgattgatgtacacaaccgtgtccgaatggtgacagtgggcatcgtctgcaccagccccatcctcccactgcctgacgtcatggttctggcccaaccaactaaaatctgtgaacagcatgtcagatggggccggtttgccaaggggagaggtcgcaggcccgtcaagactctagagctcacgagactgcttcccttgaaatttgtgaagatctccatccacgatcatgagaaacagcagctgcgcctgaaactcgccactggccgtactttttatctgcagttgtgtccctcttctgacacacgggaagatctcttttgctattgggaaaaacttgtctatctcctgaggccaccagtagagagttactgcagtaccccaacacttctatctggggacgcaccacccgaagacaacaaaagcctagtggctgcagagctccacagagaagggcgatcacgagtggaggaccgggctcaacaaggcttgctgatgtatctggcggcaccgtcttctgcatatgcgggggaaagggaacccaatgccccccggaacagggaagggggtctccacccgaacctcaggg

SEQ ID NO: 730844 - DNA, 810 bp, Homo sapiens
agcggagtagcgggccgtcggttgggcgcagacaggccgcagaagatggagagatggagccaccccaagagacaaataggcctttcagcacacttgataaccgcagcgggcaggtccaagtcctgtccgccaccccgctattgcagaggaatccctacagcagcccggatatcatgcacattaaagggtcggaggcttcttcggtcccttacgccctgaaccagggcacgacggccctgcctaagaacaagaaccaggagggcaccgggcaccggctgctgaacatgctgagaaaaactcttaaagagtctgatagtgaagaactggaaataacacaggagacaccaaatttggtgccatttggggatgtggttggctgcctgggcattcatataaagaactgcagacattttatgcctaagatcagtttacaacattatgctaatttattcattcgcatctctataaacaaagctgtgaaatgtacaaaaatgtgtagcttgctatccaaaaacgatgagaagaacactgtaattaagttcgatgaagtgaagtatttttctgtacaggttcccagacgttatgatgataagcggaataatattttattggaactcatacaatatgacaatagagaaaaacgtgctttcttgttagggagtgttcagatacatctttatgaggtaattcagaaagggtgcttcattgaagaggtccaagtgttgcatggaaacatatttgtctgcaggctggaggtggaatttatgttctcctatggaaactttggttatggattttcacatcaggtta

SEQ ID NO: 730845 - DNA, 509 bp, Homo sapiens
  misc_feature (29)..(29): n is a, c, g, or t
  misc_feature (31)..(31): n is a, c, g, or t
  misc_feature (410)..(410): n is a, c, g, or t
  misc_feature (416)..(416): n is a, c, g, or t
  misc_feature (445)..(445): n is a, c, g, or t
  misc_feature (463)..(463): n is a, c, g, or t
tggtgatctagaggtctcggctcccactngntgcatatggaaccaaactgactacagaatatttgagcttaacaaacggttcagaactggacagaggagtgtgacaatctctggtgggatgcattcacgactgagttctttgaggatgatgccatgttgaccatcactttctgcctggaggatggaccaaagagatataccattggccggaccctgatcccacgctacttccgcagcatctttgaggggggtgctacggagctgtactatgttcttaagcaccccaaggaggcattccacagcaactttgtgtccctcgactgtgaccagggcagcatggtgacccagcatggcaagcccatgttcacccaggtcagcaacccagctggatgtggaacaccatggcaccngggttngattcccatcctctctcccagtgtatacncacagctgttccccaggnaggcataatgtgaactgtcaaaataagaagggcgggtaggcatgtt

SEQ ID NO: 730846 - DNA, 1206 bp, Homo sapiens
  misc_feature (440)..(440): n is a, c, g, or t
  misc_feature (468)..(469): n is a, c, g, or t
  misc_feature (505)..(506): n is a, c, g, or t
  misc_feature (514)..(514): n is a, c, g, or t
  misc_feature (527)..(527): n is a, c, g, or t
  misc_feature (815)..(815): n is a, c, g, or t
aggatccttgctccacttggttgcatatgatgtgggccaactcccaatgtatccgctacatacctggagccagggattgggaggcacacaccatatggaaccaaactgactacagaatatttgagcttaacaaacggttcagaactggacagaggagtgtgacaatctctggtgggatgcattcacgactgagttctttgaggatgatgccatgttgaccatcactttctgcctggaggatggaccaaagagatataccattggccggaccctgatcccacgctacttccgcagcatctttgaggggggtgctacggagctgtactatgttcttaagcaccccaaggaggcattccacagcaactttgtgtccctcgactgtgaccagggcagcatggtgacccagcatggcaagcccatgttcacccaggtgtgtgtgnagggccggttgtacctggagttcatgtnngacgacatgatgcggataaagacgtggcacttcagnntccggcancaccgagagctcntccctcgcgtagcatccttgccatgcgtgcccaagatccccagatgttggatcgagctctccagataaacatcgactcggatgtgggctgtccgaattccactctcaactacctccgactctgtgtgatactcgagcccatgcaagagctcatgtcacgccatcaagagcctacagcctcagcccccgcgactggctcgagacctggcttttcccgaagtggcagcgcatggtagcaccctgcggagccaacgtcagcagccagcaaaggcggaaacggacgattccnggggcagaccatgagctctggtggggcaactcaacaaaggaccagtcagaaaagagcccgtaaacatttggcccttcagcccgattttgatgtggggaaacccctgtatggcggggagaccgtgagcaacgacaaagggcgttcacccggtgggagaacacccaagttggttgacaacagcgctgtgaaagagaggagcattaaaaacccctcatgtggggcaaccctgagaagaaagcggctacgaatagaacagggcgacctaggtcccaagcgggggggaaagcgatagccaaacatcacgaggagaggaacatagatctcaccgcaggacgaacagatccgggacacctcgacgagagaacgcactgggtcacacggtaagatgagc

SEQ ID NO: 730847 - DNA, 736 bp, Homo sapiens; identical to SEQ ID NO: 728702

SEQ ID NO: 730848 - DNA, 378 bp, Homo sapiens
  misc_feature (13)..(13): n is a, c, g, or t
  misc_feature (15)..(15): n is a, c, g, or t
acatacctacttnantattatataacttttaatatacagatggtcccgacctatgatggttcaacttatgatttttcaagtttactatgagtttagtgggatatgaaatgcattttctttctttttttttttggagacagagtctcgctccgttgcccaggctggagtgcagtggcaccatcttggctcactgcaacctctgcctaccgggttcaagtgattctcctgcctcagcctcccgagggcagctggattacagccatgagcccttgtgtcccgcctaaaaagttgtttaaaagaagtttggactctgaagcctaacagaccagggtttgaactctggttcctgtcattcactacctgtgtgactccagacaa

SEQ ID NO: 730849 - DNA, 480 bp, Homo sapiens; identical to SEQ ID NO: 393738

SEQ ID NO: 730850 - DNA, 1017 bp, Homo sapiens; identical to SEQ ID NO: 338967

SEQ ID NO: 730851 - DNA, 524 bp, Homo sapiens
agcctggaatgtcacactaccagcgcacctcctgtccagacagacatcgtcaacaccagcagtatttctgatcttgagaaccaagtgttgcagatggagaaggctctgtccttgggcagcctggagcctaacctcgcaggagaaatgatcaaccaagtcagcagactccttcattccccgcctgacatgctggcccctctggctcaaagattgctgaaagtagtggatgacattggcctacagctgaacttttcaaacacgactataagtctaacctccccttctttggctctggctgtgatcagagtgaatgccagtagtttcaacacaactacccttgtggcccaagaccctgcaaatcttcaggtttctctggaaacccaagctcctgagaacagtattggcacaattactcttccttcatcgctgatgaataatttaccagctcatgacatggagctagcttccagggttcagttcaatttttttgaaacacctgctttggttcaggatccttccctgga

SEQ ID NO: 730852 - DNA, 604 bp, Homo sapiens
gtgaaaggaggcgcttcggctgctggatgtgtggaccctggagtgaaaggaggcgcttcggctgctggatgtgtggaccctggagagaaaggaggcgcttcggctgctggatgtgtggaccctggagtgaaaggaggcgcttcggctgctggatgtgtggaccctggattgaaaggaggcgcttcggctgctggatgtgtggaccctggagtgaaaagaggcgcttcggctgctggatgtgtggaccctggagtgaaaggaggcgcttcggctgctggatgtgtggaccctggagtgaaaggaggcgcttcggctgctggatgcctggaccctggagtgaaaggaggcactttggctgtgcagacctgctccattctcctccgcgtccacagcgcagaagaacaccagcttccatttctaaaaccattatttaaaagtcaagttcttttggtataatgtgcctaatgtgtttggctttctctaggtcaccatttaacatcttactctgcaacactacggtcctagttaagaccaaattcacagccaccaggtatctttacaaattaaccaagattggccaggcgcagtggctcatgcctgtaat

SEQ ID NO: 730853 - DNA, 343 bp, Homo sapiens; identical to SEQ ID NO: 118740

SEQ ID NO: 730854 - DNA, 168 bp, Homo sapiens; identical to SEQ ID NO: 518077
  misc_feature (145)..(145): n is a, c, g, or t

SEQ ID NO: 730855 - DNA, 608 bp, Homo sapiens
  misc_feature (324)..(329): n is a, c, g, or t
  misc_feature (331)..(331): n is a, c, g, or t
  misc_feature (585)..(585): n is a, c, g, or t
catactgatgatatctttgtaaaagaacactgacatctcacgtaattctcattgtatcacacttccttcaatcccgcccatgtttaattggtcgggaccaaatattcctcgagccttccattagggcatatatacttattcatgatgctgttaccactcccagcctgctgttaccactcccagttacattattttaccgtacggtgattccttctgaaccccactcttatttgttggcctactacatgccactcaagagggattcaaagatgagtgcgtggtcccggaagatgcagatgtggggtaccacagagaaagtgattnnnnnncnctagcggggaacaatcacttagttcaagtgattgttcaagtgattgttcaagtgattgttcaagtgattgttcaagtgattgttcaagtgattgttcaagtgattgttcaagtgattgttcaagtgatggttcaagtgattgttcaagtgattgttcaagtgattgttcaagtgattgttcaagtgattgttcaagtgattgttcaagtgattgttcaagtgattgttcaagtgattgttcaagtgattgttcnggatcctcagagtcaccgcagca

SEQ ID NO: 730856 - DNA, 524 bp, Homo sapiens
  misc_feature (324)..(329): n is a, c, g, or t
  misc_feature (331)..(331): n is a, c, g, or t
  misc_feature (492)..(492): n is a, c, g, or t
  misc_feature (512)..(512): n is a, c, g, or t
catactgatgatatctttgtaaaagaacactgacatctcacgtaattctcattgtatcacacttccttcaatcccgcccatgtttaattggtcgggaccaaatattcctcgagccttccattagggcatatatacttattcatgatgctgttaccactcccagcctgctgttaccactcccagttacattattttaccgtacggtgattccttctgaaccccactcttatttgttggcctactacatgccactcaagagggattcaaagatgagtgcgtggtcccggaagatgcagatgtggggtaccacagagaaagtgattnnnnnncnctagcggggaacaatcacttagttcaagtgattgttcaagtgattgttcaagtgattgttcaagtgattgttcaagtgattgttcaagtgattgttcaagtgattgttcaagtgattgttcaagtgatggttcaagtgattgttcaagtgattgttccccnctgggatccttagatcaccncagcacagcatg

SEQ ID NO: 730857 - DNA, 929 bp, Homo sapiens
  misc_feature (324)..(329): n is a, c, g, or t
  misc_feature (331)..(331): n is a, c, g, or t
catactgatgatatctttgtaaaagaacactgacatctcacgtaattctcattgtatcacacttccttcaatcccgcccatgtttaattggtcgggaccaaatattcctcgagccttccattagggcatatatacttattcatgatgctgttaccactcccagcctgctgttaccactcccagttacattattttaccgtacggtgattccttctgaaccccactcttatttgttggcctactacatgccactcaagagggattcaaagatgagtgcgtggtcccggaagatgcagatgtggggtaccacagagaaagtgattnnnnnncnctagcggggaacaatcacttagttcaagtgattgttcaagtgattgttcaagtgattgttcaagtgattgttcaagtgattgttcaagtgattgttcaagtgattgttcaagtgattgtttccccgctagcggggaacaatcacttatccaaatgtcactatgcatcaatgagatgcctaagtgtgtaacagaacaattaaactcagccgtgtctggtgtatcaccagctttcaatctcatgaaatagtcaattcccacatgatttacattttgccatcatgaagggatgtctgtgaaagcagaagaaactatgatctaatgtgctagcggggtgtgtacctaactttcaaatagggaacacgtcatgtgggcttccgctggttgctccttgcccagaccccaaatagtagggaccggctgacaaagaggtgggcactgagggatgtgtggcctgtacccgacctccaaggtcacggcagagcccacgctcaaaggggtctccaaagaggcaatgagctgggacgctcccatggtgccaggaggaagcagctatttctcccaggacagggcagacttcatgctatcactcacgagagt

SEQ ID NO: 730858 - DNA, 861 bp, Homo sapiens
tagctcccttcttgacagatttctgctcccctgaggcaactacttgttggaggccaaaagaatgagggtcatgatcaactcagtataccactggaggttatatgagtaagcagcaaactgtttttcataaatgcagaatgttggcaaactgacagactgcgtatgccacccagaaggaatgctgaaggcagtcatgcccaaagcacagtgtttcttgtgattaggtacatctgaagcctgttagtaacaatatgaacctgtgatcaattaagcagctgaccaatccttacctccttctccctgctcttgttacccaataaatatgaagggctgtggaagctcaggggctgcctttgctcactagaagcagggagctcttttcttcttcccctggcccttcctttaaaacagttccttttgtttttttgttatttccatgtttgtcccttccttcagtctcgtaatgacggtctcaagtagtaacagtagtaactgttgtagtgaaggtctcaagtagtaactgtggcaatgtgccacaagtggcgcccgaacagggactatcagtgacaaacagagacctgaagagacctgaagggacctgaggaggcctacagggacacatagagataagtagggataaatagagatagagacagatagggaaagatagggacttgcaccaacttggaggaactaacagggaccgtagagacagacagggacagacagggatagataaagactagcaaatactagcagagactagcaaagactagcagagaccagcagaagctagcagaaacttgcagggacagacagggacagatagagacagggtcctataggaactcgtcagaggtg

SEQ ID NO: 730859 - DNA, 230 bp, Homo sapiens
gactcgtattatctgtttaaaccacacagctaccctgtgaggcaatatctatcttaagtccttttttcacagatgaggaaattgaggctcagagagatgacatctcttgtccaaagtcgtagctaataaatagtaaactggaaaatggaggcgcagccccagggctgcctcccactaaagcccattctcgcaactctttcactgtcgactctgttgctttctctttccca

SEQ ID NO: 730860 - DNA, 486 bp, Homo sapiens
aatcaggaagagagtaaacggtctgcaggagaaatggggagaaagattcagagagggaaaacaattaatatagcgtaacaagagagcaaaagagcaaagggggaggagaaactaggaaaatcatatatgggctctcacctatttccaaagctgggctaatgtcctttggcttgtgtctgaataaggcaccaattttaagctgctaatgaaaaaaaaagaaaaagagaaagaagcaggcccaggctgggcgcagtggctcatgcctgtaatcccagcacttggggaggccaaggtgggcagatcacctgaggtcaggagttcgagaccagcctgctcgacatggcgaaaccctgtctctactaaaaatgcaaaaaaagtagctgggcgtggtggcggacacctgtaatcccagctacttgggaggctgagggaggagaatcagttgaacccaggaggtggaggttgcaatgagccaagatcgcgcca

SEQ ID NO: 730861 - DNA, 610 bp, Homo sapiens
gttcttatctccccaccatcccatcctggggccctttcagtgactcctgatggcaagtggctgttctcattgtcctggcttccccttgagactggggatgaggaaaatcaaacagcaaagaccatatcctgggtgtcctgagtgtttacagcaggccatgtactagggattaacataaaaacaacaataacaaatctcatgaaaatttcacaaatggaagtgaaacaatatcacctctattatacagatgtgaaaagagaggcccgatgaggtctagcaacttgccctaaatcatatccctagcagagcagatggagaggcaggattcaaacccagaattcctttttttttctttgagacagagtcttgctctgtcaccaggctggagtgcggtggcataatctgggctactgcaagctccacctcccaggttcacaccattctcttgcctcagccttctgagtagctgggactacaggcacacgccaccacgctgggctaatgttttggtatttttagtagagacagggtttcaccgtgttaaccaggatggtctctatctcctgacgtcatgatccgcctgagtacaacctgccggtggggggatcct

SEQ ID NO: 730862 - DNA, 924 bp, Homo sapiens
cagcacagctgagagccatgctcaggaagtttctggatcctaggctcagctccacagaggagaacacgcaggcagcagagaccatggggcccctctcagcccctccctgcacacagcgcatcacctggaaggggctcctgctcacagcattacttttaaacttctggaacttgcctaccactgcccaagtcacgattgaagccgagccaaccaaagtttccaaggggaaggacgttcttctacttgtccacaatttgccccagaatcttgctggctacatctggtacaaagggcaaatgaaggacctctaccattacattacatcatacgtagtagatggtcaaataattatatatgggcctgcatacagtggacgagaaacagtatattccaatgcatccctgctgatccagaatgtcacccgggaggacgcaggatcctacaccttacacatcgtaaagcgaggtgatgggactagaggagaaactggacatttcaccttcaccttatacctggagactcccaagccctccatctccagcagcaacttataccccagggaggacatggaggctgtgagcttaacctgtgatcctgagactccggacgcaagctacctgtggtggatgaatggtcagagcctccctatttttcattttttgcagttgtccaaaaacaaaaggaccctctttctatttggtgtcacaaagtacactgcaggaccctatgaatgtgaatacggaaccagtgagtgccagccgcagtgaccagtcacctgaatctcctcccgaagctgccaagccctacatcacatcaacacttaaacccagggagataaggatgtcttagcttcactgtgaactaagagtgagactacactacatttggtggctaatggtcagagctcccggtttttccagggta

SEQ ID NO: 730863 - DNA, 1751 bp, Homo sapiens
ggatagatgggtaagctgaggcccaaaagggggctgagaccacctcccagtttccccagtgaggtggcgcctgagccacggccaggcccggcctccttccacccggccctgctgtgcgcgcggcgggtgctgacctggcgaggccggacaggggaccaggtcggggtgaccgtcactgacacctggacagtcctcgttgtgttcggggtgggaagcccacggtgagtctggggacccaagatcttattttcctttctgtcacccccgcttggttttggattccatgacagctggacccggcttctgcgtgatcttcagagggaaggcaccaggagtggactgcgggacacccagagtggactgcaggaggacacagaagctaggctgaagcgggaggaagctgggaaccctgcacggggccactgcgcactgggactcgttactggtccccaagactcagggagaatgggtgagttgaactggcaaggaggagcccactgtcattacgggcctctggaatcccggcaggaggagattaaccacatggacattcgaggtggcagagagagctgcctagagaaggtgcgggggcagcagccagctgaggcagagcccggagggtttggtgcaggagcgtctgtagtggagggccatcccccaggctcaaattcctcccataggagattttagccctagtggagctgttgtatgtgatctttgtggggtggtcttgcccatcagatggggccagtctgacccgagcatgccttggtctgctggcctctcccagggccccggcctggccacgcctgcttgcagggcagctctgggtgccctgggggcctgcagcatagcttctgcactggcagaccatgcctgattggtggagagctccagcagggcagcccccacatccctgtgccagcctgcccactgcctcccacactgtagcttctccagggcccactgtcaccccccatcttgcttttgccagtgcatgtctgtgcaggtgggttttgctttccttgcccgccagtgtacctgtgtgtttgcaccctgccctgccattgctgtggcaggagtaccgtttgcccaacgccccctgctgactgccattgcagttggagccttggcagacacagagccagccagccccacctcccttgcaccccactcttgcaccaacactgttgcgggagtgaaactaggcacggaatagggaccaccctgcctgtggggcacaaagaatgccacaggcctgggcctgccggtgctccacctccatcccaacaccaccgccagcatggctgttgccagcagggggccctgccccccaggtgctttcgtctgccactgtggtgaacacctgcacagaggcaggcaccccagcacttgctagcaccctgccacagccgatgaacgtgcaccctgtgctgctgccaccacggctgctggcatgtgcaagcaagaatggatcccgctgccactgcactgcaaaatgcactggctggcaccacctatcagagtgtagtgaccggtagtgaggagcaccttgatccctcagtgcagttgattcctaacctccgggagccagagaacaaagttggtgcctgatacaagtaccccagttagagcacacagtctgggagttgggaactgagccttggccccctaaaatcatccagaaacaaagccagtcagctgaatccaacttatactacaatcaaatcctcaaggtcatcaaataggat

SEQ ID NO: 730864 - DNA, 840 bp, Homo sapiens
ggatagatgggtaagctgaggcccaaaagggggctgagaccacctcccagtttccccagtgaggtggcgcctgagccacggccaggcccggcctccttccacccggccctgctgtgcgcgcggcgggtgctgacctggcgaggccggacaggggaccaggtcggggtgaccgtcactgacacctggacagtcctcgttgtgttcggggtgggaagcccacggtgagatcttcagagggaaggcaccaggagtggactgcgggacacccagagtggactgcaggaggacacagaagctaggctgaagcgggaggaagctgggaaccctgcacggggccactgcgcactgggactcgttactggtccccaagactcagggagaatggggaagagtgtatcacagccattgggaactttcttcacccatcaaagcctcagggctgaagcatcctgaacaagaactcaggagagtgaaagaaacagttacctgtcggctgcagctggtacagctccccaccccgtacagagaccgaagcgtctctctctccccatcacccagcaccagactctgccccgcgactcagcctgcacctgcttcctggctccatccagccttccagcctcactagatcatcatgggccactggccaacacacaggggcagtgccgagccaggccgtggtcacacatggctgggttagtacttgaaaacattgtttttcactggcctcaccgtaatggacctgccccattttctgtggttgattttggatctgcaccagtgtgtaaattatggggtgtcccccgatattggataaagggtaaacagttttagccaaaa

SEQ ID NO: 730865 - DNA, 955 bp, Homo sapiens
  misc_feature (7)..(7): n is a, c, g, or t
  misc_feature (91)..(92): n is a, c, g, or t
  misc_feature (278)..(278): n is a, c, g, or t
agcgggntgttcgcctgcgtcgctccgggagctgccgacggacggagcgcccccggccccgccgggccggacgaccgccagcgccatgccnntctccaaagccaaagcatgaagtggctccggcgaggagagtcccgactgagcgccacaagaaccacatggccacaggtgcgtgagacccgagactgtaccgcagagctgagcgccaagagcacagccgagcgggtttcacgactggacgaagtacatccagacaggcgatggacaacccgggacancccgtaaatcacagagcgagcggacatgcgtggagggcagacacgcaggagttacctagaaaaggcttcgcaggactctactaacgaaacccccatcaatcagaaaggaacccgcgcagcggcagcgcacaacaaaagccccacagaacgactgagccacccaggacccagacacctcacaacccaccgacacaacccaagcacaggggacggcgcaactaagcactgggcacccccgaactacgctgaccgcacaacctcacacgggatggcaaacacgcgggccagagacgagataccaggtgcgccctaatggagctccccacaccgaagcatgtcacacgagccgaagcacaaacgaccagccagaccaaacagacgaaaacacaccgcacacgcggagagagcaccaaggaacaagaccggcgcacggagacgacctgcggcaggggcgcgaacgtacacgcacgaccgacgccgacacagcaactggaacgagaagagcggagcaagcaagagcagcacaatcagaagcgtacacagctggcctcaccacgacgccaacccagctgtaagaccaccacaagacgagcacatcggcacatagaccagagaaactgatgccaaaggccccgcgacgagcggccccaacggtgccgcagcaacgcccggacgcg

SEQ ID NO: 730866 - DNA, 780 bp, Homo sapiens
  misc_feature (7)..(7): n is a, c, g, or t
agcgggntgttcgcctgcgtcgctccgggagctgccgacggacggagcgcccccggccccgccgaggcgctacgacgcgcaggaacgcactgtcctagagggtacctgcaagttggtattgatcttggaaccacctactctggtgtgggtgtatttccacgccaaggtagaaacgtcgcagcataattgccaattgatcagggtaaatgcagaaccacatcctagatgctatgtcgctcgtttacggacactgaacggttgatcggtgatcgccgcaaaggaatcatagttgcaagtggatgcgcccaacaagcgagagtttcgtgatgtcaagaagtgctgagttgtgacgtgcgaggatgttgatgagtgcatgtctgatccaggtcgtgactatgaatactattggcacctttatggttgggtgaactgatgactggcaggtcccaaggtccaaggtaggaactacaaggggagagaccaaacagcttctatccagaggacggtgtctactattggttctgacaaagatgaaggacatcttgcaggaagcctaccttgggaagactgtgaccaatgctgtggtcacagtggcagcttacttgaatgactctcagcgtcaggctaccaaagatgctggaatgtacttgcttggtctcgaagtagtacgtgtagagattgattaactgagcgcaacatgcatgcatgcatagttgcgttacggcttagacaaatcaggttggagcagaaagaaatgtgctcatcttgtgatctgggagg

SEQ ID NO: 730867 - DNA, 1053 bp, Homo sapiens
  misc_feature (7)..(7): n is a, c, g, or t
  misc_feature (1053)..(1053): n is a, c, g, or t
agcgggntgttcgcctgcgtcgctccgggagctgccgacggacggagcgcccccggccccgccgaggccagcacgcccggcggaggcgatagaccctcggtctacgagcactccaccaaggcccctggacggttggcgctatgctccagggcgagggtagataggtgttcgcgagagacatcggactcgccctactagactagtcagaattggcccaatggctgggtagatgtcacgtacgcctagtcagcgccgcgacgctgttgactctgccaaaggaaacgacaggccgcacgacgaggctgtgaagcgtctcgcgaaccgtaccgattcattacccaaggaccaatgtggccgctagggtaccaagcaccggccgagctggctagttacccatgctaatagtaacacagctggggcgttggtgttgggccgaggtcgaactgaagtcagatctctggcatagggctagatgcttcgagacactcattgctgagtctccagttggctccaaggtgatgccgagactgcaaggcgtactgaccaaagtcacaagaagcactcgcacccaaccaagggacacaggacacattcatgtccacggaatgacacccttgtaagagtgtcgtgctgtacttcaatctttgggtacaaccgggacactaatccgtcggcgcggaacttacggagtggctcgcagacgaagcgcaaacgtagtacgatccggattgacttacacgctttgcgccctcaccgtaacttgcatttacttgctcgtggagaggaaagccaagccaccgatcagagggaattgcatcttgggcgaagtcacagaccaagaaaccggtacccaaaggaggttccggtagtcggtaggggcagcgtcgtggtgacacataacgctgtctctagtgaggccttgggaaccgtgagacgggtttcagccaacattcttagcggcatcaaattttgacccgaaccaagttgtcccaatctaacagtctccctccaccgggggtgttacgttgcattggtttccattgggaccctacn

SEQ ID NO: 730868 - DNA, 473 bp, Homo sapiens
gtttggagctgttcgggatgtttctgtatatttcacatgccctgtatccagaagtgggctaaagacagccagtttcttgtatcttctgtgactgatgatgattttggaaagaaagattgtccctggccttgtccaaaatgtaggtttgaatacaaacgatctgaaacacctagtaggtactattgctattgtggaaaagtagaagatccacctttagatccgtggcttgtgcctcattcatgtggccaagtatgtgagcgtgaatttaaacctccttgtggccataaatgtttactcctctgtcatccaggtccctgccctccttgtccaaagatggtcacaactacttgttactgtaagaaagcaaaacctatccctcgtaggtgcagtgccaaggaatggtcttgtcagctgccatgtggacagaagttgctttgtgggcaacataagtgtgaaaatccttgtcatgcagg

SEQ ID NO: 730869 - DNA, 890 bp, Homo sapiens
agtcgccggaacgcgggcgggggcttctgggagttgtagtctgttgggggcgtgcgcagtcgggatggaagcttcctggcgccaggtggccggtggccgaggccgatcccggggacgggccactgccgccccctcaggaaatggagtccatctccgcggcgccggaggagggcgagagaaggggtcggtgggcgcagttccttctggcaccagtcccggaggagtcgcgaccacggcggctgcagggagcaggcacagccccgcaggatcccaagccctgcagactaccgcagccagcgagctaatgtctcagaaaaaatttgaagaaatcaagaaagctaaccaagctgcagccagaaaacttgttgaagaacagtttagctcttcatctgaagaaggagatgaagattttgaaggaaaacagggaaaaatacttgcaaatacgtttataacatacactactcagacagatggagatacacgtgaattagagcgaacaaaacaatatgtaaatgaagcttttcaagcaggggctatgacatgcctaatttgtattgcttcggtgaagagaaaccaagcagtttggagctgttcgggatgtttctgtatatttcacatgccctgtatccagaagtgggctaaagacagccagtttcttgtatcttctgtgactgatgatgattttggaaagaaagattgtccctggccttgtccaaaatgtaggtttgaatacaaacgatctgaaacacctagtaggtactattgctattgtggaaaagtagaagatccacctttagatccgtggcttgtgcctcattcatgtggccaagtatgtgagcgtgaatttaaacctccttgtggccataaatgtttactcctctgtcatccag

SEQ ID NO: 730870 - DNA, 886 bp, Homo sapiens
tgtccaccatgggtgaattatgaatcagtagctatgccaggcctcagctgggccacatctggagaactggggtgagggcacaacatcacaaaatatctggccccagtctggtcactcatcccttttagggcaacaaggaaactatcctgtggcctgagagcacaatacctgagacaaaggccagcagaaacatttgtctgccctcaccctttctgccccagcttccacctgctccccatctgcccacccactaaagcccatgtggcatgccatctctcgaacatccaggatgtcccagagtggatgtccatcaggtctgctggcagacaaaaatatctcttcaagtgccactcgagtgatagtgaagactgcaggcaaccagaaagactttatggtagctgatgacatctcggtaaggcagttcaaggagatgctattggctcacttccaatgccagatggaccaactagtgctggtcttcatgggttgccttctcaaagaccatgacacactgagccagaggggcatcatggatggccacaccatctacttggtcatcaagtccaagcagggctccagatctctagcccattccttccgggacctgccaacgaatgatccctgccaccgggacagaaacaccaaaggaaacagcagcagagtgcaccaaccaactggtatgaatcaagctccagtggaactggcccactttgtggggtctgatgcacccaaagtgcatacccaaaacttggaagtgagccacccagagtgcaaagcacagatgctggagaatcctagcatccagcggcttctgtccaacatggagttcatgtggcagttcatttcagaacatctagacacgcaacaattgatgcagcagaaccca

SEQ ID NO: 730871 - DNA, 598 bp, Homo sapiens
gtgccctgcgtgcaggtttatagataacccctgccagacctgctacaaccaagaccttatggtccaggtctcagtttggagaagatttagctgtctaccacttcttgtgtagtgttcctgtgaagttttatttttggttgcaagtatctggaaaacagatgcagatgtttttgtggatgttgttgagacttttgagacttctgtttctaaggtacacatgatgggacccaaactctcctggagagttccattcacttcctgaaacgtgcacctgtttcaggtgcatgtttattcagtgtgcatggatatttaagatttgctggagcaggctgggcggggtggctcacccctgtggtcccgacactttgggaggccaaggcgggtggatcacctgaggtcagggagtttgagaccagcccggccaacagagtgaaaccccgtctctactaaaaatacaaaaattggacgacgcccaccatcatgccccggctggtgcgtcggtataacacagtagagacggggtctcaccgtgttggccgggatggtctcgatctcctgagctcgtgagtccgcacgcgtcgggctccaaggtgtctgg

SEQ ID NO: 730872 - DNA, 966 bp, Homo sapiens
ccgtattattctgaggacactgtggtaatcaagaactatccataactaatgtataaataactgcttgcttatttctacaataatccaactcaaattatatatacacagcaaaaagcttatgatagaaggcttgcacagaaatctggaggcagtatcacctaacgaccaaacctggaccacccaaaaagccgaagaccccttcaagaccatcagccttagcatattgctatcactgcgcgcaaaaaggccattatggacacgaatgtccagaaagagaagtgtatgacccgtctccagtatctccattcatctgctactatgatgacaaatatgaaattcaggagagagaaaagagactaaaacaaaaaataaaagtactcaagaaaaatggggttatcccagagccatccaagctaccttatataaaagcagcaaatgagaacccccaccatgatataaggaagggccgtgcctcatggaaaagcaacaggtggcctcaagaaaataaagaaacacaaaaagaaatgaagaacaagaatagaaactgggagaagcacaggaaggctgacagacatcgtgaagtggatgaggattttcccaggggccccaaaacctactcttctcctggcagttttaaaacccagaagccttctaagccctttcaccgttcatcacattaccacacgtccaagagaagacaagtctcccaagggaaggcaagaggggcaagcagaagaaaaaggagaggtgcttgcgaagatgatgaccatgataacttattcttattaagcagagaaaaaaaagtcttaagccgtcaggcagcctctgaatgtggtttcattgtccttggcctgtgtctatacctctggcctggttatatccatgataactacaggagtttggctgttttacttcaaaaaaaaaggggggctaaatccccgaggcattcgtcccttttttaaggca

SEQ ID NO: 730873 - DNA, 905 bp, Homo sapiens
  misc_feature (618)..(618): n is a, c, g, or t
  misc_feature (625)..(626): n is a, c, g, or t
  misc_feature (637)..(637): n is a, c, g, or t
  misc_feature (702)..(702): n is a, c, g, or t
  misc_feature (763)..(763): n is a, c, g, or t
  misc_feature (789)..(789): n is a, c, g, or t
  misc_feature (799)..(799): n is a, c, g, or t
  misc_feature (810)..(810): n is a, c, g, or t
cacacatgtgggtttcaagtgcggctggtgccatccctctgagcagacgctgaaagagaaaacttctgagatagcacttgtgagcgaaaagcacaccaactggctcaaagagctgtggttgggcagatctggtgtaaatacaaagttccttcccgacatttcccagagtttcttgaagatcacctggcctctagaagatgacaaggagacagcaagtcctacaagcaaaaaggagcattcagcaaacattccaagcacagcttatgccctggaagagtatgttccacgggagagaagtgaagccagtgggtccagacctggaactctacctctctctgaatgtctaaagtgaagcggtttcctttcttcttcagctcagaggctgagaatggtgtggaggagaaaaagaaagcctgcaggtcgccaacagcccaatcccctaccccatctgtggaggcggactccccagaccagaagaaaatcattagcctatggtcaaaatccagttttgatggtgcctctttagcaagtgataagaacgactgtaaaacagaaagcaaaaatgaccctaagactgaaagaaaaaagtcttcatcttccagccagtacaaggccaantatgcanntttcacaagtngtttcttagtgtcccaacggaggaaccatgaagcaaagctttacctgtgctctacagcaagacantactataccaaggaaagctcttgtatcagaacactggattggtttcattccaaaagtcttnggacaagacccaagatctctatccantttctcggtnacccttataangaaaccaaaacggctcctctagtgcccaaagcctgatctagcacagtcaagacagtacctataggtccctactctcacgaatcacttcaaaacta

SEQ ID NO: 730874 - DNA, 856 bp, Homo sapiens
  misc_feature (569)..(569): n is a, c, g, or t
  misc_feature (576)..(577): n is a, c, g, or t
  misc_feature (588)..(588): n is a, c, g, or t
  misc_feature (653)..(653): n is a, c, g, or t
  misc_feature (714)..(714): n is a, c, g, or t
  misc_feature (740)..(740): n is a, c, g, or t
  misc_feature (750)..(750): n is a, c, g, or t
  misc_feature (761)..(761): n is a, c, g, or t
cacacatgtgggtttcaagtgcggctggtgccatccctctgagcagacgctgaaagagaaaacttctgagatagcacttgtgagcgaaaagcacaccaactggctcaaagagctgtggttgggcagatctggtgtaaatacaaagttccttcccgacatttcccagagtttcttgaagatcacctggcctctagaagatgacaaggagacagcaagtcctacaagcaaaaaggagcattcagcaaacattccaagcacagcttatgccctggaagagtatgttccacgggagagaagtgaagccagtgggtccagacctggaactctcagaggctgagaatggtgtggaggagaaaaagaaagcctgcaggtcgccaacagcccaatcccctaccccatctgtggaggcggactccccagaccagaagaaaatcattagcctatggtcaaaatccagttttgatggtgcctctttagcaagtgataagaacgactgtaaaacagaaagcaaaaatgaccctaagactgaaagaaaaaagtcttcatcttccagccagtacaaggccaantatgcanntttcacaagtngtttcttagtgtcccaacggaggaaccatgaagcaaagctttacctgtgctctacagcaagacantactataccaaggaaagctcttgtatcagaacactggattggtttcattccaaaagtcttnggacaagacccaagatctctatccantttctcggtnacccttataangaaaccaaaacggctcctctagtgcccaaagcctgatctagcacagtcaagacagtacctataggtccctactctcacgaatcacttcaaaacta

SEQ ID NO: 730875 - DNA, 822 bp, Homo sapiens; identical to SEQ ID NO: 310553

SEQ ID NO: 730876 - DNA, 550 bp, Homo sapiens; identical to SEQ ID NO: 310544

SEQ ID NO: 730877 - DNA, 777 bp, Homo sapiens; identical to SEQ ID NO: 401877

SEQ ID NO: 730878 - DNA, 1020 bp, Homo sapiens; identical to SEQ ID NO: 401879

SEQ ID NO: 730879 - DNA, 1025 bp, Homo sapiens
  misc_feature (611)..(611): n is a, c, g, or t
  misc_feature (767)..(767): n is a, c, g, or t
  misc_feature (796)..(796): n is a, c, g, or t
  misc_feature (798)..(798): n is a, c, g, or t
  misc_feature (804)..(804): n is a, c, g, or t
  misc_feature (808)..(808): n is a, c, g, or t
  misc_feature (812)..(812): n is a, c, g, or t
  misc_feature (815)..(815): n is a, c, g, or t
  misc_feature (818)..(820): n is a, c, g, or t
  misc_feature (824)..(824): n is a, c, g, or t
cctcttcctgtgtggaagctgggattccaatggcaggcaggaaatcttgtagtaggtgatcgtggccttccttgggatccctgtttcccccttttattcccttttcacccagtaaaaccctgctttgctcactctttaaagcatctgtgagcgtaaatttttgtggccatgggatggacaagaaccacatgtttacctgaagtcctgtgacattttggtgtgcagcatgggagctccaaaagtgagtcaagtgaacttattttgaatggtttatggcctttaataattacataagttatatactcctgtgatcaaaatttggagcatgtttgtttctctctgcctggttcctccagaatttagaacctatctacattctttcagatgccagaggatgctatagaaaaatgcgtgccctcttgtaatactttgttcaagttctgatcagaaggatgaatgatggagcccaagaagccagagtctcattgtgttgctcaggctggaatccagtggcatgatctcggctcagtgcaacctccgcctcctgggttcaagcagttctcctagatcagcatcagcgtcccgagtagctgggattacaggcacccgcnacatgcctggctaatgttggtcaggctggctcgaactcctgacctcaagagatccactgctttggcctcccaaagtgctcggattacaggcatgagctgcaaacccagctccaaatactttttttttaaatcaaataatgatttcaatgactgagnattggcaatgtatttcaacataattctgntntcactnacgnattnagnctnnntganaacagagacacgagacaacgaaaaagaaagaacaattgtggcgcgcacgggccgcaaaaaagcgtacaaaaacacacggatgaagcacccggaccaacaaagatgagaaggtggcagacagtgcccacagagaaccggcgaccaaaaaagagcgggatacaccaaaaaaaaaagccgaggaaacaagaagcgctgaaaaac

SEQ ID NO: 730880 - DNA, 807 bp, Homo sapiens
  misc_feature (393)..(393): n is a, c, g, or t
  misc_feature (549)..(549): n is a, c, g, or t
  misc_feature (578)..(578): n is a, c, g, or t
  misc_feature (580)..(580): n is a, c, g, or t
  misc_feature (586)..(586): n is a, c, g, or t
  misc_feature (590)..(590): n is a, c, g, or t
  misc_feature (594)..(594): n is a, c, g, or t
  misc_feature (597)..(597): n is a, c, g, or t
  misc_feature (600)..(602): n is a, c, g, or t
  misc_feature (606)..(606): n is a, c, g, or t
cctcttcctgtgtggaagctgggattccaatggcaggcaggaaatcttgtacatctgtgagcgtaaatttttgtggccatgggatggacaagaaccacatgtttacctgaagtcctgtgacattttggtgtgcagcatgggagctccaaaagtgacattctttcagatgccagaggatgctatagaaaaatgcgtgccctcttgtaatactttgttcaagttctgatcagaaggatgaatgatggagcccaagaagccagagtctcattgtgttgctcaggctggaatccagtggcatgatctcggctcagtgcaacctccgcctcctgggttcaagcagttctcctagatcagcatcagcgtcccgagtagctgggattacaggcacccgcnacatgcctggctaatgttggtcaggctggctcgaactcctgacctcaagagatccactgctttggcctcccaaagtgctcggattacaggcatgagctgcaaacccagctccaaatactttttttttaaatcaaataatgatttcaatgactgagnattggcaatgtatttcaacataattctgntntcactnacgnattnagnctnnntganaacagagacacgagacaacgaaaaagaaagaacaattgtggcgcgcacgggccgcaaaaaagcgtacaaaaacacacggatgaagcacccggaccaacaaagatgagaaggtggcagacagtgcccacagagaaccggcgaccaaaaaagagcgggatacaccaaaaaaaaaagccgaggaaacaagaagcgctgaaaaac

SEQ ID NO: 730881 - DNA, 1028 bp, Homo sapiens
cagaaaaaagcctaattgcaacttgatggctttgttggctttctgagcaatgtgtccagttgccacagtgaagggaatggaataatctaactcaccattcccaagtcctatgccatcctgagagtggggggtggagtcaattcaccttggtgcttggactaagcatgaggtggtgagtgacaacgttcctaattgaagggtagggtaaatggttgttgggtggacaccaacacttattctactacagaagctaaattgaaccctcaggcagggtacgtgaaagtggcaagagatgtcaagaccactgggcaagttggccagttgttccttaggaatgaaaattcttttgaaaggaatggccagggtcctctgctggccccacttggtcttctggaggctctgatcttggttggttagtggtctttacaggccaaggtcaaggccattgcacaaaaaaccctgtgcatgcccttaacttgctttcagttgaatatttgggctgaactatgaggcagagaggaatcccactgggtggctccttgctgcattcgcagttgaccagcatggggtttgttggagaaataggaaccatcccctgaaaacacacactatggtagccactcaactgttgaaaggcactggagtccaatgggtgaggccgcctctgagacaagcctctgagttgaggctgggagaggctccctccttggagtgttgctttttttgtttcacccctgcctctggagatgggtagaggaacatgagctgaccttctgggaagttaggttggtgaggagttgctgaggcactgcagggccatgcccagtagagaggaatgtataacattttaagaggctgagagcaccccttgttggacgcatgcccatggcagcttccttctgccgatcatgggagaaatcaagcacttttcactaatggctaatgatcgattttgggatgaaattctccactcctctcctttaccacatcaccactatccttcctgcaatacatccacgagactcact

SEQ ID NO: 730882 - DNA, 1943 bp, Homo sapiens
gcttcctctcagcccgctctgagctggaagcagcatgtgggacctggccctgatcttcctcgcagcagcctgagtgttctcactaggggtcactctgtgggtcatttgcagccattttttcactgtgcacatccctgcagcggttggccaccctgtgaaactgagagtcctccattgcatcttccagctgctgttgacatgggggatgatatttgagaagctcagaatctgttctatgccccaatttttctgtttcatgcaagatctgcctccgctaaagtatgatcccgatgttgtggtcacggatttccgctttgggacaatccctgtgaagctgtaccaatccaaggcatccacctgcaccctgaagcctggcatcgtgtactaccacggtggcgggggcgtcatggggagtttgaaaacccaccatggcatatgctctcgtttgtgcaaggagagtgactccgtggttctggcagttggttaccgcaagttacctaagcataagtttccagtgccagtaagagactgcttggtggccaccatccacttcctgaagtccctggatgcatatggagtggatccagcccgggttgtggtctgcggtgacagtttcggaggggcaatagccgcagtggtttgtcaacaacttgtggacaggccagatctgccccggatccgggctcagatcctgatctatgccattctccaagccctggatttacaaaccccttcgtttcaacagaggaaaaacatccattgttcacacggagttcatctattactttttttttcaaaacctggatttcagattctcctggccaaaacctggatttcagctcctcctggcaagaggtcatcatgaaaggtgcccatttgcctgctgaagtctgggaaaagtacagaaagtggttgggcccagaaaacatccctgagaggtttaaggagaggggttaccaactgaagccccatgagcccatgaatgaagctgcttacttggaagtaagtgttgtcctggatgtgatgtgctcgcccctgattgcagaagatgacatagtgtctcagctcccggaaacctgcatcgtgagctgtgagtatgatgctctccgggacaattcactgttgtaccccgtgactggcacatatggaggatggttcctatggagtgctcaggaccatgacgtgagcttcttgcactttccctgctccatgataattctgagtgccttagttcactccatgagaattctgagtgcattagttcaatttgtaaagggactgtgaccatctttcttctctgctggtactgcggtgtggattccactggcatccagcctcccacagggctctctgttgctgatttaggtggtgcatagtggggctagggaggaggtagaggttgctgtcacctttctggtccaggttctagaaccacacaatgcatgctcctgatgtccagaggacgtggtagaaaagacaggtttggaggtgggagtgtggctgtctctattctctgttgggaaaacctgggctgacaatattcagtggccatttgtgggagtgaatcagccggtaagagctgttctcagcctctctaaggggcagttcaggctcccagattgatccagactgtgtgtgactttcgtccatttgacttgactttggaatagcacaagggcatcacgtacttcacgaggctttcccaatgtggctcagaggcaggagctctgatgctctaggctgctgtgaggtggtggtggtggtggagaaactggcttcacccacctactcttctgtgaacagtagtgacttttcccgctgtttctcagcctctgggatcagagtcttcactgtctgggctggaaactttaagatagaatggatagagcttccacagtggttggcatctagtggtggatgaagacagcctgcagctgcccgac

SEQ ID NO: 730883 - DNA, 693 bp, Homo sapiens
ggcgcgcgcggaatcagttgagtctcttcggttcccggctctttctcctgcgactggggaaatggacgcctggagaacggaaatccagttatcaaaattgactccagaagagagaacctaacagaacaataacaatggaagaaattgggaatattatcaaaaagctatcattctgttaaactccaggcttggatggtgttacaggtttaaaaaaaaaaaaaggaaaaagtccttcatgaaaaaagaagaacttaagcaacattgatggattcagaagctcatggaaagagaccaccaatactaacatcttcgaaacaagatatgtcacctcatattacagatttagtgaaactgaagcattacttgtgtggctgctgtgcagccttcaacaacgtcgcaatcacatttcccattcagaaggtcctctttccacaacagctgtatggcatcaaaacgggggatgcaatacttcagttgagaacggatggatttcgaaacttgtatcggggaatctttccccgattgatgcagaagacaactacacttgcacttacgttgggtctgtatgaggatttatcctaccttctccacaagcatgtcagtgctccagagtttgcaacctgtggcgtggcagcagtgcttgcagggacaacggaagcaattttcacttcagacattgcttcaagaccacaa

SEQ ID NO: 730884 - DNA, 985 bp, Homo sapiens
ggcgcgcgcggaatcagttgagtctcttcggttcccggctctttctcctgcggtgggtatttgtccggctgctgggcgacctttcccgcgaaggaggttgtgccttcattcggtcgcgccccgggctggggaggcacctccctggtgcgcaggaaccgcaggggcgggtaggagcctggctctgcctgagctccggagggagcagagctggcaccgcgcaagggcccctgcctcccgggagactgggatttctggcctcctcacctcgggaccgctgactgtggagtgtcaaagacggaacagggtttagtgatcttgtccaaccccctccccgcttttcacagactggggaaatggacgcctggagaacggaaatccagttatcaaaattgactccagaagagagaacctaacagaacaataacaatggaagaaattgggaatattatcaaaaagctatcattctgttaaactccaggcttggatggtgttacaggtttaaaaaaaaaaaaaggaaaaagtccttcatgaaaaaagaagaacttaagcaacattgatggattcagaagctcatggaaagagaccaccaatactaacatcttcgaaacaagatatgtcacctcatattacagatttagtgaaactgaagcattacttgtgtggctgctgtgcagccttcaacaacgtcgcaatcacatttcccattcagaaggtcctctttccacaacagctgtatggcatcaaaacgggggatgcaatacttcagttgagaacggatggatttcgaaacttgtatcggggaatctttccccgattgatgcagaagacaactacacttgcacttacgttgggtctgtatgaggatttatcctaccttctccacaagcatgtcagtgctccagagtttgcaacctgtggcgtggcagcagtgcttgcagggacaacggaagcaattttcacttcagacattgcttcaagaccacaa

SEQ ID NO: 730885 - DNA, 622 bp, Homo sapiens
agcggaggttatgcacatatattggtaggagctatatgggaaatctctctactttcagctcaattttgctgtgaacctaaaattgctcttaaaaaataaagtgtgtaatcaaaaaatactccttgttaactaacatgatccatatcttacagatgggaaactgccccttcttttacaggaggatacaatatgttagctgtagagccagtactgtaaccttgaccttcatttcaaggccaggtttctctaagctttactaggctactcaaaactcataacctgtaccatgatggaatttgatattgtttttggactgatctgtaaataaatacatttgtaatttagatttccatttagacagttcgttattcatgatagacttactaaagaatctctctttttaatgctagtgttcctgaataacactatttataacaacagaagaaaaaatactactactaatagatgcatctgtcgattttgtaccatatgtgaggtagtatgctaagcatccattgtttatggttctagtaataaccctcaaaggtgggtattatattatatttttggaaaacaccaaaaatgaagcttagagagattaagatatacatcaaaagaacac

SEQ ID NO: 730886 - DNA, 628 bp, Homo sapiens
cgggggtcggccgagggcgcggggccccggggctccgggctcgcccccgccgctcggggcaggcgcgccgatggcgtttctgaggtgacgccgcccacaccgggcttctccgggggcggaggaaacacctatgaaccctccggcagccttccttgccgggcgccagaacatcgggtcagaagttgagatttccactatcgagaaacaacggaaggagctgcagttgctcattggagaattaaaagatcgagataaagagctcaatgacatggttgcagtgcaccagcaacagcttctttcatgggaagaggatcggcagaaagtgttgacactggaagaacgttgcagcaaattagaaggtgaactacataaaagaactgaaataatcaggtcactcacgaagaaggtaaaagctcttgaatccaatcaaatggaatgccaaacagctctccaaaagacccaactacagcttcaggaaatggctcaaaaggcaacgcattcttctcttctctctgaagaccttgaggctagaaacgaaactctcagcaacacgttagtggaactttctgcccaggtaggacagctacaagctcgagaacaagctcttacgacaatgataaagctaaag

SEQ ID NO: 730887 - DNA, 806 bp, Homo sapiens
agcggggcacaacaagggactgggggttcgtctgctgggtttgcggagcagctagctactcggcgggatctcccggcaggatgggtaaaaagataaagaaggaagtagagcctcctcctaaggatgtgtttgacccattaatgattgaaagcaaaaaagcagcaactgtggtgttaatgcttaattctccagaagaggaaattttggctaaagcatgtgaagccatttataaatttgctttaaaaggtgaggaaaataaaacaaccctccttgaacttggagctgtggaacctttaactaagctactcacccatgaagacaaaattgtaagaagaaatgctactatgatatttggaatcctggcttctaataatgatgttaaaaaattgttaagggagttagatgtcatgaattctgtcattgcccagctcgctccagaagaagaagtagttatccatgagtttgctagtctttgtctagcaaacatgtctgcagagtacaccagtaaagtgcaaatatttgaacatgggggattagagccactcatcagactactgagtagccctgacccggatgtaaagaagaactctatggaatgcatttacaacttggtgcaggattttcagtgtcgagctaaacttcaagaactaaatgcaatacctcctatcttagatctcttgaagtcagaatatccagtgattcagttgttggctctcaaaaccttaggtgttattgcaaatgataaggagtctcgaacaatgctaagagacaatcaaggattggaccatcttattaagatcctagaa

SEQ ID NO: 730888 - DNA, 778 bp, Homo sapiens
  misc_feature (670)..(671): n is a, c, g, or t
agcgggcggttgccatggggacggagcttgggtggcaaccagaactagggagctggtggagaaggtggcggccgctggaaggaggcccgggaggtggctgaggggtccaggcggcgggacgactctggccttttgaagaccggggtgggtgctctctaggaaactctacagagaagaatgtcagatgcagcagaagctccccgagaagcaacaggagaaaatggagaaacagaaatgaaagaagaggaggaacctaatccaaattataaagaagtagaagatccacaacaggaatcaaaagatgacacaatagcatggagagagtctcaggaggaggagaggaaaacgggcgaggaggaaggggaggaggaggagaaagaggaggaggggaaggaggacaaaaagattgtcatggaagaaactgaggaaaaggctggagaagtccaagagaaggaggcttcaggaatacaggaagaaaccacagtagagccccaagaagtcacagcgtccatgatccgtttggagacacagattactgattcccagtcaatcacatcaggaattttcccaaaaacccaaagaggtagcaagtcaaagctttccttacaattggaggatgcagaaacagatgagcttttaagagacctgagcacacaaattgaattcttgnnttggatcaaatcagtcctgaggaacaacagattagttcccctgaaaggcagcctcaggagagcttgaggagaaaacgacggatgcgcgagatgaatgggacaagaaa

SEQ ID NO: 730889 - DNA, 762 bp, Homo sapiens; identical to SEQ ID NO: 102762

SEQ ID NO: 730890 - DNA, 667 bp, Homo sapiens; identical to SEQ ID NO: 97643

SEQ ID NO: 730891 - DNA, 831 bp, Homo sapiens
agcgtgagtgcctggcaacctagaccagtcagggacgcggcaggaaatggaagagcctccgcaagaggctctggctgaacccttgaaacatgaaagcccagccgctccctcaagtgctggccacactaagggccaggaagaagacgaccagaagaaccaggccgaaaggaaggcagataaccacactgctcacagaatagctgaccagactgccctaagagtgcctagccaggctgaatccagcatatttagccaagctaccaacggagtagctgaacaaaatgggcatagtacacctggtcaggctggccgcagagcatccaaccctgctgatgtttctgaccttagagcagatgatcaggttaatcaaacaccgtctgaacagactaaaggcaaggcatctagccaagctaataatgtacagcatgaacagagtgatggtcaggtgtctggcctgacggaggaaagaactgctgaacagactgaacgaagattacctacccaggctgagagaagaacttctgggcagattgatggtagactggctatgccatctgaccagagaggttccagacagaccgaccacagaatggcaggccagtctgagagaagagcttccgagcagatggaccgcagaatgtctggcgaggctgagcgaagaacttctgagcagattacacacagattatccaaactatctgagagaagaccttctgtgcagattgacagtgggtcatccgtccatctgaccaagtccttctgtaacagatcgacacgtggatcgtccgtaccatctgacaaggacctaccgtacacattgcaccggcagca

SEQ ID NO: 730892 - DNA, 798 bp, Homo sapiens
aacgcccgcacgcgcccggcccctagtcccagcgcggggagggtactatcgcagcttctccgtcaggccttgggccatggcctcgctacgcaatgccaacccgaggctgaagaactacttcaaggagaactacattcctcaggtctgcgaggcactgttatgtggtatacttgttacatgtcctgaggatccgctgaggtatttagagggaatgatcatggttataatcaaaagtggtcttcagaatcttctttgggatatgtgcattactccatcaatgaaaccaaacattcgaagattgtctgaaacttacctggaacaactttttgaattggatgatcagctgatgactccggaattgatgataaaagcctgtagcttttatactggacatttagtaaagactcatttttgcacttggagagacatagctcgtacaaatgaaaatgtcgtcctggctgaaaaaatgaacagagcagtgacatgctacaatttcagacttcaaaaatctgtatttcatcactggcactcttatatggaagaccagaaagaaaaacttaaaaatatgctattgcggatacaacagatcatctattgtcacaagctaaccattatcctaacaaaatggcggaatacagcaagacataagagtaaaaagaaagaagatgagctgatattaaaacatgaacttcaattgcaaccccttgggaacactaggtgactactcacaacgacgcttgctgcgaaagaatcccattttctggacgaagtcctctgaaggtctcttgtccatgagac

SEQ ID NO: 730893 - DNA, 904 bp, Homo sapiens; identical to SEQ ID NO: 387989

SEQ ID NO: 730894 - DNA, 793 bp, Homo sapiens; identical to SEQ ID NO: 387990

SEQ ID NO: 730895 - DNA, 836 bp, Homo sapiens
agcggacagtcctgccaggacggcgacagtgaagcacctgggttgagagggagcagcaggtaactgcgcaacccctgcctcccccggccccagcccgtgcctcagcagagccgggtgtggtggggacccgggagtgggtctcactgcgtgtcgcctgccaacaccttcctccaccaccatccttacccagccccagtcccacccagcacacctgggcgagacaacccaggtgcgaaggacaagcgattactaccgaagagcgtgcaaaccaggaagagagcagcctcctggagaggaaaacgtgatcccaggggtagacacgtggcgctgcgtggagagacaggttgacgagacgaggctcttctgaccgtcctacctggcaaaacttgacgacagcttcaggtcgctaccatctggacctctcggagctccctgaaccatgactcagaccctcgacacaagggaagaccctctgaacctgggcggcggtggcggcggcggctgtggctgtggctgggcacactcggcctccttgagctcctggtcgtcctgccatcgaaggcgcccgggtgctccagcgtacaatagaccgcaccgatatagccccaagaccgagtatgggcccccaaggaagcagccgaagcaacagcacggccgggcttttggttccaagcacccgtgtgctctaactgggggtgctggggagggccctggcgcccaccccctccaggattctggaaattcccctgcccggtgcaagtgtttcgggtgtatggcctgcaccctctctgcttttgctgctgctcctgctggagcgggtcctggaaccctggctg

SEQ ID NO: 730896 - DNA, 1730 bp, Homo sapiens; identical to SEQ ID NO: 465720

SEQ ID NO: 730897 - DNA, 884 bp, Homo sapiens
  misc_feature (792)..(792): n is a, c, g, or t
  misc_feature (796)..(796): n is a, c, g, or t
  misc_feature (802)..(802): n is a, c, g, or t
  misc_feature (804)..(805): n is a, c, g, or t
  misc_feature (817)..(817): n is a, c, g, or t
  misc_feature (819)..(819): n is a, c, g, or t
  misc_feature (824)..(824): n is a, c, g, or t
  misc_feature (828)..(829): n is a, c, g, or t
agcgggtccctggcaattcccgacttcccaacggcttcccgctggcagccccgaagccgcaccatgttccgcctctggttgctgctggccgggctctgcggcctcctggcgtcaagacccggttttcaaaattcacttctacagatcgtaattccagagaaaatccaaacaaatacaaatgacagttcagaaatagaatatgaacaaatatcctatattattccaatagatgagaaactgtacactgtgcaccttaaacaaagatattttttagcagataattttatgatctatttgtacaatcaaggatctatgaatacttattcttcagatattcagactcaatgctactatcaaggaaatattgaaggatatccagattccatggtcacactcagcacgtgctctggactaagaggaatactgcaatttgaaaatgtttcttatggaattgagcctctggaatctgcagttgaatttcagcatgttctttacaaattaaagaatgaagacaatgatattgcaatttttattgacagaagcctgaaagaacaaccaatggatgacaacatttttataagtgaaaaatcagaaccagctgttccagatttatttcctctttatctagaaatgcatattgtggtggacaaaactttgtatgattactggggctctgatagcatgatagtaacaaataaagtcatcgaaattgttggcttgcaaattcaatgttcacccaatttaaagttactattgtgctgtcatcattggagttatggtcagatgaaaatnaganttctananntggtgaagcaantnaattnttgnncaaattttagaatcgggaaaatcttattttaactaaagggctgagattgggatat

SEQ ID NO: 730898 - DNA, 909 bp, Homo sapiens
  misc_feature (707)..(707): n is a, c, g, or t
  misc_feature (791)..(793): n is a, c, g, or t
  misc_feature (800)..(800): n is a, c, g, or t
agcgggcctgcctcttccaggctgcgtggccggggcgtcatctcgcgcttccaactgccctgtaaccaccaactgccattattccggctgggacccaggacttcaagccatgtggcgcgtcttgtttctgctcagcgggctcggcgggctgcggatggacagtaattttgatagtttacctgtgcaaattacagttccggagaaaatacggtcaataataaaggaaggaattgaatcgcaggcatcctacaaaattgtaattgaagggaaaccatatactgtgaatttaatgcaaaaaaactttttaccccataattttagagtttacagttatagtggcacaggaattatgaaaccacttgaccaagattttcagaatttctgccactaccaagggtatattgaaggttatccaaaatctgtggtgatggttagcacatgtactggactcaggggcgtactacagtttgaaaatgttagttatggaatagaacccctggagtcttcagttggctttgaacatgtaatttaccaagtaaaacataagaaagcagatgtttccttatataatgagaaggatattgaatcaagagatctgtcctttaaattacaaagcgtagagccacagcaagattttgcaaagtatatagaaatgcatgttatagttgaaaaacaattgtataatcatatggggtctgatacaatgntgtcgctcaaaaagttttccagttgatttggattgacgaatgctatttcgtttcatttaactattacaattattctgtcttcannnggagctntggattagattgacgcttaaattggcaacactggagaaagtaatgaggttttccccacattttaaagaaggcaaaaattcttatcctggtgaaggtcctcatgaagtgg

SEQ ID NO: 730899 - DNA, 158 bp, Homo sapiens
agcggaagggaggggcgagtatcgcaaaataggccaagtcgctgccctctactcaactcgcagggcgggaggatggagacagagggatgcggcgggagggcgggacagcccagtcgccgccaaggaggcgaagcggggtcggggtagctcacccgccc

SEQ ID NO: 730900 - DNA, 841 bp, Homo sapiens
agctgaagggcgcgcggtgccgacagggagcttccttggctggcatggcggcgagcgcgctgcgaggcctgccagtggctggcggaggcgagagtagcgagagcgaggatgatggctgggagattgggtatctcgaccggacgtctcagaaattgaaaaggctattacccattgaagaaaagaaagaaaaatttaagaaagcaatgaccatcggagatgtttcattggtccaggagctcctagattctggcattagtgtagattccaactttcagtatggatggactccccttatgtatgctgctagtgttgccaatgcagagctggttcgggtccttttggacagaggtgctaatgcaagctttgagaaggataagcaaagtattttgataactgcatgttctgctcatggctcagaggaacagatcttgaagtgtgtagaactactactttcaagaaatgctgatccaaatgttgcttgtaggagacttatgaccccaatcatgtatgctgctcgagatggtcacacccaggttgttgctctccttgttgctcatggagcagaagttaatacccaggatgagaatggttacactgctttaacgtgggcagcacgtcagggtcataaaaatatagttttgaagttgcttgaacttggagctaataaaatgctacaaaccaaagatggaaagatgccaagtgagattgcaaaaagaaacaaacatcatgagatcttcaacttactttcttttactttaaatccattggaaggaaaacttcaacaggtaactaaagaagacactatttgtaaaatattgacaacagattctgatagagaaaa

SEQ ID NO: 730901 - DNA, 729 bp, Homo sapiens
agctgaagggcgcgcggtgccgacagggagcttccttggctggcatggcggcgagcgcgctgcgaggcctgccagtggctggcggaggcgagagtagcgagagcgaggatgatggctgggagattgggtatctcgaccggacgtctcagaaattgaaaaggctattacccattgaagaaaagaaagaaaaatttaagaaagcaatgaccatcggagatgtttcattggtccaggagctcctagattctggcattagtgtagattccaactttcagtatggatggactccccttatgtatgctgctagtgttgccaatgcagagctggttcgggtccttttggacagaggtgctaatgcaagctttgagaaggataagcaaagtattttgataactgcatgttctgctcatggctcagaggaacagatcttgaagtgtgtagaactactactttcaagaaatgctgatccaaatgttgcttgtaggctttaacgtgggcagcacgtcagggtcataaaaatatagttttgaagttgcttgaacttggagctaataaaatgctacaaaccaaagatggaaagatgccaagtgagattgcaaaaagaaacaaacatcatgagatcttcaacttactttcttttactttaaatccattggaaggaaaacttcaacaggtaactaaagaagacactatttgtaaaatattgacaacagattctgatagagaaaa

SEQ ID NO: 730902 - DNA, 171 bp, Homo sapiens; identical to SEQ ID NO: 109142

SEQ ID NO: 730903 - DNA, 689 bp, Homo sapiens
agggcaggcagggacagcccctctgatgaggaggccactgggctgagaccaatgaatgagatggagccagccacgtggtgagccagaagagggcatcacagggcttgagtctgggggagcctggctgcccagaggtggcagatgacatgaagaaataaccatgtaagggctggctgtgtatgagagcaagcattgggaaggatgaatgccaactatgttccaggaacttccactgttctcacacacccaggtgagtggtgttcaggtgggtggcacccaggtgagtgacatcccagttgagtggcacccaggtgagtagcatccaggtgagtgacacctaggtgagtgacattcaggttagtggcgtctgtgtgagtggcatcatccaggtgagtagcttccaggtgagtggcacccaggtgagtggcattcgggtgagtggcatccaggtgagtgatatcatccaggtaagtggcacctaggtgacatccaggtgagtgacgacatccaggtgagtgacatcatccaggtaaatggcacccaggtgagtagcattcaggtgagtgacacccaggcgagtggcatccacgtgactagcgttgtccaggtgcataacacccaggtgagtggcacccagttgagtggtgcccaagtgagtcacatccaggtaagtggggtccaggtggtgg

SEQ ID NO: 730904 - DNA, 850 bp, Homo sapiens
agggcaggcagggacagcccctctgatgaggaggccactgggctgagaccaatgaatgagatggagccagccacgtggtgagccagaagagggcatcacaggtccatgaaatgggctcccgaagtccaacctcacagaccccataggaaagcagatggaatctccaagggcaccagctatacatggtggtggaaggaccaacgcatgctctgaatgccactgcggaccacagggcttgagtctgggggagcctggctgcccagaggtggcagatgacatgaagaaataaccatgtaagggctggctgtgtatgagagcaagcattgggaaggatgaatgccaactatgttccaggaacttccactgttctcacacacccaggtgagtggtgttcaggtgggtggcacccaggtgagtgacatcccagttgagtggcacccaggtgagtagcatccaggtgagtgacacctaggtgagtgacattcaggttagtggcgtctgtgtgagtggcatcatccaggtgagtagcttccaggtgagtggcacccaggtgagtggcattcgggtgagtggcattatccaggtgacacctgggtgaggtggcatccaggtgagtgatatcatccaggtaagtggcacctaggtgacatccaggtgagtgacgacatccaggtgagtgacatcatccaggtaaatggcacccaggtgagtagcattcaggtgagtgacacccaggcgagtggcatccacgtgactagcgttgtccaggtgcataacacccaggtgagtggcacccagttgagtggtgcccaagtgagtcacatccaggtaagtggggtccaggtggtgg

SEQ ID NO: 730905 - DNA, 678 bp, Homo sapiens
ggtccctggtacgcggcggatgggcgccggcaggagcgggcagggcgaggcgaaggccggggagggatcgagaacggtgtgggagagctaggctcggggggcgaggccccggcccggcggggcgatggaggcgctgctctccacccccatcaaccccaacaacttccccgccaagctgtggcgcctggtgaacagcccgcgctaccgctccatccgctgggacggccgcggcgaggggctgcttatcgatcagccgctcttcgaggccgagctgctcagcccgcccgggccggggggcggtggcgggactgcgggggccggggccgagcccgagctcttcaaaaccaccagcttcaccagcttcatccgccagctcaacctctacggcttccgcaaggtggtgctgggcgggccggggggcggcaaaccggcaggcaatgggccgctccatcacttccacaacccgcacttccgccgcgaccagccacagctgctcgtgcacctcaagcgcctcaccagcgccaacaaggccaagctggcggccggcctggaggtgccctgccgcccgaccaacacgcttccagcggctgctcatcacctcggcctccgccgccaccgcgccactgcagcaccagcagccgccgccgcccgcggggccccggcccgagccgcacggtg

SEQ ID NO: 730906 - DNA, 708 bp, Homo sapiens
aatgttaacttccattatgtgagagcagatgaaaccaaagccttgggcccacacagcaaacctttgggtagcaacgagttctagaaaaatggagcctaaggagtccagattgtttttccttgaaataccaagcaagtctaaaatgattactacccatgagatatatttttaatgatgttaggtttgggggtgtgttagattgttttgcattgctataaatgaatacctgaggctgagtaatttgtaaagaaaagaggtttatttggctcacatttctgcctggcagtggctatagttggcttctagtgaggcttcaggaagcttttactcatggtagaaggcaaggggggggcaggcatgtcacatagcaagaggaggagtgagagagagaaggaggtgccaggctcctttaaattgtaaactaacagcaagaactcactcattcccatgaggaagggaccaggccattcatgagggatcctccctcatgacccaaacaccccgactaggccctacctccaattctgaggatcacattccaacataagattcagagagtgaaaacattcaaagtctaccaggaggtgattaaagtgatatgacaatgtgaggtatatgttacctggaaggtagtaggagcagatggtgggaagaagaaaagtgtagcaactacccagtcctctgcatgaaagagccctcctcaaagag

SEQ ID NO: 730907 - DNA, 1025 bp, Homo sapiens
aagtagttgcgggagggcgcggagcacgccgggaagctcgcgggtcggcaccgggacagctcccgggcgccgtggaatgcacacgtcccgcacccggaccttccggtcagcttcccggctcgctgtctgatgcccgcggtagccaatgagctagtggtgtttgtcctgctccgtccccgccctccaggggaaccaatcccattgcaggagaggcaggacgcgcaaaggcccgaaagaggagctgggcggggtggggggaaggcggaggcagtctagtaatgtaaagctccgctgagagggagagtgctgaagaaggggacagcctctgtacctgcggcgcggcccgaggggcggacgcgagcggactgacgcgctggaggctgtttatagcgctgtcaggacagcgcggggagtggaggcagaggcctgagagctccccggattatggtgcactgagaaggcatctggaagcctgggccctcatggcatccaacgataaaggcatggcaccctcgctgggctctccctgggcctcccagatggggccctgggatgccatcctcaaggctgtcaaagaccagctcccgtctctggactcagactcccctttgtcggactatggggaagaggagctgttcatcttccagcgaaaccaaacctccctgattccagacctgtcggaggagctggctgaagatcctgccgatggcgacaagtccagggcctgggtcgctgcagctgaagagtcccttcccgagccagttctggtgcctgcagaattggccacagaacctgggtgcagacagaacacaaggacaaaggatgcatcctctcaggaaggaagagaccctggcaggccttttgaaagctctggtgaggtcagcgctcttcttgggatggccgaggagccccccaggtggctggaaggcgaccttggaagcctgtctttcaacaccaaaggatcccagggtcctccctgggacccacaggccgaagccactctctcctgccatgaaggagaccca

SEQ ID NO: 730908 - DNA, 809 bp, Homo sapiens
  misc_feature (50)..(50): n is a, c, g, or t
  misc_feature (498)..(498): n is a, c, g, or t
  misc_feature (670)..(670): n is a, c, g, or t
  misc_feature (680)..(680): n is a, c, g, or t
  misc_feature (692)..(693): n is a, c, g, or t
ggtctggggatgcgaccaggaccctggggaaaggaagccagcccccaggnccagtcccggaggggctgatccgcatctacagcatgaggttctgcccctattctcacaggacccgcctcgtcctcaaggccaaagacatcagacatgaagtggtcaacattaacctgagaaacaagcctgaatggtactatacaaagcacccttttggccacattcctgtcctggagaccagccaatgtcaactgatctatgaatctgttattgcttgtgagtacctggatgatgcttatccaggaaggaagctgtttccatatgacccttatgaacgagctcgccaaaagatgttattggagctattttgtaaggtcccacatttgaccaaggagtgcctggtagcgttgagatgtgggagagaatgcactaatctgaaggcagccctgcgtcaggaattcagcaacctggaagagattcttgagtatcagaacaccaccttctttnggtggaacctgtatatccatgattgattacctcctctggccctggtttgagcggctggatgtgtatgggatactggactgtgtgagccacacgccagccctgacggctctggatatcagacatgaagtgggaccacacagtctgtgctcttctcatggataagagcatatcnagggctactngcatctctattnncagaacaacccgtaatgcctttgactatgggatgtgctgagtctcagttgtacaacccttcgactgtcaaaaatccccagttgatgagagtctacgtcacggcacggctgggaaac

SEQ ID NO: 730909 - DNA, 840 bp, Homo sapiens
  misc_feature (81)..(81): n is a, c, g, or t
  misc_feature (529)..(529): n is a, c, g, or t
  misc_feature (701)..(701): n is a, c, g, or t
  misc_feature (711)..(711): n is a, c, g, or t
  misc_feature (723)..(724): n is a, c, g, or t
gctccttcctcaccgggctgactagcctctcctttccctgtccccctccatcgctgctctgcaggaagccagcccccaggnccagtcccggaggggctgatccgcatctacagcatgaggttctgcccctattctcacaggacccgcctcgtcctcaaggccaaagacatcagacatgaagtggtcaacattaacctgagaaacaagcctgaatggtactatacaaagcacccttttggccacattcctgtcctggagaccagccaatgtcaactgatctatgaatctgttattgcttgtgagtacctggatgatgcttatccaggaaggaagctgtttccatatgacccttatgaacgagctcgccaaaagatgttattggagctattttgtaaggtcccacatttgaccaaggagtgcctggtagcgttgagatgtgggagagaatgcactaatctgaaggcagccctgcgtcaggaattcagcaacctggaagagattcttgagtatcagaacaccaccttctttnggtggaacctgtatatccatgattgattacctcctctggccctggtttgagcggctggatgtgtatgggatactggactgtgtgagccacacgccagccctgacggctctggatatcagacatgaagtgggaccacacagtctgtgctcttctcatggataagagcatatcnagggctactngcatctctattnncagaacaacccgtaatgcctttgactatgggatgtgctgagtctcagttgtacaacccttcgactgtcaaaaatccccagttgatgagagtctacgtcacggcacggctgggaaac

SEQ ID NO: 730910 - DNA, 934 bp, Homo sapiens
  misc_feature (663)..(664): n is a, c, g, or t
  misc_feature (688)..(689): n is a, c, g, or t
  misc_feature (740)..(740): n is a, c, g, or t
gcaggccctgcgcaccctcatcaccaagggctgccaggcagaggctgaccgtgctgaagtgagtcgctttgccaagaactttctgccgatcctcttcaacctgtatgggcagcccgtggcagccggggacactccagcccctcgccgggctgtgctggaaaccatcagaacttacctcaccatcactgacactcagttggtgaacagtctcctggaaaaagccagtgagaaggtgctcgaccctgccagctctgactttaccagattgtctgtcctggacctggtcgtggccttggctccgtgtgctgacgaagctgccatcagtaagctatactccaccatccggccctacctagagagcaaggcccacggggtgcagaagaaggcctaccgagtgctggaggaggtgtgtgccagtcctcagggccccggggccctcttcgtgcagagccacctggaggacctgaagaagacactgctggactcgctgcggagcacctcctcacccgccaagaggccccgtttgaagtgcctcctacacatcgtgaggaagctctcagctgaacacaaggagttcatcactgccctcatcccagaggtgatcctgtgcaccaaggaggtgtcggtgggcgcacggaagaacgcttttgcactgctcgtggnngatgggccatgctttcctaaggtnnggtcgaaccaggaagaggcctgagtgctacctcgtcctgatctacctggcntggtgggcgcgtgaccatggtccagctgcagcatccggcgcctgaccaactccttttcgagttaaaggtctgatgagggcccagtcacagtggagcagctgctggagcaacgtgtgcctgatctggcctacggaccgtgagagaccaagactgacagcggctccacacggggcaggctcggccgggactggcac

SEQ ID NO: 730911 - DNA, 1057 bp, Homo sapiens
  misc_feature (465)..(465): n is a, c, g, or t
gcaatgaaaagggagagagagaactagaaccaatcacaacctctcaagccctgcagattgctggcagagctggcagattcagctcacggtttaaagaaggagaggttacaacaatgaatcatgaagatctcagtttattaaaggaaattttgaagaggcctgtggatcctataagggcagctggctcttcatccaactgctgagcagattgaaatgtttgcctaccatctccctgatgcaacactgtccaatctcattgatatttttgtagacttttcacaagttgatgggcagtattttgtctgcaatatggatgattttaaattttctgcagagttgatccagcatattccactaagtctgcgagtgaggtatgttttctgcacagctcctatcaacaagaagcagccttttgtgtgttcttcactgttacagtttgccaggcagtagcaggaatgagccccngacctttgcatggttacgccgatacatcaaatggcctttacttccacctaagaatattaaagacctcatggatcttgaagctgtccacgatgtcttggatctttacttgtggctaagctaccgatttatggatatgtttccagatgccagccttattcgagatctccagaaagaactagatggtattatccaagatggtgtgcacaatatcactaaattgattaaaatgtctgagacgcataagctgttgaatttggagggctttctatcagggagccagtcacgattgtcaggaaccttaaagagccaagctagaaggacacgcggcaccaaagctctagggagtaaagctactgagccacccagccccgatgcaggagagctgtcccttgcttccagattggtgcagcaaggactcctcactccagacatgctgaaacagctagaaaaagagtggatgacacaacaaactgaacacaacaaagaaaaaacagagtctgggactcatccaaaagggacgagaagaaagaagaaggaacctgattcggactagttttctgttcctgtttttttttttttatttaattttgta

SEQ ID NO: 730912 - DNA, 841 bp, Homo sapiens
  misc_feature (8)..(9): n is a, c, g, or t
  misc_feature (698)..(698): n is a, c, g, or t
agcggagnngggagagatgtgagcctcgtaccaggaagatcatactgaggccaccaggttgagagccgcctggctggggggcttgtccggggacagcaggggcagaggcatggaggttcacagccaggaaatcgtgcagtgaacctgtcccctccggtcacaacatcaagagctgaactgggactagaagtcatcgccccagagctttttgctaccagaactgccgggtgaaaatctttggaagagaagtttgagaacctgttaaacaagctctctaggtaattctgtgcacgttcagtctgagaactgctgcatctgaagaggccctccagaaaaaggaagaaaagtgggaaggtgaccccagtggctgaaagcaggagaaagtgtttcatcacgggccctctccttctgaatactatttgaacatggaattcaatccttcagatcatcctcgggccagcacaatattcctcagtaaatctcagacagacgtgagagaaaaacgcaagagtctcttcattaaccatcatcctccaggacaaatagcaaggaaatacagttcctgctccaccattttcctagatgatagcacagtcagtcaaccaaacctcaagtatacaattaaatgtgtcgctcttgcaatatattatcacatcaaaaacagggacccagatggaaggatgctcttagatattttngatgaaaatcttcaccctctttcgaaatccgaagtgccaccagattatgacaacaaaaccagagcagaagcagattaccggttcggtcggaccctgtcagtgctgctcagtgacggtgaatgtgccatcgtcacctggtgtac

SEQ ID NO: 730913 - DNA, 1063 bp, Homo sapiens
  misc_feature (8)..(9): n is a, c, g, or t
  misc_feature (920)..(920): n is a, c, g, or t
agcggagnngggagagatgtgagcctcgtaccaggaagatcatactgaggccaccaggttgagagccgcctggctggggggcttgtccggggacagcaggggcagaggcatggaggttcacagccaggaaatcgtgcagtgaacctgtcccctccggtcacaacatcaagagctgaactgggactagaagtcatcgccccagagctttttgctaccagaactgccgggtgaaaatctttggaagagaagtttgagaacctgttaaacaagctctctaggtaattctgtgcacgttcagtctgagaactgctgcatctgaagaggccctccagaaaaaggaagaaaagtgggaagcactgtatacacagaagcttcccaaggaaaagctatgaactctacactttggaggaggttgaggcagtgggggtgagagaaggtgactcagggagttgtgcaaatgactgactcatatttcatggatacgagtatggctgatgtaagactgcagttatctcctcctgattcaattaagcacagggaatctactagagggccctgcctccacttccatcaaacaagggaagaaaatgctcttcatgaggtcactgttaactgagccagcatagggaggctcagcagatttgaacatggaattcaatccttcagatcatcctcgggccagcacaatattcctcagtaaatctcagacagacgtgagagaaaaacgcaagagtctcttcattaaccatcatcctccaggacaaatagcaaggaaatacagttcctgctccaccattttcctagatgatagcacagtcagtcaaccaaacctcaagtatacaattaaatgtgtcgctcttgcaatatattatcacatcaaaaacagggacccagatggaaggatgctcttagatattttngatgaaaatcttcaccctctttcgaaatccgaagtgccaccagattatgacaacaaaaccagagcagaagcagattaccggttcggtcggaccctgtcagtgctgctcagtgacggtgaatgtgccatcgtcacctggtgtac

SEQ ID NO: 730914 - DNA, 465 bp, Homo sapiens
tgggtgtgttcatgcacctacgagtcgcagaagtcccgggcagagctggtggggcagcttcagaggctgggatttgacatctctgagcaggaggtgaccgccccggcaccagctgcctgccagatcctgaaggagcgaggcctgcgaccatacctgctcatccatgacggagtccgctcagaatttgatcagatcgacacatccaacccaaactgtgtggtaattgcagacgcaggagaaagcttttcttatcaaaacatgaataacgccttccaggtgctcatggagctggaaaaacctgtgctcatatcactgggaaaagggcgttactacaaggagacctctggcctgatgctggacgttggtccctacatgaaggcgcttgagtatgcctgtggcatcaaagccgagtggtggggaagccttctcctgagtttttcaagtctgcctgcaagcgatagagtg

SEQ ID NO: 730915 - DNA, 668 bp, Homo sapiens
  misc_feature (234)..(234): n is a, c, g, or t
  misc_feature (374)..(374): n is a, c, g, or t
  misc_feature (544)..(544): n is a, c, g, or t
gaagtcagaccaaaatagcaggaaggtattgcagcaagatggatttgggaaaggaccaatctcatttgaagcaccatcagacacctgaccctcatcaagaagagaaccattctccagaagtcattggaacctggagtttgagaaacagagaactacttagaaaaagaaaagctgaagtgcatgaaaaggaaacatcacaatggctatttggagaacagaaaaaacgcaagcagnagagaacaggaaaaggaaatcgaagaggcagaaagagacaacaaaacacagaattgaaggtggagcctcagccacagatagaaaaggaaatagtggagaaagcactggcacctatagagaaaaaaactgagccacctggngagcataaccaaagtatttccttcagtagcctccccgcaaaaagttgtgcctgaggaacacttttctgaaatatgtcaagaaagtaacatatatcaggagaatttttctgagtaccaagaaatagcagtacaaaaccattcttctgaaacatgccaacatgtgtctgaanctgaagacctctctcctaaaatgtactaagaaatatctgtacttcaagacaattcttccaaaatatgccaagacatgaaggaacctgaagacgactctcctaacaatgccaagtaaccatctgt

SEQ ID NO: 730916 - DNA, 723 bp, Homo sapiens
cactttttcacattcacagtgcttcctctgatatctttccttacatcattatacactgttgatatcattttactcttctttctcttctacatttcttaaattttggttcttttcctgtacatgtgttttagcggggcccttttctttgaactttgtctaattagcctgtacatttttgtttcttttaaggtagaacagatctttttttgtttctccttttaagtctactggttttaaaagaggtaaatgtatccatagaccacagtgccttgctttttcctctgccagcacatggagcacgggattagatgcacaaacctatttagggaactattttggtagatgtttgagtttatacagaaattgcagctggtattttattttgctgtacatttactcaacttgtccattagtatttaactatttccagagtttgtttaggagtaagaattgacccattcgttagtttaccatattttttcctggtataaaaaggagccagaaataagccttattgctaaataattaattatgtaagcccacctaggtcctgcataagatccccctcacatacttcacaatatatatgtgtgtgtgtgtgtgtgtgtgtgtgtgtgtgtgtgtgtgtgtgtgtagtgggataaaaaattatacgtgacgaaaatgacgtgattatatatacttgactacactgattgatgggacaaagtgatctaaagtatt

SEQ ID NO: 730917 - DNA, 796 bp, Homo sapiens
  misc_feature (655)..(655): n is a, c, g, or t
  misc_feature (660)..(660): n is a, c, g, or t
gcagtgagggagagtgaggatggcagagaccagtgccttgcccaccggcttcggggagctcgaggtgctggctgtggggatggtgctactggtggaagctctctccggtctcagcctcaataccctgaccatcttctctttctgcaagaccccggagctgcggactccctgccacctactggtgctgagcttggctcttgcggacagtgggatcagcctgaatgccctcgttgcagccacatccagccttctccggcgctggccctacggctcggacggctgccaggctcacggcttccagggctttgtgacagcgttggccagcatctgcagcagtgcagccatcgcatgggggcgttatcaccactactgcacccgtagccagctggcctggaactcagccgtctctctggtgctcttcgtgtggctgtcttctgccttctgggcagctctgccccttctgggttggggtcactatgactatgagccactggggacatgctgcaccctggactactccaagggggacagaaacttcaccagcttcctcttcaccatgtccttcttcaacttcgccatgcccctcttcatcacgatcacttcctacagtctcatggagcagaaactggggaagagtggccatctccaggtaaanaccantctgccagcaaggacgctgctgctcggctggggcccctatgccatcctgtatctatacgcagtcatcgcagacgtgacttacaattcccccagattggagatggtgcccgccctcattgcgcaaatgggtgcccag

SEQ ID NO: 730918 - DNA, 697 bp, Homo sapiens
gcagtgagggagagtgaggatggcagagaccagtgccttgcccaccggcttcggggagctcgaggtgctggctgtggggatggtgctactggtggaagaccccggagctgcggactccctgccacctactggtgctgagcttggctcttgcggacagtgggatcagcctgaatgccctcgttgcagccacatccagccttctccggtaccagccccctccccagtccacaggctctggggtcctgcctggggcctgacccctgggccctgggcagccaggccaagggcatttttactacttacagaaaattggccaagggcagagggtgggcaggctaaaatgggctgaattccagattgattctgaagaacgacagctgatttctggaagacaggggttgctgaaacctgatgaccgagatggtaggctgtacagatcaatggtgtgggttctgtaaccaagcaacctaggtttgcattctggcttcagcatttctagttctgggcttcttccataaatcggatatcatttcctaactcatataggtggtcggaagtatttacttctattatgtgtacctaacttacacataatgctggatacctaggactctacgtaagtgtaggtgaacacaacatgggggcgtgatcaccactactggacccgtatgtatctgggctcctggagtggagggac

SEQ ID NO: 730919 - DNA, 758 bp, Homo sapiens
gcagtgagggagagtgaggatggcagagaccagtgccttgcccaccggcttcggggagctcgaggtgctggctgtggggatggtgctactggtggaaggtgagccaggcagaactggggtgcagcgggggcccagtgggttctgaggacccaggccaccagtgtggagctggcaaggagaggagaggtccccaaacccagctgggtgtccggtcccattggctgcttcccctctgtgcccggactcggggggtgtctgacaattgaacctgtgaggtgcagcacactgcccgctgggagcagagaggaagccaggcaagggtcagggagggagggactttgaaaggggacatctgcccaggagatgatcaagagccaggctttaggacttttcatgtccctccagccaggagaaaatttaatccactccttggaaaatcctgctgagaatcccacataagatcagtcccccaaaaaggctctggggacagacagctctgcctcctgctcttgtgtggctggaaccaaagtccccttcagctctctgccctcaatgccttgacattccgaatgggtggttgtaaagattaaatgggataatgggtataaagtgctagcctaaatagactctagggtataaaaaggttcattcactcccatcctctccagcccaccatattttcactgtgtctactcctatgagcccaaggcaacttcacctctggaggcaactgggtctgcgaggtactacctcactaa

SEQ ID NO: 730920 - DNA, 3538 bp, Homo sapiens
cccgtggggggctcatcctacccacagtaagagcatcctggcgtgaccccactgaggacttcacctcctctcccttggtggacacctatccaggtgggcatcgtgctgcactattctacactgtccaccatgctgtggataggagtgaccgccaggaacatctacaagcaggtgaccaagaaggcccctctgtgcctggacacagaccagccaccgtaccccaggcagcccctgctcaggttttacctcgtcagcggaggggtcccctttatcatctgtggggtcacggctgccacgaacatcaggaattacgggacagaggacgaggacacggcgtactgctggatggcctgggagcccagcctgggcgccttctacggcccagccgccatcatcaccctggtcacctgtgtgtacttcctgggcacctacgtgcagctgcggcgccacccagggcgcaggtacgagctgcgcacacagcccgaggagcagcggcggctggcgacacccgagggcggccgtgggatccggccaggcaccccacccgcacacgatgcccccggcgcctccgtgctgcagaacgagcactcattccaggcacagctgcgcgccgccgccttcacgctgttcctgttcacggccacgtgggccttcggggcgctggcggtgtcacagggccacttcctggacatggtcttcagctgcctgtacggcgccttctgcgtgaccctgggactcttcgtgctcatccaccactgcgccaagcgtgaggacgtgtggcagtgctggtgggcatgctgcccgccccgcaaggacgcccaccccgcacttgacgccaacggggccgcgctgggccgcgccgcctgcctgcactcgccgggactgggccagccacggggcttcgcgcacccaccgggcccctgcaagatgaccaacctgcaggccgcgcagggccacgccagttgcctgtcaccggccaccccgtgctgcgccaagatgcactgcgagccactgacggcggacgaggcgcacgtgcacctgcaggaggagggcgccttcgggcacgacccccacctgcacgggtgccttcagggcagaactaagccgccctactttagccggcacccagcagaggagcccgagtacgcctaccacatcccatccagcctggatggcagcccccgcagctcgcgcacagacagcccccccagctctctggatggcccggcggggacacacacgctggcctgctgcacccagggcgaccccttccccatggtcacccagcccgagggcagtgatgggagccctgccctctacagctgccccacgcagccgggcagggaggcagcgctcgggcccggccacttggagatgctgcggaggacacagtccctgccctttggtggccccagccagaacgggctgcccaagggtaaattgctagaaggcctgccgtttggcaccgacgggaccggcaacatccgaacgggaccctggaaaaacgaaactactgtgtagatgggggcagaggacacggtgttcctggaggagcttcagagcagagtggggggcccatctgccacatgaggtcactgggggtaccgaagtgaccccgcctttcagaagccgttcacacccctgccccttccttgtgatcacacccctgccccttccttgtgatcacacccctgccccttccttgtgttcacacccctgccccttccttgtgatcacacccctgccccttccttgtgatcacacccctgccccttccttgtgttcacacccctgccccttccttgtgatcacacccctgccccttccttgtgaaagacctcagcggggaaacgctccgggccacgcccactccccttatcccaattccgcgtgctggtcccgcacacggtcatccggtttctgtcctgtgatctccagtcctggggcaccctagaggcagagcaggggattccatcaaaggacccactgagaccccagcatggccctgcccgagatgccctgctgcccacggagtcctggcttcccctggtgtggccgggcagggccgagatcgcaggagggggctgccctgacctttcccagtgttcaatgtgtgtgtcttgcgttctactccgggggtggcggcggcaggtctgtccccagcattctcgctctgggcagaaccctcgggaccctccgctgtcgtgtgtctgagccacccctgcagcttcacagggcccctgcacacctctgcccactcagtgtgccctgtcagccctgtccttgtcgtagccccagccctgcagggctgagagcaccacagatgctgggggctgctctggactttggggatggctgtcagcctcagagggccaatggggggctttcacgggcccaaggcttgggaaaatgcccagacatcctttagtgaagactcgacttccaaaaccagccaccgctgggactggattccactccagtataggcacttagcaacacgaaggtttattccaaaaagaaaaggggctgacagacgggagattctcatggacaaaatccctttccctttttctcgtctccatgaacatctgggtaccaagccctgactcaaaggacagatgtggatgacagcaagacttctgtgaaagcaagtggcccgtccctaggtgggagggagtccagagggtcatgggtgtgaaactgtgcacagctttccctccctccctcttcctccttgtctgtgacacatgtgcacccacacacacacacacaaacacatgtgcatatcacacacatgcacacacacaaacacatgtgcatatcacacacgcgcacacacccaaacacgtgcatatcacacacatgcacacacacaaacacgtgcatatcacacacatgcacacaaacgtgcatatcacacacacgcacacacacccaaacacgtgcatatcacacacacgcacacacacaaacacgtgcatatcacacacaaacacacgtgcacacatacttaacacacacttgcacctgctgtgcacatgtgcacacacacgtagtagtgtgttttccagccacccacacactgggtttgcattggagattgtttcaccctgcaaacgtcaacgtcagcagactcgtcggtgcgctgtgctatccggttgggaggtctcaccaggagcagagcctccctaacgtgcacctccgagaagaggggtgtcggggagtgttcccagcacctgctcggtggaagggctctccggagactggcactcagtatctgagtatgaggagcctcacttcccggggtgtcggtaaacttgaccgtgactcagtaacccacagcgtgctcctcccagcaaaccccgtgtgtccttacaggtcgaccagacgggccgtcggaggaccaccaggtggctctgcctctgcctcaccttctcacctgcttccatagctgatgtgaacccgaatccccacgctgtgctgtgtacgcactgtaggtgcagaaccgtccacacaaaaatacagtcttggcattgtt

SEQ ID NO: 730921 - DNA, 1057 bp, Homo sapiens
  misc_feature (197)..(198): n is a, c, g, or t
  misc_feature (200)..(200): n is a, c, g, or t
  misc_feature (202)..(202): n is a, c, g, or t
  misc_feature (204)..(204): n is a, c, g, or t
  misc_feature (283)..(283): n is a, c, g, or t
  misc_feature (382)..(382): n is a, c, g, or t
  misc_feature (893)..(893): n is a, c, g, or t
  misc_feature (916)..(916): n is a, c, g, or t
  misc_feature (934)..(934): n is a, c, g, or t
  misc_feature (936)..(936): n is a, c, g, or t
cgctcactgctgctagtgttcctctcctgctccaggacctccgggtagactcagaccccgggcccattcccagactcagcctcagcccggacttccccagccccgacagcacagtaggccgccaggggcgccgtgtgagcgccctatcccggccacccggcgccccctcccacggcccgggcgggagcggggcgccnngngncngcggggccaggccgaaggagagtttgtccgattcccgagacctggacggtcctacgacagctcacgggcaccctccagngcccactaaaaaagcgctgaagcagcgattcctcaagctgctgccgtgctgcgggcccaagccctgccctcagtcagtgaaaacagcgtggacgatgantttgaattgtccaccgtgtgtcaccggcctgagggtctggagcagctgcaggagcaaaccaaattcacgcgcaaggagttgcaggtcctgtaccggggcttcaagaacaagtcttccctcccatcacatgagccacgtggaatgtcccagcggaattgtcaatgaggagaacttcaagcagatttactcccagttctttcctcaaggagactccagcacctatgccacttttctcttcaatgcctttgacaccaaccatgatggctcggtcagttttgaggactttgtggctggtttgtccgtgattcttcggggaactgtagatgacaggcttaattgggccttcaacctgtatgaccttaacaaggacggctgcatcaccaaggaggaaatgcttgacatcatgaagtccatctatgacatgatgggcaagtacacgtaccctgcactccgggaggaggccccaagggaacacgtggagagcttcttccagaagatggacagaaacaangatggtgtggtgaccattgaggnattcattgagtcttgtcnanaaggatgagaaccatcatgaggtcccatgcactctttgaccatgtcatcttagcccccaggagaacggggtcaaagtttcctgggggacccagctcaaccctaataccgcgggctcaacct

SEQ ID NO: 730922 - DNA, 909 bp, Homo sapiens
  misc_feature (197)..(198): n is a, c, g, or t
  misc_feature (200)..(200): n is a, c, g, or t
  misc_feature (202)..(202): n is a, c, g, or t
  misc_feature (204)..(204): n is a, c, g, or t
  misc_feature (283)..(283): n is a, c, g, or t
  misc_feature (382)..(382): n is a, c, g, or t
  misc_feature (862)..(862): n is a, c, g, or t
  misc_feature (885)..(885): n is a, c, g, or t
  misc_feature (903)..(903): n is a, c, g, or t
  misc_feature (905)..(905): n is a, c, g, or t
cgctcactgctgctagtgttcctctcctgctccaggacctccgggtagactcagaccccgggcccattcccagactcagcctcagcccggacttccccagccccgacagcacagtaggccgccaggggcgccgtgtgagcgccctatcccggccacccggcgccccctcccacggcccgggcgggagcggggcgccnngngncngcggggccaggccgaaggagagtttgtccgattcccgagacctggacggtcctacgacagctcacgggcaccctccagngcccactaaaaaagcgctgaagcagcgattcctcaagctgctgccgtgctgcgggcccaagccctgccctcagtcagtgaaaacagcgtggacgatgantttgaattgtccaccgtgtgtcaccggcctgagggtctggagcagctgcaggagcaaaccaaattcacgcgcaaggagttgcaggtcctgtaccggggcttcaagaacgaatgtcccagcggaattgtcaatgaggagaacttcaagcagatttactcccagttctttcctcaaggagactccagcacctatgccacttttctcttcaatgcctttgacaccaaccatgatggctcggtcagttttgaggactttgtggctggtttgtccgtgattcttcggggaactgtagatgacaggcttaattgggccttcaacctgtatgaccttaacaaggacggctgcatcaccaaggaggaaatgcttgacatcatgaagtccatctatgacatgatgggcaagtacacgtaccctgcactccgggaggaggccccaagggaacacgtggagagcttcttccagaagatggacagaaacaangatggtgtggtgaccattgaggnattcattgagtcttgtcnanaagg

SEQ ID NO: 730923 - DNA, 634 bp, Homo sapiens
  misc_feature (525)..(525): n is a, c, g, or t
  misc_feature (548)..(548): n is a, c, g, or t
  misc_feature (566)..(566): n is a, c, g, or t
  misc_feature (568)..(568): n is a, c, g, or t
aagtcttccctcccatcacatgagccacgtggtgagtcctctggaggcttgaagattatccccctccctgggagtcttgggccatggagggtgggggcggtgaacggaaggggattttgtctctgccctcagcctggtgccctctccttccaggaatgtcccagcggaattgtcaatgaggagaacttcaagcagatttactcccagttctttcctcaaggagactccagcacctatgccacttttctcttcaatgcctttgacaccaaccatgatggctcggtcagttttgaggactttgtggctggtttgtccgtgattcttcggggaactgtagatgacaggcttaattgggccttcaacctgtatgaccttaacaaggacggctgcatcaccaaggaggaaatgcttgacatcatgaagtccatctatgacatgatgggcaagtacacgtaccctgcactccgggaggaggccccaagggaacacgtggagagcttcttccagaagatggacagaaacaangatggtgtggtgaccattgaggnattcattgagtcttgtcnanaaggtacagtccctgcctctacattaccctgacctggactcaggcctgatttagtaatgcagggaa

SEQ ID NO: 730924 - DNA, 450 bp, Homo sapiens
ctttatcttttaaattgcccactaataccatgaggtttaaggtgtggggtggatgctgcggcatcggaggaccctgctggtggaggaaatggttcacgcccgtccccgttccctttgcaggcttgctattgtgcgtctgtgattgacaagaccacgaggctgagcgcgccctggagatttttctataaatggcttaacaccccagtctagactatttgctcggatataagggagacaattgtttttttgttctttgccggcgaaccctggctctgtagggctgacctggaatttaaccagtcttccctgagccggcggaggaggacaaaaaccgccgcgaccccggcagggtgggaagtgcagggcagcgctcccaagacacgcttgttggaggttcgggcctgggtgcttggttgtctgagcctccttttttgtgtttgcctgggtcct

SEQ ID NO: 730925 - DNA, 447 bp, Homo sapiens
cgcctgctttcgcttccagccgcgcgctccgtgccactgccgctctctgcagccccgcgtccccgcagcctccccatggccagcccgcttcgctccgctgcggcccttgcccgccaggcttgctattgtgcgtctgtgattgacaagaccacgaggctgagcgcgccctggagatttttctataaatggcttaacaccccagtctagactatttgctcggatataagggagacaattgtttttttgttctttgccggcgaaccctggctctgtagggctgacctggaatttaaccagtcttccctgagccggcggaggaggacaaaaaccgccgcgaccccggcagggtgggaagtgcagggcagcgctcccaagacacgcttgttggaggttcgggcctgggtgcttggttgtctgagcctccttttttgtgtttgcctgggtcct

SEQ ID NO: 730926 - DNA, 669 bp, Homo sapiens
cgcctgctttcgcttccagccgcgcgctccgtgccactgccgctctctgcagccccgcgtccccgcagcctccccatggccagcccgcttcgctccgctgcggcccttgcccgccaggtacctcgaacccgggcgtttgcggaaggggggaggattggaacccgggtctcggtagctcgcgggcctggccgggcgccttgtcgccgtttcctgcaccatcctccttcgccttgccctccattccgcctccagcgaggcgtcttcccttccccgcatccctgcccgaaatctggagtcccagcctgcaatctccacctcttcgaggttcccgctgcccaggcttgctattgtgcgtctgtgattgacaagaccacgaggctgagcgcgccctggagatttttctataaatggcttaacaccccagtctagactatttgctcggatataagggagacaattgtttttttgttctttgccggcgaaccctggctctgtagggctgacctggaatttaaccagtcttccctgagccggcggaggaggacaaaaaccgccgcgaccccggcagggtgggaagtgcagggcagcgctcccaagacacgcttgttggaggttcgggcctgggtgcttggttgtctgagcctccttttttgtgtttgcctgggtcct

SEQ ID NO: 730927 - DNA, 572 bp, Homo sapiens
tgcccctggagtagaggacatcagcgggcttccttctggagaagttctagagactactgcccctggagtagaggacatcagcgggcttccttctggagaagttctagagaccactgcccctggagtagaggacatcagcgggcttccttctggagaagttctagagaccgctgcccctggagtagaggacatcagcgggcttccttctggagaagttctagagactgctgcccctggagtagaggacatcagcgggcttccttctggagaagttctagagactgctgcccctggagtagaggacatcagcgggcttccttctggagaagttctagagactgctgcccctggagtagaggacatcagcgggcttccttctggagaagttctagagactgctgcccctggagtagaggacatcagcgggcttccttctggagaagttctagagactgctgcccctggagtagaggacatcagcgggcttccttctggagaagttctagagactgctgcccctggagtagaggacatcagcgggcttccttctgggagagttctagagactgctg

SEQ ID NO: 730928 - DNA, 647 bp, Homo sapiens
gccgcggcgctccgacctccgctttcccaccgcccgcagctgaagcacatcccgcagcccggcgcggactccgatcgccgcagttgccctctggcgccatgtcgcagaacggagcgcccgggatgcaggaggagagcctgcagggctcctgggtagaactgcacttcagcaataatgggaacgggggcagcgttccagcctcggtttctatttataatggagacatggaaaaaatactgctggacgcacagcatgagtctggacggagtagctccaagagctctcactgtgacagcccacctcgctcgcagacaccacaagataccaacagagcttctgaaacagatacccatagcattggagagaaaaacagctcacagtctgaggaagatgatattgaaagaaggaaagaagttgaaagcatcttgaagaaaaactcagattggatatgggattggtcaagtcggccggaaaatattccccccaaggagttcctctttaaacacccgaagcgcacggccaccctcagcatgaggaacacgagcgtcatgaagaaagggggcatattctctgcagaatttctgaaagttttccttccatctctgctgctctctcatttgctggccatcggattggggatctatatt

SEQ ID NO: 730929 - DNA, 391 bp, Homo sapiens
tggagaaagttggaggtggtggtgatttcagtcgccttggccgccttgagccggagctgagcggaggcactgggccgagcctgcttcccgggccttcctaccatgccagggctgctccctgcctccgccaccctggcacaccttcacccgcgtaccgcctcctccccgtcgctctgccttttccaaaactcacttgggccctccgtgcgcagggttcttttttggtttttctgtaaaaatcaaaacaaaaaacagagacttttgagaggagcagatgccacctaaagtcccactgcattccctgcaaagcgctcaaatgtggaagccagtcattggcatttttattttttattgattgattgattttttcaccagtggctttttgtaacct

SEQ ID NO: 730930 - DNA, 532 bp, Homo sapiens
ttaaaactacatggaattgttctttatggattatcatggttaatttcaatttttaaaaatatgcaggaagttaaaagactataattccagtattggaagccagtttaagagaatatgactatgtagttacttttaatggaaaggggaagaagaggaagaaaaaggaaagacattgtgttcgtatcttctctgcaacaattataaaatgaatgaggaagtattttggtgtttctaaggtctttccatgatcttgaaatctatatattatagtcatttagtctgtgaaccattttaacaattgggtttcatgttacatatctttaaatttttatgttgaaaatttatagctgtgacacaagatgatagaaattgctcatgctcacatatattccaactggcttttcagcttgctcccttctcttttaatttcagctatcatttttagagccttacagtcacaattgttcttaactatcccaaatttttatttcctatttggactgacttctccataattttagtaactaaatga

SEQ ID NO: 730931 - DNA, 565 bp, Homo sapiens
tgtttacaaggtattggctgaggaactttgtgttggaagttaataaacatcagtgtcaaattggaaagattttgcatatttatattgcaaggaaaaagtcactaggctttcttacttgattaggaagggcacttccatatgtcatctctatgatttgaagtggactatacttctcccttctattggtttaagaattacacacactgtatattcttctaccacgtaataacttagaaggatttattgaaaagttcaaaatatgctgtttttgtttttattccattgatgaaataaatgcatgaatgggagtaacagaatatattaacacatctagagaaaaatattgttgcttatccctgcatagctgctggtacatcacagatagcaacaacaaaaatccataaccagtactatgatttggatgtcttctccataactcatgttgaaatttaactgccattgtgatgatcttggcaagtggaacctctaagtggtgattaagtggcagagtcttcataaatcctgttatttcatgagtggtttagactcctgggaatgagttccc

SEQ ID NO: 730932 - DNA, 516 bp, Homo sapiens
atcaagataactggctgatattttcaaaaagacagatttctttctaataattatagctttcttaaaaaaaaaagagagggggttgcattgcaacatcctcattccccatggctgacagtcagcacagcaactagaaaggatctcactaaatacactgtcaaaaatgtttatgcttaaaatggctggcagatatagcattcccagttccaggtttcatttttgtaccttctctattcaaaaaagcctctatccagcaggaaaacgtgcagaatactcacagacaacagagctgctctacaggctgtaaaggatccacagatacctcatgagaggagcaaacaacaccgagtacagccaactacacatcctagaaaacatggctttacggaatcccctcttgctaagtggatgaatttctacttcttccttttgccttaatgagatcacatggacacaggaaggggaatatcacactctggggactgttgtggggtggggggagaggggagggatagc

SEQ ID NO: 730933 - DNA, 388 bp, Homo sapiens
caaacttgtaatcatgcctacggctaacctctgggttgagagatgaggtttcttttatgctagtttccacctcttgaggcacgaccgtcactcaaatttgttgcattactggattcatctcttttggcacaatacaatataaaagtttggtgtcacttgggttgtgtcatgtttgaagtcatagcattagtgctcagcttacctattcagaaaagtaggtcatgaggctcaagtatcttcatctcattaggaaaaaacagaaatactttaaaaattctattaaactaatagtaatcatgatggccttacatcttatttatccttgtatatatatctgagtttagaattttcataaatgatgagaatattagtatttttgatgagcaag

SEQ ID NO: 730934 - DNA, 583 bp, Homo sapiens
ctaacctcatgatccacccgcctcggcctcccagagtgttgagattacaagcgtaagccactgtgcctggccgatttttcgcctttaaagctggaacaccaaagtgtccccttataagagaaaaccagaaataaacctattccctgcaaatcctaagaaccacccagcacactaagtctactaggagactttcctcctttactgtaggaaagtccccaaagagtccccttgtaaaagaaaagcagaaataaacctattctctgcaaaaattttcaaaaagaagaaacttattttaaaccatgtgctaagcagagcttagggaagtggggtctagcccccaaaggtagccgttaggagagtttacaaatgaaattcacatgagtttagattccaaaacatctcaaggaaaaatgtaatttaaagtgatcctggacagtaagtgtccccagatgcccagaaaaatcaaatgcaaatgctctctagctgaatttaccttcattgcagcaaatgctgttgcttatccagaacacaccagtacattcacatgagctttttacatctggtgttgattctgattgagcca

SEQ ID NO: 730935 - DNA, 580 bp, Homo sapiens
gtgaaattcaaggatgaattagacatagccattatttattagacgctcacattctgcctctggtagaagatgggactacatcttacaaagccattcttcctcaagaaattttttgctagtttgctttaggaataattcaaatagttgggcagacattgactttcttaacactattagacaaaacacatgtaccaagaaaactagagcattttgatttcccaatttgttcaatcctgttttattgaaacaaagatgggaagaaaagcagatggaaataggaatcacaaaattagacaatgtttattatacgcctatttcagacaaatctcaaaaagtgcctttagtagaaaataaagccataaagaaaatggagaaggaatgggaaatgtattggaaacgataacaggggcttcgagattaaaaattgtagagaaaatttctcatctgaggccaatggaattaaaaacagaatacatttgctggactagatattattaggtaagaggatgagaaaataaatattccaactcggcgaaagctaaatggacagaatgcaatttaagagctatttgggttgaga

SEQ ID NO: 730936 - DNA, 680 bp, Homo sapiens
aagctgcctagaagcaataattgaagggtcagacaaaaataactgtccaaatggtgttcttataaaatgttccagagtaacttgtagttagaaaaagttagacttgaaggcaaaaaaaaaggtgtaatcttgaattttgtctattgatcacatgcagaagagctggttgtatatattttcataatactttggtagccaatacaatttatggcaaaatatttttctgagccaaaagataaacttataagacaaagaattgtagccatgtatttaaaaagataatgctttgttttagaaatgaagtactttgcatcatgcattggaatgaaaatagaatgaacaaacaactaaggaaatatagtttgaagttattcagcaaacacatgatagttattttcattgtttctgaaattatgttatatattttaggaaggtgcacactataagcttctgttgtgatagatataaaacaacaaagacaataacaacacacatacaaaaacaaacccaaccaaaactataaaatgtgtcacattcctggagggaagaataaaagcccaccaacttcacaaaaataaataaagtttttgtgtagattaatatctacctattaatggctcatatttcctcagaaaaaaactctaattagaaatattctgtagatgaaggatgggaagaga

SEQ ID NO: 730937 - DNA, 519 bp, Homo sapiens
gcaggtggtgtcatcatgcttggctacttttttgtatttttggtagagacggggtttcgccttgctggccgggatgatctcgatctcctgaccctgtgatatgcccaccttggcctccccaggtgctgggattgcaggcatgagccaccgcacccggcttgcctgtctctattttaaaaaagccaactcagatcaagaattttgattatccagacttgctttattttcttctgtggtatttttttcctttacttacattataaaattcctcagatgcatgtgaagtagagagaatagtataatgaacctccatatacttaccacctagcttttttttttttgagacaggatttcactctttcgcccaggcaggagtgcgatggtgcgatctcagcttactgcaacctctgctccccgggttcaaccgattctcctgcctcagcctccaagtatttgggaggcccaggcagtggatcacaagatcaagagatcgagaccattctggccaacatggtgaaa

SEQ ID NO: 730938 - DNA, 358 bp, Homo sapiens
  misc_feature (144)..(144): n is a, c, g, or t
tttttcttatgatatttctctcccagtttcttggttataattttcacaataatttcaggctgtagccagtagtctgttcgggcagttcttttcttttcctcttcaatctccatgatttcatccagtgcagatttctttttcttnttttctttagactgagttgagctctgggaagattcttttcgtttcactgatgctgaacttcctatcgtcttcagtgcactcggtcccagagtacttgacttggaagatgttgctccggatgagctacatgctcctttactcaaattaaacgtgactttctcttcatcattttctctgcttaattccgtaaaagtagggacctcctgttccttct

SEQ ID NO: 730939 - DNA, 445 bp, Homo sapiens
  misc_feature (134)..(134): n is a, c, g, or t
  misc_feature (357)..(357): n is a, c, g, or t
ggaccatcatcctaaattattatgtctgttacatccatcacagcactccaaaaggtcgccgcaaccccgaggtcagtttcctggtgtagttgtccctcagctccatgcgacccacgcgaacaatctgacagacnaaactgattttctcccttttcaggtctttgcttccgaggtcagtaaacacggctcgcaaattatgtaatctgtctatgtctttaggtaatcctgaactggaccagcgaaccaggtagttctcactgatgaatttggactccacagggtcatatagagacatgaggacttcagcatcttctcctattttacaaaccacatttttgaggttcacaaacaaggccngagaaggggttgcagcaaacttggcttgtctgttaatatctatgttctgcttttgagatttttcctcttgtaacctttcctccacttg

SEQ ID NO: 730940 - DNA, 558 bp, Homo sapiens
  misc_feature (24)..(24): n is a, c, g, or t
gctatcatccgaaattattatgtngcttcagatgcgtgtcacagtttgcctagacgcatccaccaacttttaatggtgtattctcttagtaagaggaacccagcttatattcagctagccagtaacccaaataaatgtccttattcatattcacttatgtcttatgagaattatttgcaatatatataccaagagtaaaataactgggttgtcaggtatatagatatttaagcaaagtagatattaacaaattgtcttctggaattgtttcattagttaaggctcccaatggcgatatataagcattctttttctcagtatctttaccaatacgtgttactattcatcattctaattttgccaacaatatggacataaaatgatatacggatgttttaactgtttatttttcttattataatgcattcttgttaactattcagatttcctctctgatttatgctgattcatatgttttcagaagcattttcttctcctaaaatttccatattttcttattaattgttaggagttccataataatttaggatgatggtc

SEQ ID NO: 730941 - DNA, 525 bp, Homo sapiens
  misc_feature (33)..(33): n is a, c, g, or t
  misc_feature (40)..(42): n is a, c, g, or t
  misc_feature (44)..(44): n is a, c, g, or t
  misc_feature (442)..(442): n is a, c, g, or t
ctctagagaatccggtgtcgacttctgctctgncagagannngnggtcttacagaggctctttactgaccaactgaagtatagacttactgctggacaatctgcatgggaatcacccctccccgcatgtaacccaaaagaggtgtccagagccaaggcttctaccttcattgtccctctctgtgctcaaggagttccattccaggaggaagagatctataccctaagcagatagcaaagaagataatggaggagcaattggtcatggccttggtttccctcaaaacaacgctgcagatttatctgcacaaacatctccacttttgggggaaaggtgggtagattccagttccctggactaccttcaggaggcacgagagctgggagaagaggcaaagctacaggtttacttgggagccagctgagaagagagcagaaggtcncaggtgctggtgcttggatttagccaggctcctccgagcacctcatgcatgtcccagcccctgggccctagccctttcctgcc

SEQ ID NO: 730942 - DNA, 379 bp, Homo sapiens
  misc_feature (49)..(49): n is a, c, g, or t
  misc_feature (55)..(55): n is a, c, g, or t
  misc_feature (59)..(59): n is a, c, g, or t
  misc_feature (61)..(61): n is a, c, g, or t
  misc_feature (66)..(66): n is a, c, g, or t
  misc_feature (83)..(83): n is a, c, g, or t
  misc_feature (94)..(94): n is a, c, g, or t
  misc_feature (159)..(159): n is a, c, g, or t
  misc_feature (171)..(171): n is a, c, g, or t
  misc_feature (201)..(201): n is a, c, g, or t
  misc_feature (235)..(235): n is a, c, g, or t
  misc_feature (313)..(313): n is a, c, g, or t
  misc_feature (319)..(319): n is a, c, g, or t
  misc_feature (336)..(336): n is a, c, g, or t
tgcagggaggcgtcaaggactgggcaggaggtgataataaggtgaggtncaactntttncngcttntagcttttccgtatgtngaattatttcnttaggaaaaactctcagaagtagaattaacagggtaaaaagaggtagaagcatttttatggtttngacacacaggcngttttagaaaggaccattctggttttcacnaccatcactaactagagtccaaaaatggcacctngttcaatttgcatttctctgatactagtgaggctagaaatttttccacatttgttatccagttctacttccttgtttncaggtngtcagtttattttcttngatcatctatcttccttttttttttttttttttcgaggggggg

SEQ ID NO: 730943 - DNA, 538 bp, Homo sapiens
gtctagaggatccggctcgcgagcagataccaccccaaagtcgagggatgtacagcaacagaatgagaagctacaaacaagaaatgggaaaactcgaaacagattttaaaaggtcacggatcgcctacagtgacgaagtacggaatgagctcctgggggatgatgggaattcctcagagaaccagagggcacatctgctcgataacacagagaggctggaaaggtcatctcggagactagaggctggataccaaatagcagtggaaaccgagcaaattggtcaggagatgttggaaaaccttagtcatgacagagaaaagatacagcgagcacgtgaaagacttcgggaaacagatgctaatttgggaaaaagctccaggattctgacagggatgttgcgaagaatcatccagaaccgcatcctgctcgtcatcctagggatcatcgtggtcatcaccatcctgatggcgatcactttttctgtcagaagacctgatgtatctgctcgcgagccgggatcctctagatcaacgcgcat

SEQ ID NO: 730944 - DNA, 336 bp, Homo sapiens
gtgctgaggaggaaccctggacgccactatttcacatggaagaggcaggcgacatgcgagtgctgaggaggaaccctggacgccaccatttcacatggaagaggcaggcgacatgcgagtgctggagaggaaccccggacgccaccatttcacatggaagaggcaggcgacatgcgagtgctggagaggaaccccggacgccaccatttcacatggaagaggcaggcgacatgcgagtgctggagaggaaccccagacgccaccatttcacatgaagaggcaggcgacatgcgagtgctgaggaggaaccccggacgccaccatttcacatggaag

SEQ ID NO: 730945 - DNA, 558 bp, Homo sapiens
  misc_feature (9)..(9): n is a, c, g, or t
gtgatctanaggagctgtcacactgggttcgagtctaaatggaataatagatatgaaataactcaacaagtaaatagctcagctgttggaaatcaaacaaggagaagaaaagaaaaaggacatagtgctataaaagaaaatctttataaaattcaaaaccatttaaaatatgttgccattgatttccttattaacaggttttaatacctccatctttctctaatagttttcagtttattagaaacagtatgtgaactttttagattaaaaatttccagcataggtttatcacttattatatccttttattccttgaaatggatgattgtcaggcagaaatttaggacaaaggagctggaaaatattcatgagactcaggaacaaagctattactccaactgtaaggtttcattataagcacgtaaatatagttcaaagttaccacatctgtaaactcaaaaatgctgctcacttggctggatccaatcaatatttgctaaccattattttagttattcttcatatagacaggcgctttgtttcttagaagaaatcact

SEQ ID NO: 730946 - DNA, 187 bp, Homo sapiens
caaaaagcaggaaccgttcgtgggctttgggtttgacaagccagactccctattcttagatctcctggcttgacaggacccaagctctgcccctatgctgggtaccaagggagttctcctagctgtggcttctctaggttctaggggtgcaagcctctgtgtgtttgtttgttgtgttggctgtgtg

SEQ ID NO: 730947 - DNA, 571 bp, Homo sapiens
  misc_feature (556)..(556): n is a, c, g, or t
aggtgactctacaggatcttagagcttctgctctgagggagcctgaccttgtagtgggtggaggaggtaaggggcctccctccctaaatctgcctcttctgcaagctacttggagacttgcctagttgtacccacccctccaggtccctggtgctagagcttctgagaagggcctttccctttcctctttgcctgctatataaggcaggctcctgtggctctgctggctcagtgtgggctgcaggaggactgcagactcagctgcaattctgaggggggtttgggaggcttgtgcgaggtctcaggcctgtgtggggagctggtgcctcttcctgcccgtatctttctcttccaagggcagtgctccaaggcagggactggagaagccaaggggagagtctaaaagggctagagcatttttaaaaatagacacagggtcttgggactggggtttcggattgagttgcaagcagggagaaaacctgaaggtcggtgcccctatggggctgaccagtagagaatttcctttactgtatttttgtgtctggggcatctntcctgggggccgagc

SEQ ID NO: 730948 - DNA, 459 bp, Homo sapiens
  misc_feature (15)..(15): n is a, c, g, or t
ttatacggattcgancccagcgccactagcctcatggccacctgtttatttgattatttttaacagagaagatccttttaaaaatatctgttaccctggctggagtgcagtgacgtgatcacggctcactgcagccacaaccttccagcttaggtgatcctcccacctcagtgctccccaccctgagtagctgggactataggcatgtgccaccacaccaccatgctaggctaatggtttgtatttgtttgagagatgcagtttccctaagttgcttaggcttcttttttagactcaaataatctgcatgcattggcctcccttagtgctggaattacaggccatctaaatcttttatctcaggtttgccttgtgacaaaaggaggggtactttttctgacatgatgaggcagagaaaggtgaggtgggtgcatcctgtgcatatgattttctcaggtg

SEQ ID NO: 730949 - DNA, 645 bp, Homo sapiens
gcggtaccggcgcatttaggtgagaaggcactagtctacatgcccatctatctggacaccccacagccactccagcccagcatggccatgctgaatgcagacccctcccctagaccacaaatttctgtttggttttccttcctgatgaacagtttctatcctatgtatggagatgggagtgtggtctggagtggggtcaatgtccccgccatgtggctgcctcactttttaatgggctccaaatgacacagagctgggtcacctgggtctcactgcagtttcctggatcagggatactggaaagatgtcatgttccacatggacaccagcctaagctttaggctgacacaaaaagactccctccagcatgcaagtggcatggctcttttttgttaccacgctgttcccttccacttattggtgccagtgcccctcagtcctcctctggtcctgttggtgtccctctccaaatctgaggcctcccttccttagggagagcatcagtcctggagccctccatcgggagctctccattaagaagggcatcttcagaacccagggtggggcccactcgggcagcaggacacacggtgcagcaggagctcaggctgcaatgcagccactgggtgtgacctaaatcgcaca

SEQ ID NO: 730950 - DNA, 440 bp, Homo sapiens
tcgtaacagccttgtcccagcaattctggaatgacccaggacattgccttccttgtccatgaccgcaatccccttaatggattcaagacttcgggacatgtagacattcattccactggcttgcaccgaggaagatcacaggtaagagtcttttaatccaagggccagtcaggccatacttcatctggacaaactgagggattactcctaagaaagttgaagaagcaacggctcccgccattagtaatgatctttctagtggcttacaagtgtaacttctgtttccattgatgctgttgaacgctgccatgtaggcacagaggaaaacctgaggtaaaatcacggacttgatccctttcagtggcgtcattgacaaaaataccgtgggcgccatgaaaggcaggaacgctgcaggtcgaaaaagcttggggatcaggttg

SEQ ID NO: 730951 - DNA, 581 bp, Homo sapiens
  misc_feature (509)..(510): n is a, c, g, or t
  misc_feature (558)..(558): n is a, c, g, or t
agggcacatcagttcagaatactgccaaaaataagttttacaaagcttctgcaagttagaaagaaagagagagggagaagaagccacgtggaaagcagcaggattcagaatggctttgtacttctcaacactagccctggaatccagaagaccatggagcaatgccttccaaattgtgaagaaaaattacttccaaccttgagttcaatactcagccataaattggaggggaggtagaactaaaacacttttagaaatgtaaggtctcaaaagatgtgcttttcgtgcacactttctcaggaagctattgaagatgccctgtattagtctgttttcatgctgctgataaaagacatacctgagactgagaagaaaaagagatttaattggacttctagttccacatggctggggaggcctctgaatcatggcaggaggtgaaaggcacttcttacatggcagccacaagagaaaaatgaggaagaacaaaaagcggaaaccctgataannccatcagatctcatgagatttattcactatcacaggaatagaacaggnccctttgattcattacttccccc

SEQ ID NO: 730952 - DNA, 230 bp, Homo sapiens
acactagcctcatggggatagtcagtagccacttgggggaaactgaggaccatgaaggagcagaaacaggagggcctcctcctgtaatatgacaacatgctccagagacctttttctgagggtccccagcccaccccaactatgggactaaccatacttgaatctaccccaaaccaagggttaagttcacgcctaagcataaggactaaagtgatgaggctagtgtgtac

SEQ ID NO: 730953 - DNA, 415 bp, Homo sapiens
  misc_feature (31)..(31): n is a, c, g, or t
cgccactagtctcatcagcgccactaccctnatcccatcccagtggcatgaatctgaccctttccaagcacatctcttcctcggcactcttctcaatttgctctggccacagggaccaccaacctgttcctcaaatgtgcaagcccctcctactgcagtgcccttgcactgactgttttctgtaccccaaacactcttctctgcgttatttggctctctcctcatcctttgcggcattaaagaccccttctctgatcatcctatctaaacagctctcccccatgaatctcaattacactacccccattgctttcctacaaagcacatattacactttctaagaatgtatttattgggtgcctccttgtttattggttctgcatcagactataaacttcatgaggctagggcgctg

SEQ ID NO: 730954 - DNA, 393 bp, Homo sapiens
ctacggtggaagcgacgtggccgagggggccttgacggcgttggcggggctgggcacaggggcagccgcagggaggcaggtatggcaaggcgtgaagccaccctggaaggaactggaccaaggtcttcagaggtgcgacagggtctggaatctgaccttactctagcaggagtttttgtagactctccctgatagtttagtttttgataaagcatgctggtaaaaccactaccctcagagagagccaaaaatacagaagaggcggagagcgcccctccaaccaggctgttattcccctggactccgtgacatctgtggaattttttagctctttaaaatctgtaatttgttgtctattttttcattctaaataaaacttcagtttgcacctag

SEQ ID NO: 730955 - DNA, 479 bp, Homo sapiens
  misc_feature (28)..(28): n is a, c, g, or t
cacagactgcgccgggcggttacatctnaatgagcccacagctgcctgttgacctggtgtcatcacgagggtgatcactatttccagcaagctctttgtccctcaaagcccagggatcaggggcagcccgtggaagacgagccactggttccagcgaggcacaaggagagaggttaagctgcttctaccctgttcaactgtgatgagattccagcgaaaatcagcattgagggcctcaggtgtttgcagggggctctggtatgttagaaaaactagagggaggggtctgcctttgtgtctgtttgtgagcgtgtctactcaagtaggaaaggggagcacagatttttacaaaatagatgtgggcggtttcttgtagtcttgcctaactgaaaccatgtttgccagagattacttggaattaccctaataggtgctttgtcaaaatacttggtgcgggcccagacagtgagggggtccga

SEQ ID NO: 730956 - DNA, 546 bp, Homo sapiens
caggatctgatcgaatcgacggttctcccttttatgtttcaccaaaccatttgtagagctacaaaaggtatcctttcttattttcagtagtcagaattttatctagaaatcttttaacacctttttagtggttatttctaaaatcactgtcaacaataaatctaaccctagttgtatccctcctttcagtatttttcacttgttgccccaaatgtgaaagcatttcattcctttaagaggcctaactcattcaccctgacagagttcacaaaaagcccacttaagagtatacattgctattatgggagaccacccagacatctgactaatggctctgtgcccacactccaagacctgtgccttttagagaagctcacaatgatttaaggactgtttgaaacttccaattatgtctataatttatattcttttgtttacatgatgaaactttttgttgttgcttgtttgtatataatacaatgtgtacatgtatctttttctcgattcaaatctcaacccttaggactctggtatttttgatctggc

SEQ ID NO: 730957 - DNA, 283 bp, Homo sapiens
  misc_feature (34)..(34): n is a, c, g, or t
  misc_feature (70)..(70): n is a, c, g, or t
gcttgtgcgaaatcctcctcctcctgctcatctnctcttgctgaatggactctgggagggctactctgcntttctctgagctctcaggtgcagctcacagccttctttgtctccagataacaggttggtggtatagcgtacgtacctcagcctcacacagcagtgccagtgggcacacgggccgtagcaacgggcagtcagaggtggcagcccatgcctgtgccagcatgtgtgacgagatggtcacactgtggaggctggccgtgctggaccctgcactcag

SEQ ID NO: 730958 - DNA, 311 bp, Homo sapiens
gtctagagatccctgtggagacgggtctcaggaacacataatggatacaatccagcatgtcacaaagcattatcattctttcttctagattatggcaaagttcctgacttttgttcttccccttgccataagccagtgttggatctggtcttgccttagctgctacagctaacttttaaaaccatcatcatggtcaggcatggtggctcacgcctgcaatcccggcacttcgggaggccgaggcaggtggattacctgaggtcaggaattcaagaccagcctggccaacgtggtgaaaccccgtctccaca

SEQ ID NO: 730959 - DNA, 480 bp, Homo sapiens; identical to SEQ ID NO: 105232

SEQ ID NO: 730960 - DNA, 579 bp, Homo sapiens
gcgactctgagaggatcccctcgcgaacgtgttatcccacatatttcagaatgaaaaaaattaaaatatagactataacaatgaaaggccatatttctttaataagcacgaatcatctttcaaacattattctgctgataagacttagtttttacttccctgaatttcactgcaaccaataatagcacagtcttttcattttttacttaattttagttctgaataggtcatatattcatatggcttaatattttaaaggtaacaaagggtacacatttatcacattttaaactgtggtgaaataattagtagttgagaatgttaatttcaatatgcttctaactagatcaaatctgaaaatatccttaaatatgaccattctaaatacattgctatatactagtatattatattcatttatgataccagtggctttgaaatcaaagtgctacaaattaccaaaacactacagagtcctattagatggctaaatttcagagatttttaaatgccatgcaaactatagtaatgtacagtttatccaatgcatatgcatgcatgggataacacgttcgcgag

SEQ ID NO: 730961 - DNA, 282 bp, Homo sapiens
tgatgactctagaggatcctaagacatggcgaaacacatcaatgccagtcataggagatcactctattttgaaaaatataaaactgtttcattgcaaatctatggaaacaatgtcacaggggccaagagctgtcacttcgagtcaaagaaggcccacttcactgtggcgctgatggccagtgatgtcaaggcgaattacaccccgactcaccaagagagaaatcaaagtcaggagaggaacattcagctagtgacgttcctcatcccagtgacgttcctcat

SEQ ID NO: 730962 - DNA, 310 bp, Homo sapiens
  misc_feature (297)..(297): n is a, c, g, or t
atcagctcggtccagcggaacagcaaggaagtggatgagctgggatgcaaccccaggttgtctggctggagagaaaaacacagagaaagatgccagaaatgaaaggtgggggctattttctcacagaacttaaaatgaattgaggagaggaggccaggggttcccaggtggccgcctgcccacagtgccacgggctggtaggcggttttcttcactagtccacaaataaacgagaaggaagactaggaaatatttaccaagtgaactgtgctggtagaggaaggacagtcttgggtngcttgttccgctg

SEQ ID NO: 730963 - DNA, 479 bp, Homo sapiens
ctcagtgcccaggctgctgccaggcacggtcacgtcaccttgctccagacataagttgttctgcttttttgcaaatcgaggaggaatacgggaggaaaggcctcgacctttgacaggcacctgcacggcctgctccttctttcttctctcttcctccagcaggcggcgctgcttcttggtcaggacttcgatgaagccttcgcccaccatagaacccacctcactctcctccccggggctggacccgcaattttcaatgatggcacttccatagttcaggtcaaactgtttcatggcctctccctgttcacctgccctcggagcagccaacttggcctccttctctgcctttttactggaggcttcgggaaggtcagcactggcatgggctgcccgctccagggcatagggggagtggccactcccactgctgcagccactaagacctccaggcaaggcctcgtctggggcatctgtcc

SEQ ID NO: 730964 - DNA, 618 bp, Homo sapiens; identical to SEQ ID NO: 728728

SEQ ID NO: 730965 - DNA, 401 bp, Homo sapiens
  misc_feature (15)..(17): n is a, c, g, or t
  misc_feature (21)..(22): n is a, c, g, or t
gtagttcagcccagnnntggnngacagcgctggttcccggctccccgcaccatcatggctttgcctctgaggcccctgacccggggcttggccagcgctgccaaaggaggccacggaggagcaggagctcgtacctggcgtctgctgaccttcgtgctggcgctgcccagcgtggccctctgcaccttcaactcctatctccactcgggccaccgcccgcgccccgagttccgtccctaccaacacctccgcatccgcaccaagccctacccctggggggacggcaaccacactctgttccacaatagccacgtgaaccctctgcccacgggctacgaacacccctgaggccccggacgcccccggacacaataaaggtgtgaagcttcaaaaaaaaaaaa

SEQ ID NO: 730966 - DNA, 422 bp, Homo sapiens
  misc_feature (4)..(4): n is a, c, g, or t
  misc_feature (11)..(11): n is a, c, g, or t
  misc_feature (25)..(25): n is a, c, g, or t
  misc_feature (320)..(320): n is a, c, g, or t
  misc_feature (322)..(322): n is a, c, g, or t
  misc_feature (373)..(373): n is a, c, g, or t
  misc_feature (390)..(390): n is a, c, g, or t
  misc_feature (400)..(400): n is a, c, g, or t
cccngagttancctgagcaaaaacngaatgcagccaaccttgagtgacgcaagatacaaagagtcctggcgtaatcttcgtgctcaaggctacaagctgacaatagaagcgctccccttccaggctgcccgggcctctggagatatagccagtgatttgcgctacaagtcagacctgatcggcatgaagggcataggatggctggcgctgagatccccacagatggagagtgcaaagaaggctggagaactcatcagcgagaccaagtaccgtaaaaaaccagacagtatcaagttcaccacagtggttgactccccagnanctggttcatgccaagaacagctattattgcactgcaatggagcggcatgtntagatcttggagatgcnagaattcccntgcacaagatacaaccctgatt

SEQ ID NO: 730967 - DNA, 399 bp, Homo sapiens
  misc_feature (5)..(5): n is a, c, g, or t
  misc_feature (297)..(297): n is a, c, g, or t
  misc_feature (299)..(299): n is a, c, g, or t
  misc_feature (350)..(350): n is a, c, g, or t
  misc_feature (367)..(367): n is a, c, g, or t
  misc_feature (377)..(377): n is a, c, g, or t
tggtnacctggtcatgcaagaatgccaggtctggcagtgccacgactacaggacacagtatcacaagttcacagcactgcccgaggacctgaagatggcctgggccaagaaagcccatgccctgcagagtgatttgcgctacaagtcagacctgatcggcatgaagggcataggatggctggcgctgagatccccacagatggagagtgcaaagaaggctggagaactcatcagcgagaccaagtaccgtaaaaaaccagacagtatcaagttcaccacagtggttgactccccagnanctggttcatgccaagaacagctattattgcactgcaatggagcggcatgtntagatcttggagatgcnagaattcccntgcacaagatacaaccctgatt

SEQ ID NO: 730968 - DNA, 361 bp, Homo sapiens
  misc_feature (6)..(6): n is a, c, g, or t
  misc_feature (10)..(10): n is a, c, g, or t
  misc_feature (76)..(76): n is a, c, g, or t
aatganttgntgaccatttaggaagcagcaccaagtctattacaggcatggtgtgaacttgatgtttgacctgtgnatcaaaattgaaccattgtacagtttggcttctgtttgcttcaaaatatgtagaattgtggttgatgattaatttgcgagactaactttgagagtgtaacagttttgaagaaaacattgaatgttttgcaaatgaaggggcttcacggaatgttacaatgttactaatataatttggcttttgttatgcaaattgttaacaccagctattaaaatatattttagtggaaatgcctttaattcatatttttttcctctacactgtggaatctttaaagcctggtgg

SEQ ID NO: 730969 - DNA, 384 bp, Homo sapiens
  misc_feature (20)..(20): n is a, c, g, or t
  misc_feature (319)..(319): n is a, c, g, or t
  misc_feature (339)..(339): n is a, c, g, or t
agaaatcttgggcctgagtnaatggataggtcctaggaggtggctggggttgagaatagaagggcctggacagattatgattgctcaggcataccaggttatagctccaagttccacaggtctgctaccacaggccatcaaaatataagtttccaggctttgcagaagaccttgtctccttagaaatgccccagaaattttccaaaccctcctcggtatccatggagagcctggggccagatatctggctcatctctggcattgcttcctctccttccttcctgcatgtgttggtggtggttgtggtgggggatgtggntgggggatgtcctggctgangctgccaaatttcatcccaccctccttgcttatcgtccctgtttt

SEQ ID NO: 730970 - DNA, 415 bp, Homo sapiens
aaaatagaagacccaaataaaatcagaaatgacaaaggagacattacaatgaacacacagaaatacaaaggatcattagagactgttatgaacaactatacactaataaattggaaaacctagaggaaataaagtcctgaatatatatatcctactaagattgaaccaggaagaaacagaaaacctgaacagacaaataatgagtaatgagattgaatcagtaatgaaacatcttccaacaaagaaaagccgaggaccaaatggttttactgctgaattttactaaaattataaagaacaggtaacgtcaattcttctcaaactattccaaaaagtggaagaggaaggaattcttcctaactcattctatgaagccagaattaccctgatatcaaaaataagacaaggacatgac

SEQ ID NO: 730971 - DNA, 613 bp, Homo sapiens
  misc_feature (304)..(304): n is a, c, g, or t
  misc_feature (307)..(307): n is a, c, g, or t
  misc_feature (374)..(374): n is a, c, g, or t
gctgatgaggggctgcagcatgcaattcacttcaccagcagtcactaaggtctgatctcttttctaaccatacctggaagatggaatgctggacccagggtatgcatagaaaatgggagttattagaaaagcagctttgcttgctttaacccaggaattgtatttctgacttttagacttggactgggactacaccatcaactttccttggtctccagcttgcagacaacagattatgggacttgccagcctccataatcagaaggctttgacatatcaatgcaccagggatcttaccaaactnaantttaagcacttatagctcaagattctccctctgagatgaaacatacttccaccctgtcatgtgtcancttcagaagatatcaattgctcaagaaagtgttggacaagcagaaaagcacactgaacatttctggacttgtgaaaagctctgaatatggatctctcagggatattccatccccaccaatgctttaccaatgcgagagctggccaggctgagacatttaatgataacatggaacaatttattcaggaagatagtcaactactcatgtggctttatgattataaaacccactgaaaattg

SEQ ID NO: 730972 - DNA, 435 bp, Homo sapiens
ttaatctcaacttaatttcagtaatgaaaaatttgctctatatgccttcattctgcccatgctgttattgtcacaaactacatctttataataattatatgtccatcaacatagttttataattacgcagttttaaaaatcaggagggaagaacaagagttacgaacagatatacattgtcttgctgctccaaaatctgcaatgtaaaaggccccatgcacaagggcaatgtgctaattctgttggagtcatgagtgagaggcccagaggttgcacctcacttggctgctcactgggtcttggatgcagggttcaaccacttggccagtgggaatggtgtgctacgatctgctcctttattttattttttgctcaccacacgggaattgtgatgcacccttaaataaagcatttgtgttccaaattaaaaaaaaa

SEQ ID NO: 730973 - DNA, 530 bp, Homo sapiens; identical to SEQ ID NO: 728729

SEQ ID NO: 730974 - DNA, 774 bp, Homo sapiens
  misc_feature (35)..(35): n is a, c, g, or t
  misc_feature (89)..(90): n is a, c, g, or t
  misc_feature (99)..(99): n is a, c, g, or t
  misc_feature (122)..(122): n is a, c, g, or t
  misc_feature (131)..(131): n is a, c, g, or t
  misc_feature (139)..(139): n is a, c, g, or t
  misc_feature (142)..(142): n is a, c, g, or t
  misc_feature (170)..(170): n is a, c, g, or t
  misc_feature (172)..(172): n is a, c, g, or t
  misc_feature (188)..(188): n is a, c, g, or t
  misc_feature (225)..(225): n is a, c, g, or t
  misc_feature (261)..(262): n is a, c, g, or t
  misc_feature (286)..(286): n is a, c, g, or t
  misc_feature (309)..(309): n is a, c, g, or t
  misc_feature (314)..(314): n is a, c, g, or t
  misc_feature (317)..(317): n is a, c, g, or t
  misc_feature (347)..(347): n is a, c, g, or t
  misc_feature (368)..(368): n is a, c, g, or t
  misc_feature (370)..(370): n is a, c, g, or t
  misc_feature (373)..(373): n is a, c, g, or t
  misc_feature (393)..(393): n is a, c, g, or t
  misc_feature (396)..(396): n is a, c, g, or t
  misc_feature (401)..(401): n is a, c, g, or t
  misc_feature (406)..(406): n is a, c, g, or t
  misc_feature (409)..(409): n is a, c, g, or t
  misc_feature (725)..(725): n is a, c, g, or t
  misc_feature (727)..(727): n is a, c, g, or t
  misc_feature (731)..(731): n is a, c, g, or t
  misc_feature (738)..(738): n is a, c, g, or t
ttatttgtataagaaatgtaagaaaaaaaatatanaaagaagaggataggattttgtttatttgtatggatggacccttggtataaaannacttttggngctttccattcatttggtttagnacagccagngagcttcncgnactttctttctttttttttttttttttnanacagagccttgcttgntctgtcacccaggctagagtgcagtagcacgatcttngcttactgcaaccacggctgccggggggcaaggganncccaggcgcccagccccctgagtngctgggattatggacaaatgccnccacnccnggcgaatttttttttttttttttgtatttntagtagagacagagttttgcngngtnggtcaggctggtcttgaacnccnggccncatangantcacctgcctctgcctcccaaagttctgggaggacagacatgagctaccatgctgcccttgtattttcttatctgtacccagtgtaactacacgtttactggaactgtgtttttaagactgacagttgtttataatggattagtcgtaagtgccaaaaagtctcagttgatattatctttacaaatgacttgaccttaatgttataaaagtagttactgtttttttttaattggaggcagacttgatatttcagagttgcatagtaaaagcaatttgttaatttttgtgtactttcagataaactattacaataangnaggngcagaangtagtattttggaggttgatttaaattcagcaacgc

SEQ ID NO: 730975 - DNA, 1870 bp, Homo sapiens
cttgcgttgcacccgggctgagtgcggccgcgacggggcgggcggactctcgggcgctcagagctggcctcgggtcctcggagcctggcgctcgaacctcccttccgacctccacccggaccccgaccccgacccggcctggcccggcccccgcccccgccccccgggccgatggactactcctacctcaattcgtacgactcgtgcgtggcggccatggaggcgtccgcctacggcgactttggcgcctgcagccagcccggcggcttccaatacagccccctgcggcccgctttccccgcggcagggccgccctgccccgcgctcggctcctccaactgcgcacttggcgccctacgcgaccaccagcccgcgccctactcggcagtgccctacaagttcttcccagagccatccggcctgcacgagaagcgcaagcagcggcgcatccgcaccacgttcaccagcgcgcagctcaaggagctggagcgcgttttcgctgagacccactaccccgacatttacacgcgtgaggagctggcgctcaagatcgacctcactgaggctcgcgtgcaggtctggttccagaaccgccgggccaagttccgcaaacaggagcgcgcggccagcgccaagggcgcggcgggcgcggcgggcgccaaaaagggcgaggcgcgctgctcctccgaggacgacgattccaaggagtccacgtgcagccccacgcccgatagcaccgcctcgctgccgccgccgcctgcgcccggcctggccagcccgcgcctgagccccagcccgctgcccgtcgcactgggctccgggccgggacctgggccggggccacagccgctcaagggcgcactgtgggccggtgtggcgggcggtgggggcggcgggcctggcgcgggagcggccgaactacttaaggcttggcagccggcggagtccggccccgggcccttctccggggttctgtcctcctttcaccggaagcccggccccgccctgaagaccaatctcttctagctgccggcctctggaggctccgagcctgcccccagagacgtccctgcccctccaggacctgacagcccctcccatcctggccacccgcctggaagtccccatccgtctccactccctactgtctcacccctcggtgtgtcctccccaactttggagaccaagtcagggccactctcgtcctcacccaccctctaccagcagagcggagttctttataccgggacctcctccaggagaaccccggagctccttctagcttggccttctttggatgcggtatcacatgaggcctgtccctaacagtgccctcaaagtgaaggtcctcaaggaggatcggcacagcccccttccctggctctgcagcggctgggtcaccccttacgctggtgatcaggaaagcccgctgccccacccctcgggcccacccgtacagaggctggtggtcgccgggataattaatgaccaccgccaattcatccctcacgtgtctcctctcttccctagcccgtctggcacagagggtggacctgttagaggagtggaggggctgcctggggaatgggacagagggattctctttccctaatttttttggttgtcctttttctttgaaaaacttgtaatttattgaagttttactcaatccaaataaaacttaatttattgaagacatcacgccgcaacccttacgactgcccaggaggctgcttgcaagaccctgtcccgggctgagacctgcgaggaacctccctcccccaccctgccgccgtgcatccccagagcagggcagcacagaccaggagacagtgagaactaagcaaactggcactttatggctgagatc

SEQ ID NO: 730976 - DNA, 958 bp, Homo sapiens
tttgagctggtcttcatagtcctggctgagcactacaaggtggtggtaaatggaaatcccttctatgagtacgggcaccggcttcccctacagatggtcacccacctgcaagtggatggggatctgcaacttcaatcaatcaacttcatcggaggccagcccctccggccccagggacccccgatgatgccaccttaccctggtcccggacattgccatcaacagctgaacagcctgcccaccatggaaggacccccaaccttcaacccgcctgtgccatatttcgggaggctgcaaggagggctcacagctcgaagaaccatcatcatcaagggctatgtgcctcccacaggcaagagctttgctatcaacttcaaggtgggctcctcaggggacatagctctgcacattaatccccgcatgggcaacggtaccgtggtccggaacagccttctgaatggctcgtggggatccgaggagaagaagatcacccacaacccatttggtcccggacagttctttgatctgtccattcgctgtggcttggatcgcttcaaggtttacgccaatggccagcacctctttgactttgcccatcgcctctcggccttccagagggtggacacattggaaatccagggtgatgtcaccttgtcctatgtccagatctaatctattcctggggccataactcatgggaaaacagaattatcccctaggactcctttctaagcccctaataaaatgtctgagggacaaaccatgaagtgacgaattaaaccctctatattattaattggataaaatgctgtaaaaccggttattagcatgactcaaactaagtttaaatgtttgcatgtctaaagcaactttctggagtgatggatatgttccataccctaggtcacacagctctgtgcatttgttagaactcattggctgtatattttattttatt

SEQ ID NO: 730977 - DNA, 966 bp, Homo sapiens
gacatctttcagtcgcaaatctggggaccctctcataaccgctttctctttctgtgcccacagggacccccgatgatgccaccttaccctggtcccggacattgccatcaacagctgaacagcctgcccaggggttgcagcccaaggtgtactaacccagcacctagagaaacgccggagtctaatgggtgtgtcatagatatctgtcgactcttggagaataatatcgcttcttcctcacttcacagaccatggaaggacccccaaccttcaacccgcctgtgccatatttcgggaggctgcaaggagggctcacagctcgaagaaccatcatcatcaagggctatgtgcctcccacaggcaagagctttgctatcaacttcaaggtgggctcctcaggggacatagctctgcacattaatccccgcatgggcaacggtaccgtggtccggaacagccttctgaatggctcgtggggatccgaggagaagaagatcacccacaacccatttggtcccggacagttctttgatctgtccattcgctgtggcttggatcgcttcaaggtttacgccaatggccagcacctctttgactttgcccatcgcctctcggccttccagagggtggacacattggaaatccagggtgatgtcaccttgtcctatgtccagatctaatctattcctggggccataactcatgggaaaacagaattatcccctaggactcctttctaagcccctaataaaatgtctgagggacaaaccatgaagtgacgaattaaaccctctatattattaattggataaaatgctgtaaaaccggttattagcatgactcaaactaagtttaaatgtttgcatgtctaaagcaactttctggagtgatggatatgttccataccctaggtcacacagctctgtgcatttgttagaactcattggctgtatattttattttatt

SEQ ID NO: 730978 - DNA, 1033 bp, Homo sapiens
atacaccgggcacccagtctcctttcttcctgctgctgctcctcacagtgcttacagctaccacagcccctaaacccgcaacagttgttacgggttctggtcatgcaagctctaccccaggtggagaaaaggagacttcggctacccagagaagttcagtgcccagctctactgagaagaatgctgtgagtatgaccagcagcgtactctccagcctgggtgacagagtaagaccccatctcttataagaaaaaaagacaggaaagaaaagaaaaagaaaatttcttcccacatctggctctgctaagctgagagagaatgggaccccccgttctcttcccacagcctgtgccatatttcgggaggctgcaaggagggctcacagctcgaagaaccatcatcatcaagggctatgtgcctcccacaggcaagagctttgctatcaacttcaaggtgggctcctcaggggacatagctctgcacattaatccccgcatgggcaacggtaccgtggtccggaacagccttctgaatggctcgtggggatccgaggagaagaagatcacccacaacccatttggtcccggacagttctttgatctgtccattcgctgtggcttggatcgcttcaaggtttacgccaatggccagcacctctttgactttgcccatcgcctctcggccttccagagggtggacacattggaaatccagggtgatgtcaccttgtcctatgtccagatctaatctattcctggggccataactcatgggaaaacagaattatcccctaggactcctttctaagcccctaataaaatgtctgagggacaaaccatgaagtgacgaattaaaccctctatattattaattggataaaatgctgtaaaaccggttattagcatgactcaaactaagtttaaatgtttgcatgtctaaagcaactttctggagtgatggatatgttccataccctaggtcacacagctctgtgcatttgttagaactcattggctgtatattttattttatt

SEQ ID NO: 730979 - DNA, 829 bp, Homo sapiens
atacaccgggcacccagtctcctttcttcctgctgctgctcctcacagtgcttacagctaccacagcccctaaacccgcaacagttgttacgggttctggtcatgcaagctctaccccaggtggagaaaaggagacttcggctacccagagaagttcagtgcccagctctactgagaagaatgctgtgagtatgaccagcagcgtactctccagcctgggtgacagagtaagaccccatctcttataagaaaaaaagacaggaaagaaaagaaaaagaaaatttcttcccacatctggctctgctaagctgagagagaatgggaccccccgttctcttcccacagcctgtgccatatttcgggaggctgcaaggagggctcacagctcgaagaaccatcatcatcaagggctatgtgcctcccacaggcaagagctttgctatcaacttcaaggtgggctcctcaggggacatagctctgcacattaatccccgcatgggcaacggtaccgtggtccggaacagccttctgaatggctcgtggggatccgaggagaagaagatcacccacaacccatttggtcccggacagttctttgatctgtccattcgctgtggcttggatcgcttcaaggtttacgccaatggccagcacctctttgactttgcccatcgcctctcggccttccagagggtggacacattggaaatccagggtgatgtcaccttgtcctatgtccagatctaatctattcctggggccataactcatgggaaaacagaattatcccctaggactcctttctaagcccctaataaaatgtctgagg

SEQ ID NO: 730980 - DNA, 449 bp, Homo sapiens
aggggttgcagcccaaggtgtactaacccagcacctagagaaacgccggagtctaatgggtgtgtcatagatatctgtcgactcttggagaataatatcgcttcttcctcacttcacagaccatggaaggacccccaaccttcaacccgcctgtgccatatttcgggaggctgcaaggagggctcacagctcgaagaaccatcatcatcaagggctatgtgcctcccacaggcaagagctttgctatcaacttcaaggtgggctcctcaggggacatagctctgcacattaatccccgcatgggcaacggtaccgtggtccggaacagccttctgaatggctcgtggggatccgaggagaagaagatcacccacaacccatttggtcccggacagttctttgatctgtcccattcgctgtggtggcagaattgggatcctctagatcac

SEQ ID NO: 730981 - DNA, 645 bp, Homo sapiens
atacaccgggcacccagtctcctttcttcctgctgctgctcctcacagtgcttacagctaccacagcccctaaacccgcaacagttgttacgggttctggtcatgcaagctctaccccaggtggagaaaaggagacttcggctacccagagaagttcagtgcccagctctactgagaagaatgctgtgagtatgaccagcagcgtactctccagcctgggtgacagagtaagaccccatctcttataagaaaaaaagacaggaaagaaaagaaaaagaaaatttcttcccacatctggctctgctaagctgagagagaatgggaccccccgttctcttcccacagcctgtgccatatttcgggaggctgcaaggagggctcacagctcgaagaaccatcatcatcaagggctatgtgcctcccacaggcaagagctttgctatcaacttcaaggtgggctcctcaggggacatagctctgcacattaatccccgcatgggcaacggtaccgtggtccggaacagccttctgaatggctcgtggggatccgaggagaagaagatcacccacaacccatttggtcccggacagttctttgatctgtcccattcgctgtggtggcagaattgggatcctctagatcac

SEQ ID NO: 730982 - DNA, 754 bp, Homo sapiens
tttgagctggtcttcatagtcctggctgagcactacaaggtggtggtaaatggaaatcccttctatgagtacgggcaccggcttcccctacagatggtcacccacctgcaagtggatggggatctgcaacttcaatcaatcaacttcatcggaggccagcccctccggccccagggacccccgatgatgccaccttaccctggtcccggacattgccatcaacagctgaacagcctgcccaccatggaaggacccccaaccttcaacccgcctgtgccatatttcgggaggctgcaaggagggctcacagctcgaagaaccatcatcatcaagggctatgtgcctcccacaggcaagagctttgctatcaacttcaaggtgggctcctcaggggacatagctctgcacattaatccccgcatgggcaacggtaccgtggtccggaacagccttctgaatggctcgtggggatccgaggagaagaagatcacccacaacccatttggtcccggacagttctttgatctgtccattcgctgtggcttggatcgcttcaaggtttacgccaatggccagcacctctttgactttgcccatcgcctctcggccttccagagggtggacacattggaaatccagggtgatgtcaccttgtcctatgtccagatctaatctattcctggggccataactcatgggaaaacagaattatcccctaggactcctttctaagcccctaataaaatgtctgagg

SEQ ID NO: 730983 - DNA, 570 bp, Homo sapiens
tttgagctggtcttcatagtcctggctgagcactacaaggtggtggtaaatggaaatcccttctatgagtacgggcaccggcttcccctacagatggtcacccacctgcaagtggatggggatctgcaacttcaatcaatcaacttcatcggaggccagcccctccggccccagggacccccgatgatgccaccttaccctggtcccggacattgccatcaacagctgaacagcctgcccaccatggaaggacccccaaccttcaacccgcctgtgccatatttcgggaggctgcaaggagggctcacagctcgaagaaccatcatcatcaagggctatgtgcctcccacaggcaagagctttgctatcaacttcaaggtgggctcctcaggggacatagctctgcacattaatccccgcatgggcaacggtaccgtggtccggaacagccttctgaatggctcgtggggatccgaggagaagaagatcacccacaacccatttggtcccggacagttctttgatctgtcccattcgctgtggtggcagaattgggatcctctagatcac

SEQ ID NO: 730984 - DNA, 539 bp, Homo sapiens
  misc_feature (5)..(5): n is a, c, g, or t
cagcnactaggctgagtaggggattccccacgcacctgtcaactgtctaatgaccttcattcctgcgcgtgtcttcagcacccccggggcacttggtgtttgttctctgtccattcgctgtggcttggatcgcttcaaggtttacgccaatggccagcacctctttgactttgcccatcgcctctcggccttccagagggtggacacattggaaatccagggtgatgtcaccttgtcctatgtccagatctaatctattcctggggccataactcatgggaaaacagaattatcccctaggactcctttctaagcccctaataaaatgtctgagggacaaaccatgaagtgacgaattaaaccctctatattattaattggataaaatgctgtaaaaccggttattagcatgactcaaactaagtttaaatgtttgcatgtctaaagcaactttctggagtgatggatatgttccataccctaggtcacacagctctgtgcatttgttagaactcattggctgtatattttattttatt

SEQ ID NO: 730985 - DNA, 335 bp, Homo sapiens
  misc_feature (5)..(5): n is a, c, g, or t
cagcnactaggctgagtaggggattccccacgcacctgtcaactgtctaatgaccttcattcctgcgcgtgtcttcagcacccccggggcacttggtgtttgttctctgtccattcgctgtggcttggatcgcttcaaggtttacgccaatggccagcacctctttgactttgcccatcgcctctcggccttccagagggtggacacattggaaatccagggtgatgtcaccttgtcctatgtccagatctaatctattcctggggccataactcatgggaaaacagaattatcccctaggactcctttctaagcccctaataaaatgtctgagg

SEQ ID NO: 730986 - DNA, 702 bp, Homo sapiens
ccccgattatgaatggcggaggcgtgaatggcgtacgcgttgaaggccggaggcgtagaatggccatcatcatcaagggctatgtgcctcccacaggcaagagctttgctatcaacttcaaggtgggctcctcaggggacatagctctgcacattaatccccgcatgggcaacggtaccgtggtccggaacagccttctgaatggctcgtggggatccgaggagaagaagatcacccacaacccatttggtcccggacagttctttgatctgtccattcgctgtggcttggatcgcttcaaggtttacgccaatggccagcacctctttgactttgcccatcgcctctcggccttccagagggtggacacattggaaatccagggtgatgtcaccttgtcctatgtccagatctaatctattcctggggccataactcatgggaaaacagaattatcccctaggactcctttctaagcccctaataaaatgtctgagggacaaaccatgaagtgacgaattaaaccctctatattattaattggataaaatgctgtaaaaccggttattagcatgactcaaactaagtttaaatgtttgcatgtctaaagcaactttctggagtgatggatatgttccataccctaggtcacacagctctgtgcatttgttagaactcattggctgtatattttattttatt

SEQ ID NO: 730987 - DNA, 498 bp, Homo sapiens
ccccgattatgaatggcggaggcgtgaatggcgtacgcgttgaaggccggaggcgtagaatggccatcatcatcaagggctatgtgcctcccacaggcaagagctttgctatcaacttcaaggtgggctcctcaggggacatagctctgcacattaatccccgcatgggcaacggtaccgtggtccggaacagccttctgaatggctcgtggggatccgaggagaagaagatcacccacaacccatttggtcccggacagttctttgatctgtccattcgctgtggcttggatcgcttcaaggtttacgccaatggccagcacctctttgactttgcccatcgcctctcggccttccagagggtggacacattggaaatccagggtgatgtcaccttgtcctatgtccagatctaatctattcctggggccataactcatgggaaaacagaattatcccctaggactcctttctaagcccctaataaaatgtctgagg

SEQ ID NO: 730988 - DNA, 314 bp, Homo sapiens
ccccgattatgaatggcggaggcgtgaatggcgtacgcgttgaaggccggaggcgtagaatggccatcatcatcaagggctatgtgcctcccacaggcaagagctttgctatcaacttcaaggtgggctcctcaggggacatagctctgcacattaatccccgcatgggcaacggtaccgtggtccggaacagccttctgaatggctcgtggggatccgaggagaagaagatcacccacaacccatttggtcccggacagttctttgatctgtcccattcgctgtggtggcagaattgggatcctctagatcac

SEQ ID NO: 730989 - DNA, 946 bp, Homo sapiens
gaggagaggaagaggagcatgcccttcatggtggtaaatggaaatcccttctatgagtacgggcaccggcttcccctacagatggtcacccacctgcaagtggatggggatctgcaacttcaatcaatcaacttcatcggaggccagcccctccggccccagggacccccgatgatgccaccttaccctggtcccggacattgccatcaacagctgaacagcctgcccaccatggaaggacccccaaccttcaacccgcctgtgccatatttcgggaggctgcaaggagggctcacagctcgaagaaccatcatcatcaagggctatgtgcctcccacaggcaagagctttgctatcaacttcaaggtgggctcctcaggggacatagctctgcacattaatccccgcatgggcaacggtaccgtggtccggaacagccttctgaatggctcgtggggatccgaggagaagaagatcacccacaacccatttggtcccggacagttctttgatctgtccattcgctgtggcttggatcgcttcaaggtttacgccaatggccagcacctctttgactttgcccatcgcctctcggccttccagagggtggacacattggaaatccagggtgatgtcaccttgtcctatgtccagatctaatctattcctggggccataactcatgggaaaacagaattatcccctaggactcctttctaagcccctaataaaatgtctgagggacaaaccatgaagtgacgaattaaaccctctatattattaattggataaaatgctgtaaaaccggttattagcatgactcaaactaagtttaaatgtttgcatgtctaaagcaactttctggagtgatggatatgttccataccctaggtcacacagctctgtgcatttgttagaactcattggctgtatattttattttatt

SEQ ID NO: 730990 - DNA, 742 bp, Homo sapiens
gaggagaggaagaggagcatgcccttcatggtggtaaatggaaatcccttctatgagtacgggcaccggcttcccctacagatggtcacccacctgcaagtggatggggatctgcaacttcaatcaatcaacttcatcggaggccagcccctccggccccagggacccccgatgatgccaccttaccctggtcccggacattgccatcaacagctgaacagcctgcccaccatggaaggacccccaaccttcaacccgcctgtgccatatttcgggaggctgcaaggagggctcacagctcgaagaaccatcatcatcaagggctatgtgcctcccacaggcaagagctttgctatcaacttcaaggtgggctcctcaggggacatagctctgcacattaatccccgcatgggcaacggtaccgtggtccggaacagccttctgaatggctcgtggggatccgaggagaagaagatcacccacaacccatttggtcccggacagttctttgatctgtccattcgctgtggcttggatcgcttcaaggtttacgccaatggccagcacctctttgactttgcccatcgcctctcggccttccagagggtggacacattggaaatccagggtgatgtcaccttgtcctatgtccagatctaatctattcctggggccataactcatgggaaaacagaattatcccctaggactcctttctaagcccctaataaaatgtctgagg

SEQ ID NO: 730991 - DNA, 558 bp, Homo sapiens
gaggagaggaagaggagcatgcccttcatggtggtaaatggaaatcccttctatgagtacgggcaccggcttcccctacagatggtcacccacctgcaagtggatggggatctgcaacttcaatcaatcaacttcatcggaggccagcccctccggccccagggacccccgatgatgccaccttaccctggtcccggacattgccatcaacagctgaacagcctgcccaccatggaaggacccccaaccttcaacccgcctgtgccatatttcgggaggctgcaaggagggctcacagctcgaagaaccatcatcatcaagggctatgtgcctcccacaggcaagagctttgctatcaacttcaaggtgggctcctcaggggacatagctctgcacattaatccccgcatgggcaacggtaccgtggtccggaacagccttctgaatggctcgtggggatccgaggagaagaagatcacccacaacccatttggtcccggacagttctttgatctgtcccattcgctgtggtggcagaattgggatcctctagatcac

SEQ ID NO: 730992 - DNA, 969 bp, Homo sapiens
tggtggtaaatggaaatcccttctatgagtacgggcaccggcttcccctacagatggtcacccacctgcaagtggatggggatctgcaacttcaatcaatcaacttcatcggaggccagcccctccggccccaggggttgcagcccaaggtgtactaacccagcacctagagaaacgccggagtctaatgggtgtgtcatagatatctgtcgactcttggagaataatatcgcttcttcctcacttcacagaccatggaaggacccccaaccttcaacccgcctgtgccatatttcgggaggctgcaaggagggctcacagctcgaagaaccatcatcatcaagggctatgtgcctcccacaggcaagagctttgctatcaacttcaaggtgggctcctcaggggacatagctctgcacattaatccccgcatgggcaacggtaccgtggtccggaacagccttctgaatggctcgtggggatccgaggagaagaagatcacccacaacccatttggtcccggacagttctttgatctgtccattcgctgtggcttggatcgcttcaaggtttacgccaatggccagcacctctttgactttgcccatcgcctctcggccttccagagggtggacacattggaaatccagggtgatgtcaccttgtcctatgtccagatctaatctattcctggggccataactcatgggaaaacagaattatcccctaggactcctttctaagcccctaataaaatgtctgagggacaaaccatgaagtgacgaattaaaccctctatattattaattggataaaatgctgtaaaaccggttattagcatgactcaaactaagtttaaatgtttgcatgtctaaagcaactttctggagtgatggatatgttccataccctaggtcacacagctctgtgcatttgttagaactcattggctgtatattttattttatt

SEQ ID NO: 730993 - DNA, 765 bp, Homo sapiens
tggtggtaaatggaaatcccttctatgagtacgggcaccggcttcccctacagatggtcacccacctgcaagtggatggggatctgcaacttcaatcaatcaacttcatcggaggccagcccctccggccccaggggttgcagcccaaggtgtactaacccagcacctagagaaacgccggagtctaatgggtgtgtcatagatatctgtcgactcttggagaataatatcgcttcttcctcacttcacagaccatggaaggacccccaaccttcaacccgcctgtgccatatttcgggaggctgcaaggagggctcacagctcgaagaaccatcatcatcaagggctatgtgcctcccacaggcaagagctttgctatcaacttcaaggtgggctcctcaggggacatagctctgcacattaatccccgcatgggcaacggtaccgtggtccggaacagccttctgaatggctcgtggggatccgaggagaagaagatcacccacaacccatttggtcccggacagttctttgatctgtccattcgctgtggcttggatcgcttcaaggtttacgccaatggccagcacctctttgactttgcccatcgcctctcggccttccagagggtggacacattggaaatccagggtgatgtcaccttgtcctatgtccagatctaatctattcctggggccataactcatgggaaaacagaattatcccctaggactcctttctaagcccctaataaaatgtctgagg

SEQ ID NO: 730994 - DNA, 3310 bp, Homo sapiens
  misc_feature (806)..(806): n is a, c, g, or t
tgctaatgcttttggtacaaatggatgtggaatataattgaatattttcttgtttaaggggagcatgaagaggtgttgaggttatgtcaagcatctggcacagctgaaggcagatggaaatatttacaagtacgcaatttgagactaagatattgttatcattctcctattgaagacaagagcaatagtaaaacacatcaggtcagggggttaaagacctgtgataaaccacttccgataagttggaaacgtgtgtctatattttcatatctgtatatatataatggtaaagaaagacaccttcgtaacccgcattttccaaagagaggaatcacagggagatgtacagcaatggggccatttaagagttctgtgttcatcttgattcttcaccttctagaaggggccctgagtaattcactcattcagctgaacaacaatggctatgaaggcattgtcgttgcaatcgaccccaatgtgccagaagatgaaacactcattcaacaaataaaggacatggtgacccaggcatctctgtatctgtttgaagctacaggaaagcgattttatttcaaaaatgttgccattttgattcctgaaacatggaagacaaaggctgactatgtgagaccaaaacttgagacctacaaaaatgctgatgttctggttgctgagtctactcctccaggtaatgatgaaccctacactgagcagatgggcaactgtggagagaagggtgaaaggatccacctcactcctgatttcattgcaggaaaaaagttagctgaatatggaccacaaggtanggcatttgtccatgagtgggctcatctacgatggggagtatttgacgagtacaataatgatgagaaattctacttatccaatggaagaatacaagcagtaagatgttcagcaggtattactggtacaaatgtagtaaagaagtgtcagggaggcagctgttacaccaaaagatgcacattcaataaagttacaggactctatgaaaaaggatgtgagtttgttctccaatcccgccagacggagaaggcttctataatgtttgcacaacatgttgattctatagttgaattctgtacagaacaaaaccacaacaaagaagctccaaacaagcaaaatcaaaaatgcaatctccgaagcacatgggaagtgatccgtgattctgaggactttaagaaaaccactcctatgacaacacagccaccaaatcccaccttctcattgctgcagattggacaaagaattgtgtgtttagtccttgacaaatctggaagcatggcgactggtaaccgcctcaatcgactgaatcaagcaggccagcttttcctgctgcagacagttgagctggggtcctgggttgggatggtgacatttgacagtgctgcccatgtacaaagtgaactcatacagataaacagtggcagtgacagggacacactcgccaaaagattacctgcagcagcttcaggagggacgtccatctgcagcgggcttcgatcggcatttactgtgattaggaagaaatatccaactgatggatctgaaattgtgctgctgacggatggggaagacaacactataagtgggtgctttaacgaggtcaaacaaagtggtgccatcatccacacagtcgctttggggccctctgcagctcaagaactagaggagctgtccaaaatgacaggaggtttacagacatatgcttcagatcaagttcagaacaatggcctcattgatgcttttggggccctttcatcaggaaatggagctgtctctcagcgctccatccagcttgagagtaagggattaaccctccagaacagccagtggatgaatggcacagtgatcgtggacagcaccgtgggaaaggacactttgtttcttatcacctggacaacgcagcctccccaaatccttctctgggatcccagtggacagaagcaaggtggctttgtagtggacaaaaacaccaaaatggcctacctccaaatcccaggcattgctaaggttggcacttggaaatacagtctgcaagcaagctcacaaaccttgaccctgactgtcacgtcccgtgcgtccaatgctaccctgcctccaattacagtgacttccaaaacgaacaaggacaccagcaaattccccagccctctggtagtttatgcaaatattcgccaaggagcctccccaattctcagggccagtgtcacagccctgattgaatcagtgaatggaaaaacagttaccttggaactactggataatggagcaggtgctgatgctactaaggatgacggtgtctactcaaggtatttcacaacttatgacacgaatggtagatacagtgtaaaagtgcgggctctgggaggagttaacgcagccagacggagagtgataccccagcagagtggagcactgtacatacctggctggattgagaatgatgaaatacaatggaatccaccaagacctgaaattaataaggatgatgttcaacacaagcaagtgtgtttcagcagaacatcctcgggaggctcatttgtggcttctgatgtcccaaatgctcccatacctgatctcttcccacctggccaaatcaccgacctgaaggcggaaattcacgggggcagtctcattaatctgacttggacagctcctggggatgattatgaccatggaacagctcacaagtatatcattcgaataagtacaagtattcttgatctcagagacaagttcaatgaatctcttcaagtgaatactactgctctcatcccaaaggaagccaactctgaggaagtctttttgtttaaaccagaaaacattacttttgaaaatggcacagatcttttcattgctattcaggctgttgataaggtcgatctgaaatcagaaatatccaacattgcacgagtatctttgtttattcctccacagactccgccagagacacctagtcctgatgaaacgtctgctccttgtcctaatattcatatcaacagcaccattcctggcattcacattttaaaaattatgtggaagtggataggagaactgcagctgtcaatagcctagggctgaatttttgtcagataaataaaataaatcattcatccttttttttgattataaaattttctaaaatgtattttagacttcctgtagggggcgatatactaaatgtatatagtacatttatactaaatgtattcctgtagggggcgatatactaaatgtattttagacttcctgtagggggcgataaaataaaatgctaaacaactgggta

SEQ ID NO: 730995 - DNA, 3060 bp, Homo sapiens
  misc_feature (715)..(715): n is a, c, g, or t
catctggcacagctgaaggcagatggaaatatttacaagtacgcaatttgagactaagatattgttatcattctcctattgaagacaagagcaatagtaaaacacatcaggtcagggggttaaagacctgtgataaaccacttccgataagttggaaacgtgtgtctatattttcatatctgtatatatataatggtaaagaaagacaccttcgtaacccgcattttccaaagagaggaatcacagggagatgtacagcaatggggccatttaagagttctgtgttcatcttgattcttcaccttctagaaggggccctgagtaattcactcattcagctgaacaacaatggctatgaaggcattgtcgttgcaatcgaccccaatgtgccagaagatgaaacactcattcaacaaataaaggacatggtgacccaggcatctctgtatctgtttgaagctacaggaaagcgattttatttcaaaaatgttgccattttgattcctgaaacatggaagacaaaggctgactatgtgagaccaaaacttgagacctacaaaaatgctgatgttctggttgctgagtctactcctccaggtaatgatgaaccctacactgagcagatgggcaactgtggagagaagggtgaaaggatccacctcactcctgatttcattgcaggaaaaaagttagctgaatatggaccacaaggtanggcatttgtccatgagtgggctcatctacgatggggagtatttgacgagtacaataatgatgagaaattctacttatccaatggaagaatacaagcagtaagatgttcagcaggtattactggtacaaatgtagtaaagaagtgtcagggaggcagctgttacaccaaaagatgcacattcaataaagttacaggactctatgaaaaaggatgtgagtttgttctccaatcccgccagacggagaaggcttctataatgtttgcacaacatgttgattctatagttgaattctgtacagaacaaaaccacaacaaagaagctccaaacaagcaaaatcaaaaatgcaatctccgaagcacatgggaagtgatccgtgattctgaggactttaagaaaaccactcctatgacaacacagccaccaaatcccaccttctcattgctgcagattggacaaagaattgtgtgtttagtccttgacaaatctggaagcatggcgactggtaaccgcctcaatcgactgaatcaagcaggccagcttttcctgctgcagacagttgagctggggtcctgggttgggatggtgacatttgacagtgctgcccatgtacaaagtgaactcatacagataaacagtggcagtgacagggacacactcgccaaaagattacctgcagcagcttcaggagggacgtccatctgcagcgggcttcgatcggcatttactgtgattaggaagaaatatccaactgatggatctgaaattgtgctgctgacggatggggaagacaacactataagtgggtgctttaacgaggtcaaacaaagtggtgccatcatccacacagtcgctttggggccctctgcagctcaagaactagaggagctgtccaaaatgacaggaggtttacagacatatgcttcagatcaagttcagaacaatggcctcattgatgcttttggggccctttcatcaggaaatggagctgtctctcagcgctccatccagcttgagagtaagggattaaccctccagaacagccagtggatgaatggcacagtgatcgtggacagcaccgtgggaaaggacactttgtttcttatcacctggacaacgcagcctccccaaatccttctctgggatcccagtggacagaagcaaggtggctttgtagtggacaaaaacaccaaaatggcctacctccaaatcccaggcattgctaaggttggcacttggaaatacagtctgcaagcaagctcacaaaccttgaccctgactgtcacgtcccgtgcgtccaatgctaccctgcctccaattacagtgacttccaaaacgaacaaggacaccagcaaattccccagccctctggtagtttatgcaaatattcgccaaggagcctccccaattctcagggccagtgtcacagccctgattgaatcagtgaatggaaaaacagttaccttggaactactggataatggagcaggtgctgatgctactaaggatgacggtgtctactcaaggtatttcacaacttatgacacgaatggtagatacagtgtaaaagtgcgggctctgggaggagttaacgcagccagacggagagtgataccccagcagagtggagcactgtacatacctggctggattgagaatgatgaaatacaatggaatccaccaagacctgaaattaataaggatgatgttcaacacaagcaagtgtgtttcagcagaacatcctcgggaggctcatttgtggcttctgatgtcccaaatgctcccatacctgatctcttcccacctggccaaatcaccgacctgaaggcggaaattcacgggggcagtctcattaatctgacttggacagctcctggggatgattatgaccatggaacagctcacaagtatatcattcgaataagtacaagtattcttgatctcagagacaagttcaatgaatctcttcaagtgaatactactgctctcatcccaaaggaagccaactctgaggaagtctttttgtttaaaccagaaaacattacttttgaaaatggcacagatcttttcattgctattcaggctgttgataaggtcgatctgaaatcagaaatatccaacattgcacgagtatctttgtttattcctccacagactccgccagagacacctagtcctgatgaaacgtctgctccttgtcctaatattcatatcaacagcaccattcctggcattcacattttaaaaattatgtggaagtggataggagaactgcagctgtcaatagcctagggctgaatttttgtcagataaataaaataaatcattcatccttttttttgattat

SEQ ID NO: 730996 - DNA, 1891 bp, Homo sapiens; identical to SEQ ID NO: 329079
  misc_feature (26)..(26): n is a, c, g, or t
  misc_feature (43)..(43): n is a, c, g, or t
  misc_feature (49)..(49): n is a, c, g, or t
  misc_feature (59)..(60): n is a, c, g, or t
  misc_feature (72)..(72): n is a, c, g, or t

SEQ ID NO: 730997 - DNA, 1851 bp, Homo sapiens
  misc_feature (26)..(26): n is a, c, g, or t
  misc_feature (43)..(43): n is a, c, g, or t
  misc_feature (49)..(49): n is a, c, g, or t
  misc_feature (59)..(60): n is a, c, g, or t
  misc_feature (72)..(72): n is a, c, g, or t
acgacggcagtgctcgttatttggtnatagcgtctccagaggntccctngtgagggatnngatcggcattanttgtgattaggaagaaatatccaactgatggatctgaaattgtgctgctgacggatggggaagacaacactataagtgggtgctttaacgaggtcaaacaaagtggtgccatcatccacacagtcgctttggggccctctgcagctcaagaactagaggagctgtccaaaatgacaggaggtttacagacatatgcttcagatcaagttcagaacaatggcctcattgatgcttttggggccctttcatcaggaaatggagctgtctctcagcgctccatccagcttgagagtaagggattaaccctccagaacagccagtggatgaatggcacagtgatcgtggacagcaccgtgggaaaggacactttgtttcttatcacctggacaacgcagcctccccaaatccttctctgggatcccagtggacagaagcaaggtggctttgtagtggacaaaaacaccaaaatggcctacctccaaatcccaggcattgctaaggttggcacttggaaatacagtctgcaagcaagctcacaaaccttgaccctgactgtcacgtcccgtgcgtccaatgctaccctgcctccaattacagtgacttccaaaacgaacaaggacaccagcaaattccccagccctctggtagtttatgcaaatattcgccaaggagcctccccaattctcagggccagtgtcacagccctgattgaatcagtgaatggaaaaacagttaccttggaactactggataatggagcaggtgctgatgctactaaggatgacggtgtctactcaaggtatttcacaacttatgacacgaatggtagatacagtgtaaaagtgcgggctctgggaggagttaacgcagccagacggagagtgataccccagcagagtggagcactgtacatacctggctggattgagaatgatgaaatacaatggaatccaccaagacctgaaattaataaggatgatgttcaacacaagcaagtgtgtttcagcagaacatcctcgggaggctcatttgtggcttctgatgtcccaaatgctcccatacctgatctcttcccacctggccaaatcaccgacctgaaggcggaaattcacgggggcagtctcattaatctgacttggacagctcctggggatgattatgaccatggaacagctcacaagtatatcattcgaataagtacaagtattcttgatctcagagacaagttcaatgaatctcttcaagtgaatactactgctctcatcccaaaggaagccaactctgaggaagtctttttgtttaaaccagaaaacattacttttgaaaatggcacagatcttttcattgctattcaggctgttgataaggtcgatctgaaatcagaaatatccaacattgcacgagtatctttgtttattcctccacagactccgccagagacacctagtcctgatgaaacgtctgctccttgtcctaatattcatatcaacagcaccattcctggcattcacattttaaaaattatgtggaagtggataggagaactgcagctgtcaatagcctagggctgaatttttgtcagataaataaaataaatcattcatccttttttttgattataaaattttctaaaatgtattttagacttcctgtagggggcgatatactaaatgtatatagtacatttatactaaatgtattcctgtagggggcgatatactaaatgtattttagacttcctgtagggggcgataaaataaaatgctaaacaactgggta

SEQ ID NO: 730998 - DNA, 1692 bp, Homo sapiens
  misc_feature (26)..(26): n is a, c, g, or t
  misc_feature (43)..(43): n is a, c, g, or t
  misc_feature (49)..(49): n is a, c, g, or t
  misc_feature (59)..(60): n is a, c, g, or t
  misc_feature (72)..(72): n is a, c, g, or t
acgacggcagtgctcgttatttggtnatagcgtctccagaggntccctngtgagggatnngatcggcattanttgtgattaggaagaaatatccaactgatggatctgaaattgtgctgctgacggatggggaagacaacactataagtgggtgctttaacgaggtcaaacaaagtggtgccatcatccacacagtcgctttggggccctctgcagctcaagaactagaggagctgtccaaaatgacaggaggtttacagacatatgcttcagatcaagttcagaacaatggcctcattgatgcttttggggccctttcatcaggaaatggagctgtctctcagcgctccatccagcttgagagtaagggattaaccctccagaacagccagtggatgaatggcacagtgatcgtggacagcaccgtgggaaaggacactttgtttcttatcacctggacaacgcagcctccccaaatccttctctgggatcccagtggacagaagcaaggtggctttgtagtggacaaaaacaccaaaatggcctacctccaaatcccaggcattgctaaggttggcacttggaaatacagtctgcaagcaagctcacaaaccttgaccctgactgtcacgtcccgtgcgtccaatgctaccctgcctccaattacagtgacttccaaaacgaacaaggacaccagcaaattccccagccctctggtagtttatgcaaatattcgccaaggagcctccccaattctcagggccagtgtcacagccctgattgaatcagtgaatggaaaaacagttaccttggaactactggataatggagcaggtgctgatgctactaaggatgacggtgtctactcaaggtatttcacaacttatgacacgaatggtagatacagtgtaaaagtgcgggctctgggaggagttaacgcagccagacggagagtgataccccagcagagtggagcactgtacatacctggctggattgagaatgatgaaatacaatggaatccaccaagacctgaaattaataaggatgatgttcaacacaagcaagtgtgtttcagcagaacatcctcgggaggctcatttgtggcttctgatgtcccaaatgctcccatacctgatctcttcccacctggccaaatcaccgacctgaaggcggaaattcacgggggcagtctcattaatctgacttggacagctcctggggatgattatgaccatggaacagctcacaagtatatcattcgaataagtacaagtattcttgatctcagagacaagttcaatgaatctcttcaagtgaatactactgctctcatcccaaaggaagccaactctgaggaagtctttttgtttaaaccagaaaacattacttttgaaaatggcacagatcttttcattgctattcaggctgttgataaggtcgatctgaaatcagaaatatccaacattgcacgagtatctttgtttattcctccacagactccgccagagacacctagtcctgatgaaacgtctgctccttgtcctaatattcatatcaacagcaccattcctggcattcacattttaaaaattatgtggaagtggataggagaactgcagctgtcaatagcctagggctgaatttttgtcagataaataaaataaatcattcatccttttttttgattat

SEQ ID NO: 730999 - DNA, 2548 bp, Homo sapiens
  misc_feature (4)..(4): n is a, c, g, or t
gtanggcatttgtccatgagtgggctcatctacgatggggagtatttgacgagtacaataatgatgagaaattctacttatccaatggaagaatacaagcagtaagatgttcagcaggtattactggtacaaatgtagtaaagaagtgtcagggaggcagctgttacaccaaaagatgcacattcaataaagttacaggactctatgaaaaaggatgtgagtttgttctccaatcccgccagacggagaaggcttctataatgtttgcacaacatgttgattctatagttgaattctgtacagaacaaaaccacaacaaagaagctccaaacaagcaaaatcaaaaatgcaatctccgaagcacatgggaagtgatccgtgattctgaggactttaagaaaaccactcctatgacaacacagccaccaaatcccaccttctcattgctgcagattggacaaagaattgtgtgtttagtccttgacaaatctggaagcatggcgactggtaaccgcctcaatcgactgaatcaagcaggccagcttttcctgctgcagacagttgagctggggtcctgggttgggatggtgacatttgacagtgctgcccatgtacaaagtgaactcatacagataaacagtggcagtgacagggacacactcgccaaaagattacctgcagcagcttcaggagggacgtccatctgcagcgggcttcgatcggcatttactgtgattaggaagaaatatccaactgatggatctgaaattgtgctgctgacggatggggaagacaacactataagtgggtgctttaacgaggtcaaacaaagtggtgccatcatccacacagtcgctttggggccctctgcagctcaagaactagaggagctgtccaaaatgacaggaggtttacagacatatgcttcagatcaagttcagaacaatggcctcattgatgcttttggggccctttcatcaggaaatggagctgtctctcagcgctccatccagcttgagagtaagggattaaccctccagaacagccagtggatgaatggcacagtgatcgtggacagcaccgtgggaaaggacactttgtttcttatcacctggacaacgcagcctccccaaatccttctctgggatcccagtggacagaagcaaggtggctttgtagtggacaaaaacaccaaaatggcctacctccaaatcccaggcattgctaaggttggcacttggaaatacagtctgcaagcaagctcacaaaccttgaccctgactgtcacgtcccgtgcgtccaatgctaccctgcctccaattacagtgacttccaaaacgaacaaggacaccagcaaattccccagccctctggtagtttatgcaaatattcgccaaggagcctccccaattctcagggccagtgtcacagccctgattgaatcagtgaatggaaaaacagttaccttggaactactggataatggagcaggtgctgatgctactaaggatgacggtgtctactcaaggtatttcacaacttatgacacgaatggtagatacagtgtaaaagtgcgggctctgggaggagttaacgcagccagacggagagtgataccccagcagagtggagcactgtacatacctggctggattgagaatgatgaaatacaatggaatccaccaagacctgaaattaataaggatgatgttcaacacaagcaagtgtgtttcagcagaacatcctcgggaggctcatttgtggcttctgatgtcccaaatgctcccatacctgatctcttcccacctggccaaatcaccgacctgaaggcggaaattcacgggggcagtctcattaatctgacttggacagctcctggggatgattatgaccatggaacagctcacaagtatatcattcgaataagtacaagtattcttgatctcagagacaagttcaatgaatctcttcaagtgaatactactgctctcatcccaaaggaagccaactctgaggaagtctttttgtttaaaccagaaaacattacttttgaaaatggcacagatcttttcattgctattcaggctgttgataaggtcgatctgaaatcagaaatatccaacattgcacgagtatctttgtttattcctccacagactccgccagagacacctagtcctgatgaaacgtctgctccttgtcctaatattcatatcaacagcaccattcctggcattcacattttaaaaattatgtggaagtggataggagaactgcagctgtcaatagcctagggctgaatttttgtcagataaataaaataaatcattcatccttttttttgattataaaattttctaaaatgtattttagacttcctgtagggggcgatatactaaatgtatatagtacatttatactaaatgtattcctgtagggggcgatatactaaatgtattttagacttcctgtagggggcgataaaataaaatgctaaacaactgggtatacatgcataaaaactatccattcaaacccaaaaatttaa

SEQ ID NO: 731000 - DNA, 231 bp, Homo sapiens
  misc_feature (13)..(13): n is a, c, g, or t
tctagaggatccnccgctacgctcagccaagcacccttaggataccaggaccctgtttcccttcggccctccagccccaaacctgcccagccagccctgaaaatgcaagtcttgtacgagtttgaagctaggaacccacgggaactgactgtggtccagggagagaagctggaggttctggaccacacaacgcgctgctggtctgagcgtgactggggatacctctagagt

SEQ ID NO: 731001 - DNA, 244 bp, Homo sapiens
gtggaccttcacgcttcagcaagcaccttaggataccaggaccctgtttcccttcggagaagacacacaaccatgaccctcagcctggggaccccaactccaggccctccagccccaaacctgcccagccagccctgaaaatgcaagtcttgtacgagtttgaagctaggaacccacgggaactgactgtggtccagggagagaagctggaggttctggaccacagcagcgtgatgctgagcta

SEQ ID NO: 731002 - DNA, 494 bp, Homo sapiens
cactagcagagaagctgctgtccttccaccaccagcaccggaccacctgctccaagaccagcctcctggggggaccaggcacccggccttcactggcacccagggagccgtcctcagcagcgtcaacatgtcaaggcccagcagcagagccatttacttgcaccggaaggagtactcccagaacctcacctcagagcccaccctcctgcagcacagggtggaggtgagtacctctgcagcccccgggcagtgtccaactaaacccaagtgttcccatgtgcccaccgccctgccagaacatggacacttcacacaagtccctgccccagaagccaacagcctgtcccaaccatgtcgcatggactcagatccaacaagcctgccagagcatctgctcagtgtcagggacggggaggggtggtcagattgaacagagcaggcctggctggaggttgagcgggtgagtgtcctgtccccagacaggaagaagtagc

SEQ ID NO: 731003 - DNA, 2139 bp, Homo sapiens
cactagcagagaagctgctgtccttccaccaccagcaccggaccacctgctccaagaccagcctcctggggggaccaggcacccggccttcactggcacccagggagccgtcctcagcagcgtcaacatgtcaaggcccagcagcagagccatttacttgcaccggaaggagtactcccagaacctcacctcagagcccaccctcctgcagcacagggtggagcacttgatgacatgcaagcaggggagtcagagagtccaggggcccgaggatgccttgcagaagctgttcgagatggatgcacagggccgggtgtggagccaagacttgatcctgcaggtcagggacggctggctgcagctgctggacattgagaccaaggaggagctggactcttaccgcctagacagcatccaggccatgaatgtggcgctcaacacatgttcctacaactccatcctgtccatcaccgtgcaggagccgggcctgccaggcactagcactctgctcttccagtgccaggaagtgggggcagagcgactgaagaccagcctgcagaaggctctggaggaagagctggagcaaagcagacctcgacttggaggccttcagccaggccaggacagatggagggggcctgctatggaaaggccgctccctatggagcaggcacgctatctggagccggggatccctccagaacagccccaccagaggaccctagagcacagcctcccaccatccccaaggcccctgccacgccacaccagtgcccgagaaccaagtgcctttactctgcctcctccaaggcggtcctcttcccccgaggacccagagagggacgaggaagtgctgaaccatgtcctaagggacattgagctgttcatgggaaagctggagaaggcccaggcaaagaccagcaggaagaagaaatttgggaaaaaaaacaaggaccagggaggtctcacccaggcacagtacattgactgcttccagaagatcaagtacagcttcaacctcctgggaaggctggccacctggctgaaggagacaagtgcccctgagctcgtacacatcctcttcaagtccctgaacttcatcctggccaggtgccctgaggctggcctagcagcccaagtgatctcacccctcctcacccctaaagctatcaacctgctacagtcctgtctaagcccacctgagagtaacctttggatggggttgggcccagcctggaccactagccgggccgactggacaggcgatgagcccctgccctaccaacccacattctcggatgactggcaacttccagagccctccagccaagcacccttaggataccaggaccctgtttcccttcggccctccagccccaaacctgcccagccagccctgaaaatgcaagtcttgtacgagtttgaagctaggaacccacgggaactgactgtggtccagggagagaagctggaggttctggaccacagcaagcgtgtggctggtgaagaatgaggcgggacggagcggctacattccaagcaacatcctggagcccctacagccggggacccctgggacccagggccagtcaccctctcgggttccaatgcttcgacttagctcgaggcctgaagaggtcacagactggctgcaggcagagaacttctccactgccacggtgaggacacttgggtccctgacggggagccagctacttcgcataagacctggggagctacagatgctatgtccacaggaggccccacgaatcctgtcccggctggaggctgtcagaaggatgctggggataagcccttaggcaccagcttagacacctccaagaaccaggccccgctgatgcaagatggcagatctgatacccattagagccccgagaattcctcttctggatcccagtttgcagcaaaccccacaccccagctcacacagcaaaaacaatggacaggcccagagggtgaagcaaacagtgtcccttctggctgtgttggagcctccccagtaaccacctatttattttacctctttcccaaacctggagcatttatgcctaggcttgtcaagaatctgttcagtccctctccttctcaataaaagcatcttcaagcttgtaaaaaaac

SEQ ID NO: 731004 - DNA, 929 bp, Homo sapiens
  misc_feature (13)..(13): n is a, c, g, or t
tctagaggatccnccgctacgctcagccaagcacccttaggataccaggaccctgtttcccttcggcggggaagtcataggttagggagcacctcacactttcctcaggagaagacacacaaccatgaccctcagcctggggaccccaactccaggccctccagccccaaacctgcccagccagccctgaaaatgcaagtcttgtacgagtttgaagctaggaacccacgggaactgactgtggtccagggagagaagctggaggttctggaccacagcaagcgtgtggctggtgaagaatgaggcgggacggagcggctacattccaagcaacatcctggagcccctacagccggggacccctgggacccagggccagtcaccctctcgggttccaatgcttcgacttagctcgaggcctgaagaggtcacagactggctgcaggcagagaacttctccactgccacggtgaggacacttgggtccctgacggggagccagctacttcgcataagacctggggagctacagatgctatgtccacaggaggccccacgaatcctgtcccggctggaggctgtcagaaggatgctggggataagcccttaggcaccagcttagacacctccaagaaccaggccccgctgatgcaagatggcagatctgatacccattagagccccgagaattcctcttctggatcccagtttgcagcaaaccccacaccccagctcacacagcaaaaacaatggacaggcccagagggtgaagcaaacagtgtcccttctggctgtgttggagcctccccagtaaccacctatttattttacctctttcccaaacctggagcatttatgcctaggcttgtcaagaatctgttcagtccctctccttctcaataaaagcatcttcaagcttgtaaaaaaac

SEQ ID NO: 731005 - DNA, 877 bp, Homo sapiens
gtggaccttcacgcttcagcaagcaccttaggataccaggaccctgtttcccttcggagaagacacacaaccatgaccctcagcctggggaccccaactccaggccctccagccccaaacctgcccagccagccctgaaaatgcaagtcttgtacgagtttgaagctaggaacccacgggaactgactgtggtccagggagagaagctggaggttctggaccacagcaagcgtgtggctggtgaagaatgaggcgggacggagcggctacattccaagcaacatcctggagcccctacagccggggacccctgggacccagggccagtcaccctctcgggttccaatgcttcgacttagctcgaggcctgaagaggtcacagactggctgcaggcagagaacttctccactgccacggtgaggacacttgggtccctgacggggagccagctacttcgcataagacctggggagctacagatgctatgtccacaggaggccccacgaatcctgtcccggctggaggctgtcagaaggatgctggggataagcccttaggcaccagcttagacacctccaagaaccaggccccgctgatgcaagatggcagatctgatacccattagagccccgagaattcctcttctggatcccagtttgcagcaaaccccacaccccagctcacacagcaaaaacaatggacaggcccagagggtgaagcaaacagtgtcccttctggctgtgttggagcctccccagtaaccacctatttattttacctctttcccaaacctggagcatttatgcctaggcttgtcaagaatctgttcagtccctctccttctcaataaaagcatcttcaagcttgtaaaaaaac

SEQ ID NO: 731006 - DNA, 2229 bp, Homo sapiens
cactagcagagaagctgctgtccttccaccaccagcaccggaccacctgctccaagaccagcctcctggggggaccaggcacccggccttcactggcacccagggagccgtcctcagcagcgtcaacatgtcaaggcccagcagcagagccatttacttgcaccggaaggagtactcccagaacctcacctcagagcccaccctcctgcagcacagggtggagcacttgatgacatgcaagcaggggagtcagagagtccaggggcccgaggatgccttgcagaagctgttcgagatggatgcacagggccgggtgtggagccaagacttgatcctgcaggtcagggacggctggctgcagctgctggacattgagaccaaggaggagctggactcttaccgcctagacagcatccaggccatgaatgtggcgctcaacacatgttcctacaactccatcctgtccatcaccgtgcaggagccgggcctgccaggcactagcactctgctcttccagtgccaggaagtgggggcagagcgactgaagaccagcctgcagaaggctctggaggaagagctggagcaaagcagacctcgacttggaggccttcagccaggccaggacagatggagggggcctgctatggaaaggccgctccctatggagcaggcacgctatctggagccggggatccctccagaacagccccaccagaggaccctagagcacagcctcccaccatccccaaggcccctgccacgccacaccagtgcccgagaaccaagtgcctttactctgcctcctccaaggcggtcctcttcccccgaggacccagagagggacgaggaagtgctgaaccatgtcctaagggacattgagctgttcatgggaaagctggagaaggcccaggcaaagaccagcaggaagaagaaatttgggaaaaaaaacaaggaccagggaggtctcacccaggcacagtacattgactgcttccagaagatcaagtacagcttcaacctcctgggaaggctggccacctggctgaaggagacaagtgcccctgagctcgtacacatcctcttcaagtccctgaacttcatcctggccaggtgccctgaggctggcctagcagcccaagtgatctcacccctcctcacccctaaagctatcaacctgctacagtcctgtctaagcccacctgagagtaacctttggatggggttgggcccagcctggaccactagccgggccgactggacaggcgatgagcccctgccctaccaacccacattctcggatgactggcaacttccagagccctccagccaagcacccttaggataccaggaccctgtttcccttcggcggggaagtcataggttagggagcacctcacactttcctcaggagaagacacacaaccatgaccctcagcctggggaccccaactccaggccctccagccccaaacctgcccagccagccctgaaaatgcaagtcttgtacgagtttgaagctaggaacccacgggaactgactgtggtccagggagagaagctggaggttctggaccacagcaagcgtgtggctggtgaagaatgaggcgggacggagcggctacattccaagcaacatcctggagcccctacagccggggacccctgggacccagggccagtcaccctctcgggttccaatgcttcgacttagctcgaggcctgaagaggtcacagactggctgcaggcagagaacttctccactgccacggtgaggacacttgggtccctgacggggagccagctacttcgcataagacctggggagctacagatgctatgtccacaggaggccccacgaatcctgtcccggctggaggctgtcagaaggatgctggggataagcccttaggcaccagcttagacacctccaagaaccaggccccgctgatgcaagatggcagatctgatacccattagagccccgagaattcctcttctggatcccagtttgcagcaaaccccacaccccagctcacacagcaaaaacaatggacaggcccagagggtgaagcaaacagtgtcccttctggctgtgttggagcctccccagtaaccacctatttattttacctctttcccaaacctggagcatttatgcctaggcttgtcaagaatctgttcagtccctctccttctcaataaaagcatcttcaagcttgtaaaaaaac

SEQ ID NO: 731007 - DNA, 1394 bp, Homo sapiens
gcacccttaggataccaggaccctgtttcccttcggtatgctctgagcttaatagggactgcgtggtcctggggagggagggacaggactgtagtcctttggatctctggctctctacatcttaagagagccaagagggtctcttttagccgagaaaaacatgtacaaggacatccctctcctaccttgggtgaaaaacagtgttctaccctcctaggctcccattgcttcttctcatgatactacccacacatgcttctgatttcccatactcaagtataaagtgcttagggcagaactcagatgtagaaaattccactcccggaaatgtcttcagaaatcaatgacatttcagacccctcctgcctgcagaaagccccacctaacactgacctgccagcaaactctaaagaaacccaaaagtcaccatcagactgcaggccggagatacctgaggggaatctcagggctgggacataggcttaatttctgaggccccattctccagccatcctgactctgtttcttaggcggggaagtcataggttagggagcacctcacactttcctcaggagaagacacacaaccatgaccctcagcctggggaccccaactccaggccctccagccccaaacctgcccagccagccctgaaaatgcaagtcttgtacgagtttgaagctaggaacccacgggaactgactgtggtccagggagagaagctggaggttctggaccacagcaagcgtgtggctggtgaagaatgaggcgggacggagcggctacattccaagcaacatcctggagcccctacagccggggacccctgggacccagggccagtcaccctctcgggttccaatgcttcgacttagctcgaggcctgaagaggtcacagactggctgcaggcagagaacttctccactgccacggtgaggacacttgggtccctgacggggagccagctacttcgcataagacctggggagctacagatgctatgtccacaggaggccccacgaatcctgtcccggctggaggctgtcagaaggatgctggggataagcccttaggcaccagcttagacacctccaagaaccaggccccgctgatgcaagatggcagatctgatacccattagagccccgagaattcctcttctggatcccagtttgcagcaaaccccacaccccagctcacacagcaaaaacaatggacaggcccagagggtgaagcaaacagtgtcccttctggctgtgttggagcctccccagtaaccacctatttattttacctctttcccaaacctggagcatttatgcctaggcttgtcaagaatctgttcagtccctctccttctcaataaaagcatcttcaagcttgtaaaaaaac

SEQ ID NO: 731008 - DNA, 1696 bp, Homo sapiens
gcacccttaggataccaggaccctgtttcccttcggtatgctctgagcttaatagggactgcgtggtcctggggagggagggacaggactgtagtcctttggatctctggctctctacatcttaagagagccaagagggtctcttttagccgagaaaaacatgtacaaggacatccctctcctaccttgggtgaaaaacagtgttctaccctcctaggctcccattgcttcttctcatgatactacccacacatgcttctgatttcccatactcaagtataaagtgcttagggcagaactcagatgtagaaaattccactcccggaaatgtcttcagaaatcaatgacatttcagacccctcctgcctgcagaaagccccacctaacactgacctgccagcaaactctaaagaaacccaaaagtcaccatcagactgcaggccggagatacctgaggggaatctcagggctgggacataggcttaatttctgaggccccattctccagccatcctgactctgtttcttaggcggggaagtcataggttagggagcacctcacactttcctcaggagaagacacacaaccatgaccctcagcctggggaccccaactccaggccctccagccccaaacctgcccagccagccctgaaaatgcaagtcttgtacgagtttgaagctaggaacccacgggaactgactgtggtccagggagagaagctggaggttctggaccacagcaagcgtgtggctggtgaagaatgaggcgggacggagcggctacattccaagcaacatcctggagcccctacagccggggacccctgggacccagggccagtcaccctctcgggtactacccagcctggactatccagagccctaagtcttgagttggaggtcggggtggggaggattcagtggcaagcagaggagatagtcttggtttgattcggaccgtattattgcatgcttagtgtgccaactttatcatggggccagagcagagaacaagaccagctccctgccagaccagaaagccacagagtaagagaagtgatttgatgggaacctggagaagggacccagatgttaggggctgtggttggctgtgagatgagatggactctgatccctggttccccctgattctaggttccaatgcttcgacttagctcgaggcctgaagaggtcacagactggctgcaggcagagaacttctccactgccacggtgaggacacttgggtccctgacggggagccagctacttcgcataagacctggggagctacagatgctatgtccacaggaggccccacgaatcctgtcccggctggaggctgtcagaaggatgctggggataagcccttaggcaccagcttagacacctccaagaaccaggccccgctgatgcaagatggcagatctgatacccattagagccccgagaattcctcttctggatcccagtttgcagcaaaccccacaccccagctcacacagcaaaaacaatggacaggcccagagggtgaagcaaacagtgtcccttctggctgtgttggagcctccccagtaaccacctatttattttacctctttcccaaacctggagcatttatgcctaggcttgtcaagaatctgttcagtccctctccttctcaataaaagcatcttcaagcttgtaaaaaaac

SEQ ID NO: 731009 - DNA, 1231 bp, Homo sapiens
  misc_feature (13)..(13): n is a, c, g, or t
tctagaggatccnccgctacgctcagccaagcacccttaggataccaggaccctgtttcccttcggcggggaagtcataggttagggagcacctcacactttcctcaggagaagacacacaaccatgaccctcagcctggggaccccaactccaggccctccagccccaaacctgcccagccagccctgaaaatgcaagtcttgtacgagtttgaagctaggaacccacgggaactgactgtggtccagggagagaagctggaggttctggaccacagcaagcgtgtggctggtgaagaatgaggcgggacggagcggctacattccaagcaacatcctggagcccctacagccggggacccctgggacccagggccagtcaccctctcgggtactacccagcctggactatccagagccctaagtcttgagttggaggtcggggtggggaggattcagtggcaagcagaggagatagtcttggtttgattcggaccgtattattgcatgcttagtgtgccaactttatcatggggccagagcagagaacaagaccagctccctgccagaccagaaagccacagagtaagagaagtgatttgatgggaacctggagaagggacccagatgttaggggctgtggttggctgtgagatgagatggactctgatccctggttccccctgattctaggttccaatgcttcgacttagctcgaggcctgaagaggtcacagactggctgcaggcagagaacttctccactgccacggtgaggacacttgggtccctgacggggagccagctacttcgcataagacctggggagctacagatgctatgtccacaggaggccccacgaatcctgtcccggctggaggctgtcagaaggatgctggggataagcccttaggcaccagcttagacacctccaagaaccaggccccgctgatgcaagatggcagatctgatacccattagagccccgagaattcctcttctggatcccagtttgcagcaaaccccacaccccagctcacacagcaaaaacaatggacaggcccagagggtgaagcaaacagtgtcccttctggctgtgttggagcctccccagtaaccacctatttattttacctctttcccaaacctggagcatttatgcctaggcttgtcaagaatctgttcagtccctctccttctcaataaaagcatcttcaagcttgtaaaaaaac

SEQ ID NO: 731010 - DNA, 1179 bp, Homo sapiens
gtggaccttcacgcttcagcaagcaccttaggataccaggaccctgtttcccttcggagaagacacacaaccatgaccctcagcctggggaccccaactccaggccctccagccccaaacctgcccagccagccctgaaaatgcaagtcttgtacgagtttgaagctaggaacccacgggaactgactgtggtccagggagagaagctggaggttctggaccacagcaagcgtgtggctggtgaagaatgaggcgggacggagcggctacattccaagcaacatcctggagcccctacagccggggacccctgggacccagggccagtcaccctctcgggtactacccagcctggactatccagagccctaagtcttgagttggaggtcggggtggggaggattcagtggcaagcagaggagatagtcttggtttgattcggaccgtattattgcatgcttagtgtgccaactttatcatggggccagagcagagaacaagaccagctccctgccagaccagaaagccacagagtaagagaagtgatttgatgggaacctggagaagggacccagatgttaggggctgtggttggctgtgagatgagatggactctgatccctggttccccctgattctaggttccaatgcttcgacttagctcgaggcctgaagaggtcacagactggctgcaggcagagaacttctccactgccacggtgaggacacttgggtccctgacggggagccagctacttcgcataagacctggggagctacagatgctatgtccacaggaggccccacgaatcctgtcccggctggaggctgtcagaaggatgctggggataagcccttaggcaccagcttagacacctccaagaaccaggccccgctgatgcaagatggcagatctgatacccattagagccccgagaattcctcttctggatcccagtttgcagcaaaccccacaccccagctcacacagcaaaaacaatggacaggcccagagggtgaagcaaacagtgtcccttctggctgtgttggagcctccccagtaaccacctatttattttacctctttcccaaacctggagcatttatgcctaggcttgtcaagaatctgttcagtccctctccttctcaataaaagcatcttcaagcttgtaaaaaaac

SEQ ID NO: 731011 - DNA, 1141 bp, Homo sapiens
  misc_feature (13)..(13): n is a, c, g, or t
tctagaggatccnccgctacgctcagccaagcacccttaggataccaggaccctgtttcccttcggccctccagccccaaacctgcccagccagccctgaaaatgcaagtcttgtacgagtttgaagctaggaacccacgggaactgactgtggtccagggagagaagctggaggttctggaccacagcaagcgtgtggctggtgaagaatgaggcgggacggagcggctacattccaagcaacatcctggagcccctacagccggggacccctgggacccagggccagtcaccctctcgggtactacccagcctggactatccagagccctaagtcttgagttggaggtcggggtggggaggattcagtggcaagcagaggagatagtcttggtttgattcggaccgtattattgcatgcttagtgtgccaactttatcatggggccagagcagagaacaagaccagctccctgccagaccagaaagccacagagtaagagaagtgatttgatgggaacctggagaagggacccagatgttaggggctgtggttggctgtgagatgagatggactctgatccctggttccccctgattctaggttccaatgcttcgacttagctcgaggcctgaagaggtcacagactggctgcaggcagagaacttctccactgccacggtgaggacacttgggtccctgacggggagccagctacttcgcataagacctggggagctacagatgctatgtccacaggaggccccacgaatcctgtcccggctggaggctgtcagaaggatgctggggataagcccttaggcaccagcttagacacctccaagaaccaggccccgctgatgcaagatggcagatctgatacccattagagccccgagaattcctcttctggatcccagtttgcagcaaaccccacaccccagctcacacagcaaaaacaatggacaggcccagagggtgaagcaaacagtgtcccttctggctgtgttggagcctccccagtaaccacctatttattttacctctttcccaaacctggagcatttatgcctaggcttgtcaagaatctgttcagtccctctccttctcaataaaagcatcttcaagcttgtaaaaaaac

SEQ ID NO: 731012 - DNA, 2531 bp, Homo sapiens
cactagcagagaagctgctgtccttccaccaccagcaccggaccacctgctccaagaccagcctcctggggggaccaggcacccggccttcactggcacccagggagccgtcctcagcagcgtcaacatgtcaaggcccagcagcagagccatttacttgcaccggaaggagtactcccagaacctcacctcagagcccaccctcctgcagcacagggtggagcacttgatgacatgcaagcaggggagtcagagagtccaggggcccgaggatgccttgcagaagctgttcgagatggatgcacagggccgggtgtggagccaagacttgatcctgcaggtcagggacggctggctgcagctgctggacattgagaccaaggaggagctggactcttaccgcctagacagcatccaggccatgaatgtggcgctcaacacatgttcctacaactccatcctgtccatcaccgtgcaggagccgggcctgccaggcactagcactctgctcttccagtgccaggaagtgggggcagagcgactgaagaccagcctgcagaaggctctggaggaagagctggagcaaagcagacctcgacttggaggccttcagccaggccaggacagatggagggggcctgctatggaaaggccgctccctatggagcaggcacgctatctggagccggggatccctccagaacagccccaccagaggaccctagagcacagcctcccaccatccccaaggcccctgccacgccacaccagtgcccgagaaccaagtgcctttactctgcctcctccaaggcggtcctcttcccccgaggacccagagagggacgaggaagtgctgaaccatgtcctaagggacattgagctgttcatgggaaagctggagaaggcccaggcaaagaccagcaggaagaagaaatttgggaaaaaaaacaaggaccagggaggtctcacccaggcacagtacattgactgcttccagaagatcaagtacagcttcaacctcctgggaaggctggccacctggctgaaggagacaagtgcccctgagctcgtacacatcctcttcaagtccctgaacttcatcctggccaggtgccctgaggctggcctagcagcccaagtgatctcacccctcctcacccctaaagctatcaacctgctacagtcctgtctaagcccacctgagagtaacctttggatggggttgggcccagcctggaccactagccgggccgactggacaggcgatgagcccctgccctaccaacccacattctcggatgactggcaacttccagagccctccagccaagcacccttaggataccaggaccctgtttcccttcggcggggaagtcataggttagggagcacctcacactttcctcaggagaagacacacaaccatgaccctcagcctggggaccccaactccaggccctccagccccaaacctgcccagccagccctgaaaatgcaagtcttgtacgagtttgaagctaggaacccacgggaactgactgtggtccagggagagaagctggaggttctggaccacagcaagcgtgtggctggtgaagaatgaggcgggacggagcggctacattccaagcaacatcctggagcccctacagccggggacccctgggacccagggccagtcaccctctcgggtactacccagcctggactatccagagccctaagtcttgagttggaggtcggggtggggaggattcagtggcaagcagaggagatagtcttggtttgattcggaccgtattattgcatgcttagtgtgccaactttatcatggggccagagcagagaacaagaccagctccctgccagaccagaaagccacagagtaagagaagtgatttgatgggaacctggagaagggacccagatgttaggggctgtggttggctgtgagatgagatggactctgatccctggttccccctgattctaggttccaatgcttcgacttagctcgaggcctgaagaggtcacagactggctgcaggcagagaacttctccactgccacggtgaggacacttgggtccctgacggggagccagctacttcgcataagacctggggagctacagatgctatgtccacaggaggccccacgaatcctgtcccggctggaggctgtcagaaggatgctggggataagcccttaggcaccagcttagacacctccaagaaccaggccccgctgatgcaagatggcagatctgatacccattagagccccgagaattcctcttctggatcccagtttgcagcaaaccccacaccccagctcacacagcaaaaacaatggacaggcccagagggtgaagcaaacagtgtcccttctggctgtgttggagcctccccagtaaccacctatttattttacctctttcccaaacctggagcatttatgcctaggcttgtcaagaatctgttcagtccctctccttctcaataaaagcatcttcaagcttgtaaaaaaac

SEQ ID NO: 731013 - DNA, 823 bp, Homo sapiens
gcagccaagggtggatggtccagggatggagctgccaaggtgggtggcctagagagggagaaggagggtaggaaagagctggagggagaaagccttgtgtggggagggaaggctggctggaaagaggctcaggggactgaggtggtgactcttggcaggttctggaccacagcaagcgtgtggctggtgaagaatgaggcgggacggagcggctacattccaagcaacatcctggagcccctacagccggggacccctgggacccagggccagtcaccctctcgggttccaatgcttcgacttagctcgaggcctgaagaggtcacagactggctgcaggcagagaacttctccactgccacggtgaggacacttgggtccctgacggggagccagctacttcgcataagacctggggagctacagatgctatgtccacaggaggccccacgaatcctgtcccggctggaggctgtcagaaggatgctggggataagcccttaggcaccagcttagacacctccaagaaccaggccccgctgatgcaagatggcagatctgatacccattagagccccgagaattcctcttctggatcccagtttgcagcaaaccccacaccccagctcacacagcaaaaacaatggacaggcccagagggtgaagcaaacagtgtcccttctggctgtgttggagcctccccagtaaccacctatttattttacctctttcccaaacctggagcatttatgcctaggcttgtcaagaatctgttcagtccctctccttctcaataaaagcatcttcaagcttgtaaaaaaac

SEQ ID NO: 731014 - DNA, 391 bp, Homo sapiens
ccctcctgcagcccctcagactcagacttggaggccctatccctggccccagtgcttcgacaccgtccctcacattggccctggaaagttgctttatctgaagcctggaacctcctacctcaagggggccgaggacacgtcttcttcctcttctgcttttctctacccagcacgcctgtggtccacctctctgagctttctcccagtcctaggactccccctctccctgcagcacttgatgacatgcaagcaggggagtcagagagtccaggggcccgaggatgccttgcagaagctgttcgagatggatgcacagggccgggtgtggagccaagacttgatcctgcaggtcagggacggctggctgcagctgctggacattgagaccaag

SEQ ID NO: 731015 - DNA, 839 bp, Homo sapiens
  misc_feature (13)..(13): n is a, c, g, or t
tctagaggatccnccgctacgctcagccaagcacccttaggataccaggaccctgtttcccttcggccctccagccccaaacctgcccagccagccctgaaaatgcaagtcttgtacgagtttgaagctaggaacccacgggaactgactgtggtccagggagagaagctggaggttctggaccacagcaagcgtgtggctggtgaagaatgaggcgggacggagcggctacattccaagcaacatcctggagcccctacagccggggacccctgggacccagggccagtcaccctctcgggttccaatgcttcgacttagctcgaggcctgaagaggtcacagactggctgcaggcagagaacttctccactgccacggtgaggacacttgggtccctgacggggagccagctacttcgcataagacctggggagctacagatgctatgtccacaggaggccccacgaatcctgtcccggctggaggctgtcagaaggatgctggggataagcccttaggcaccagcttagacacctccaagaaccaggccccgctgatgcaagatggcagatctgatacccattagagccccgagaattcctcttctggatcccagtttgcagcaaaccccacaccccagctcacacagcaaaaacaatggacaggcccagagggtgaagcaaacagtgtcccttctggctgtgttggagcctccccagtaaccacctatttattttacctctttcccaaacctggagcatttatgcctaggcttgtcaagaatctgttcagtccctctccttctcaataaaagcatcttcaagcttgtaaaaaaac

SEQ ID NO: 731016 - DNA, 369 bp, Homo sapiens
tccctcacctgccatcagcctcatctgaatctttgtctttcctcagataagcccttaggcaccagcttagacacctccaagaaccaggccccgctgatgcaagatggcagatctgatacccattagagccccgagaattcctcttctggatcccagtttgcagcaaaccccacaccccagctcacacagcaaaaacaatggacaggcccagagggtgaagcaaacagtgtcccttctggctgtgttggagcctccccagtaaccacctatttattttacctctttcccaaacctggagcatttatgcctaggcttgtcaagaatctgttcagtccctctccttctcaataaaagcatcttcaagcttgt

SEQ ID NO: 731017 - DNA, 518 bp, Homo sapiens
tgacactttgtatggcaagtggaaccactggcttggtggattttgctagatttttctgatttttaaactcctgaaaaatatcccagataactgtcatgaagctggtaactatcttcctgctggtgaccatcagcctttgtagttactctgctactgccttcctcatcaacaaagtgccccttcctgttgacaagttggcacctttacctctggacaacattcttccctttatggatccattaaagcttcttctgaaaactctgggcatttctgttgagcaccttgtggaggggctaaggaagtgtgtaaatgagctgggaccagaggcttctgaagctgtgaagaaactgctggaggcgctatcacacttggtgtgacatcaagataaagagcggaggtggatggggatggaagatgatgctcctatcctccctgcctgaaacctgttctaccaattatagatcaaatgccctaaaatgtagtgacccgtgaaaaggacaaataaagcaatgaataca

SEQ ID NO: 731018 - DNA, 567 bp, Homo sapiens
aatgggggaattgtaaggagattttataggttttaaaaggccatcctctagcagtgtgagagttacccgaagctccgcgtccgtgatggtctagggggcttccgaggtgatcgggcagtgtcggtcttcagccgctaagccgagaaggagtcagagagacttaggccagagttccgggggctctgcgagtggctgccagctactgccttcctcatcaacaaagtgccccttcctgttgacaagttggcacctttacctctggacaacattcttccctttatggatccattaaagcttcttctgaaaactctgggcatttctgttgagcaccttgtggaggggctaaggaagtgtgtaaatgagctgggaccagaggcttctgaagctgtgaagaaactgctggaggcgctatcacacttggtgtgacatcaagataaagagcggaggtggatggggatggaagatgatgctcctatcctccctgcctgaaacctgttctaccaattatagatcaaatgccctaaaatgtagtgacccgtgaaaaggacaaataaagcaatgaataca

SEQ ID NO: 731019 - DNA, 1259 bp, Homo sapiens
tataccgtgaggagtggggcggctgtgtagacacctgatctgccggtgccttggtcttggacttccagcctccagaactgtccatgtcacaaacggcgggcaagcatctgctgtacccagctggggtccctgtcggccctgaagcatgctgtcctggggctctacctgctggtcttcctgattcttgtgggcatcttcatcttagcagtgtccaggccgcgcagctcccctgacgacctgaaggccctgactcgcaatgtgaaccggctgaatgagagcttccgggacttgcagctgcggctgctgcaggctccgctgcaagcggacctgacggagcaggtgtggaaggtgcaggacgcgctgcagaaccagtcagactcgttgctggcgctggcgggcgcagtgcagcggctggagggcgcgctgtgggggctgcaggcgcaggcggtgcagaccgagcaggcggtggccctgctgcgggaccgcacgggccagcagagcgacacggcgcagctggagctctaccagctgcaggtggagagcaacagtagccagctgctgctgaggcgccacgcgggcctgctggacgggctggcgcgcagggtgggcatcctgggcgaggagctggccgacgtgggcggcgtgctgcgcggctcaaccacagcctgtcctacgacgtggcctccaccgcacgcggctgcaggacctgcgggtgctggtgagcaacgccagcgaggacacgcgccgcctgcgcctggcgcacgtaggcatggagctgcagctgaagcaggagctggccatgctcaacgcggtcaccgaggacctgcgcctcaaggactgggagcactccatcgcactgcggaacatctccctcgcgaaagggccaccgggacccaaaggtgatcagggggatgaaggaaaggaaggcaggcctggcatccctggattgcctggacttcgaggtctgcccggggagagaggtaccccaggattgcccgggcccaagggcgatgatgggaagctgggggccacaggaccaatgggcatgcgtgggttcaaaggtgaccgaggcccaaaaggagagaaaggagagaaaggagacagagctggggatgccagtggcgtggaggccccgatgatgatccgcctggtgaatggctcaggtccgcacgagggccgcgtggaagtgtaccacgaccggcgttggggcaccgtgtgtgacgacggctgggacaagaaggacggagacgtggtgtgcc

SEQ ID NO: 731020 - DNA, 1676 bp, Homo sapiens
gtagaggagctgccggtgcctcctcagaacatctcctgatcgctacccaggaccaggcaccaaggacagggagtcccaggcgcacaccccccattctgggtcccccaggcccagacccccactctgccacaggttgcatcttgacctggtcctcctgcagaagtggcccctgtggtcctgctctgagactcgtccctgggcgcccctgcagcccctttctatgactccatctggatttggctggctgtggggacgcggtccgaggggcggcctggctctcagcgtggtggcagccagctctctggccaccatggcaaatgctgagatctgaggggacaaggctctacagcctcagccaggggcactcagctgttgcagggtgtgatggagaacaaagctatgtacctacacaccgtcagcgactgtgacaccagctccatctgtgaggattcctttgatggcaggagcctgtccaagctgaacctgtgtgaggatggtccatgtcacaaacggcgggcaagcatctgctgtacccagctggggtccctgtcggccctgaagcatgctgtcctggggctctacctgctggtcttcctgattcttgtgggcatcttcatcttagcagtgtccaggccgcgcagctcccctgacgacctgaaggccctgactcgcaatgtgaaccggctgaatgagagcttccgggacttgcagctgcggctgctgcaggctccgctgcaagcggacctgacggagcaggtgtggaaggtgcaggacgcgctgcagaaccagtcagactcgttgctggcgctggcgggcgcagtgcagcggctggagggcgcgctgtgggggctgcaggcgcaggcggtgcagaccgagcaggcggtggccctgctgcgggaccgcacgggccagcagagcgacacggcgcagctggagctctaccagctgcaggtggagagcaacagtagccagctgctgctgaggcgccacgcgggcctgctggacgggctggcgcgcagggtgggcatcctgggcgaggagctggccgacgtgggcggcgtgctgcgcggctcaaccacagcctgtcctacgacgtggcctccaccgcacgcggctgcaggacctgcgggtgctggtgagcaacgccagcgaggacacgcgccgcctgcgcctggcgcacgtaggcatggagctgcagctgaagcaggagctggccatgctcaacgcggtcaccgaggacctgcgcctcaaggactgggagcactccatcgcactgcggaacatctccctcgcgaaagggccaccgggacccaaaggtgatcagggggatgaaggaaaggaaggcaggcctggcatccctggattgcctggacttcgaggtctgcccggggagagaggtaccccaggattgcccgggcccaagggcgatgatgggaagctgggggccacaggaccaatgggcatgcgtgggttcaaaggtgaccgaggcccaaaaggagagaaaggagagaaaggagacagagctggggatgccagtggcgtggaggccccgatgatgatccgcctggtgaatggctcaggtccgcacgagggccgcgtggaagtgtaccacgaccggcgttggggcaccgtgtgtgacgacggctgggacaagaaggacggagacgtggtgtgcc

SEQ ID NO: 731021 - DNA, 829 bp, Homo sapiens
tataccgtgaggagtggggcggctgtgtagacacctgatctgccggtgccttggtcttggacttccagcctccagaactgtccatgtcacaaacggcgggcaagcatctgctgtacccagctggggtccctgtcggccctgaagcatgctgtcctggggctctacctgctggtcttcctgattcttgtgggcatcttcatcttagcagtgtccaggccgcgcagctcccctgacgacctgaaggccctgactcgcaatgtgaaccggctgaatgagagcttccgggacttgcagctgcggctgctgcaggctccgctgcaagcggacctgacggagcaggtgtggaaggtgcaggacgcgctgcagaaccagtcagactcgttgctggcgctggcgggcgcagtgcagcggctggagggcgcgctgtgggggctgcaggcgcaggcggtgcagaccgagcaggcggtggccctgctgcgggaccgcacgggccagcagagcgacacggcgcagctggagctctaccagctgcaggtggagagcaacagtagccagctgctgctgaggcgccgcctgcgcctggcgcacgtaggcatggagctgcagctgaagcaggagctggccatgctcaacgcggtcaccgaggacctgcgcctcaaggactgggagcactccatcgcactgcggaacatctccctcgcgaaagccgggcccaagggcgatgatgggaagctgggggccacaggaccaatgggcatgcgtgggttcaaaggtgaccgaggcccaaaaggagagaaaggagagaaaggagacagagctggggatgcca

SEQ ID NO: 731022 - DNA, 1246 bp, Homo sapiens
gtagaggagctgccggtgcctcctcagaacatctcctgatcgctacccaggaccaggcaccaaggacagggagtcccaggcgcacaccccccattctgggtcccccaggcccagacccccactctgccacaggttgcatcttgacctggtcctcctgcagaagtggcccctgtggtcctgctctgagactcgtccctgggcgcccctgcagcccctttctatgactccatctggatttggctggctgtggggacgcggtccgaggggcggcctggctctcagcgtggtggcagccagctctctggccaccatggcaaatgctgagatctgaggggacaaggctctacagcctcagccaggggcactcagctgttgcagggtgtgatggagaacaaagctatgtacctacacaccgtcagcgactgtgacaccagctccatctgtgaggattcctttgatggcaggagcctgtccaagctgaacctgtgtgaggatggtccatgtcacaaacggcgggcaagcatctgctgtacccagctggggtccctgtcggccctgaagcatgctgtcctggggctctacctgctggtcttcctgattcttgtgggcatcttcatcttagcagtgtccaggccgcgcagctcccctgacgacctgaaggccctgactcgcaatgtgaaccggctgaatgagagcttccgggacttgcagctgcggctgctgcaggctccgctgcaagcggacctgacggagcaggtgtggaaggtgcaggacgcgctgcagaaccagtcagactcgttgctggcgctggcgggcgcagtgcagcggctggagggcgcgctgtgggggctgcaggcgcaggcggtgcagaccgagcaggcggtggccctgctgcgggaccgcacgggccagcagagcgacacggcgcagctggagctctaccagctgcaggtggagagcaacagtagccagctgctgctgaggcgccgcctgcgcctggcgcacgtaggcatggagctgcagctgaagcaggagctggccatgctcaacgcggtcaccgaggacctgcgcctcaaggactgggagcactccatcgcactgcggaacatctccctcgcgaaagccgggcccaagggcgatgatgggaagctgggggccacaggaccaatgggcatgcgtgggttcaaaggtgaccgaggcccaaaaggagagaaaggagagaaaggagacagagctggggatgcca

SEQ ID NO: 731023 - DNA, 507 bp, Homo sapiens; identical to SEQ ID NO: 339328

SEQ ID NO: 731024 - DNA, 1410 bp, Homo sapiens
  misc_feature (1407)..(1408): n is a, c, g, or t
cggaattagggagatagttggtattaggattaggattgttgtgaagtatagtacggatgctacttgtgcaatgatggtaaaagggtagcttactggttgtcctccgattcaggttagaatgaggaggtctgcggcttggagctcctggggcctaacaaaaagaaacctgccatgctgctcttcctcctctctgcactggtcctgctcacacagcccctgggctacctggaagcagaaatgaagacctactcccacagaacaatgcccagtgcttgcaccctggtcatgtgtagctcagtggagagtggcctgcctggtcgcgatggacgggatgggagagagggccctcggggcgagaagggggacccaggtttgccaggagctgcagggcaagcagggatgcctggacaagctggcccagttgggcccaaaggggacaatggctctgttggagaacctggaccaaagggagacactgggccaagtggacctccaggacctcccggtgtgcctggtccagctggaagagaaggtcccctggggaagcaggggaacataggacctcagggcaagccaggcccaaaaggagaagctgggcccaaaggagaagtaggtgccccaggcatgcagggctcggcaggggcaagaggcctcgcaggccctaagggagagcgaggtgtccctggtgagcgtggagtccctggaaacacaggggcagcagggtctgctggagccatgggtccccagggaagtccaggtgccaggggacccccgggattgaagggggacaaaggcattcctggagacaaaggagcaaagggagaaagtgggcttccagatgttgcttctctgaggcagcaggttgaggccttacagggacaagtacagcacctccaggctgctttctctcagtataagaaagttgagctcttcccaaatggccaaagtgtcggggagaagattttcaagacagcaggctttgtaaaaccatttacggaggcacagctgctgtgcacacaggctggtggacagttggcctctccacgctctgccgctgagaatgccgccttgcaacagctggtcgtagctaagaacgaggctgctttcctgagcatgactgattccaagacagagggcaagttcacctaccccacaggagagtccctggtctattccaactgggccccaggggagcccaacgatgatggcgggtcagaggactgtgtggagatcttcaccaatggcaagtggaatgacagggcttgtggagaaaagcgtcttgtggtctgcgagttctgagccaactggggtgggtggggcagtgcttggcccaggagtttggccagaagtcaaggcttagaccctcatgctgccaatatcctaataaaaaggtgaccatcaaaaaannaa

SEQ ID NO: 731025 - DNA, 1284 bp, Homo sapiens
  misc_feature (1281)..(1282): n is a, c, g, or t
acagacatgtttctcagcacctccaaacatgggcggcaagaggccatgctgctcttcctcctctctgcactggtcctgctcacacagcccctgggctacctggaagcagaaatgaagacctactcccacagaacaatgcccagtgcttgcaccctggtcatgtgtagctcagtggagagtggcctgcctggtcgcgatggacgggatgggagagagggccctcggggcgagaagggggacccaggtttgccaggagctgcagggcaagcagggatgcctggacaagctggcccagttgggcccaaaggggacaatggctctgttggagaacctggaccaaagggagacactgggccaagtggacctccaggacctcccggtgtgcctggtccagctggaagagaaggtcccctggggaagcaggggaacataggacctcagggcaagccaggcccaaaaggagaagctgggcccaaaggagaagtaggtgccccaggcatgcagggctcggcaggggcaagaggcctcgcaggccctaagggagagcgaggtgtccctggtgagcgtggagtccctggaaacacaggggcagcagggtctgctggagccatgggtccccagggaagtccaggtgccaggggacccccgggattgaagggggacaaaggcattcctggagacaaaggagcaaagggagaaagtgggcttccagatgttgcttctctgaggcagcaggttgaggccttacagggacaagtacagcacctccaggctgctttctctcagtataagaaagttgagctcttcccaaatggccaaagtgtcggggagaagattttcaagacagcaggctttgtaaaaccatttacggaggcacagctgctgtgcacacaggctggtggacagttggcctctccacgctctgccgctgagaatgccgccttgcaacagctggtcgtagctaagaacgaggctgctttcctgagcatgactgattccaagacagagggcaagttcacctaccccacaggagagtccctggtctattccaactgggccccaggggagcccaacgatgatggcgggtcagaggactgtgtggagatcttcaccaatggcaagtggaatgacagggcttgtggagaaaagcgtcttgtggtctgcgagttctgagccaactggggtgggtggggcagtgcttggcccaggagtttggccagaagtcaaggcttagaccctcatgctgccaatatcctaataaaaaggtgaccatcaaaaaannaa

SEQ ID NO: 731026 - DNA, 534 bp, Homo sapiens
  misc_feature (470)..(470): n is a, c, g, or t
  misc_feature (506)..(506): n is a, c, g, or t
  misc_feature (514)..(514): n is a, c, g, or t
aattcgcggccgcgtcgacacggctgcgagaagagacagaaggggacacactcgcttctggaacgtctgaggttatcaataagctcctagtccagacgccatgggtcatttcacagaggaggacaaggctactatcacaagcctgtggggcaaggtgaatgtggaagatgctggaggagaaaccctgggaaggctcctggttgtctacccatggacccagaggttctttgacagctttggcaacctgtcctctgcctctgccatcatgggcaaccccaagtcaaggcacatggcaagagggtgctgacttccttgggagatgccataaagcacctggatgatctcaagggcacctttgcccagctgagtgaactgcactgtgacaagctgcatgtggatcctgagacctcaagctcctggaaatgtgctggtgaccgtttggcaatccatttcggcaaagattcaccctnaggttcaggcttcctgcagagatggttactggagtngccagtgncctgtcctccagataccact

SEQ ID NO: 731027 - DNA, 374 bp, Homo sapiens; identical to SEQ ID NO: 506197
  misc_feature (186)..(186): n is a, c, g, or t
  misc_feature (198)..(198): n is a, c, g, or t
  misc_feature (206)..(206): n is a, c, g, or t
  misc_feature (212)..(213): n is a, c, g, or t
  misc_feature (217)..(217): n is a, c, g, or t

SEQ ID NO: 731028 - DNA, 2341 bp, Homo sapiens; identical to SEQ ID NO: 84780

SEQ ID NO: 731029 - DNA, 1989 bp, Homo sapiens
attcgggcctaggctcatctccacagaggagaacacgcagggagcagagaccatggggcccctctcagcccctccctgcacacagcatataacctggaaagggctcctgctcacagcatcacttttaaacttctggaacccgcccaccacagcccaagtcacgattgaagcccagccaccaaaagtttctgaggggaaggatgttcttctacttgtccacaatttgccccagaatcttactggctacatctggtacaaaggacaaatcagggacctctaccattatgttacatcatatgtagtagacggtcaaataattaaatatgggcctgcatacagtggacgagaaacagtatattccaatgcatccctgctgatccagaatgtcacccaggaagacacaggatcctacactttacacatcataaagcgaggtgatgggactggaggagtaactggacgtttcaccttcaccttatacctggagactcccaaaccctccatctccagcagcaatttcaaccccagggaggccacggaggctgtgatcttaacctgtgatcctgagactccagatgcaagctacctgtggtggatgaatggtcagagcctccctatgactcacagcttgcagctgtctgaaaccaacaggaccctctacctatttggtgtcacaaactatactgcaggaccctatgaatgtgaaatacggaacccagtgagtgccagccgcagtgacccagtcaccctgaatctcctcccgaagctgcccaagccctacatcaccatcaataacttaaaccccagggagaataaggatgtctcaaccttcacctgtgaacctaagagtgagaactacacctacatttggtggctaaatggtcagagcctcccggtcagtcccagggtaaagcgacgcattgaaaacaggatcctcattctacccagtgtcacgagaaatgaaacaggaccctatcaatgtgaaatacgggaccgatatggtggcatccgcagtgacccagtcaccctgaatgtcctctatggtccagacctccccagaatttacccttcattcacctattaccattcaggacaaaacctctacttgtcctgctttgcggactctaacccaccggcacagtattcttggacaattaatgggaagtttcagctatcaggacaaaagctttctatcccccagattactacaaagcatagcgggctctatgcttgctctgttcgtaactcagccactggcaaggaaagctccaaatccgtgacagtcagagtctctgactggacattaccctgaattctactagttcctccaattccatcttctcccatggaacctcaaagagcaagacccactctgttccagaagccctataagtcagagttggacaactcaatgtaaatttcatgggaaaatccttgtacctgatgtctgagccactcagaactcaccaaaatgttcaacaccataacaacagctgctcaaactgtaaacaaggaaaacaagttgatgacttcacactgtggacagtttttcccaagatgtcagaataagactccccatcatgatgaggctctcacccctcttagctgtccttgcttgtgcctgcctctttcacttggcaggataatgcagtcattagaatttcacatgtagtataggagcttctgagggtaacaacagagtgtcagatatgtcatctcaacctcagacttttacataacatctcaggaggaaatgtggctctctccatcttgcatacagggctcccaatagaaatgaacacagagatattgcctgtgtgtttgcagagaagatggtttctataaagagtaggaaagctgaaattatagtagagtcccctttaaatgcacattgtgtggatggctctcaccatttcctaagagatacattgtaaaacgtgacagtaagactgattctagcagaataaaacatgtactacatttgctaaa

SEQ ID NO: 731030 - DNA, 811 bp, Homo sapiens
  misc_feature (775)..(775): n is a, c, g, or t
  misc_feature (796)..(796): n is a, c, g, or t
  misc_feature (799)..(799): n is a, c, g, or t
acatgcagagaaacaggtgaggagaagcagcgagagagaaggggccaggtataaaaagggcccacaagagaccagctcaaggatcccaaggcccaactccccgaaccactcagggtcctgtggacagctcacctagcggcaatggctgcaggctcccggacgtccctgctcctggcttttggcctgctctgcctgtcctggcttcaagagggcagtgccttcccaaccattcccttatccaggctttttgacaacgctatgctccgcgcccgtcgcctgtaccagctggcatatgacacctatcaggagtttgaagaagcctatatcctgaaggagcagaagtattcattcctgcagaacccccagacctccctctgcttctcagagtctattccaacaccttccaacagggtgaaaacgcagcagaaatctaacctagagctgctccgcatctccctgctgctcatccagtcatggctggagcccgtgcagctcctcaggagcgtcttcgccaacagcctggtgtatggcgcctcggacagcaacgtctatcgccacctgaaggacctagaggaaggcatccaaacgctgatgtgggtgagggtggcaccaagggatccccaatcctggggccccactggcttccagggactggggagagaaacactgctgccctctttttagcaatcaggcgctgacccaagagaactcaccgtattcttcatttccctcgtgaatcctccaagcctttctctacaacctggaaggggaaggnaggaaaatgggttgaattganaanaagggaagggaa

SEQ ID NO: 731031 - DNA, 879 bp, Homo sapiens
gcagggagagagaactggccagggtataaaaagggcccacaagagaccggctcgaggatcccaaggcccaactccccgaaccactcagggtcctgtggacagctcacctagtggcaatggctccaggctcccggacgtccctgctcctggcttttgccctgctctgcctgccctggcttcaagaggctggtgccgtccaaaccgttccgttatccaggctttttgaccacgctatgctccaagcccatcgcgcgcaccagctggccattgacacctaccaggagtttgaagaaacctatatcccaaaggaccagaagtattcattcctgcatgactcccagacctccttctgcttctcagactctattccgacaccctccaacatggaggaaacgcaacagaaatccaatctagagctgctccgcatctccctgctgctcatcgagtcgtggctggagcccgtgcggttcctcaggagtatgttcgccaacaacctggtgtatgacacctcggacagcgatgactatcacctcctaaaggacctagaggaaggcatccaaacgctgatggggaggctggaagacggcagccgccggactgggcagatcctcaagcagacctacagcaagtttgacacaaactcgcacaaccatgacgcactgctcaagaactacgggctgctctactgcttcaggaaggacatggacaaggtcgagacattcctgcgcatggtgcagtgccgctctgtggagggcagctgtggcttctaggtgcccgagtagcatcctgtgacccctccccagtgcctctcctggccctgaaggtgccactccagtgcccaccagccttgtcctaataaaattaagttgtatcatttca

SEQ ID NO: 731032 - DNA, 1132 bp, Homo sapiens
gcagggagagagaactggccagggtataaaaagggcccacaagagaccggctcgaggatcccaaggcccaactccccgaaccactcagggtcctgtggacagctcacctagtggcaatggctccaggctcccggacgtccctgctcctggcttttgccctgctctgcctgccctggcttcaagaggctggtgccgtccaaaccgttccgttatccaggctttttgaccacgctatgctccaagcccatcgcgcgcaccagctggccattgacacctaccaggagtttgaagaaacctatatcccaaaggaccagaagtattcattcctgcatgactcccagacctccttctgcttctcagactctattccgacaccctccaacatggaggaaacgcaacagaaatccaatctagagctgctccgcatctccctgctgctcatcgagtcgtggctggagcccgtgcggttcctcaggagtatgttcgccaacaacctggtgtatgacacctcggacagcgatgactatcacctcctaaaggacctagaggaaggcatccaaacgctgatgggggtgagggtggcgccaggggtcaccaatcctggaaccccactggcttcgagggctgggggagagaaatactgctgccctctttttagcagtaaggcgctgacccaagagaactcaccttattcttcatttcgcctggtgaatcctccaggcctttctctacaccctgaaggggagggaggaaaatggataaatgagagagggagggaacagtgcccaagcgcttggcctctccttctcttccttcactttgcagaggctggaagacggcagccgccggactgggcagatcctcaagcagacctacagcaagtttgacacaaactcgcacaaccatgacgcactgctcaagaactacgggctgctctactgcttcaggaaggacatggacaaggtcgagacattcctgcgcatggtgcagtgccgctctgtggagggcagctgtggcttctaggtgcccgagtagcatcctgtgacccctccccagtgcctctcctggccctgaaggtgccactccagtgcccaccagccttgtcctaataaaattaagttgtatcatttca

SEQ ID NO: 731033 - DNA, 1024 bp, Homo sapiens
gcagggagagagaactggccagggtataaaaagggcccacaagagaccggctcgaggatcccaaggcccaactccccgaaccactcagggtcctgtggacagctcacctagtggcaatggctccaggctcccggacgtccctgctcctggcttttgccctgctctgcctgccctggcttcaagaggctggtgccgtccaaaccgttccgttatccaggctttttgaccacgctatgctccaagcccatcgcgcgcaccagctggccattgacacctaccaggagtttgaagaaacctatatcccaaaggaccagaagtattcattcctgcatgactcccagacctccttctgcttctcagactctattccgacaccctccaacatggaggaaacgcaacagaaatccaatctagagctgctccgcatctccctgctgctcatcgagtcgtggctggagcccgtgcggttcctcaggagtatgttcgccaacaacctggtgtatgacacctcggacagcgatgactatcacctcctaaaggacctagaggaaggcatccaaacgctgatggggaggctggaagacggcagccgccggactgggcagatcctcaagcagacctacagcaagtttgacacaaactcgcacaaccatgacgcactgctcaagaactacgggctgctctactgcttcaggaaggacatggacaaggtcgagacattcctgcgcatggtgcagtgccgctctgtggagggcagctgtggcttctaggtgcccgagtagcatcctgtgacccctccccagtgcctctcctggccctgaaggtgccactccagtgcccaccactgcctcgtcgaggcagtggtgggagcccgtgcggttcctcaggagtatgttcgccaacaacctggtgtatgacacctcggacagcgatgactatcacctcctaaaggacctagaggaaggcatccaaacgctgatggggaggctggaagacggcagccgccggactgggcagatcctca

SEQ ID NO: 731034 - DNA, 708 bp, Homo sapiens
cttcaagaggctggtgccgtccaaaccgttccgttatccaggctttttgaccacgctatgctccaagcccatcgcgcgcaccagctggccattgacacctaccaggagtttatcgatgccacctggaggaaacgcaacagaaatccaatctagagctgctccgcatctccctgctgctcatcgagtcgtggctggagcccgtgcggttcctcaggagtatgttcgccaacaacctggtgtatgacacctcggacagcgatgactatcacctcctaaaggacctagaggaaggcatccaaacgctgatggggaggctggaagacggcagccgccggactgggcagatcctcaagcagacctacagcaagtttgacacaaactcgcacaaccatgacgcactgctcaagaactacgggctgctctactgcttcaggaaggacatggacaaggtcgagacattcctgcgcatggtgcagtgccgctctgtggagggcagctgtggcttctaggtgcccgagtagcatcctgtgacccctccccagtgcctctcctggcccgtgcggttcctcaggagtatgttcgccaacaacctggtgtatgacacctcggacagcgatgactatcacctcctaaaggacctagaggaaggcatccaaacgctgatggggaggctggaagacggcagccgccggactgggcagatcctca

SEQ ID NO: 731035 - DNA, 763 bp, Homo sapiens
cttcaagaggctggtgccgtccaaaccgttccgttatccaggctttttgaccacgctatgctccaagcccatcgcgcgcaccagctggccattgacacctaccaggagtttatcgatgccacctggaggaaacgcaacagaaatccaatctagagctgctccgcatctccctgctgctcatcgagtcgtggctggagcccgtgcggttcctcaggagtatgttcgccaacaacctggtgtatgacacctcggacagcgatgactatcacctcctaaaggacctagaggaaggcatccaaacgctgatggggaggctggaagacggcagccgccggactgggcagatcctcaagcagacctacagcaagtttgacacaaactcgcacaaccatgacgcactgctcaagaactacgggctgctctactgcttcaggaaggacatggacaaggtcgagacattcctgcgcatggtgcagtgccgctctgtggagggcagctgtggcttctaggtgcccgagtagcatcctgtgacccctccccagtgcctctcctggccctgaaggtgccactccagtgcccaccactgcctcgtcgaggcagtggtgggagcccgtgcggttcctcaggagtatgttcgccaacaacctggtgtatgacacctcggacagcgatgactatcacctcctaaaggacctagaggaaggcatccaaacgctgatggggaggctggaagacggcagccgccggactgggcagatcctca

SEQ ID NO: 731036 - DNA, 969 bp, Homo sapiens
gcagggagagagaactggccagggtataaaaagggcccacaagagaccggctcgaggatcccaaggcccaactccccgaaccactcagggtcctgtggacagctcacctagtggcaatggctccaggctcccggacgtccctgctcctggcttttgccctgctctgcctgccctggcttcaagaggctggtgccgtccaaaccgttccgttatccaggctttttgaccacgctatgctccaagcccatcgcgcgcaccagctggccattgacacctaccaggagtttgaagaaacctatatcccaaaggaccagaagtattcattcctgcatgactcccagacctccttctgcttctcagactctattccgacaccctccaacatggaggaaacgcaacagaaatccaatctagagctgctccgcatctccctgctgctcatcgagtcgtggctggagcccgtgcggttcctcaggagtatgttcgccaacaacctggtgtatgacacctcggacagcgatgactatcacctcctaaaggacctagaggaaggcatccaaacgctgatggggaggctggaagacggcagccgccggactgggcagatcctcaagcagacctacagcaagtttgacacaaactcgcacaaccatgacgcactgctcaagaactacgggctgctctactgcttcaggaaggacatggacaaggtcgagacattcctgcgcatggtgcagtgccgctctgtggagggcagctgtggcttctaggtgcccgagtagcatcctgtgacccctccccagtgcctctcctggcccgtgcggttcctcaggagtatgttcgccaacaacctggtgtatgacacctcggacagcgatgactatcacctcctaaaggacctagaggaaggcatccaaacgctgatggggaggctggaagacggcagccgccggactgggcagatcctca

SEQ ID NO: 731037 - DNA, 1222 bp, Homo sapiens
gcagggagagagaactggccagggtataaaaagggcccacaagagaccggctcgaggatcccaaggcccaactccccgaaccactcagggtcctgtggacagctcacctagtggcaatggctccaggctcccggacgtccctgctcctggcttttgccctgctctgcctgccctggcttcaagaggctggtgccgtccaaaccgttccgttatccaggctttttgaccacgctatgctccaagcccatcgcgcgcaccagctggccattgacacctaccaggagtttgaagaaacctatatcccaaaggaccagaagtattcattcctgcatgactcccagacctccttctgcttctcagactctattccgacaccctccaacatggaggaaacgcaacagaaatccaatctagagctgctccgcatctccctgctgctcatcgagtcgtggctggagcccgtgcggttcctcaggagtatgttcgccaacaacctggtgtatgacacctcggacagcgatgactatcacctcctaaaggacctagaggaaggcatccaaacgctgatgggggtgagggtggcgccaggggtcaccaatcctggaaccccactggcttcgagggctgggggagagaaatactgctgccctctttttagcagtaaggcgctgacccaagagaactcaccttattcttcatttcgcctggtgaatcctccaggcctttctctacaccctgaaggggagggaggaaaatggataaatgagagagggagggaacagtgcccaagcgcttggcctctccttctcttccttcactttgcagaggctggaagacggcagccgccggactgggcagatcctcaagcagacctacagcaagtttgacacaaactcgcacaaccatgacgcactgctcaagaactacgggctgctctactgcttcaggaaggacatggacaaggtcgagacattcctgcgcatggtgcagtgccgctctgtggagggcagctgtggcttctaggtgcccgagtagcatcctgtgacccctccccagtgcctctcctggcccgtgcggttcctcaggagtatgttcgccaacaacctggtgtatgacacctcggacagcgatgactatcacctcctaaaggacctagaggaaggcatccaaacgctgatggggaggctggaagacggcagccgccggactgggcagatcctca

SEQ ID NO: 731038 - DNA, 903 bp, Homo sapiens
gaagaaacctatatcccaaaggaccagaagtattcattcctgcatgactcccagacctccttctgcttctcagactctattccgacaccctccaacatggaggaaacgcaacagaaatccgtgagtggatgccgtctcccctaggcggggatgggggagacctgtggtcagggctcccgggcagcacagccactgccggtccttcccctgcagaatctagagctgctccgcatctccctgctgctcatcgagtcgtggctggagcccgtgcggttcctcaggagtatgttcgccaacaacctggtgtatgacacctcggacagcgatgactatcacctcctaaaggacctagaggaaggcatccaaacgctgatgggggtgagggtggcgccaggggtcaccaatcctggaaccccactggcttcgagggctgggggagagaaatactgctgccctctttttagcagtaaggcgctgacccaagagaactcaccttattcttcatttcgcctggtgaatcctccaggcctttctctacaccctgaaggggagggaggaaaatggataaatgagagagggagggaacagtgcccaagcgcttggcctctccttctcttccttcactttgcagaggctggaagacggcagccgccggactgggcagatcctcaagcagacctacagcaagtttgacacaaactcgcacaaccatgacgcactgctcaagaactacgggctgctctactgcttcaggaaggacatggacaaggtcgagacattcctgcgcatggtgcagtgccgctctgtggagggcagctgtggcttctaggtgcccgagtagcatcctgtgacccctccccagtgcctctcctggccctgaaggtgccactccagtgcccacca

SEQ ID NO: 731039 - DNA, 767 bp, Homo sapiens
aggctgccttctagtaccaaatgttataatcagataattgacctggtgtttgtggtgatctgatattatcaggaaaagcattactctgcctttttaaactcttaaattgatacaactgctggaagaagggaggacagatccaagagatctaatttgtatataatgggagttccagagtgaaatacaagagaaaagccagatttaatagaagtaaatttcctgagctgaataaagccttatatttgcaggttgaaagtgttcactaaattctaggcaggattgatgagaaaaggcatacacctaaacatactctgacagaattcctgaatctcaaagttaaagagaaaaatatataagattccagacagaaagaagttatttgcaatgggaaaagaattggactggtatcagacagtggaatcatatctatacctgttaagagaaaaggaaagtaaccaagaagtctctttccagccaagcatcattcacctgccagagtgaaagggatgcagaaaggattccaagaatctatcatctgcatatccccatctgaagaaactgaaaagaggactgtaactaaataacaaattaatgagaatagagacttcaagaaatgagaaggtaaagtagaaagggaagatgatgagtgaacaataagccttgtaatatacatgggtatgtatcttaatgtacttggatgatgatgaaatgactgaaaatgtgtactatatgtgttaaataaagactcttaagataaaaaaaactca

SEQ ID NO: 731040 - DNA, 4742 bp, Homo sapiens; identical to SEQ ID NO: 714894

SEQ ID NO: 731041 - DNA, 550 bp, Homo sapiens
taatgacacttcatcctagagcagggcagtgagccgtgaagttcctagtgggaccgtcatcaccattatcatttgatcctgtcggctgggggcggctggtctccttccaaagcagctgcacccgagagtctctgactccacctgaaagaatgacgctggcttaataggactctccattgctaccaaactcctcctgcacggtcttgggtgcacccaccagagggtactactattatggaaaaattttgcctccaatcattagggtgtcttgatggcgttaactgatctttccataaaaatagattcagtcatacacacatacacacactaacacacataagttacaccagtcctctgtcaaaaaagcttaggtgacttttcttgatgcaaagctctgattcccacaggaatataaaaacaaagaaagagggaaacatccctcgagaaaaaaaatagtattgcttagaaaagaaaccattttctcatttggaaatccataccatgtgtgaaaatcctatccaacggacagcaaacccaaatgttgtctaca

SEQ ID NO: 731042 - DNA, 406 bp, Homo sapiens; identical to SEQ ID NO: 87051

SEQ ID NO: 731043 - DNA, 477 bp, Homo sapiens
gaaaagcccagcggagccgggttgggcaggagctggcggcggctgtgcgctgggccttctgccttggatcctccgcggtcggcaccgcttccctgctcagattcgaacccagattcggctcccaaggctcccacggctccagggtgcccagtcttgcagccagctcgccgcccgagccccggatggaggaagcgctcactggccgctacctctgctgtttctggcaccagagattgagactgtgaacctgaactcccttgatctcctcccgttgggcccaggagggagccgaatccaggcccaaccgggctcactgagaaggtgcaggaagcccccaacgactcctactcgtgtgcggcccatactgggccaggacgctgcagtggccgagccgctgggtgtctgcaacggggagctcccccgccgctgggggcaataaacggaatcggtttcacacgctttccctcttgatctaag

SEQ ID NO: 731044 - DNA, 526 bp, Homo sapiens; identical to SEQ ID NO: 232183

SEQ ID NO: 731045 - DNA, 527 bp, Homo sapiens; identical to SEQ ID NO: 232184
  misc_feature (11)..(11): n is a, c, g, or t
  misc_feature (152)..(152): n is a, c, g, or t
  misc_feature (296)..(296): n is a, c, g, or t
  misc_feature (354)..(354): n is a, c, g, or t
  misc_feature (358)..(358): n is a, c, g, or t
  misc_feature (366)..(366): n is a, c, g, or t
  misc_feature (381)..(381): n is a, c, g, or t
  misc_feature (387)..(387): n is a, c, g, or t
  misc_feature (396)..(396): n is a, c, g, or t
  misc_feature (406)..(406): n is a, c, g, or t

SEQ ID NO: 731046 - DNA, 647 bp, Homo sapiens
gaaaagcccagcggagccgggttgggcaggagctggcggcggctgtgcgctgggccttctgccttggatcctccgcggtcggcaccgcttccctgctcagattcgaacccagattcggctcccaaggctcccacggctccagggtgcccagtcttgcagccagctcgccgcccgagccccggatggaggaagcgctcactggccgctacctctgctgtttctggcaccagagattgagactgtgaacctgaactcccttgatctcctcccgttgggcccaggagggagccgaatccaggcccaaccgggctcactgagaagaacctttaaaaatccgccaacgaatgctgttgcctggatgcactgcctatgaccttcagccgtgtgttcacgcgcgcccgcagccgtggagtggcggtccctcctgccgcccgcaaccccggggccgccggtctgcgcacaccgggagcaacttcgttacccacagcgcccgcgtcctgcggctcgcgcggaactgcgcgcgggaaggtggcagagcgacgctccagaacgctgcttgcgtagacgctgccgctgccttcagatcccaattcggccgcgcgcgggcggggccctggcagcaacgaaaatggcgagcctcgtagcct

SEQ ID NO: 731047 - DNA, 852 bp, Homo sapiens; identical to SEQ ID NO: 232186

SEQ ID NO: 731048 - DNA, 320 bp, Homo sapiens
atcaacttggaaacattccatttgtagtatcatcaaatatatattttgtaggacaatttatatatgatgtgatttgacctaccatattaaagcagacacagattacgtatcatgctttcaaccaaaattacagacttcctttgaaacatgctgcagatttgatagaggtatattatgtcttaggaaaatacaatgaagaaggtccaaatccctattgaggctggatgtctgatctgcactagacttaagaggatatatcatttcatctgcatgtaacacatagggctgaatgtgatgtcaaaagggtttcccgttaataa

SEQ ID NO: 731049 - DNA, 278 bp, Homo sapiens
ttgttaggtaaggctcatcaattgatttgttaaatcacatactaataggtggataattgtgaaaaattgaggaataacaatatacaattcaatgcttttttctttggcttttatgtcaaagccctgttgcatattttctaagtccagatggctcctaaactgaaagttactgtgagatttagctgccgtttgcattttctaaaaacatgaacattcatttatagtcaagtattggggattttaaacccttacaagatgaggctaaaagttatataaca

SEQ ID NO: 731050 - DNA, 489 bp, Homo sapiens
gaatcacctcctgggttcaagcgattctcctgcctcagcatcctgagtacaggcactacaggcacgtgagcaagagaagctgacagattcaaatgttcacaaacatttatgttctattttgatagatacataaactatgtttctcattcttatatactttatattagggcatgggattaaagtcaaaatagtggaaaattagtagaaataacatattttatatccaattaagtctccaaaatcccaacatgcactcttctgtatacgtttttcagtatgcttgactggaacggccaattctaagtagtcttggaagcaacatactgcagattaaataccttagtagcctatgttcttgaatgcggacataaaggagcaatgcttttcctatcttaaaaacagtttatatgaatgaaacttctgttctgtttaagatattatatgttgttgagtgtagttgtcaaagcaactagcacgattccaagtaat

SEQ ID NO: 731051 - DNA, 1533 bp, Homo sapiens; identical to SEQ ID NO: 94266

SEQ ID NO: 731052 - DNA, 206 bp, Homo sapiens; identical to SEQ ID NO: 94267

SEQ ID NO: 731053 - DNA, 849 bp, Homo sapiens
  misc_feature (711)..(712): n is a, c, g, or t
  misc_feature (718)..(718): n is a, c, g, or t
  misc_feature (720)..(720): n is a, c, g, or t
tgccccatgctgactccttgcttctttccagccggagccgctgccttgccccccggagactgaagacatggcacccaagagggccaagagaaggacagtagagggcggaagctccagcgtcttctccatgttcgaccagactcagatccaggagttcaaagaggccttcactgtgatcgaccagaaccgtgatggtattatagacaaggaggaccttcgggacaccttcgcagccatgggccgcctcaatgtgaagaatgaggagttggatgccatgatgaaggaagccagcggtcccatcaacttcaccgtcttcctgaccatgttcggggagaagctcaagggtgccgaccctgaggatgtgatcaccggagccttcaaggtcttggaccctgagggaaagggcaccatcaagaagaagttcctggaggagctgctgaccacgcagtgtgaccgcttctcccaggaggagatcaagaacatgtgggcggccttcccccccgacgtgggcggcaacgtcgactacaaaaacatctgctacgtcatcacgcacggcgacgccaaggaccaggagtaggggcacccgcgggcctccgctgcccgacgcttctgttcggcccgacctccaccccggctcccaataaaatttaactgatctttgtttcttaaaaaaaaaacaacacaacaaaaatctttggggggccgcccccnnaaaacntnaaacactcttggccgcgcccccaatatataattgccttcttcccaaaaccgccccactggctgtccccaaacaccgggccgggtggaacccaggtcggccggtcacggcgtacccccgcgcggaaacta

SEQ ID NO: 731054 - DNA, 669 bp, Homo sapiens
tgccccatgctgactccttgcttctttccagccggagccgctgccttgccccccggagactgaagacatggcacccaagagggccaagagaaggacagtagagggcggaagctccagcgtcttctccatgttcgaccagactcagatccaggagttcaaagaggccttcactgtgatcgaccagaaccgtgatggtattatagacaaggaggaccttcgggacaccttcgcagccatgggccgcctcaatgtgaagaatgaggagttggatgccatgatgaaggaagccagcggtcccatcaacttcaccgtcttcctgaccatgttcggggagaagctcaagggtgccgaccctgaggatgtgatcaccggagccttcaaggtcttggaccctgagggaaagggcaccatcaagaagaagttcctggaggagctgctgaccacgcagtgtgaccgcttctcccaggaggagatcaagaacatgtgggcggccttcccccccgacgtgggcggcaacgtcgactacaaaaacatctgctacgtcatcacgcacggcgacgccaaggaccaggagtaggggcacccgcgggcctccgctgcccgacgcttctgttcggcccgacctccaccccggctcccaataaaatttaactgatctttgtttcttaa

SEQ ID NO: 731055 - DNA, 296 bp, Homo sapiens
aaaggaaccaggaacccaatcgcaactccccttgtgtcacctctctccagcctggaggagctgctgaccacgcagtgtgaccgcttctcccaggaggagatcaagaacatgtgggcggccttcccccccgacgtgggcggcaacgtcgactacaaaaacatctgctacgtcatcacgcacggcgacgccaaggaccaggagtaggggcacccgcgggcctccgctgcccgacgcttctgttcggcccgacctccaccccggctcccaataaaatttaactgatctttgtttcttaa

SEQ ID NO: 731056 - DNA, 630 bp, Homo sapiens; identical to SEQ ID NO: 704226
  misc_feature (561)..(561): n is a, c, g, or t
  misc_feature (571)..(571): n is a, c, g, or t

SEQ ID NO: 731057 - DNA, 837 bp, Homo sapiens
  misc_feature (699)..(700): n is a, c, g, or t
  misc_feature (706)..(706): n is a, c, g, or t
  misc_feature (708)..(708): n is a, c, g, or t
agatcccttagacctcagggcagcctcaccctttgaaagaaagtagctggtttccagtccaacaaaaagttaaaaggatgctcatctctttctcggcatcactgatggaaaacagactgtgtgatggcctaaaggatccaatcaatgtgaagaatgaggagttggatgccatgatgaaggaagccagcggtcccatcaacttcaccgtcttcctgaccatgttcggggagaagctcaagggtgagtggagtgtcctgggtccaaggccccggctgccttttcccagacccttcagggacccatcagcttcatgtgccctctgacccccacaggtgccgaccctgaggatgtgatcaccggagccttcaaggtcttggaccctgagggaaagggcaccatcaagaagaagttcctggaggagctgctgaccacgcagtgtgaccgcttctcccaggaggagatcaagaacatgtgggcggccttcccccccgacgtgggcggcaacgtcgactacaaaaacatctgctacgtcatcacgcacggcgacgccaaggaccaggagtaggggcacccgcgggcctccgctgcccgacgcttctgttcggcccgacctccaccccggctcccaataaaatttaactgatctttgtttcttaaaaaaaaaacaacacaacaaaaatctttggggggccgcccccnnaaaacntnaaacactcttggccgcgcccccaatatataattgccttcttcccaaaaccgccccactggctgtccccaaacaccgggccgggtggaacccaggtcggccggtcacggcgtacccccgcgcggaaacta
